United States Patent Application Publication US 2006/0134663 A1 - sequence listing, part 110

SEQ ID NO: 341911 - DNA, 1000 bp, Homo Sapiens
tttttttttttttttaaaaagtgcatattctttaatccaggaattactcaagaaatttatacattttttaaaaagatcaccaaatgcatcccacatagttcctttacaataaacaaaagataaacaacctagcgtcctgtcctatatgcgctctaccagatgactcaattatattccatccatccatggaatcctagacaatcataaaaggacatttatgttaacatggaaagtgaagatacgctttgaagaataggctacaagagagaatacattacacaatcctactgctgtataaaacaaaacatctggaagaatctatgcttaaatattaatagtgtgtcccgcaaagtggtaggataatagtgacttttattctttttacttatctctattttctcatgtttctgtaatgaacatgtttcataaaacaaaatgggtctgttataaaaatctgaaaacttgcttttgaaagagagcagtattacaggctgtagtgtcaaataaaatattaatgttaaatatcacacgctcccgtgaaaataaccaacattcttaattaacctttcagttctgtgaatctaatactagatcacaccttgctatttctgaaaatgttagtcctgataaaaattaaaaaccataaaagaggtaacaaattggctgaagaaagtaaaaattggcactttagctttgagatcttaaatctacttaaataacactaagcaatactttgtccaaatgtaaaccattatactagctgacattaagaattatgtggccatcagaaggcactttcttcaataaaagatgaatattaatcagacacaactttatatgtaatcttcaactaaaaaaaatttgagctcacttttcatgttatatagcttcaagataaagacttcttagaaacaaaagttcattctcactttgttcaaataggcttacgtatcaggtaatcactggaaagcaaaacttacattaacatacactatgtcaa

SEQ ID NO: 341912 - DNA, 1000 bp, Homo Sapiens; identical to SEQ ID NO: 160063

SEQ ID NO: 341913 - DNA, 1000 bp, Homo Sapiens
caaaaccggagggaacatcagtcacttctgtttataagctgggcacacatttgggaagccagtgaaatggagagaatgcttgttcattgacattgactttcttgtccacgtggggatgccacctccacctggacgtccagcagagagggatgtggcggaaatgtagcgagacttggactggagtcgggtgtccggccagcaggggatgtccgcgctgggcctcccttgcgcctgcttagccggaggggatggtgcttgcggggtggagctgggagggaggagggcctgtttggcctctttcagctcagcctgagccaagctggtccccagactcttgggccccagtgaccctccttaccttgtccttagatgcttaacatttttgtttggttttcttataaaaataacagatcttatgaaggtagaggtcagatgctgaatgagcgtctggcaaaagtgggatctgagcagctgatgcgggctgccagggccaagccaaggttgtccccaaggcctggccttggagggtcccccccgaccggccctgtccctgcccttgctccctgggaggggacggtggatgggtgctgctcacacccacaaggcttccctgtctagtcacagctctgtgatctccaggggggtctccatgatcacgtcgcgaagtttgtgcaggggtgtggatttggcggattctgtgcgggcgttgcgctcgaaggcagtggcctcggcagcggtcagcgtctccagcgagcggcccaggcccttctggtcttcctcgggcaggctgttgaggtcggtggccagcagcgtgcccgtgctgccgtgcaccacatggatcccatcgggccccttgagctccactggtggcttgtggcggaagcgcaggctaccctgccctgggctgtggtctcctggctcctcgtccagctcagtctgtatcagctcagagatggaggagtggcaggaggaggctttttgcaccatccgctgtgcaaag

SEQ ID NO: 341914 - DNA, 1000 bp, Homo Sapiens; identical to SEQ ID NO: 160066

SEQ ID NO: 341915 - DNA, 1000 bp, Homo Sapiens
ggttgtggaatctttaattctggttgttttgtgcaaatgcatggaaagcaaaagaatcatcgttataaataaattgaagcttgaggatgacttcgtaaaagaactaatatttgcaaagaaaggggacgaggacattttctaataagcattagccaggagcagccacccccaagtacattttattcccaggtatatttattttgggactaatagcaatcaaaacagagtaagcggaaggtcttttttgtaagggtaagatgactgtgttcctgcagcctggacactgactgctgcaatgaaattggatctgttgagcatgtcttccaaggacagatttggatagtaagccaggtagaaggccagagctcccacaaagctgtcaccagcacccgtggtatccacagccttgactttctctgtgggaatgtgctttggctcaggttctgtctgtgacagcaccacacatccttcagcccctaaggtaatgattaccacctggcagccccttttcaagagcactaatgcagcctccccagcatctgcagcgctgcccaccgtgaggccagttaaaatctcagcctcactttcattgcagcagaacacatctgagagggtgtagaactggggatccaggtcagcaatggcaggggctggattgaacaaggttttcactccactcctgcgggccattgttagggcttccaaagaagttgctggagttatttcgagctggcagaccatgactttggctctgctaatgacattggctgctgccctcagatcctccgtattcaaaagtaaatttgctccagccactatgacaatgatattctggccttcattattgacaattatagaagcagttcctgtagcagcatctttagtctgatatgtaaattctgtagaaatatcattctgttttaagttttctatataatcattgccaaaagaatctttgccaaccttacacaccatggacgtcattgctccaagccgagca

SEQ ID NO: 341916 - DNA, 1000 bp, Homo Sapiens
gctggtgaattattgatttattgcacatcaggagaaacacaagattactgctataataaattcactcttacatgctttagcaaaaatcagtaaaaatagaaaacatggtaacaattaaagtgaaaaaattggggtcattaaagaatgtctgactgattagcttgcagtttttgagacggctgagaactaccatcaatgagatcaccttaaacaaacactcttaatgacttgaaaaagtccccatcccaaagtcaactataggtattcaatattgtatatttaactgaatttaaagttatgttaaaacccattttattgaagtaagagaagaattccttttacattatcattctcaagccatatatcaagaaaaagattgaaattacattcctttttttttttttaatagagacaagttctcgctgtgttgcccaggctggtctcgaactcctaggttcaagtgatcctcctgccttgtcctgccaaagtgctgggattacaggcatgagccgccacgcccagctgagattacattactttgagtgtttaatttcactatgacaggaagtagcctaatacatacttttttgtgttaattttctggattcatcctgatttttagtcttcgtacctgagtacaacaataaaggaaatcacttcttagatacattaaaattacttctaaacttgccccccacacatgaactgttttcagtttgctatttttaatggcccatgcttatttatatagacatagcataacactgctaacactttatggcctactgtcctctttcttagtattatattataaaatatttttctatatttccacatagttattgactcattttaatggctgcaaaatcaggtactcatttaagctcaaatggtttagtatcactcctcagaaatgtattcctccttctcttgattggtagtcataatcaaatgaagtgacattattctttgtagctggttacttacatttcaaatacac

SEQ ID NO: 341917 - DNA, 1000 bp, Homo Sapiens
ttttttttaacataaatgccacttaactagggaccagctctgtgcctgtgccaaaccaattggtgtgagcttgaggaggagtgaaggatggggacagagcatacacattgatgacaaagaggaatcagacattcgaaacaaacatgttctcagagcttcgtggaaattctgtcaaggccctaattcttgcctgctattctcttggccacaaaagatcacagaccagttactatagaaacaattctcttcacaggttgtgcatgttaggatggagatggaaaagatttccttatcaaaaaaagaaagaaattaggttttcagatatatttgccctctatctaaagtgttcctccttttatgagcagaagaaagaagaagctgcaatgattgcaaatatgcttctaattccttgcagttaaatttcaaactttcattgtagacttggtggagctcgtgcgtttctaatacatgcagaaagcgtgtattttctcaagagggaagataggagataagggaccataaggctgagtggtgagagccttgccaacctcagggtcccctctgtcctgggggagcccagccacccccactccacccaccatgaagcctacgtttgacctcattagcatttccatctgctttctggctctaggcttgttgtgactgtccttgttgtgtgttgtgttgtgtccttgttgtccttgttgtgactgtccttgttgtgttgtcctggggcagtgcctgtgtggaatgcctcctgggccctgtggttctgtttgctgagtgcccctggcagggtagctgcatggttgcagcaggtgcccagacaggcaggctcagatagctctgatgggggatcagaccctgcttgtggccaaggacctattcttggtttgggacttttcttataagcttatatggcctcagaaagaagcaaggggaaaggctctccaagctggggaactagatagacagagagagagagagagagagaatgtgt

SEQ ID NO: 341918 - DNA, 1000 bp, Homo Sapiens
gaaatggggagcgctgttgtttgaatggtatagtttcagtttgggactgagaacaaattctggagatgaatggtggtaatggctgcacagcagtgtgagggcactttatgcaactgaagtaacagatgcctttcaaaaataagcccgctaaaatatcaccaagcataaccagcaaaacaatcatttcagtgaaaatacaactttatattaatcatctcaataatacagattacagaactgagtttacagattacagaacttttcatactttgtgggtcagaaaggataaccataaattactgtctccgctttatgggtggtaaaactgagccacagagaaatttctctaagaaaatttaaaaggaattgatgttcattaaataaatatcctcactgatttttttaaggtagaaaagtacaatgcacagtgttaaaaaaattactgtaacagcctcatgttcgagaagtctaaaattttaaggctactacatgtgttaattttcagtacatgtccaacagaaaacatcctttattccagttacatcctgaagataccgaagtcagtcttctctattggtgcgttgagggctgcactaaaactgagacccaagaccagtctggtgtctgctggatcaatgatcccatcatcccatacccttgcgctggaatagtaagggtttccttcctcttcaaacttcttaatgatgggctcttttaaagccgcttcatcagcactggagaactgctttccttcccgggctctttggtcctttgttatcgtggccaacacattggctgcctgctctcctcccatcactgagatacgagcatttggccaaatgtagagaaatcttgggctatacgctctgccacacatcccatagtttccggctccataggagcccccaatgatgagggttatcttaggcacttgggcacaggccacagcggccaccatcttggcaccatccttggcaattccttcagcttcatactctct

SEQ ID NO: 341919 - DNA, 1000 bp, Homo Sapiens
tttttttttttttttttttttaagagttgagtgatttattgagtgcttacttggtgccacggcatgtgctaggtgcttacctaaatcaactcattggatcctcacaacaaccctgtgaggtgggtttcataacccccactgtttaccgatgaggctcacagaggctatgtaacttgcccaagattctgcagctggtaaaggacggaatctgtgcctctgcactaccaatgcctgctcctgaaggaaggtttgtgagggtgaatttctcaaagtcacttcaggtccttactgtagcgacagtgttggcaccttctgtgtcctctctcaccttgcctgtgagccttccagtgggtgggaaaagaggcatgcctatcagtggccattctgtgaacacagaagagagctgcgctggccacagagaagatagtccaatgatccttaaagttcaggcgtgtgggttggagccaaaggggcctgtcccctggatataacttgagagtagctctggagaggaattctagaagccagtatgccactgtctggcctggacaacctggcccgggtaggaggtgcaggaaagttggtggtagctggaggggtagaacaagggggtgtttgctggagagaggtgggtgtggcctgaggaggggacacagctggctcacagacttcctcatcacccttctcggactctggtccagcatctgcagcagtgggacccaggacatggtagaggctgggaaggcggatgtcaaagcgcagcccaaacttagcaaagagcttgtcattgagagtgtagagcttctctgagatgtcatatcccagcagagccgagaagaggcaggagatgtatcgctctttggtcagaagaagatggagacttttccggggccaggaaatgtagctacatgaggtctcagcagtcagagtgacctggaacaccccctcctcagaaggctgtagtgattcccactcaggagagtccatgaactggtatgga

SEQ ID NO: 341920 - DNA, 1000 bp, Homo Sapiens
ttttttgcaatatgcaaatagttctttttattattaacattagggtatgtcaaattttaaaatatttacacttaaagacaaaacatttccacaattattacaattggtttcactaaatcagaagtgactacacattatctctacttttataccagaaaacaaaatgaagaaatcaacaaaatataattactaaaactccactgtggatcaggataaaatgtgtccaatattaactcacactttcccaataagtataaaaatgaatataacattgcttggacaacttgtttcaacagcgaatcctctattactatttgttcaataacatatataaattcaaaactggcaggtatgaaaaaaggttactttgttttttgcagatactgtacttgtaaaataaagccaaataaagcatatgtcacacataccaaagtcttacattttgcctttctaatacaagcaagtgaaatattaacacatagcatttaaaataataaatatatattttattgacagtaatttggaatgttagagatacaaaattttatgtacaattattcagattaaaacatttaaactttaggttttatttacaaatatttatcttatcttcctctcctatttgacgttttagctcaagaagagttaaaatggaatgcatctgtagatatatagttgggaatgcgtgttcagtcacttggctctgtgataataatcttatgtaccatgtcagacagattttcagactccagatcctctttgccattatctgaatttcctgatgagatatagcaaccagagtcccttgggcagtcatctaactgtgacttatttaaggagatgtctgagctcaaggataggggctcaggttcattttcttgctcttgaataatttcttcttcaaggaagttttcagcagctgatagtaaccttcttctgtcatctgggttttcaatatttaattcaatgaggtgactctcttttatatcttttaaatctt

SEQ ID NO: 341921 - DNA, 1000 bp, Homo Sapiens
agtttcaatagcatattttattttaatctaagaacaatgattaaattcaaaggtcagaaatataaaagattatccaaaaagtttaggatcataactgtttcttaaacaacattggcatgtacttgagctggttctgtggctccaaaggcttgatttttaccttgcacagtttaaataagcaagaagccttacgcgatgctccacaagcatcacaacatcacaaaatcattctacaaggcatgtctcaggggatttggggccatgaagatctttttccaaccaaaagtctgagccgagatagaatcacagcttgaagttcctgctctcagactgtcctccaaatggttccttaagacactgggtgccctgagctctggggcccaggcctgagggtggcagctggttatgcacgcagaccagttctgttggtcactgtgtgggcattccactcctatccttctctgccagtgccactcggatgaatttcccattggcaagttctcgtacccttgatgcattcagaaaagcagaaaggaaccgtggggaccctcaggcacctccccccggctgccaacaccagccccgggggcaccacgtatccggctgtaccttcagtaaggagactgctcataattggttcaggtgaagattttaccttccggtagccctggggtggaccaggtaggaggatcaggagaataatgtccatgtgtaggaggaaaaccaggcagacaagcctgttagccagctcggtcacaccgcgactggatttacattttggaaggatgggcccctcccaggcactgtgactggatttactgcctcctaggcagcctcccaccatcggaacgactctctgggactcattcaagccccagggcaaaactcaaaacagaagcttaaaatggaaaagcaaagatcctttgagccaaagtatcacaccaacgacagtttgaaaatattatttcctccaggggaactacctgcacttaactggata

SEQ ID NO: 341922 - DNA, 1000 bp, Homo Sapiens; identical to SEQ ID NO: 160067

SEQ ID NO: 341923 - DNA, 1000 bp, Homo Sapiens
ttttttttccctcccagaaatacttttattaaaataaactgagcaaggccaggcggctcaaaatgatccacacaagggggttcaaagataatccaacgatggagacaggagacagggtgggagggaagcgggtcacgaatgcacaggaaacagcgggactgtgggaggacaccctgcagcctcgggccctccagctgggctgacaggcaggctctgggctttggaggcagtgagggtcaattcggggctccatggggcgtcctgtccctgtgtgccttctgcgtgtgcttgcagaacagaccatagagcaccctcagtgtgctcttggcatccttgttcacgatatcttcagggctgacagggcagctgagcaggccctcgtccttcagcagctccagcgccagggtgacgttgtgcagcatttctgcaggagagttgggagtgaggtagaattcctttaagtgcaggaagaagccttcaagttgtccaatcagcaagagtaagatgaccccatctgcaaactgggtgtccagattctgcacagacaggcccaggcggtccagcttctggttgacaaagttcacgatggcctctttcactgcgttcactttctccggagccagcttaaataattcatcaaagacgtcctttggaggctcgtccttgtctgtgctgtattcagtgagctgttccaccaacttctctgacttcagaccacttttggtgctctcgatagtgatgacctccacctggacgttggttgggagggagaggtcgggctggaagcgcttggccagggccacaaggaggtgcagggtagacaacaggtccttgttgaagatgctctccacgctccacttggcctgccactcctccagctgcagactccggttcacggcctccagcaccactgtgagcttgtgcttctggcttgtggctgtcagggcgatgtcctctgcttccagcttgagcgccgccagcctctggaataggtggtgta

SEQ ID NO: 341924 - DNA, 1000 bp, Homo Sapiens; identical to SEQ ID NO: 160069

SEQ ID NO: 341925 - DNA, 1000 bp, Homo Sapiens
ttttttgataatgtagaagtttattagaacatgaagagaggaattacctacaagtaattctggagagctggctaccaggggccagatgcctcataggcagaaattcattgaatagcatgcatttattatatgttgccagcagtttaagcatttgagctcaaacctcctattagaccctccccagcatgcgggccacccaccagttacaaggcatgatgacacgacagatgactcgtcctccttggtagcagtatggatatgggtagtagcctagtaaaggttcacagacgcggcggcaatagcggttgcctcgacggcagtaaatacaacaataacctctctcatccagcatgggatcaaattctattccattttcagtatagtcatttattggaagttcttcctcacttgcttgtctggcgtgacgggtcttctctactttcacttgagggaccacccactgttcattttgttcaatcccttttttttcgttggcaggaaagtgaagatcttctccctcctcctcaaagtcttgtaactcagaaactgatattagagtgggattgatccaatacatggtcacgttatcacaaatctccagaattttggaatttttaagaaaatctcggttttcaataggcttttctgctgggacccaaatcactgactgttcaaagaaagttgtggtaatttcttcattctcatctatttcctcttctggttcagaaaattcaggaatcactttaatctgagttttgataaaacatttttgaagacccacgaagtagatgccagtgtatccgtttttaaagtcgtgtacttccaatgtttcatcagtgccatttccgcttctgaatatttcagttctggtcacaggatcaatttccatgtaaatcttcttcttctctccactgctgtagaaagtgtgctccatgtcataggcttttttgggtacctccggccagaagtgcttgctcccccaaaacaggacaattagagt

SEQ ID NO: 341926 - DNA, 1000 bp, Homo Sapiens
tttttttttttttttttttcattttattagcattcctttattttagaagttcacacctataattttataacaatcgtgaaaatgttactcagaactagatgttttgatgacacatagcagaaatctgtggttcaagatggtcattgcaaacttaaccaatctcagcattctattctgccttttgttttgattgcacagaatcaatataattctgattcatatggaaaataacttaatatcttaacctccgctcaggatcttcatcataaatgtaggtcagtacatacctaaaaattgtcaatgatccaacatggtcacatgtgacatgctacacttgcacctagtaccaaacaagctgatacttcaatgagatctggttggcatatacacccaagccttgtctgtcccctcagagcactgcacacagatagtgaaagaacttgtgtacaataagaaattcacagggatgaggctgggcgcagtgtctcacgcctgtaatcccagcactttcagaggccgaagcaggtggatcacttgaggtcaggagttcgaaactagcctggccaacatggtgaaaccccgtctctactgataatgcaaaacttagctgggcgtggtggcacatgcctgtagtcccagctactcgggcaactgaggcaggagaatagcttaaacctggaaggcggaggatgcagtgagccaagatcacgccactgcactccagcctgggtgacagagcgagactctgtctcaacaacaacaacaaagatattcacaaggatgaatttaaataggtaaatggcagtgtagaactacatccttcctagtcaattacacctttaggagactttaaataggcacagaaacgacaaagggcttatactgagaattgcacaaaaatgagttacttggcagcacaaggtagggattgtatgtgtcacaagagtatatagactgttctaccttcatgctctactcattgccatatcccttcgtggtt

SEQ ID NO: 341927 - DNA, 1000 bp, Homo Sapiens
tttagtcgtagttccaccgtttacttgttttgacaagacacagacctttcagaacctctattgccctctgtgttaaatggcagcaataaaacctcccaggattttcagggaagggggtggatcaaacaagttacaacacatgtgaaagtgtgttggaaagcaccaagtattctaacagaaaaggccaagaaacagcatgcatgctgccacttccctctcccgtgcccaaggcagacatggctatctatctcggcactgtctcaccaagctatattgatcattcagaatccctctcaacacattccaggatagttagggtgacatagcctccatggggtgaagagaagcagcaatgcaaagcagggaatgcccagggaatgggccaggtggcctgtgccgtctatgggctgggcctcatgctcagctgggctgtggctgggcttcaagaggcctttgttcccagcatcctggttagcaaccccagttcctctttcgtgcattgtggttccctgagaaaacgttaacccagcccccagcacagtcaggccagccctggggaaggcctcattcatgaggcaggaccccaggggccaagttggtgctcggtggtggcaggacccctgcagccccctgtcccactgcacactcccaagtccaccccgcgaggagcaccccctgaaaaaggccatgtatcagcccctctgccctgggccactgcatgtagtgggagctctggtcaggcagaagtcttttgaaaagcaggtcctggggctcctgcacctccaccccagcgcccatcgccacggactcccccaggcagggccagcctgcccaccagcagtcaccagtggcctccatggtgtgtttttagggagtgctgagcagtccccgctgtgtcagcaaaaccctccaaatggtgctttcaattccattccttcagcctctccctgggagggaataaaggcaggaagtctctattaaactgtgaatgtcaggagat

SEQ ID NO: 341928 - DNA, 1000 bp, Homo Sapiens
ttttttttttttttttttttttctcgcatctttgaaatgatttattgttcacttttgcacacgcgtgctgaggacagggcaggtccagcctggggcctgctccccactgcagcatttccaggcccccagagtgggccgaagggggacatgggcgtgtctttccacattaagtagcaggagattccctgagtaaaaggcattttcttaagtaggacgtgtccaggctccagcagcagtcctgggggtgggggttgtgggccttcaggccagggcactgcccatgacttcggagaagccacctggtgttccaggtgctgctggctgaggctcctgcagctcaggctgggcctctttccaggccagagacttctccaatttggttttaaaaagcaatccgtgacctgggcagtctgcagtctctttggaggctcgcttcttgcagcagccgcggcacaggctgaacacacatctgttgccctttgggtttccacactggtcacactttgcatattttggcttcagagaggggtcgaaggtcttgtgggggttcctcagctgcttcttttgcttgttcttggacaggacctccgtgccaccctcctcttcctccagggcccgcttgctgcgcgcacctgccttctccttgctcccctccctgggccccggccggatgtagggctggcagatccagtggaagggcaagtcgccggtgggcttcgctccctcctgcctggatatctcctcctgacaccgcagcttcagctcctggctcacagcagcgatgccctccagggtcttcaccttggccagctcctctcgcagctcctggtgcacctgcagcgtgtggtgccacagcttgaagaggtgggcccggacgtaggacagggggcaggggtgctcccgcacgatgtccagatactcctcggccagctcccacacggcagggctccggccctcgaacagggcggggttgtgcaggttgccctctgcgctcatgacg

SEQ ID NO: 341929 - DNA, 1000 bp, Homo Sapiens
tgctgggtacctccagggaaaacccactttatttctattcagaagcatccaaacaggtacagttaagccatcccccacgccaagcaagggcctccttctccaccctgggcggtggtcggggaatcagggctggtcagtgctggatggacaccagctctgccatcctcagcaggcccagaacacagtccagaacaggcagagaggggcagggagcccactctgcagcccacctggccggccatggcacctggcctaggacaggaaggtgcgcacgcggctgcggacgggggctctgcagatggggcacagctgcaggccgggggcacactcagcacagaccaggtggccgcacggcacaaagacgatggacacggcgcggtccaggcacaccttgcacgtcctctcctcctgcagccgccgcagctgcgcctccacatccctggctcctggctcctgggcactttcagactggacctctctcctgggtgtgggcagctcagggtacccagaggcagggacggagggggccacaggggctgcgtcttccggttcttcccacgggtcccaggagcccagcagctgggagtgagtctcctgcacactgtggacaaagtctcttccttttgaccggagcaggaactgacagctggggaaccacttggcatgctccgtccaggggtcgtccccgcgcttccagctctgcaggcccccatagcagaagaagcacctcaccttgtcctgatggcctgtgtggaagaagccggcagcagccagcagctcgggtggcacctcagcagtcagcggccagtcatagaaggaggccagacgcaactcctcagagcccatgccggggaaggcaggccccctggacaaggtggccccggcgccctcctcctcttcctcctctgtcaggggccgcagctggcccaggatctgcccatccacgtggtcccaggctctgcaggtgtccaggcctaggacagggctgcccagagagcgg

SEQ ID NO: 341930 - DNA, 1000 bp, Homo Sapiens
ttttttttttttttttttttttttttttttagtaatagactcgtttatttctcagaatttagtttgctgcttgatattacctgcaaatgtgaggcaatcacacaatgtccttgaggctctaatcccagacttgtctgagcaccgtccacaggcagctcggcccatcagaggtctgaaacaaacctcctaacttgggccaggtattttggtttcaaatagtcacccagctcatccttagtgacccacacatgatggcccttattcccagcctgggaaaagtctccagttaatagcagtgctttgaagaagaacaccttggctccgaggttactctctgtccgcattgcctgggggaacttgaatgtgtagtgcccacagggtgcatttcctaggaacttggcttccatgttgttttctgagagtgtggccagggttcgttcagctgttcctcgaagggtctccccaggctgccactctgcctggggcagtatccaaacatcctggtctccaaacttctctctgactaacaggacaaggttcctgtctagcttcctgttcagggatgttcggtcattcttttcatcagcttctgttatgcgagctccaagtttgaactgtagaaatttctgctcccacatatcttccaaatcttgcgccagcaatatatcctgttcatcttcttcatcatgaaggtcagctttcttctttgccagtcgctggttttcatccagagcacgaagctcgtggtctgaatacaggcttctctctatctcaatctgctgcagtagagacgccatctcttcctgcaatggggtcaacggcttggagactacaggtggccgctgcaggcacaacgcgcccaacaagcgccatggggatccgttgcttgagggtgcggctgcaagagccaggctgcgagagcttagactgccggcccagagcctctcgaaccgccgccaaccccccgccacccctaacagcgtccgccttacgggcgccg

SEQ ID NO: 341931 - DNA, 1000 bp, Homo Sapiens
tttttttttttttttttatcaatactttggttttattttaaaacagtgaaaagaaaaataaatatctgaagaataagaatacagggctgggtgcagtggctcatgcctgcaatcccagcactttgggaggcggaggcaggtggaccgcttgagcccaggagttcgagaccagcctgggcaacacagtgagacccccctctttacaaaaaatacaaaaattagccaggtgtggtggtgcacctgtagtcccagctacttgagaggctgaggtgggagggtcacttgaacccaggagtcggaggttacagtgagccctgatgggccactgcactccaacctgggcaacggagcaagaccctgtctaaaaaaaaaaaaaaagaatacaggagtggggtggggtagtggggctggagacttgaggtgtcctggctttggtagtcttgagtgggggcgccagaggcctgggatctgcagctgtgctcttcccaggccaggccctgccccgtccccactgggaggtctgggggctccgccagtctcgcctgcccgcggctcccaggcggggcgctgcgtcagcggaacccgcgccgggattagcgccctggcgcccgcctgcgccccgggctctgtcgggcgaggctggggtcaccgccccattggggcctcttccgccggcccttagcctggatcccaggccggaccccgcgtggtgcccgcagcctcagtgatgacccatgtcctccatgcccacgcggccccagacgcccagcacgaagctctcgatgtcgcactcattgacgccgcgcacgatgcggaagtggcccctctcgccccaggctgggccccaggagttggccgcagtccagtatttgagcgtccttccatctggcagcgtctcctctccccatcctgtgatcttgactgagtgggtcccatgccggcggtatctctctggcctcccaaggctcactggcgtgtggctgtagatgcctcccttgta

SEQ ID NO: 341932 - DNA, 1000 bp, Homo Sapiens; identical to SEQ ID NO: 160074

SEQ ID NO: 341933 - DNA, 1000 bp, Homo Sapiens; identical to SEQ ID NO: 160076

SEQ ID NO: 341934 - DNA, 1000 bp, Homo Sapiens
tttttttttttttttttttttttttataccaatataaacagggccgttgaccctttcattttattaaaatggcacataattattaaaacagcatactgatcactttatacttctgctagcccccaggggagctgctgggggcggcatgtgagtgccctcccgaagggtacagattcatgcattgagcaattcgtgttctttatcggttttcccaacagcatcaggatttgagagtgggtcgaggtcagcgaagaggctgaaccaggcagtcaggtctgaggcagccttagcaggttcttgtagcgaggcctgtaagtctttcatattttggtctaaaagctgcgaaggaaggaaacctgagcctgtctgggccttggggtctggctctcccagggccatagtgggcactggctccttcacttggccgtctccaaacacagcggcccactctttgctgaactcgccctcttccaaggaggaagcattgaagatctcactcaacagcagcaggtcatctttgtcagcaccttcaggttccggggtccctgccactggtcccaggcaagcaccttcctcagatttcatgtctaatagttcatctatgggtcctgagcatgcagtatgtgtagagcctttgtctaaggcagataaaatactttttccatcttcagtcttaaaactagaggattccttgcgctggttttcttcctctaatgaaattaattggctcggctcctgcacggctgcatctgtactttcctgctggttgattttcttcttctcttctttctcaactaattttttcatagggtcttgtaagctctttaaagtagtaaattcatatggttgataacctttgaaactctcatggatggctgccatagtgtgagaagttttctcccaaaaatgaagcagagtggtctggtatgttgctagcatgtgagacaagagattgcatctgctcgctccaagaagatccactttttgacaaacatccatc

SEQ ID NO: 341935 - DNA, 1000 bp, Homo Sapiens
ttttttttttttttttttttttttattaatgtgtttattgagattataaaatataataagttatatatatacagaattagacaaaaataatattgacaattaagacttcactgtctaagggccacagacctaccctggggtgttttctaaatgttttaaagtattgcagaattatgaatatctccacacaaaaatggcaggatggagtcccagctttggtcagtgagaattattatgatctcattgttctgaatcccataacataggctaaagcttgtcagagtaaatcccatgtttccaaataagtaaatgacaagggaatttgtaactatataaggaatagctccctaaaaatggcaggtggagagccaatggaacatgagctgacactggctggccttacagccccagaattctaatagtgtgaaatgaggccaaagcaccaggagcagagaacagccaccccactctttcgctgaaaacattctgaggagggtgcaagctgttatcctggaatggcacactcatcacaagtgacatttgcagtctaattaaggggagactcactcatcatcatcacaaggcagggggaagggggcaccacaggatttcaaagaggaattaaaaggataattaagctctgccgtggagtatttagcttgcagggtaaaccaaataggttcgaaaaacagcagcaaacagacacagtaaatgatgatattaaatattcaggacctcattatgatcctctcacagtatgtactacattcgttggtgggaaattgcttgttggtgttaaagatatgactgattttccccctaaagcattttttcagtcatgcaacttgtaatttttacgacctcgctttataagtcagagactttgttttaatgtagtaataaacacagacctgccatcagggagttcagcagtgaactctaacccctggtgtgatcactagcctggctcctgagctcttggcagttacagggatagtac

SEQ ID NO: 341936 - DNA, 1000 bp, Homo Sapiens
ttttatcttttaatgttttattgttcacttgcaaaaatatatataatatatattacatgtatagcatgtatagaggagccccacagcttgagtcaaagagagctaacagaaaggcacatatggaggcatgtcttttcatacaatattcagttaagccaacattcaggccatggcaagtgacagttaggacaaggacaatatagcacacctgtgttcacgattccaaagagctaactcagaggcaactcttaggtctgccgagaatggaggtcatcttggaagaaaatatcacatctacttaataggcctgtcaggccatcagagaatatattgaaatctggaaaaagacaccagggcaaggtgaaagccagtccttgacttgacagctagtttgttcttctccccttttattttaagacttgaggcctttgctgattaaaagaagcaaataacagtgccgactgtggccctgcaggattttggtcagctacatgacagaagtttgtaacagactaaatattttcaaaagtttgtaaacactgtgatgatggtgaggaaagcatagaaagaacatttgctatttctctctcattgaaaaaacagaggcatagatctttggcttgccacatgtggtatatctatcctgacgtttacccaaaatggtaaaaatagaggcacaatttgtggaacaatgaggtcattcctaccagacaccagcaaaggtgcctactaggatttggcacagccagagcagctggcaaccttggttgatgtgagatggggcttcacgacgtccggctcaatagactccattaggtcacactcatttgcaagtatgtgtttcaccaggcatctggaggcttcatcaatgtttatattttcctttgctgatgtttcaaaccatcctacgaaaccgtgctccttgcagaactggtccatcttgaggccattgttcatgagcacatccttcccctggtcacatttgttggccaacaaaacc

SEQ ID NO: 341937 - DNA, 1000 bp, Homo Sapiens
ggcgagcagtcagtactttaattcaggtcaggctccgacacctggggagacggggtcctgcccgccccaccctgaggtggaacccccagctgctcctgggcacagaatcatttacaaaaataaatatgaaaaaagcagcaactctttagtgatcatggaattaatctgacagcaattaaatgtgtttaagcatctggcatatctcctcaattgcaccaaaagaatttggaagcacttggtttggtctcaaaggcaaaaggaaaggacgaggaaggggccaggcctcccgccaggcccccgcccccctcacatttctgagtccgcatacatcccgttgattaagtagtccacctgggtgtagtccttcttcttgtagctctcataggcctgcagggcaaacaaaaccaagactgtgatgaaaagggtcaccccgagtaacagcaccaccagaaggagagttttgtctaccacggcctgggtgaggggctcagtggtgaccaccatgtactggccttgggtgctgggctggcacgagtccgtggctggcatcttagtgccccctgagctcctgggtgttggcccagtggaatcagtacctggtgtggcttcagtctctacctgctccggtgcctgggatgtgcctggcccagcggccctctgggtatatggcatggggcttggctgtgtcgtgggggacatggcctccatctcagggattgggctggtgtgaggtactggcactgggctggcagttggctccctggcttgtgccttggtggtggtcaccactgtgggggtgggggcgggctctggggttgtgtttgagggcatgggtgtggatttatttgttgtgttaaccacaggctggtccactgacacctggctaatgggaccttgtgcttggggacgcatagggggtacagggcttgccgcggtgtcactgggcatgtgcttggaaggacttggacgagtgctcatggggctgcttgtgtttgctgtg

SEQ ID NO: 341938 - DNA, 1000 bp, Homo Sapiens
ctctatctcagattttattttttttaaaaaaggctccaatacaaggccccagagtagtgcatgcaaatcaacgaccctcaaagtgacagtcattgtcagataacaagcacaatctgctacagtctgtgacctggtaaagagaccaccttttcattttgagtcccatcaccaactatgccaatgtccaacctaccacacagctcacaatgactcagaggtacattttagtatctgaacagcaaagacatattgagctgcaagtacaatgagtaagtatccttagtgtattagacagggtaaatacaaacaaggcataaaagggaaaagccaacttcatctgatgcctgaatccctaagtctcttccatcttttctcatgatctgtgtctagggagatctgctatgccatatcaagaccttgctcatctggtgatgagacggggctgtttgccttggaagactaaagaaagggtgaatattcacatgaggtaagaacttgaagttgtggttataatacataggccaagtttgcctgctgtcaacccatctctgtaactccaactttgtgcctgcatgaattctgcgacatggtacagctgatgggtagagaattctaactcctgtgatgtatttacaggagaagataatcgtggaagaattaaatggaagaattcatagaagaatacagccatggataaacttaatcaaaagaatatgattttagtttggtttagtatattcaatcagtcagttttgtttgttttttgtgagacggagtcttgctcttgtcacccaggttggagtgcagtggcgcaatcttggctcactgcaacctccgcctcccaggttcaagcgattctcgtgcctcagcctccctgagtagctgggattacaggcgtctgccaccacgcccagctaatttttgtatttttagtagacacggggtttcaccatgttggccatgctagtctcaaattcctgacctcaggtgatccacccgt

SEQ ID NO: 341939 - DNA, 1000 bp, Homo Sapiens
tttttttttttttttaaaagtccaaactagaaagttattttatcctgtccctgcatataagacagtgaattaaaacccaaagtgctctgtggagatgagcaaggttgtccttggaggatgctcctcccaacatgcaggccaaatgtgttcgctgtgctgggtcccagcattggagtacagggggctgcagctctgggcaggtggttgagcagctccactacagtaggtgggagttgctggtcttgtcctttaaggtactggcgatgaggttctattttctatgtgcctgctggaggcccatcatggttttcaagtaattatgcttctgctctatcttgactttggcattgtagaaggagatggaatcagggccctcaggaagcaccctctgctgcagctggctgaatttgtcctggtcatcttctcccagagacacaatcctgttcacagggaccatgcctggccggatgctgccgcctggcttcagtgccatctgcatgtcctcagggatgacaaaggactcattgtaccagatgtcaaattccatgagcaggcggtggcgacactgatccactaggtgctggcaatactggatctcagccctgaggtcacgcaggtcctggtactcgctgcggtactgcttcttgaggtctttgagcttgaggatcagcaggaattcttcctcatcgatgatcatcagccccttgttttcgtacttgccttgcttctcccgtagtgacttctggaaattcagggcctccttggtcacatcaatctcccgcttgatggcattgatgtgctgtgtggtctcgctggcccttttcctccgttcattcaagatggatttgttttctttgaaaattcggttgatctcactaccttgctcattcttaaactcctcaaaggccactggtttggagggtggggtgtcgggcctgagtggctctttgaatgtcttcttggacttggctttcttcccaggtttggtagagaaaggggc

SEQ ID NO: 341940 - DNA, 1000 bp, Homo Sapiens
ttttcttttttttttttttttggtgcttaaatttatttttcccatgccagagaaagcaagctttggtatggtaaaccacatgagaacatggctcctttctttttggatagcctggccatgtgtgaatgggattttagcttattatgtttctaagacttttccttacagcacacttaatgtaccttttcagtccttctcccaaccccctgcaaattgtctttaaaacaacaacacataaggaatctgaagcacaggagaacacagagccaacaaacagaatgaagaacaatcatctatttttaactgactttctatcattaccatttttccttttgcttaataactatcttgctttgaaactttgactccttttataagttctatgaggcacatatgtatagcaatttggttctaaaaaccagtgatcttactttagctccatcttaaaatttcaccttaagtaaatggcctctagtagatgataagcctaaaaaaagcacaattattaaaacaaacagatccatgttaggacatttctgaataataaagagaaaaggtgtttcgttgggtattgcagaaaagaggaccaatttcatatagtacaagtttcgtaagtcaggccaagtgtcaatttcaaaagacaagaaatgaaattgacagtgaatagtgctcataaattggtagcgtatataaagagaagttcctgtcacattatattcccactagaattattatccacagtaaataaatattattttgttatgccaaaaatatagcgagcagcttcatggttaataatacatttatgttgacacctccctaatccaggaaacattcacaaacaaggactcccatatacaaatactttaggaagagagatttcccaggcagatatcaccaaaaatgttttcactgtaggaatcacaaaataagtttttgtcaaaataactgttgttgaacgttatactggtcttcctcactggtgattgataagctcctt

SEQ ID NO: 341941 - DNA, 1000 bp, Homo Sapiens; identical to SEQ ID NO: 160077

SEQ ID NO: 341942 - DNA, 1000 bp, Homo Sapiens; identical to SEQ ID NO: 160078

SEQ ID NO: 341943 - DNA, 1000 bp, Homo Sapiens
ttaaccttaatactacctttagggacttttttgaacagcagaaatcatatctccatttttaattgtggtacttttatggaagcttctccaacttcttttgatatgtctactccaagaggacattttggttcatagcggatgccttctatgtcatgtaaaatgcccaagccaccacgtagtctttcaataccattccatgcaatcataatgccattatcagtgcatagtctgggaggaggacacaacaaagtgcactgtgttgcgtttgttaaaatttccagagctctgcggatatagaagttacttgcgacaccaccagatgcaaccagtactgcattattttgaggtaacaagtctctctgcttacaaaacagaatagcccgatgtgttcttttcacaagatgacatgccattgtgtgctgtactgtggcagcaatgtctgctgctgaagacaggatttgccccttctcatacctgcagaaatgagcagctatttttaggcacaatccaggaatatttatctgttcaactttactaattagaaatataccttcctctttttcctttttcattattattttatcagtaacgtgttgaagtccagtaaaagaaaaatcacaatttttagcatgatgcaagggaggtttgatgtcaaaatgaaatctatttccttgtttggccaaatgctctatggctttcccaccactcatggtggagcactctggatgttttattaaagaaagtcttcttgccaccttgtcaagcatgtcacctggtgctatgtccaaagactttccaagaagcagaaaatctgaaactccttgaactaatgccaacagacagtgacctccagaaatcaaaagaactaaaaaaggaaattctactttattggtcaacctaatagtaagtgcatgagcctccatatgatgaatgggaatgaatggcttttttaactgtcctaccagctgtaagctaaatgataagcccactcccaggctta

SEQ ID NO: 341944 - DNA, 1000 bp, Homo Sapiens; identical to SEQ ID NO: 160079

SEQ ID NO: 341945 - DNA, 1000 bp, Homo Sapiens
ttttttttttttttttttttttttttttttttttttttttttatggtgtgactgtaatatatttttggaaaggagggaggggacttagccacagacagtaatgagaaactgctcgtggcagaagaccgcctagaggcccgtcatccgtttccaatccctggggagggtgccctgatagctgaagccagaccctcccattccagattcgaccctggcctgggtggggttgtcagatggacttccaccgggccccaggcctgggagcctgcccgccacgcacgacccccgggctcgaggggggcgaaaagcccaggttgtcgcgggcgcacctctccagcttgtgcacgtggcagaagacagaggcggagcccacggagcgggccgggcggcggggcagccagaggccacggctctcgggcgcccccggggggcgcgggctgggggggcgggcagcgcgctcgggccagtcggcgctggcaacgaggaagcgcaggaccaccaggttgaggaaggcgccaatgaccgtgagccccaggaggatgtagaggaagctgaaggccacgtaggggagcttcctctgcagcgcctcgccgctctgcagtgccacgaagtcgccgaagccgatggtggtgagggtgatgaagcagtagtagtaggcgtggaagaaggtccagccctcgaagtgcgagaaggcgacggccccgagggccagggtggcggcacacgccagcagcccggccaccaccaggttctccgtggacacgcacgtccaccgcaggcccaggcagcacttggccgccaacaggaggcgccgcaccaccgcgttcagccgttcgcccaggctctggaaagtgaccagcgtcagcgggatgcccaggagcgcgtagaacatgcagaagaccttgccggagtccgtacccggcgcggcgtggccgtacccgatggtagtgatgacggtgatggcgaagtagaaggagccggggaacttccactggcggcc

SEQ ID NO: 341946 - DNA, 1000 bp, Homo Sapiens
tgcagacaacttgctcttttaatgtggaatggatgaccctccaatatttccccagagcaccccatgctcttctatcagggaacttattaaaatcatgtaacatgtttcttggtgacaagatttaggtcttttgtttctgtaacacatgccagatacttagcccggtatctggcatgtggcatgcccagtaaatgtttgctgaataagtgaatccatgtctcttgcttgccgctatttgcccactgaatccatgaagtgagttttcataatggataccactgaaaattcaaccctgaaaagaatgtcttcggttgtgggcccataaagtcttagaaatagtgaagctcctactgtcagtccttgaaagggaacaggacagctgctgtatgccttgagaatgggcaaaagacaagcgacaaaaagagcaccgaaggcacctacttgtccctctgggccagggcctcagtgtattggtcgggcttgacctggtctcctggtacatcttcccagtttttggtgactcccttcagtttctctgagagctccaggttacactccttctctgcttccaccagagctgccatccgcgcagcttcattctttgctagcctggattcctcctgcagaagctggatcttattctccaagagctcataaacatgctccgtctcctgctgtcgctcctcaaactggcgtcggagctcagcttcattctgactgttgagattctccacatcagcccatgttttatccagatgctgtttcttgtcctggagttctcgtttcaagctctccacttcaaccttcagctcaatgttccgcttgtagatgtcctcccggctggcctcatacttctgttgcatgcgctcctccaggaagtagatgcgcagcttgaggctgaagttctccttcttcaggtcattgaggtgcttctcaaagtctcgaagagcctgggtctgtacctgagggggtttctcaaatgctctcaaggaatatgtct

SEQ ID NO: 341947 - DNA, 1000 bp, Homo Sapiens
ctttttaaatgttattttatttgtagcaataaaataggcttcaagattcacatattattatctcttgcatttattctactttttagtcacatcaagtaactgcacatttaaaataattgctttcactggaggttgtagcaaaaaagtgaattccggaaatgcctatgtggacagtagcaacccaccctcaggctgagaatacttgctggctgtttcttgagaagcaactcctgagtccatagggcaagacaatgcatttgagtaaatgtgagaaaagaattgagaaagtggaatttcattctcccagttttgatgcagaaaagggcaaactgcccatagttatccaccccctccccaattataacaatgagaaatacaagaaaaatttgtaaagtttattcacaatgcagttgttgaaaggaataaaacagttggcaatggcatctcgcttctgaatttgatttataaaaacattagggagctctttttttgtattttgctatttcactggggaatgatgaagagagagtctttttttatacttataaatttcagactttgatgtcatttatcacagtatcgtctggaattctgaaaatgttgtgtcaggggtgatctgcgtatttctggagttgacatttgatagaagttgggtagccgaatatcatagtgatatctttttcctatatataccctgtcattcaaggcatagagtttatctgcaatgtcactgccaattagcactgaaaaaaggcgggagatgtagcgatgctgagcaaagagcagatataatttctttctcctccaagacacatatcgacaatcagtttctgcagtgagggttacctgaaaaatgccttcctctgtgggtctcagtgaatcccactcaggagaatccaggaactgaagggggaaaatgtaatgcagaaattcgccatcaactgtcactctgatccttcctgaaacaagcaaggagagtttatcaatggaagttttcccc

SEQ ID NO: 341948 - DNA, 1000 bp, Homo Sapiens
tttttttttttttttttttttaccaaaagaaatctttattcttcagcaggtagacaacatctgccagccctggtcctcagggccacactcatatgcactcacccctcagcagcatatcgccccttttctgacatataaatgcaagagacccaggaccctagatctttcttcaaacgcaagtgtctcacacacacttattttacaaatccactagaaatatggactcttatgttctttgtacagccatgcaacagaggcctagcatttgtgctgtgtctgtgggaaaggcagtcagagaccagtggtttccctgctttggggaagatggctcaacagttagtaatcccaggttagattgtcagaacagtctaggccaggactgagggctcagctgccagggctccccaacagaaaccactcccctctggctgacactgcttccttgcgcaccagtctcttcttgtcatccaggggtttggctaaggcccgaatcacctgtggtttgtacggcagcagcacaggggtgggcaggcgagtgagagcatgcatgcactgcagtgcggcgatccggacagccatggaagggctagagctgaggttcagaaacttggtgacgagggtgtccacgtgaagactcatgacttggggtgcttccagtagaagaggctgaaggcagctgagggtggagagctgcaccacacagtcagggcaggacagggcctccagcagcaaggaaagaagcgtgggcagctctggcaagagtacaggcttgggcagcctgttaagtacatgagaaagacccttcaagtagtttggcttcacatcttggggagcagcatggaagccctggaccaaagcaggcacattatctgtgaagaaccgctggcggaacatgatccgcacttcggcatggccagcacgagtcagcacatcagtgcagtcagacatgagcagagagaagccatcagctgctgctggacctaattctgggtcactcagg

SEQ ID NO: 341949 - DNA, 1000 bp, Homo Sapiens
actaaggcacatgacgtagaaatattgaggtacaaaatgcaaatttctgcataagatttttaagatattcattttggaaaatgaaggtgaacatcatctcccagaatattcagcttttagcttgttttttcttttggaccagttcaaccagcaacttgtacctagcgatacagtcttccttgctcttggacgggacacatctggctattttgtcccagcggtcagaggatccccttgggtactgctgcaacgccagttccagaagtttctgttgattttgagtccacggctcctctgcagaccgagctctctcttttctcaggctctcctcgtcgctggactcgttttgttctgctatgtcaaagtccttctgccgcttggctctggacttctcctctggctccggcttcgctgtagcctccagcagcctggctggcttccgcctccgaggccgggcatcagtggccccggtctcctgctcaccggagtctccctcctgctcctcctccgctgccaccccctctgcgtcctctcgctgggtgatcatgtcatcgggcaaggtggtggccgttttgatgggcctggaattctgaactgtcgatttgagttcggagagtctaaccattcctggggagcaggtcactgaatccttcagttgcttggctttggttgtcacatctgtcacagatcgacccaattcgtgggcaatcttttcccatcgacctggagtccctcctgggaacttaaccatacttcttgtcagttggctgaggtcctcttctgtccattcaggtgcctgttttttctgtgttcggttcctgttttccaaccaatcatccatttgttcctcaatttcttctatggaagttccatgatcataagactgaatatatgtagtttctaaaggtgtgtatacaggaaattcaggttttggttttttaactttcttctgtttttgaagtgtttcaagttcagttctagtcagtgcatcttccttttc

SEQ ID NO: 341950 - DNA, 1000 bp, Homo Sapiens; identical to SEQ ID NO: 160080

SEQ ID NO: 341951 - DNA, 1000 bp, Homo Sapiens
tttttttttttttttttttttttttttttttttttttttttttttttttttctcaggaacaagtttattgcagggaacacactaacctctttcataatagccaaaggcataaaaactacaaaaatatctggctctcgagtgtgggcagctcagtgtgggacctggtctgagtcatgacttgggctgccctgcaggccagaggcccgggagctttccggccactccccagagaggtccgtggcgctgagggggtgaggaagtgccttggctgcttccacagcgtgaaggccaaggctgaggtggagctgggctggagtggttccagagaaggcttcatcgaggcccttcaaggctgatggcagagccagggtagggagacgcctggatgtggctgccctggctcaactggctcctggaccaaggccctaacccaccagtttttttctccagaacccctgctggctctcccatagccaagtgggtggagcagagccctcctgaggctcccagtgcagacagacctccacccaaccacagtgatccggaggacctgctggctgcatggctggtgtgatgctgggaggagagccggggagggaggaggatggtaggcaggaacatgcctcagcacagatgggcaggtgggttgaccttccctgccctcagggctgggcaccattggcacccaacagggccgtcttgcggaagacctgcagggttgggttgtgcagcagcgtgtaggccagaccccagcgagccctgccgcggctggccccgggcctagctcccttggccatggagtcctttgtctgtagcagctgcatcccttcgtcttcctcccctggtctgaggctgtcctggggggctgccatggtcctgggtaggaggctctgcgcttgcaggagcagggagcagaaggctgtcatggctggatgcgactggctgacttcaatcttcaagaagtttcggtacgtgtagtagccggggtcgagagtggcgg

SEQ ID NO: 341952 - DNA, 1000 bp, Homo Sapiens; identical to SEQ ID NO: 160081

SEQ ID NO: 341953 - DNA, 1000 bp, Homo Sapiens
ttttttttttttttttttttttttttttttttttttttttttttttaccataattgactttttatttaaaaaattacacggagcaatttccagcttatctttttttataaaagtactgcctatatcaaacattttatatcacgttaattccattgaagagctgcctttttctgttaaggtactgattccaattgatgggatacatgcccttaatacagaaagtttccattatttattcaaatatcaaaattaagattattgagaagtttattgctttatggctgggcaagatgctactagcacattttaggtaaataatattctttattaaaaactatgaggtcattctgtttaaaactttcaagataattcacggaaaacagatatatctattcaaattaaacattaaagggccaggctactagctatagacatttatatgtgaagcagctcttttttttttttttctgagaccgagtctcactctgtcgcccagggtggagtgcagtggcccaatctcagctcactgcaacctccgcctcctgggttcaggcaattctcctgcctgagccccccaagtagctgggattacaggcgcgtgacaccacacccggctaatttttttgtatttttagttaagatggggtttcgccatgtttgccaggctggtctcgaactcctgacctcaagtaacccacccgcctcggcctcccaaagtgctgggattacagacgtgagccatggcgcccggccaatgaagcagctctttaaagaaataagacatgaaaataggtctgtcctggtatactacacataattgaaatgagtaacacctggaagaccaatattgttacgctatgttctgttaggatctttaaaaaaaaaaaaaaaaaactcagatatttagtagtccattcgtgcttaaaatattcatatgcatgagaagcctaaagaaaaaaaacacctctgtacatgatgatcaaaagaaagttataaattt

SEQ ID NO: 341954 - DNA, 1000 bp, Homo Sapiens
gctggttaaggaagcctttattgattccagagggttcccccgccaatatttatttttatttttattttatttttggagacagggtcgtgctctgtcccccaggctggagtgcagtggcacgatcaaggctcactgcaacctcgactttcagggctcaaaggatcctcccaactcagcctcccgggtagctgggaccacaggtgcgggccaccacaccaggctaatttgtgtattttttgcatagacggggtctcactatgttgtccaggctggtctcgaactcctgggctcaagcgattctcctgcctcggcctcccaaagtgctgggattacaggcgtcagccaccatgtatggccatttccccagattgtttcatattcctctttttctcgctcagccggcatagaacatccccctttacgcctgggacttcatagctaggcacttgcataggtacgcagcgcccacagtgaggaggatccctacaagggcagcgatggaaccggaggccaaagctgtgggcgcggggctccaagctgggagcagaaggcgagaattaggaacggaacacagggaggtctgtcgacccgcgtggagctcacgcttggtctgtgcgccctctcggggtcataactctctctgcccccttcctcctagtccccagggttacaggggtgcctcaccgagcatcagtgtaatgggtgccgagctgttgcggaccaccaggccgtcgagattgaggcgcgcgtggcagatcacgggctgccagaagtcgcggggtccagcagcaaactcgtaggtcaaggtcacgttggccagatccaggccggtgaagcgctccaggctttcggaatagatgacccggcttccatgcctcagggtcaccaccaagtagcccaccgggaacacctgcgtcacgtggcagcgcaaagtgtatttcctgccctttaagaccggaggctccaaaatcacgctgtggggcggtttgtaggcggtgat

SEQ ID NO: 341955 - DNA, 1000 bp, Homo Sapiens
gtacacacacttgcttagagttttatttactatgacaattgctaaaaaacaaatatttccctactcaatttcttggagctaaatcaaggtttgctatgtttccagtaaaaacagaaagctttccggagtccatgatctggccatcgtgtcatggctaccactaagggtacagggatggaatgtccctttgtcgctccagcttattggagggtgggtggacaaatgtcgacatggccacttttgtgcagtatctaggaaatggcaaagaacattttttgagacaggattgattactggctcaagaggattcttgagaaatgttctgctcttcatgaaattcacagaaacgagacattttcatctggagcacattattctgtaacagtggtgcttcatctgtttgagttccatgagcaaaaactattccgtagaagtaactcttccatataattggaaatgctcaaaaatgccttcaaatttttaagtcattttataaaatgtaaatactcctcaatgtaccacccatgttctttcttttttaaatggggcctctcagatttggctgcacatcggatcacctagggagtttttggggccatggaggcccaggtcttgcttccagaaggtctgatgggtggccccagggtgtggtgtgggcatctggagttttaaatgctcccaggtggttggaatgcgctgcaaggtggggacactgaataaggtaatgatctaggacatttatcttttcactcctgaggctacctggtattcaaggcttacgcaccctgactgatgactgatcccaggtggccctgagttgtaagacggtgactgtgagtgggggttgagaggagggccagatcctccaggattcagagcagactcggtgctgtgtttgccattgagtgtgccggctcttcaagccttgacagcaggttttttgacataaaagaaccttctgataagaagattgaatccacggggtagataagattaaatc

SEQ ID NO: 341956 - DNA, 1000 bp, Homo Sapiens
tcactgttgagcccattcctacggttttttattttaatcctcagtaaaatcactgggtgctctgtagcagtggtgctcaccatccatctgcccagcactctctcgatgtgatcaggtaactccgacccctcgtgtggacatctgcatttaactctgggtcttccaggaacagaagcattcttacccaattctgcatgataaccttgcttcatctaaacccacaactctctttctctgtcacttatggtcaggaatccttgaaacattttatttttgcctaatcctttatccaatgtaaacatatttttaagctgacctatttttttctgtgcctagaacaaggaaaaaaaatagtcacacgagtctcccataggtttatgaatattatttacattcttgggtccgctcagtcacaatttccaaataaccacatgtccctgcaagttgtaagagcaagggactataaaccacttccattgcattcaaggcctgcttggatccaagaggcacaaatggagtcttaatggttaaaagacttgagatgtcctgtcaagaaagaaatacatggcactctcatttcagacgttcagagcagtcatgcacagtcggcagcttcacttccattttcccagccatggctttcactacctgctaatgagatgatcccttattttgaaaacaactattcctaggatgacaagagctggaataaatgaatacaaaatcagaaagttcattgtgaatctagatgttgcacctgggcaggttttctcaatgaattgaattccttgagtgaaggcacacattggattagttgtcacagaaacatttgagctgccacaagtgaaattcagtccgtagaactcattgactacaagaatctcactgcaatatttttggaatgtaaaataactgatgattttaaaaggaatgggcatttcttgtatgtttctgaggaatccagatccaacaagcacccccgcaatggacagcagagcca

SEQ ID NO: 341957 - DNA, 1000 bp, Homo Sapiens
tttttttttttttttaatttgaaaagtcattttattttttcataataaaaatgcatccatgatctgatgcaattcagcagtgataaattgaatgactagaaaaaagcagaaatgtaataaatactacagattataaatacatgtgtaaaatatggtagggaaaggaacaaatgaatagaataaacatagaagagttatacaaagcagcaatattataatttaagctttacatggacaaatttttctttgaaaaaatgattttttgcattggcccattaataaacatagataaataatgaacatggccaattaataattcgtatgttaaatattattttaaaaaccctctttactatatttagtttcaagaataagtttgtaaataatcttatttgaataaaaaatgacaaggtcagtaacagctggaaagtgccaacgaagattaaaaatagcaaaggtttggctgaggcaggagaatggcgtgaacctgggaggcggagcttgcagtgagccgagatcccgccactgcactccagcctgggcgacagagcgagactccgtctcaaaaaaaaaaaaaaaaaaaaaaaagcaaaggtttattttttgctttgtcttttgttgtatttttagcatgagaattgctgtgatataacatctgcatcttttgctaactgtgcaccttactttgtttttgatcatttttcctttagctgaattttggaatgccaatagcacttactctttaaaaatttatttattgatatataatatttgtacatattttgggggtgtatgtgatattttgctacctgtctacaatgtgtaattgtcacatcagggtaattggaaactcattctttttcgcatcctcacttctagaagactattcttatcccatttttgtttaaatgtttagttttttctttttgatttgattttaaatcatttatttttctgttttgtaatacgtcagcagttttcattcttattcttttttcct

SEQ ID NO: 341958 - DNA, 1000 bp, Homo Sapiens
gttttgttttttttgcagttgtcagtcttcatgatccattctgtggcgagctgggaaaaaacgcagttgctaagtcaacgtctgaacagtgtgaggctcctgaatatctcccaggagtccctgcgcaactgtcctgagcatgagatcattgcacagagaagacagtccaccgcgcagcgctgactatctacagaggtctgagaggggcgcgtccctcttgtgtttcctctttttgccatggtaatactgattattggatttgccttgatgttgtttgtttgtcatcaaggaaccatggcttgtttgagttgtaccttggaagcctttgctggaagaacgaaagagccttgctgatccatgctgagatttgttggtgctgttggatgtgttagtggtttgggtgctttgcattttcccaactgcctgagaggactccaaggatacatcttgcgaccctactcggttcccagtggacggacggcaaagcagctgtttcagggttttgcatggtgttgcatcggaatctacgtcactagagctggactgtgtggcagaagaggacgacactggacctgatgaagagtttcatttccattgcatgaaggctcaggtctattcttcaagccccactgctttgatatccaatctctatatgtggcaacttcatctgttactctaattattctacctagtatgctttctgtttcattgttgggatagtactttgctattggtgatacagcatgactcaaaacaacgtaggcataatcaaaggcctgcttcacttgcatggccccatatgaactccttccaacatcgttacctggttgtaaaggatcttcgatataaagcattgatggcctgtagccatctagcatatttttctgtacttcatctttggccacatatgaaccaccatcctttatccggatgccagtctttaaataattgaagtgtcgtccatataattcaaaaaattctattaagagaacaccatagt

SEQ ID NO: 341959 - DNA, 1000 bp, Homo Sapiens
cagattgtcaaaagcaatttaatttttggaggaaaaactgcatacgcagtacaacttatatctcaggcgaaatgtctcagaatcttcctgctcattggacagaaactcagcttcaccacattgccagccgggagaccatggaagggaactggcgccactgcccccagctgcccttcccaggggcaacttcaccaagatgtggaaatcctgggcccaccccacagtcagtcatcgctccatttcttcctggcaccaccacctccatctggcctgctccccaaccccccagaagcaggtgggcccaggctccaggccagtgcccccatcaagatcagacgtaaggcatcttcccaccgtcgctgtgctgcggggacttttccaatccttccttcctctctgtccagaggctgccaggctgagggggccaccgtccaggtggaacaggcacaggcatcggggaatcagatggtatcagtggggatagggcacagcactttcctgggagccatgtgacgccagatcttcctctggcagttcccactggctgtgggaagtggttttcataaagggggccaacttccaggaacatctagggctcgggagcaacccagcattgacagtgaatcagaatccacctagagctggccatggcccaggcagggggtgtcttccccacagcccccaggagtggctgcacctagtgggcgcagcatttggcctgcctcgcgggccccttgttcagagccacagctgcatccccccgtagagcctggccctcctcgtcgcttctctgcagtagctcttgggccactgtattgaacacctccgacacctggtggttcagtttggccgaagtttccatgaacagcaacttctggctgtcggcaaactccttcccttcctggaaggtcacctcccgctcctggctgaggtccgtcttgttgcccaccagcatcaccaggacttctcctgggtgcagctcctcctccaggtccttcag

SEQ ID NO: 341960 - DNA, 1000 bp, Homo Sapiens
tttttttttttttttttttttttttttttttttttttttgcagaaaaaaacagctgttttattcaactattcacaatagagaatatttataatctagtcactgaaacacgcatttcttaggccactcctagaatatgggaatagctgttacataaaatactgttttataattatattaataagaaaaagcattttacctgttccaagaggggaaaaaagctcctcattgagtatcctttgtctctagatcagaatggtaaagtcttgggcctggttcttctaccctggagcaattcttccccagtcaccctccagggaatgtcagaaaacgtgaagaactttagagactagaatcatattcaaactttccttgaaagtagctataataaacactaacaccttttttaaaaggccaaattaggtaacttctttaggtggatcatccagcaaaagccaatgaacctgaatacaagctatttttttcttttctcaaatatcttcataaaaatatattaactcaaatttagaatgcttctcatttccatccacagtattgaaataaaaatatttaaagagtatttagttataaaaagtagctaaatggtaaaatgtcttctcatggtcttgatttttctgtgctctatgccctaattttaatatagcaactgcacttcagtaagatccagtccaaagatttttttaaaaaactataatgtacgtgaagcttttaaaaggcagcatcatcaagaaagtaatttccaaatactggggagaaaaaaaggcttttgatctccttgatggaatgacatattcagaataggggcagaaccctgtgccatgcaaagggtcattcttcctcttcttcctagacattcttaggaagctttccttgtataaaaagaaaagatcctaagttaacaactcatctttatgtacatctgcacacacaaatatacaagaaagtccactgacttcattcctctactagtgtagtgatgtt

SEQ ID NO: 341961 - DNA, 1000 bp, Homo Sapiens
cattgtaacactcgtttttatataaatattcgcaagtcatgttacagaagaagccccaccagggaaaaaagtcaacgttagggttttgttagattgacccctgccttctaggttgggccccagcctggaggcgcctgctgctttgggaaggctggggttgctgccgtgaggctgccgaagaagctgcctgtgtcgcccacccctgggccgacccccttctttggtgtgtggtacatggtgaccttctctggccacccttagcctggggcagggttttggagaacagggttcagggaagcagggcccaggagtcctgggggcacttggaaatggggtgaaggggactgagccattaagaggtggtggagtctgagatttagaggctgagcctttgggggtgggggcagagtgaacgggaacatgttgggggaaccggggctgtcagccaagtaggaagcttctgcccttccctccagcccaggtccccaggtcctgccccctgttggtcatctcctgctggccccaccttcccagggagaagcctgactgtcccttcccggctcttccccctgcagtcccctttccccacagagaggccagaggctaggaacacagcaccagtctgagggtttaattaaccaggaagggaactgttgggaggggcacccctgtaaaaatgtacaaaaggtcttggggctatgtgaaaggggtgataaatatgtacatggaaccccccttccttgagcccctcctcccccagccctcggagggcatgaggacttgggtggtaggtgaacgggagggggcactttggcctctggcttagtgagcccttggggaggcaggcccagggcctagaggcccttacaggggcaaaggtgtacctcaggaggccccatggcccccgagatgagccacactcccatgcacacgcccctctcccttctctagaggctgtgacctctgctctcccagtgaccctacactccatgtgatgctt

SEQ ID NO: 341962 - DNA, 1000 bp, Homo Sapiens
ttttttaggcgctgctaagcaaagaaagccaaagaaggccaaatatctttattgcctccctcccatccccaattccctgttccccccaccaagtcctgctaggaaccatccttagattccaggcccagggactccctccgagtaccaggccggtatgctccctggccccgaggcaggcgagggtaggaagaaccgggtgtccggcctttagagcgctcccagcgaacacagtcccgagtcctgcggggtgggggcccctgccagctgccaggccccttctcttgtggaggaccttcaactccttggctatggggttctggctttaggtccatgggctccttgaggggcccctcaggaggtggcagttcctgggtgtcacgggtacctttaggggcgtggcactcccctccctttgggtgcctccgttcgggctgtcgccagggacctcgactgggcttggggggatctagcatagctttctgggtttcgcccaacctttgctgatttgacctggtccctggaatcttctcacatatgtgctgggtcgccacaggcagaggaggtggcaaagtggattggacggctggtgaggtggatagttctgctgcaagggtgctgggtggttgggatcctttggagacatctacagctgactcaggttccgcaggggcaggaggctgctgaaggctgatgaagtatcggtttcgctcagcctcaaggtcaatgattcccccccgctcctgctgcctctggtagagccgcttgcgttcttcttgctggcgcaagctctctgcactgggctggtacagctccatgggctgttggggttcaggggctgctttcagtgaggcaagatcatacacgaggggctctctgcacactggacactgcacaccgactgccttctgtttggttgtagcatgctgccgttcctgttcctgctcctgtccttgtgccttcagctcttgctccatgtgctggatgtaccgagcaaggcagt

SEQ ID NO: 341963 - DNA, 1000 bp, Homo Sapiens
ttttttttttttttttttttttttttttcaggattccagattttattttttagaagattgaaaaaacacacccaggacaacatttctttgatcaataaactttcaggaaatggaggaagctgttttgggacacattcaaagctagttaacttgaacttggaaatagggttttgacaatccaactatgggaaacaaatctctgaacaaattttaaatgaaacctcacccccccaaactgttcaagtggcagacaaaataaattaccataaattatatgccaacacaccttttaaaaaacaacaacagcaacaacaaaaacccaggagtctgaggatttccttagctcctccaggaagtgtgtaacactgcttctggcctgcaggctggggcggatcagggacctgtcacacgtcaggatagttgcagtaatataccgcggagctggcgtcggacaccaccgaggaaatggccccgtggctgtcggggagattcacaccggagtcatgcccctggtaggggaggcccatctcaggcttgcacacgaagtgcagatactgttcaaattccgtgcggtccacctccccgaggagctcggcgggctgactggggtccgtgccgtcccggcagggcagtgcctccggagggggcgacggctgtccggggcccggggggtggtgctggtgctggtgctggtgctggtgttgcggctgcatctggaagccgcgcccgccgcccgccccgggcgagcccatcgcgccgtagtacacgtgaagggcgctgggtggcgccaggaggcccggaatcgagggacccgcgggctctgggccgagtcgggggtgcatgggaccggcgggaggctccggggggccagcgtagtccgagacctgcgcgtagctgtaggtgccggccgccgggcagtccccgggcatcggggcggcgaagaaagccgggtcggggtccacgccgtccagcggggacgtgtcgggcgtgggcaacgggt

SEQ ID NO: 341964 - DNA, 1000 bp, Homo Sapiens
tttttttttttttttttttttgactccagagtggactttttatttcacgatgaccatgtggaaaagttgggggaaagagacccaagtctgtctgtctccttggttggggcccactggattttcatacatggttcacacaaccataagcccccactggctaatgtcacaagagttctgagtgttgggatatgaggaaagaataacagtgggaaagtgttcggggcagatgtgtttttttttaagggggaaagaaagaaaagatttcccctccccaaatggtaccctgggggcagcttgtttgttcatgtgacattgattggtactacttctgttctgattctgcacacttgtgactggaaggagcctggttaagagctggaagtgtattttgctctggtttggggtcttgccctcttccaagagaccagcaagtctgtgccaatgtctgtgtgctcccagcagaccagcaagactgtgccagtgtctgtccagccactatgggccagagccctgcccgtgatgaggcttttcccagggcccagggactttgctctgtggttaccaacttcttttcttcagtggggagggaggctggggccttcccgagagacctaaaagattgcccactcttggcggcaagtgcaggtagttgctggcctccgaccatctgcttcgcctgcttcaccaggcccggggattggctaagaggccctggggtctgctcagcccctgcagaagctcttcctgaggcctgagttgttggctcatataaaaaggccttggcaggaggctgagaaagaagtctggcctgggtgagtgatttaacagcttgccaggggtcctctgaaggggctgctgctttcccagatgtctgaagaggatctgacacacagcctttctcaacagctctcggcatatgccccagacctttgctggcaggccatgaacttgactccaacactggcatcttctcatcagcctgtggtgtgacctgatgagg

SEQ ID NO: 341965 - DNA, 1000 bp, Homo Sapiens
ttttttttttttttttttttttttttttgtggctcaataaacttttattgttttgttatttatttttattcaaaagaatttgtttccctatcacaaaaattagataacaccaccaagagcagcaatgtccatggagttacattgatggtggagagttggctgggtattcccaatgtcccaaaggtcataaaggagggaaaagaaaaaaagaaaaaaatattcaaaacaaatccaaaacccatgatgactttggggagagacatcacatgacattttctgtttcttctctcattgtcagctgcagatgtatttcagcaggatcaagtacaatttgacttgagttaacccttcataccaattctagcaccttaattgtaccctgactgttagcagcaatcagcacattggactccccatctggtagtgccctccagcacacagcactaacaaattcatttgtatcatcttcttttcggtctttgtcgagaacacttttgactgtatcaaacttaaaagttagcaaagtcttagaaagtcctttatagtacaggtagagagagttattttcacttccacaagctatataatctccattggaagccaggcctacaaagtttttttcattgatatgacccttgaaggaacgtaggcagtatggtttccctacattccacagttttagctgactgtctgttgaggcagagacaatttcctcaccactcacaaactttgcataagagactgctttacggtgtcctttgaataccatgattggctgtttagtgttacgaagatcatagtagtggacacagtgatctgcacagccgaaagccaaatggtatctggaagaggggctgaatttaacacagcacacattagcctttgcctcaatgcttgccactgagttgtctagattggtagaccacagcttcacttttgcatcatcagaacctgaagccaagagtttaggatccatcaaattaaagtcaacactccaaca

SEQ ID NO: 341966 - DNA, 1000 bp, Homo Sapiens
ttttttttttttttttgcaatttcatagtttttattcagtggacttaaagccaagaaaccatcccaataattatttacaatttaataactgaatgattatcagatcgtgttatactgcaaaactgttcttacaccatgaatgctgatgctgtgaactttggatgttaaactggtaaaagctggaggcttcaaatggcatatgcaaatgtaaccaaagcctgaggactatgaagaaagaggagtttctaccactcggcatttatagtttttatatgcattgcagaagcatggggaattaagtgatctctgaaaaaaatgctttaaaaaactgagtatacatatagcctataaggtaaaaatccaagttacaagtgtattaaacactggcaactatgttatcagagggaatactgaattatatatatacataaactgtcattaaactgtgattacatgatacttcctaccacagcttattagactgtacaacagaagatattcctgtggctctctaaggctccaggtttaaaagaatttagtattttccccttggctcaaagtctaatcagtatcattctataacataaatcagaaactacgctttttgcttttaaggaaataagaaacataattgcaaccattacagctccaacatacactgcaaaaatgatatctacaagcagttgccattgcatttgaaaaatgcattttctgaataagcttcacttagtaccaaggatgcctttcaagtcagcttctacattctgaataaagtacataatgggatttaagtaaatctttagaagtcccggagtttgccttttctaacattttcatatcaggtgaaaacaattttttcatatgggtgattgtatttaccaacatgagcaaatgtctacagaagaatgcgctgttctatatgtctgtaaggaatctgcacttaactggaaactacagggtccatcagaaagttaaatttaaaaaagatcagccatagcca

SEQ ID NO: 341967 - DNA, 1000 bp, Homo Sapiens
tttttttttttttttttttttttgtaataaaaatatttagtgaaaagacacattttaactcccatttatgaattttaaaaatacaaataaaattttatcaacctgatattcagcctataactggctcaatacatagccttatttcctaaaatcatattgcagcatcttctgaaaaactaaatgcaattttataccttcattagttatgttaatagaggtaaatatttaaacagtacactcatccctgggtctttaaataaaactgaaaagtcttagtgtaagtttaaaattttaatatttataaatttaaaaaattttacacgtgctgagtggtagcagtgctaacatttttgtgaccattaaaccacaaactcactgcatagagcttctttctttgtacagataatcaaatcacaataccaacatttgcaatttgtaataattttatgtggtaaaagacaccacaccaggaagcctgggctcagaaaacacttgaggtcagatccctagtaggtacatagtgcagatgcagtatataatttcaggctaggaaaattagctactagtatgtatctgacagttcctaatagctaagaggcctaagaatgcagacggggagaaaaaaaaccaaaaccaaaaaaaaagacacctctccaattgctgggagggcctgggaataggtgaagatcaaaccacagtgggagaggagggtaaagatgtgagcttcaagcgggtaatgggcaagccacacctcccagttcctaggagggaatcgccacggccgacttcagcattctcgtctttactaagacttacccatagagaactacagcaggaaaccgatttcttcattcattctctttaaaaagtatgaatgcccagtattaagcttctatttttatttgaaccaaacatattctttggttaactatgtcatgggttctcactataatcaacaaagcatacttcatatattttatatctaaatgaaaatatgctt

SEQ ID NO: 341968 - DNA, 1000 bp, Homo Sapiens; identical to SEQ ID NO: 160086

SEQ ID NO: 341969 - DNA, 1000 bp, Homo Sapiens; identical to SEQ ID NO: 160087

SEQ ID NO: 341970 - DNA, 1000 bp, Homo Sapiens
acgtgatttttctcctttaatggcactcctgacagatgaggaaacaagctcagagcaattaagcgacttcccaaggtacagagctgctgcttggtaagaagcagagacttgcaactcctgggcccaggttcctgccctggagcctgttcctggatgccctgggctgagccctgcacgtcagcagagcccatcacccaaccactcacctgaccccccggccacagggctgtgcccagtctacacagacacacagcagaaagaggatggccttcaggtttccatttaatggccaagccagcactgccaagatgtcctcctgcctgagaagcccacccacgctggcacccctcagcctcactagcggcatcccagtccagtcctggtgtggggcctcatctcagctccttcagcaagctgttgacagagcccagcagctcctggaagtagccctcgtcctcaccatcctgcagctccaggctggccagcacctggtactcagcctgcaggctggccagtgtcctgccgagctgggggtcctgacggtagcggtcccggcaggtggtcaggaggacgcccagtgtctgcagcaccttctcacgggcatcatgctcgggcagcgccaggaggtgggccgtgatctcgcaccagccctgttcccacaggcctggcaggaggtgtacctggcgatactgctgcagcttctctggggacatctcctgggtcagctcagcctcctcctcggcgaacatcttctccgtgaccaggtcgtagagcagtgtgaccacgcgcacggcgagcacctccgtgcccttctcctgcaccagggtcctcaggacctgcagccccccgagcttcaggaactgccgctgggcataggggaagtggcgcagcagggagcacagtgcaaacaggaccttcttctttgcagtgagcggctgctccgtggccaggatgaccagcagcttctgcagggctcccccttcgatggcctccacctgga

SEQ ID NO: 341971 - DNA, 1000 bp, Homo Sapiens
ttttttttttttttttcgtaacaatgtattttattgtttgaccaagctctcttcagagtacgtgagttattacacaatataaaaacaatagcctcctattcaaaatgaattactctatatttagtaagtcttatttttataaacaaattaaatgtcatgtttagatgcattttatattcatttccacacctttttatcctttcttactaaagcgatgatttagtttctacacagtttcgtcactgtacatgaagactggtaaaactgcaaataagaattacaatttgaagtcacagaaaatattttaaatggctaattctgaagaggagacaagaatccattttggacatgttctcagttttgtaaatatgacttcactatcacattctctcatgtgtttccatacccaccttttcttggaaattatgggcagaaaatggatagaaggaaggaaaaggaatcttgagaaatttgtttggaggctgcattttaataataaggatgacttcactttatctcttttgtcatcaaaggaataggaagaataagagattctcattatagttatccacctcacctaacagtaatgatatcagaatgaaggatttaaatgaaagtcaaactgacaggggaaaaaggcatctagcactctagtgtatttacctgtgaaaataaaaatccagtggaaaactgacatgtgtttagacattgaataaacaagttattttaaatattaaaagaattttcaatttcaagtcttaactgttttacatttcctcttgtggaaaaaagaaaatttttactaaactgaaatagctttactattatcagttgaaatgaaactaccgattcaacttaaggaatgtgaactaaatgatatttcaattaatagcaatttttaaggcaatttctgtactaaacactgaaatgagtagtaataaattctgtaatttattctaccattttgaaatatggcagaaataacatccagttcaatgca

SEQ ID NO: 341972 - DNA, 1000 bp, Homo Sapiens
ttttttttttttttttttaggctgctctgcctatgaagtaggcattctttattcctttactttcttaataaacttgctttcacttaaaaaattttcattgcattattgatgacttggtcttattgttatcattcatgcagacattaataatcagtggtgataggtcaatcattaaataagccttctgggaatatatacattctaagttgttcacacaatagcaaaagtcattttcattgactttataacttaaaaatcatctggccaatttcaaaaacaagtgagttagaatacgttagcagtgaaatattctgtcccatttaataaactaagatgaattatttcctaggaagttgagtttaattcctttgaagcctacacagtggatcaaccatgtgcagtttgattgtggattttattttttattgattacggagttttcttaaatggcagattaagtcaattaatagaaaaatggagatgctataaactaagaaatatttaaattaagaaatgttggaactcatgaggagtaaatgtgaaaatgaacaaaactcagaacaagtgtgtccctggtgctaacggagagactaacagtggacttccattgctgcagtttctcaaggtttccttgtttagtgtttctccttcagccagcacagtgagaatactctgtcttcagctggcaggggatgtggaagaggcttggaagcttccaaagaccaggattgagggccacctccatcacttctgctccttggatgcctgattctatttctcttagaagattccagaccccaaaggagatcatgtgacataagctagaggttgaactcaccatggttgaacaaaaactctctgaacgcatagtgctgcttcacagctcactgcaacaagtcaaaaattccacttttatggcacgtcacaccgggatcacatataatcctagattatctttatttgttctataatttaatagtatacctataaaataattaca

SEQ ID NO: 341973 - DNA, 1000 bp, Homo Sapiens
ttttttttttttttttattttttttttttttttttttttccaaatgcgcatttattatttgcacagatacatacaaattattcccattttaaaagccagaataaaaatatacattaaccacagaagtacttactctaactggaaagaaaatgaacatggctctattcaaaacagcaataaacacaaaaggtcaacgtatataaaacatgacaagtgtacatcttatttttgacaaaaataagttccatttttacattaatgcgtcatcagcttctatgttagatcctctgaccttatttacatttactatgaaattgctgttagcatgtcactcaaagccactcaactcagagggtatcaagtcctgagcttaagtaggaaacaaaactcccaactaaaatttgaacataaataattgtaaagatcagagaatattaaaatgtttaaaagtataatatctggtacataaataactcaaaaactaataataaaggtgtacagactgtcaaagaaaagaccatgtaagacaagaaatatccctggaatcaaactgatttttcactcattcaagatcatttgaaggtgtgaagctaactttcattgttcttaaaatcctaggaaagccaaattttaaaaaaatagcatatgacaatgcttaagtttaaaaaaagtttctcagcttagtctccaaaccaggaagaaagtatttaatgattaaaaacaagtatgaactggaaagatattagactaaaaggaggaatcataatgagcaggtaaaaatattaaaggaaagctttaaatgccccagctcaaaagagcattgctaattggccatccaaattattcttttagattattttagccaaataaaaataaatttacagatagataactgaggtccactaacataaggtagaaacaaagtttaagctaaaaattaaatctatattttgttgcagataaatgtgagatttacctacagtcattttctgctgatgct

SEQ ID NO: 341974 - DNA, 1000 bp, Homo Sapiens
ttttttttttttttttttttcaattagtaaaagtactttattttcctcttgtatttgctttatatcttgctttacaaagttacgaagttcacagctttataccaaaatgtaagaaggctatttgcttataaacatttttgcagtcaggtgtcatctgatttcattcttctaatccatattcaatattaaaaaaatcagaaaccaagggtgctggagcagctctagggcatatatttctcttaaataggagaaagattttcaacagcttttcctccttgaccccctcctttcccaatttatttgggtcactaccttgaatttagagtgaatctgggaaatgtagtcaccaggtaacccagcagggccatatacttgggcttggaggtgaggttagaggttactgtctaatacagtaggtctggtttctatgaggagctcatatccacttgcataaggaaacctagtctatcccaaatcacctccaccacaacttctattcctgtctattagaccacttctcttaaacccgaggaacctgatgatttgggggcagggataaaaccattattttataaatgtggcaggtatggccttcgtaattctagaagctcccgtttaggtaacagaaacaaaatttagatgtaagcataaactgcagttatttgagcaaaccagagcatatgtgctgttcaaatcccacttcacaatatacttcaatctcacctccaatgaattctcttccataaaataaaccattccactaagtatatacctactcccaccaaatcatccacatgcctcatcactaaagttgtcccttgtataatctaccagcaaaaagacaaaataaaacctgtgttaagcaaataatcacttaaacagtaataatattgcctctaaattaaaggtaagtcaggagctgaacactcaactgttaactcttctggggaagaagaaaatttttcccacaaaagcaggagtgcagtagtaagtaatgact

SEQ ID NO: 341975 - DNA, 1000 bp, Homo Sapiens
tttttttttttttttttttggcttttaaaatttgaaatataattttactttttatttttacaatacagtgtacagtatgacatctcaaaataacagtgcagatacaggaaaagagtacaaagggggattaacaacagatgtcagaaggttacctttattaaggctaaatccctgctttatattttccacacattcacaaaattacattcaaatcattccttattgatccttatttcttaggccatgagaaaaggaagataatccagacattagattttcatagaaagcaaatctggattagtctaaataatattctccttccatttgttctgacaacgaaaatttgagaaacaaagttatgcaccaacctaaaacttccttatttggattttccaagtacatagcattagttattgatatcatttctatattaaatggtaagacctcccccacactggggtctccagtcagaaccacagagggacaggaaatggaattggccagagtggctgtacaactaggtgtacagcaaggcttttttccatattcttttgtggaggtcagcaacaactcagttttcactttaaggactatgttgaatatcagcacatcctcatcactaggatttagaaaagtttaggacatttctatctaccattgctgatgaggaaggggagaatgattgatagacttcactgaccttgaaatatttatcatctcagacttcctaaaagtatggcatggcatcacctctgccttgatacaagatctgcttgttaaagccatgttcctgaatcttgacagcacatggccctagtgcaggcctaatgtctacagcaggcacaagagccactcactgacactacctacaccctcactctaacttaacatgaactgccaatagtttagctcttggagttgaaaacagttgtcagttacaataagcaggatcacaaaactccattgtcaaccatagactacacttcattcctgagacgta

SEQ ID NO: 341976 - DNA, 1000 bp, Homo Sapiens
ctaggtgatgtctatattataaaaataaaataaaatatataaatatgtaacacaaacccagtgcctattgttaaataaaatatacaataaaagcagaccttttaggaagattgattttaaaatatgctattatgatttaattataaaacacttgaaaacaatcttgagattaagatgaaataaccagatttctcagccaataaaaaggtaagtgtgtagcattctgtaactggatacactgacaaaaatgaagattacaattttatatcaagttgctcacttagaaattcatcagggagttctgaaacattctctcctagtatagtactttaatataaaaatattgccttttttttaattagatccatcggattgcacagtactgtttcaaaactctattaaagttgactttagtgattacagacagaaaattcctgggaagtcaaataatctcttctagtaacataaaaaatccattatcaatttacaatggaatttctgtgtaaattactttgcataaggaagtatatattttaaaaaatcatctgttatgcaacaacgcatataggggttatgagtatgtgtatgtgcatatgtgaacaaacatgctgacatacacacagaggatctgcacatttctggaaattatttttaaattaataaaagagaatgaaatcacaggagtgtgtagcaggataacagtcttttttttttaatgacaggataaaaaataaatgcccattggaatagaatattcaaacagtcccagaaactatacaatgtaacttgttagatccagcaagtaagatgtcatgtcaatgatctgatcaagaatacctgccctggtcactctgcggatgtttctgtccacttgttcacattgaggaccaagatatccttttttacagaggcacttgttcggtctaacacagacacctccatgacgacatgctggctcacattttgcagttctgcagaagtccccctcccagcctggact

SEQ ID NO: 341977 - DNA, 1000 bp, Homo Sapiens
tcaggtaacaatgagacatatgcagctttatttaataatctgtaaaaagtcatactctggcagagtgatgcattccttatctcagcagaaagcaaacagtctgtctgaaaagccccttcccaagatttggaactgtgtaaccctgagcttacatctcaatgctcccaagagctgggctcttgctatgtggtagttggtctccacaattctctcaccctccagcaatactctctgtctggctgtgactccctcacctaacagtagacatgaggctgaaaacaactttacctggacagggctacccctacagattggccctttctctcctacaaaagggagttcataggattaacaatctttctaatggctgggagcaatgactcatgcctgtaatcccagcactttgggaggctgaggcaggtggatcacctgaggtcaggagtttgagaccagcctggccaacatggtgaaactccatctctactaaaaatacataacttagctgggtatggtggcaggtgcctgtagtctcagctactcgggaggctgaggcaggagaatcgcttgaacccagggggcagaggttgcagtgagccaagtttgcgccattgcactccagcctgggtaacagcgagactctgtctcaaaaaaaaaaaaagactctgagaaatgggttctgtatcaatttaatttggcttccattacatctactgaaatcaaggctatacttgttaaacatgatactgtgttaatggctgttcctctccccccacccatttctcccccatctacatgctttttaggccaaacctctcccctttctgggaactgaggaatggagacacactctctgtcacagacctaagaggcacttcttgtggatatgtggatgtctggtatcagatactgcagcgacagcagttttgctcttcagagcagaggcctggcattttgtttccaccttcctgtgctaagagagtccagtaattaaaccacattc

SEQ ID NO: 341978 - DNA, 1000 bp, Homo Sapiens
tttttttttttttttttttgtcttttggttcccaggtttattgacaattactcatctatttttgactccccgagtcccagctcccaaactcgctctccctactccaggcttcacggtagtcccagaatgtaggaagtgggacaggatagactttaacatcacccaggcctctggtttccaaagcattttttttctttaatgcagtaaaaccattcctttaaaacccaaaatctctcatggaacccctacgtatcaaatatataaagcaggagctgcccttgttcagggataatatgtggggcttatggctctaagaaacacagtttgacattcactgctctccttacttcagttacctcatggtatagataaatgggctgggcccagagaggggccatgacctgtcctgggacacgcagccactgaagcctttagtccagtgctccttccacagcaccacactggattctggagtctttccagccagggcagaggaagctgcaacagtgccacgataagagtttctgggtcttctggtacctaccctctcagactgctggtcctagggtcatgtgaggggctggctggagggtggactggaagtgcatgggggttgggtggggaagccaggtgtctgtgttggaaggccagtggggctgggggattgggggctggatggctgggaaggacttcccaggcctgcagtggtctctcctttcctcaggatgaggctgctgagctcctggagcagctgttcctctagggacccccgtgcctggggactgctctttgaaggggggcctggagggggctcaggtggcctctcctcctggccaagggtgcttgacttggagagaaagggttgatccaatgacttctggctggtgagggggttctctggcttcactgtccactcccgtgtggtggagaaggaggtagaagtgtcctggatcaactcagggaaggcccctacttcctcatacactggctcctcgtacac

SEQ ID NO: 341979 - DNA, 1000 bp, Homo Sapiens; identical to SEQ ID NO: 160088

SEQ ID NO: 341980 - DNA, 1000 bp, Homo Sapiens
gtcgattttttttttttttttttgatttttaacaaaattttatttagagcattaggaaaatcatattcaaaacacagaaataatcagactataacaatgctgcatagatagtggtatacaagttccctgactctaacttcttcctaacttaaaagttcaattttcaagtcaccaggtagaaaatggtggaggcattatttcctctttctgaggctataaaaaaatggcttcaatggtgagaaggcaaaccatttaaacaatgaagattagattataccccaatttaattctattcccttcttgtttgttatttctcatagatgaaaatttagaatgtaataattattggaaaggaataagaagtgaattacctcttaggagataccctgatcagtgcctgctttaatcagacaaaacactaagttttaaaaattacaaccacaatattatgcctaactaaaattgccaatatgaatacttttttacagaatacattacatgtataccagaagagaaatacttgtttcctatcctctgaccttcagtagaaaaaaaatgttatcactaacaaggatcagaaaaataattttcaaggcagagcattaactcaatggggatcaaaatcttttctgaatacttaaaatagactgagtcagtcaacgagaaattgctaaatttcttctatgagagtacttttcaaaaaggaagacaatttattggaagaatttgtagctggaaacactgttcattaagaaaacattaagttaccctgagaaagactcttaatattaccagtgttttcagggccccctgaccaacgcatggaagagcaacttgtaggctctagccttttaacaatacctacataaagaatattttgatctaaaatgtaacttgggttctctgccacactggtaataagtcacaaccaagacatctgaatgtgatggagtataagcaaattttgcgtttattttaggctgccctctttcttttctaa

SEQ ID NO: 341981 - DNA, 1000 bp, Homo Sapiens
ttttttttttttttttttcaaaaagactttgattttattttgtgatctgtgtcaaactgcctcattctcagtgcaggtgatccctcctccccagaaacaagaactgacaggtagggtctttgtgaagtcatggcttccacaaggccccagggaaaccccacacagttctgagagttgatgggaatcccagcaaagatggggtgggtgggagacagtgacaagaaggggtggtggtcaccagtcaagaggctgggggttggaaaaccctgtctttggccttgctcagctttggggctgccatgttcatgatggagatgggggactgaaatttcccctgacctggaagtaccccttcggccaggcatggctttgattctctgctaagggctcagctgagagaggagcaggaaaatgtcatgggctggcttcttcacaaggcattgctgctgatgctccggagtccaacaccacgggcaaattgctccagcaggcccccgatggcaccggaaggactgggggctactgcccgaagccccactgtgctgctgtacgcagccaagaaggctgagcgcacctcctgcagccgagtctctcgatcactcagggctgcaagccaagctgcctgagttggcgctcctgctgggaccagctccacggcctcataggtgaagctcccagtggctcctggggaactctccatgaccagggagaagtcgctgccaaggctggtggtgctgccacggtcctttcgtctcagcatgcagatgtcttccagggtgaagcctccatcccgggctggcaaactcttcctcctctgggtcttcagagcagagaactcctcggaggtaatatgcttcaaaaaattgaagcagaagaagaaaatctcctcccctttgctgagccgatctaccaacatgtgcccgaagaggaaccagtcataggccacagtgaggtagaggatctcagtgggcttcagggacgtgtggatgagcccatcagc

SEQ ID NO: 341982 - DNA, 1000 bp, Homo Sapiens
tttttttttttttttcttaattacgggatatttttactggaatgtagacattacttttgaatatataggacaatagaaattgcatcaaagcaatgctgcctaacagacacagcaggaaacttattggcatggccaggctagtatattttctcattagtatatcaactaattataggaaaagtactgtttctaaagtgcttgaaacatttgcctacgtcactgttctctttttcaatgacctccttcataaagtcaaactctagcccaaacttaagcccatctcactgcatattgtaaagaatggattctgaatgaattaacagaaatgcttttatataggaggttgcagagattctcttgcagtcaatgtctagaggagctgaccctcaggcatcactcagaggaagtcccagccaagattcacagatctgtatgtagccttcggtcaatatcacagtgtacatcaggagtctcaagttcattgcacagaactggtcctgtagcagggaagactcagaattcctgagttttctccttatggtgactcctcagggatagccaccatcttaaatccaggaatggggcccagctgggaatggagaaagttgcaggcccacatgctccctggacggaagtcacacggagcctctgtgcgggcacctgagaagctgccagaacacctgcccagcagcagtgcatcctccccactcagtgtccatctgccatcacaccgctgagaaggagaggaatgtgagaatgatcacaacagccagggaacccagtccaacacccgccatctgcagcagcatgagtgacgaatctttcacctgagcccaaactgcacaggagtgtcttctcaccttattccattcacttgtgattcgtaatataatgcagtaatcactccctcttttcaagggtgcattataatattccccatagtacagcctgtctcctataggtatctccatggcatcatctggaacatctttggccagta

SEQ ID NO: 341983 - DNA, 1000 bp, Homo Sapiens
gagacagagttttgctcttgttgcccaggctggagtgcaatgacacaatctcagctcactgcaaccaccacctcccaggttcaagtgattctcctgccttggcctcctgcgtagctgggattacaggcatgagccaccgtgcctggcctttttcttttttaaacagggtcttgctctgtcacccagactagaggtgcagtggcacagtcatggctcactgcagcctcaatctcctgggctcaagtggtcctcaagggcctccagagtagcccaccaccatgcctggctttttttttttttttttttttgtaagtagagacacatttcactgtgttggccaggctggtgtcgaactcctgggctcaagccattgcccacctcaaagtgctgggattacaagtgtgagccaccacacccaaccaggttatttgaacatttttaagtactgtattttctctattgtaatattgactgtcatctctgtgcaggttttttagtggttgctctaggttgaaacgctttgaattcttaggtatctaagagtgagcattttctttttttgactgctatactctcaccagttgccagcttctcatataaatattgtaaatgctctcgtttaggtaactcagcttctggagttgagggaacttcaaaatcagaagagctctgggaatctgcatttgtgctaagatttagcaaacttttttcctcgggtatatgtgtctcactgcttagagtagttggttctccagtactaggaactattgtcacatctttatctctgcttttcaaatcagagtaagtatcctttgggcaaattacattttgttccatgagagaggcaggaatattctctttgattgttggtctgtagtcagctttgtccaaggaagtaatatccccactgtttctctcttgggaagataacaaaacagtatcagattggctgtcccagccttgacttccttgttctgttatgtgtgttgactgggaagaa

SEQ ID NO: 341984 - DNA, 1000 bp, Homo Sapiens
tatcctcaatcacaagtttatttcaagattgtttttccacccaagatccattctattcacttgatttttaatgacttttatctgcaacaagaagagtgcacaaacatttaagggtcaacaccccagattgctctttacaaaactgagtattagcctgacatcattctgtatcttagtcttcactaagaattaaatgtctagaatatcccttcctctgccctaacttcctttccccataagcaatggatcaaaaacctaaaataaatttctatcacttatcaagtcaatggatacaatacagacttcatgctggttttctctttgaaagtttattgttttctttaaaaaaaaaaaaaaacctataccttttatattttacattcacctctcagaatatttaatggtacccgttaacgatgttataaaaaaagaccatcacctgcttgaaatggctgcaaatttaccatgttctggcattaaagtgatttcaactctttggacaaattggtgtaacagtaagcaccgagatttcaaattcccagatgagaaaaaaaaaattaatcaggaggaaatttatttagtaaaaattcaaagctaaagaaatgtgagaaggaagccaaacccaaaaaactgtaaaaaatacaatcttctctccagaattaggttaaaaaatacagtcaaccccattctaaaccccatatttcttagaaaagtcacccagtcctgaacacagggtcttatacacaaatacatgtagcttgatttgcagatcagcctctgggatcgaccttacactggccccaattagaagttcaaaaacaaaaattaagttaggtagtcagacatctataaatactagtatccgcatgaatgaaaacaccctggctttggtatggctacagaaatccatctggaaattattcaaaaggacgtggttcagggaaaagggggtaggcagggcatggggggaggggaacacacaaaacccccaagcagaggt

SEQ ID NO: 341985 - DNA, 1000 bp, Homo Sapiens
ttttttttttttttttttttaggaggggtgcgtttattagacaaacgctgggagacaggcctggtggggacctggctgggggatgatgcagcccgcgatggctgctgcttcgtacttggcttgccccggaccacagcctcgtaacggtaacccctgctttccaggggcctggcacccccccctgccagggtccacacgcagggttgtggcgggaccacccctgcaggtccagctctgtttcccaccttttgcacagagcttcaagggaagcctccagaagtcaggggtgagaacccgtcttgctctgcctcaggcaaccccgggacaggctgaagcccctcacgcacttgggtgcccgaccagcagcagcaagggcagcacctgtgggcctcggcccagggccaacggaacaggctctgggacctcagggaaccttctgctgcctgggccaccccaccccacctgggcagagccagtgggaacccagaggcacccaactggaggtgacgaggcggctgcgggtcctggctagtcctagctcctactcgggtcccagcacaccctgcagctcactcagaattttgggggaagccctggggtcttggggcatgtggttctgctgtcacacatggacacggccccctgggagtcctggtcctgcagcccctaccaccggatgcccaggccagtgctggccttctccacggcgtggtactgcgtatgcagcaagcgacctgcacactccgagtccgtgccctgcagccagtgtgtgtacagctcctgaaccccaggcgcgtcctcgggcgcctcagcccggaccatgccgtacagtctctccacgtgctggaggagctctctgctgggcctgtctggggcctggagctggcccccgccgttcaggcagcctgaggggcaggccatgacctccacgtagtggtaggggcagcgccctcgtttgagcctctgcaccaggttctggatgttgcggaagccgtacgcc

SEQ ID NO: 341986 - DNA, 1000 bp, Homo Sapiens
tgttttttttttttttttttcttttttttgaaaaggaaggaaaatattttattaaaagttttttaaagtttatgaattgaagtctatgaaaacaaactacttgatacaaaaacattcagatattagatgtcaaaataaatcagcacatttgaaaatactataaattatatttcaaacaaatatatacacattatgttaaccttcaacaggatccattatcactacttagaacactgatatgtttatcttttaagtatgtaaaaattacatagctgttaactttgtatggcaattcacctataacacatttaagaaagcattacaaaattcattatataataattctacaaaagttttctcacatttaccaaagcctactaaagtccagagggcacaaatattggccaaatagttcttttatcttagacataaagatgtttttgctgtttttttagaaccattaagatggctaagagaaccaactttacggagcttagctgttctcaggcatctgaatgggggtgtggagaagtcctcaagttacaagaatcacagttacttttttaggatgaaaaaataaaaacattgcatttgatgacattacagtcaaaatgagctctaatacaaatgtatgtggagaggttttgaagaataaatcggatatcccaggggaggttctgctgcttgtaccgtaagatttcttaaaagtagtggatgagcttgtatactataacgttcttcatcatcgtttgtggcataaagtaattcccatgaaagattggcccactgacctctaacagcttcaggatttaactttcccacttggatcaataattcttgaaggctaagcactctcccagtgtaaattcccatattagaatcataccccagagaaaacaagtatggcttttcttgtaaaattgcttccttccacttttcatcagataccaaaccaatgtaccagtcacgttcatattcttcaaggtacttaatcagttct

SEQ ID NO: 341987 - DNA, 1000 bp, Homo Sapiens
tttttttttttttttttttttttttttttcagtggccaaaaaaactttattagcttagtctccacccttttaaatgtactctaggtacaaaataaacattatacacatataagatcagtctttccaactttagaatgtataaataagaatgacattttaaaataaaatagtttagtcacagtcacacaaaactaccttctaaggaaaactgtccagtgaagccgttaaatttgtgctttcagctatgaagaattaaacttaaaatgcattcattcttcttttaatgaaaaataacctacccttggaaacagcataagcattgttatggtagtctagctcctaaatgaaaatgtggactgagttacagtttactgtagtaacctacctaagaagcctttgaaaattagcaatcgatcaaagtatttacataaattcaagcctttttcttaggacaaaaggtaacacagttccttaacctcttttaaaaggaactttgaaattaaaccttatggtcacaactttcattcaaaaatgttgcttaaatatcaaatttctcttcacagacgctatgtccattttcttcgtaatcttctcttgttaccaccatatcttcaaaatcatcattctctgatatcaattttccaccttcccaggcataagtaatagggttttcaggcagcacaacagaaacatcataatctgttggagtaagacatcgaacttctgagtaaacccgatccctaaatcctgggaaaagggaatttcctcctgtcaagacaatgttcttaaaaaaatgcggctgcatttcttcaggtagattttgaattgaatagacaatagcttctggaattcccatttcttgaatgcctatatcagaaggattaaagagtatttccggaacagcaaatctctcattggccaaacgaagaatttgttccccagatttgtattttccactcaacaccatctcttcccttggcttacaaaagccctttttaat

SEQ ID NO: 341988 - DNA, 1000 bp, Homo Sapiens
tttttttttagaaaaaaaatgttcaacatttattgattgatagactgttaaaatttaatgtttggaataacatttggaagtagtagactttgcattaaaaaatggcttttctttaggaaagtataatcaattattttaatgaccatagcattcatggactcaaatgctgctgccacacacaactcaagtgctggaatatttttctacagtctctctgttctacggattatcttgtaaaccagtgttcaactagttttataactgaaaagctgcacatttttcacagtacaagccgtagtttttacctgtagtttggacttctctgttagaatgtaactgcattaccagcccttttaaaggcatctatctatcaaaggaaaatttgggtgttagattttcttgggaccgtttctgtaacctttgcccttcacaatatagaaaatattggttttgccattacattttaatgccaggtttaaaacctgttgaaagctgcagctttatacagctttcttctccctgtgaaatcactttgtttatgtgatggcatttaaaaaatagcatgttctttttaaactgaattttatatctaatcaatgtcttcagtcttgaagaagaatttgcattgttgtgtttgtatatagagtattgcagtgcatgaattagctttatgcattttattaaatgctgtttcaatgtggcattattgttgtggcttaatactactacctaaatgaggtttatactattaaaagtgaattaaagactaacatgcatcctgctcttcatttttcttcatgatagtagtaatgcctggcccccaaacaatgcagcgctctcttgtgttatggacatgaagcatcctggtggtcctgtctctacagctctctggctcctaccttagccttagcggccaagagggattgggccctctgtggtccactggacttattaatacctttagtgggaaaccctggcaggacagtctttacatccaccc

SEQ ID NO: 341989 - DNA, 1000 bp, Homo Sapiens
ttttttttttttttttacgttttgtatgtttttttatttgctccaggtggggttttgactgtcactttcccacactctggattagttctgatcccaccacaaggagccctcgaattggctaaagtgagaaactgggcctgaagactccgtaccctctgccatcttgccgagggagtctccttttagaaaacaatcaaagggttattgcatgagtctggatgaatcccactctcagctgtccacgggcccgaccacctcatctagccccctttttggcagggagaacctggctcccaagttctcctccttcacttcgttacaaaccaaggggaagagcccaccgtgagaacgcgccatctgcaagctgtctccctttctccatccttggtgaaaccctttgcgcagaaggcaacgtggaagctgatgtttttactcatctcgctgtttgaaagcaccattatgaagtcgggttgtacagtagttaacagtaccttttatatatatatctcatatctatcatatatatataaactgtaaacaagaggtaacagcggcttctagaaactgattttcttcaaggtttcctgtgtggtaggcacctgaaatactgtagaaaaatgtcttgtgtggtgttctcgtctccctgctgctaactgggttctgttttgcgtgaccaggaatggtgctggcacgacagctcagtggctgggagggaatgctgccgcctgagtgtctctctctttccgtcccctgcttgtgctcctatctgatcaggctagagacaacaaaaaaaagatatatagtaaaaaaaaaaacccaaaaaaaaaaaacaaaaaacaaaaaaaaaaacaacccaatatatagatttctatagaatttccttttttcctctctcccacctttcctctgcaaggtattgttactattttttgttactgatttttgctgcaataaccttcttgtttcagtcacagcaagaaacaaaacccaaacaaacaga

SEQ ID NO: 341990 - DNA, 1000 bp, Homo Sapiens; identical to SEQ ID NO: 160091

SEQ ID NO: 341991 - DNA, 1000 bp, Homo Sapiens
tttttttttttttttgtcattttaaaattggtgagagataaaatttttattttttaaaattagagtcagcttgtagttattcactcaccatgtgggctcctccatagggctgcttgagtgtcctcacaacatggcagttgggtttccccagaataactgacattggttgtaacccacgatgtaaatagtctaaaatcactctattggcaaaactgcagggaaacaatcacactcataacttgatggtggaagtgaaaaatcgtacaacctggaatttaacctttgcaacatgtagcctgagagatgtgaagttcttgtaacctgcccctctgaggaaaataagatagtcctgggatctcggagaagaaagagccatgtgctttttccacctggaatggagtctctgtcatgctgagctgcgtatctcttgcttccaagttcatctcttttctttgatagcctcttctgaaagtgctacaccttttcttttccacaagtaaacttgttatggctgattgttgttacaaagccacaaggtccttgctgaggctgtaagccctctgcagatgagtactgtggcttctaccttttagtagccttagctcccaggaagttgccctgtagacttctgtggggatagagagaaacaaacatggagttctgaggccaaacagactgcagttcaaatcctagttctaccactaaatagttggatagcagttcacaatgcttggttatgtggtttaagattgttttaatttttgcattttacattccttttggcacttttgaagaagggacattgtcttttatgttgtttggggaaagtggtaagcctcccccgtctctagctttaaatgtttggctttatgaaatccacaactctcccccagaatcttccatcattaaataatgcgagtggaaatttgccttcataagctggccattccaaccgtcttagaggctggtatccccagcttcggatttaggctgtttggtc

SEQ ID NO: 341992 - DNA, 1000 bp, Homo Sapiens
ttttttttttttttttttttttttttttttttttttttttttttgaagtgttccaactttatttaaaaccagacagccctgctaccatgcccccgctcctcagcattgctctaggggaggagctggatgaactatggcccttctgccaagcccaggtgctaggggaggaaccccttgcttgagatgtacaggatggactcctcacttcttctgggcttgtgccctggcccgttgaatcttgtcagctgtggccccatctgtggctcccgtgcagtgggacaatacgaggctcagctcagcctcattccggtgttcgatggccacatctgcagcctgagccacatcgccaacaagaagcaaagccttgaccttctgctcgggacccacgcgggaagcatacttcttggcttcgtatttgttatgttgtttcatgcagatctccacaaaaggcaggtagccaatgggtgatttcttgctcttggaaaacttctctagctcttcccaatcttccaaatctgccagggcagtcagcttcagccaccagagcctcttgtcagggatgcggaagtcacgtgccagctgctctgcacgcttgttgtgaccgccaagaatgagggtggtaactgtgtcatgtagagacaggtctaggaactggccccccagctcgtcttctaggcgccgctgcagccgtaggagccgcatttgatcctctgtagccttggctgcaaactcattcttggccttgtagaaggcatcggcggctgtctgcagagctgctactcgcccctcaatacgctcttctgcagcatagctggctcggatgtggaagctgcccaattcctggtgattgtcatcctgattgtaaaggtccttcagcgtctctagctcctgatgcttacagaactgtcggtacaaactgagggccatgggctgattccgaagggtcatgaaaaaatctcctcggttcagctcgttcttcaggtgcagcaacaccgtgaac

SEQ ID NO: 341993 - DNA, 1000 bp, Homo Sapiens
ttttttttttttttttttttttttttttttttttttttttttttttttttattttctcatgagatttcatttttattacacaaagaaaattataatgaataatgtaatttgaaaagtccaaataataacagtgatgagggaaaatggagtaaaaaagacaaaacataacttgaaagggatttttgaaaaatgtcataatattatccacatcctctttgtctactaataatgttgctgaagacagctctgttttgtagtcaagcattgtatcaatttgagtaactaatactaagaaatgctaataactcgattgttgcatcagtcatttttgtcaagttagcatagccgtgcccatactctgtgttcactaaagcaatatagatactaccaaaaccatcatccaatacctaaaggataaacatgagatattgacatagtgaatcttcattcaacatcttcttcttctattttggtatgctctaggacatgtacctctctttcaggtagtaacccatattcatttaggaaagactccacatccccagcaaaaaattcttcagcaaactgttcagcaacactaataaaattgcttatgagttccccacctttatagatgagcagtgtaggaagtacatctaaggaaaagcggtccccagcacctgtattcgaagcttttattttacaaaacttaactatagggtattctgctgcaaggcatgttaaactactgtttagagcatcacaacccttaataccatcttcataaatgtgaacaacaattgtggtgatcttcagttccttttcaattgtttctaggaattgctttccagtttccagctcatacacaaacccatatctaggcccaaaactcagcttctggtgcatatcctgcatacactgtctacggtatttacgaaggcagttttcatcctctttctctttatggattagttcatattcttgaatgctcatctttctgctgactcgttcctttgaatct

SEQ ID NO: 341994 - DNA, 1000 bp, Homo Sapiens
ttttttttttttctttttttaaccttttcttacattttattagcttacagattctgtcagtatgtctcatgtatatattatataatatttatatatcagtacaatgcctctctctaggggactcgcataggcttaagaatggagtcctggtgaattttccattctggcttagagtccttaaatggtggtcaggtgttttcccaactgtccagtggaccttaggccctttggcccaagtgcaagccttctgccctctgctgcatgggcagcgtggctcagctagggaaaccaaggcagaaagggtgacagtgaggctttggcattgtaggtaggcgatgtggtgtgcaggcagcaggcccaggagctctgctgaggtcagagggtgcctgcaaaagccagaccctaaaacacttacagaggggaggataaggactccaggtttctggccggagcctcactgagcagaaagtaggttccccagggagaattccaacacagggaccctgcagaatagaacagggctgggcagagcagcaagactcaatccccagcccccaaaaaggcatcatgcaggtaagcaggtctgagataaggctggtccaggggcatgaaacccaataacaaggctgagaggtgggagctaaggcagagtccagggccccagcaggagcaacttgcctttcttgctgctgagccacatgccttggggaagacaccccgagctcaacagctgcctgttctgacagatctcttcctatggatacacatatctctacctcctcaaaccaaagctccaggcttctggccaaggcaggacagggcgatgccattgcagaccctcccactcctgctggggtctttgtagaagagaagggtctggcggcacccagggtcactagagtgcaggtgcaggcaccaggagagagcctctgtcacccatagcttggttgtttgtccctcccctgctgcactgccaccaccaaccctaatctttggacag

SEQ ID NO: 341995 - DNA, 1000 bp, Homo Sapiens
ttttcttcttctttttattattatgactcacgtatacaatacaaagtacttggaccaggaacagggctgtcgggacacaaaatctacattcatagctggacataaagacaaatgacaaaaaattattattatagatatatttttaacatttttttctttcgagcacattgcataaacagagaattcaagacagagttaactatacattcagtgcaatttagttctactctactggggttagaagcacaataaaagcgcacaggaccggcgggctaggcagtctcagttgttgggttttcttagtgaaataagcagcaacaaacgacaacaaaaccgcattacaaatactctcaaagcaggatttctttctataggtagtgataaaatacgctggaggtttctttctttcttttttttttttttgatttttatttttttctctttttttctcctatagcaggattttaaaatttttctctttttctttttcaagattattgcaggttccctttaggtagtatgttaaagatttattattattattttcgtgattatggtgatttctgagcactaacactaatgcagctcagaggaaggcgggcccaacagaatagaaatcaaacagcgaaggagaggaaggcatgggcccgagtgaccatgggatggttaggtaggattttagaggcgactgcaggctcctatctacccttctggaaatggggggaggggaaagacccacatctccttcaggtttccatcaggttcctagagaaagtcaagggggtttttctaagcagggagccctggggagggggagggggagggggaggggatattccttgcttttttccttatttctttacatttgtcttcctttcctttcttcatttttttctgtcctttcctttttagaaaaagtacatctagtacactagccttagcataaaaacaaaaccacaagtccttttctgcatttcgagggggctcccctctaaaataa

SEQ ID NO: 341996 - DNA, 1000 bp, Homo Sapiens
tttttttttttttttttttttggaaacaaaccaaaaactttatttacaaaagtaaattttaacttgcttttatatgtcatataccgttaatgatgacagcaacagatttaaaatacattgaggtttgtgcagctcatttccccctagttataccataaaactttataaacattgctttagctttgatgtttggtcacgtttgttgtgcagaagtcacgtttcagggtaggttcaccgccagacacggtcacatcaccattggctgtggatttccaagaagcaaaggagccaatctcagcaaagctcgcactggcatttttagctgcttaaatttgaagagcagttcagcaaagcttgtgctcccttctagtcctataggtggcaggtgctgtggagctggcacagagtggtagacgaggaagcaggccagcatgctcagctgtgattcctccaagggctgcccgctgaggtaggcgtgcacacacatatcacccccgacttgtagccactggtccagggtattatcaatggtgcacttcacaacagggaggaattccgagttcataaagagcccccgcttagggtggttctgcagccgctcctgatggcttcgggagctgaaaaactctaacaccaactttatctgccaaagttcagaagtctcagacatttctcttctcccaagtcttcttatagcctgatccattgctatgtatgcaggcaacatctctggggtctcctgggtaacacattcatagagtactgaagaaaagagatccagaatttcctgtttctgacccatgttcacagttggcttgcagaaatattcagcaaatgacagaagtgctggatcagaagtgaatgctgagattgtttctggcttgaaagcccgggcttcagagttcctgttagcaacagtctgagccaacaaactttgccatcccattggatcttctttgtaggagagctgacccgcccggagtttaacatataaaacccc

SEQ ID NO: 341997 - DNA, 967 bp, Homo Sapiens
ttgatcatcagtaagttttattcaaccattagactcacgctgcgttgaaagacaatccccctccactcatttccactgtaacttcactttggggttctgctgttgggcctctacttgcctctttccttcttctccctccccttgatcctgtcatctctgaagtccctctctctctcccagtcattgtcgggccacaccctggtcggctctctttcttgccatctcttctcccggcccctgtcatggtctcgatcccttgtcctcgagtcccagtgtctttctcgggatcgagatcgctcccgcctttcccgttttccctctctatagaggtcgtttttaacaactggcaagttaataggttttcgaaaaggccggtcccgtcccccaaatctcagttgcccagactccttttttcccccaagaccgcctccaagtcgccgagggatccaccctttgagagtcctttccagctcgtagtccacaaatatctcatgctggtcaataaccaggccatcagcatctcggtaagctttgatcacggcacgctcctccttgtattcgatgaaggcgtagccctttgaaaaacctgtgaccaagtccctgaccagccgaagccgccggatgtcaccatagcgggaaaagacttcctttaatttgtcctccttggtctgcaagtttagtctggccacaaacagggtgaggaggggatctcctatgacacctttgttggggacatatcgtgccagcattgccctccagaccgcgcggtcgtgtgggtcttcatcggtgccatcaatgctgcccgctttgagtggatcatactccttggcgatgggcatccaatcgttcatgttctctgcaaagcttgggctcccttccgacggagacaggcgagcagctgcaggcgacagcagattctccgcgccggcctcggcctgacctttacattggtagcagcagattcgcc

SEQ ID NO: 341998 - DNA, 1000 bp, Homo Sapiens
gtacctaggtgttctttaatgacagttcaaggggccaattaaacagcaaacagcttggcaaggccctggggtgtggtgtgggcacgagtgccttgtgccagtctggccccagcacagcccctttctccagtgactcctggtatggtcaacagcttctggcccaggcctgggccccgagaaggctggagtcctctgctgggtgtacagctgccctgcaggctctgtgaagcgtctatgagcccagcccaggcctggctctaaaagaagtccgaagctttgcgccgggcagggagctgcagcaggttgtccgtgatggaggccgggtcctgtgtgagaggggtgcgtgtggcagagccaggcgccggtgtgcttgtgggggtctgcagcccactggccggggtcttgaggtgggtggagcgtgctggggatggtgtgtagctggcccgcagggcccggtctgtgtacttgctggccgtcctgctcacaaggcgctgtagggctggcgacatggctgggctcaggcctttgggggtgaggctggccagattctccgtcactctccgcaaggcttcctgcttcttggcccggttcttggcagcggcctcgttggccatcttcagacccagccgctccctgcggcctggctccaggatcttaaaagctgggccgggtgtcctgtccacgtagggcgtttccgacccttcaactctcaagggtgtgttctcaacctccccccaggtcatcatcggggactcgttcacaccaggggcaggggaaggagtggcaacaaatccaaatccacccactcgaggggactcctgggggatcagctccttgccatcggggcccaccttgccctgtttgtgctgggcattgagggcggctgcctgctggagctggcacctgctcagggcttggctgaaggggtccctaaggaagcgcgtgttcttatgtaccacctgccggggcttcttaaacagctgctcctcgtcagggacac

SEQ ID NO: 341999 - DNA, 1000 bp, Homo Sapiens
ttttttttttttttttttttttcccttctggacagtttgctttatgtgttcagacaatcaaggctcgccttccaggcacagcccagtgccctggatggcatcagcacaggctcccctgccccggccttgaagcatggctgtgtgcacgattcatacccatgcttggcagacgggtggggggggggggggggcgcacagagaccacaagagtatggcagcacctgctgtggtggtgcctgggaacagcaagacacagcgaggctccccaacctttaggggaacacatgtgcacgaagctttggttcacaggcgcatctggctggctaagggcaacagtcacagtcaaatgactattcacagctgcagacaggaggcaagacagaagcaagtgtctaattatagcaatttgagttgagggtttcttttttaaaggtcaacagaagccaaccttggtcacacaggtagtgagggaaggatatgttgtgggcggcccacaggccaacattgttttcctgacagaaaaaaaaaaaaaagcgccatcagtaccgcctgtagggggcatggtgggggacagacacggcagaacgctggactcttgcttcagatggcgcaccacaagcacacggcactctgcacaggtgccagtccaccaccagggccagcctttgagcacaccctggtgcctcagactccggcaggaacacatttccatcgcacacccacccataggggccaccagtcgagaagcaagctgggcaccaggcagctgcctttgacatccagagaaaccgctgtcacaggcaacagctctggatcaagaatgggctacactgaaggcccttgcttcctgtttcaacaagtccacttgctaaaatgcatgattccaaatctaccttctactctcactgtgaaagtctttcaaaatgctaaaatatcacaaaagctttaaaaatcaatgggtggacatatggactcgactgcaaaaaatctttgtaaaaaa

SEQ ID NO: 342000 - DNA, 1000 bp, Homo Sapiens
tcctctcacttttttctctctcagtgtatgcgtagattcctaatcttttcaagtccttaagagaaagtatataaagctctaatgctggtttcatttattcaaacactacaagtatctaccatatgctggacactgtgctaggcttctggaaataaaataaatgacagatacggcttccactttcatgttgcttttgtttatacccttgggcattttacttaatcttttagcgtatattcataagaatacagttttggtgtgaagattaaataagattatgtatgtaatgaacatatggagactaaaataacagaataataaatggtaagtataaaatagattttaaaatgttatttcttaagtctattgtcaatctttacaattttattgtaaatcatagtgtgagatacagctgcaaatatagggaagtaagttcacaaactgttattttctaaagctaaagctaacattaggccttgctatggtagaactcttcactgggttgtttcttaaaaaaaattcacgcaactgacaggaggaattgtctttattcttgcattaatgataaatgtaatctacaagatggccttcatggattagaaaaaggaatcagaccacaaggaaaaagaaattgctggttttcactcaagatttatctagaaaagtgtactgactactggaataatagtttacccctgggttgtaccacagaatgagaaattctacaagattatacaactctttttctacaagattacactactcatattgtttttattccattccggaattagaaattaactttctaaatatcatttttttctccaaaaaaatcctcttaccagctaacctggatatggacaaaaatatcttgattgctgtaaaggtctatctccctagtaaaaatgaataaattgcccttgaatttattcaaggcaatcactatcagctgtggaacacccaggtaaactaacacaactaggttcctacacacaaaaca

SEQ ID NO: 342001 - DNA, 1000 bp, Homo Sapiens; identical to SEQ ID NO: 160092

SEQ ID NO: 342002 - DNA, 1000 bp, Homo Sapiens; identical to SEQ ID NO: 160093

SEQ ID NO: 342003 - DNA, 1000 bp, Homo Sapiens; identical to SEQ ID NO: 160094

SEQ ID NO: 342004 - DNA, 1000 bp, Homo Sapiens; identical to SEQ ID NO: 160095

SEQ ID NO: 342005 - DNA, 1000 bp, Homo Sapiens
gtaattcagttgatatttaattacaaggaactcaggttcttacacaaggcaggagatggaagtcagccgctccccacaagccttttcagcctgggtgactgaggctgaggagatggggacacatggaacatatggggagggttctggcacagtgtgtcctgcccaaagctgagggtggtggccactggggatctgccctcgcgctggccaaggtctgccatcactccatgaggcagaactctgactcctgctgtcgcatgttgggtaacacatacagagccacagctgcaatagccaagaataccataggcttccacaacccaaacatgttctgcattaggacgacgtctcagcccaccagcaccagagcaaagccgagatgaccaccaggcctacaagaggcaaggagaagatggggggattgggggtaggggatgactttttgctctcggaaagtctgagggggttattttcttcgggactttcaagggaagagtcggcgtcatcctcctcctcttcactgtcttcttccttctcctcttcctctttgtcctcttcattttcctcctgatcttctgtggatttagcttcctcaggatctgctggctcagcaactagctcatccccacactgctcctttgcttcctctttcacttcctttttttcctcctccatctcctctttcttttcctcctcttttgctagtccatctaatttcctctggctggccttgtagtacagcactacctccagactctttctggtctcaaggtcgctctcagaagtatccgagcatggcttggtcacctttttcattttaaccccattggcattcttgttcatgttcttattagcattcttcccccgggcttctttgacaacagaaggcctcttctccctgagctggcggagctcctcctggcagcactgcagctgcccctccagctgctcctgcactaccagaagccgcccctgctcatccatgctagcctggtattgc

SEQ ID NO: 342006 - DNA, 1000 bp, Homo Sapiens
ttttttttttttttttttttttttttttttttttttttttttttcaaagtagcttccatttattcacagttttaaaaacatttttcaagtttagtcaacttcccaatataatcaaaggacaaaatggcaataaaaaatatacttcatcagatcttagagttatacaatcagttaaaaaatagatattgggttttaaacaactgacatatgctttccttttccccctttaaaggttttcagtagtctatctgaaatcactgaatcacttttcttctcctccacagaattcagaactttttcaccccgaactggagaaggagcactccgtcattagctgaggggaatggcaaggatccaggggtcctccatgactacacaaccatcctcctgagcacctttaggaaatccaatgctgtctgagaagcagcagggccagatccagatctatggaaaattaatatctgcagtgcttcctgaaggtcacctcagtctttatgccatttcaaaagctagcccggggcttgagaagaaaagggaagtggcattccagccatatttggggtgcaatttaattttcattgcgtacctcatgaacaggggcaataacacattctaggacattcttccagcccacccactcttcctctttctcttcttctctttctctaacgagtggtagtgacaggatgcaagtctgcgctcttggtagataaacggagaagcaggagaaagaactattccataatcagttaaacggggagttttcagaatcctgtcttgtcatttaagtgacttactgaagtcctactaagttattgagactatatttctttactttttgcactgggacattgaagcattgagacaccagaagtccaaaagacgaaaaatgtgaaaatcacaaatttaaagaaaatgtagaggtctcagttctgaaacaccatgcttcaagtgttgtcatttttgagaacatttttaaaaggcatctaatattccagga

SEQ ID NO: 342007 - DNA, 1000 bp, Homo Sapiens
tttttttttttttttttttttaccaagttcataattttattatactctgaatagagatgatatttaaggagcagagaaaatgactatacaaaagatttatagaacattcatttacatactggatatattctttacagtatcagaaaagtaaaaatatgcactaacaaggcagagaagacgttacaaggtatttgatgctgagaataaatgcacagtgacttttaacatggctatagcttaacactggaggaatacaacaatacgttcttttactgagtagttagtaggaccctggctataacatgcgttgggcacagttcgtgaactctccgcatttactccccagggcagtacgtgcctgtccagcgggagccctggagacaaaatgcctggaaacgttccttttcctgtggccctagagccggtgtccacggtgggggctctctcacggtttctgagcccacagtacaatctgtgatgacacacagcttgttctgtttaatgcacatgtaacacaaaaggaagaaagaaacttcctataccagctcttcagaaatcgtggaaacttgcttcctttggttcctcagagggagctatctgcttggagcaaattccccgatgcccttgaccacgtttaccttgtgtaaaaatcacacctggccaatgagttcaaaaagcacgtttgcagggcttcctgaatgccgtcgaggcatggcttcatgagggccatcgcgggcaccccgatgtctctgtgattccctggcaggctgcgtttctcaatactgagaccctagtttgctctgacttctaaatgagctctctcatccttcatcagaaggataaggaacctggcctgcactctttgggttaaacatgggtagagaccgtctcaggatgaggacctcttggggaaagtacaaacctctgctccctgtggccacattcctgcagtggatgaaaaaccgagatgctagaggcctctgctaaagacatcagggtc

SEQ ID NO: 342008 - DNA, 1000 bp, Homo Sapiens
ttttttttttttttttttttttttttttttttttttttttttttttttttccacgcaatcacaccatttattgctgtgctgtccggggaagacaccgtgcaaatgccaaagtgcactgaggagaggggagggtctgtgactcccaaaccctcgaatattttatgaatctaagagtccagacgcagttcatccacggagatctgcgccccgtccacaccaacacccacgtttgtgcacccacatgtgcacggtgctcttcagagcggcgaggtcctcccccgcggggaggaatgtgggagaggcagaggtcactgagtttcctcctgtttcgtgtcacctcttggcaacctgtgcctggcttctagaagcggcatgggcaagaaaaggaagcaaaagaggctctggcctgctcctccttgcccaggagcaaagccagcaactgtgtagtcccgctgtgaggtaatgcctggcgccgcccgtgtattcctgcaggtcaagacagattcgggccgggtggggtggcagcccagccacggagggcatgcagggagaacaccaccaggactggctgcctgggccgcagccacttcccgccaggctcaggggcctggagtcagggggcgtccttcccttatctgtcccctgagctccctggctccccagaagggtcttctatcaagaacactgggccctgggcagaagggagggcaaggcccggcctcccctggtctctgacctctgcccaggtgctgtggacctgctgagacgggttcagaaggcgccagagaggaaccagctggacctgagcctggctcctgggcccgctcccctcctggctgcagctgcaccaaggttctcattagcaggggcccccgcctgggtgcggaacatgctttgggcatttgccatgaggcggctgggagttttgcaacagtttccaggggagcagagcaggaagaggggcttccccgacgatcccattcactgctccttctccatg

SEQ ID NO: 342009 - DNA, 1000 bp, Homo Sapiens; identical to SEQ ID NO: 160098

SEQ ID NO: 342010 - DNA, 1000 bp, Homo Sapiens; identical to SEQ ID NO: 160099

SEQ ID NO: 342011 - DNA, 1000 bp, Homo Sapiens
ttttttttttttttttttttcactgacaaagaacttttatttctttttaatgacattaaacacaactgctacaagggaaaaaacatgataaagaggaggcaccaaacttcagtttcataattgaaactgacaacgccagtaaatcagggcctgcattcgaaactacaggttatttcaggctccttacttgtaagtaaacaatgtaaacagcatatttttactctgctttgtcaagacccccatggtgggaatgtcgtcatggatgaagaaagcagttaaatgcacctaacacttgcttaaaaaataatacagcaagaattccaactgcaatattagacttagaggccaataccaaatataagagatatgcagctttgaaaagagatgaaaactccagattctacccagtaccatctttaaggcgaacatgccagataatgagttttctttggctttgttttttcttcttaaagaataccatgttaaccactagagaacagctctctcctcccccagtccaacagatttaattaagctgctaaagctttggaaaaacagaattatttgagctaagaggaaatgtgattgtcacattttctagttaacctgtcactcatttgatttggcaaaggcagtgctcctattacacattcagtcttaaaaccccatgtaccaggagggcacgagtcttagatttttgcctaggcaaaatcctgtcccttcactccttgggttttctgtagggaactagactacagttccctactgtagctgcaatgctagctattccaactacatttaattttaactatgctatggtcccaaaggtggatgtttggcatgtctcactccatcaacctaatttagggcagcctggagaagtgaccgatgtagtaaatgccaagtaggctaactaaaataatagatttcaactactgcctttgaatagaacttctcctttgcattttggccccagaatttaaaacaaatgttcaaggaa

SEQ ID NO: 342012 - DNA, 1000 bp, Homo Sapiens; identical to SEQ ID NO: 160101

SEQ ID NO: 342013 - DNA, 1000 bp, Homo Sapiens
gcgtggaggaacatgcaattttattcaatataaacatttgctattttctgcttagaaaccacaccctgaagacgtgctgtctatgcagttatggcacattatatggaaactctcatgacatgaaaaataaatacagctagttaagtataaaatgccaaataaaagtgacacgtacaatgcggtttataaaaataagcttaacatctgagaaaatgtaccaagtggttgtgtgtcctcagatgtgtggggaggatccatcccccacccactgcagcctcacaccgagtccaccttggacatggtggccacattactcagctgggagaagccacccttatcctggttcctgcctcctgggggctctggagacggatgcctatggcgcctcatctttaaactgtccttagtagcccaggggagccacaccctcactccctgcctccccccggtccgcatggtggcaccgtgaggcagtctcagcaagtcctcatgctgttcttggtcttccacaagaaagtgaagctgtcagcttaataacaagaatggcctaagacagcaaagacagcactgttcctgggctgggacgcaaggaatgaggtcctttatgaaagaaagacccccctgcatagcctaagtgctatatcgatcgtcccggatgtgccttaagaaccgtgacctcatcagtcgcccatttagcattgttaagatctgtgaacgcgtgttgtctcaaaccagtcagggccgtcatgactacgcagcagcagcagtttccaagacgggccagaaacgcatccacagcagtggcacccgcggctcaggggctcctcacagcccgggctggtgggagccaagaccagacagagtgggggtctccatctgttttctcttctccctcaaatacaggctgttttcatcgtgtctagtccagccctgtctgggccctgtgctaggcaataactcttgcagccctgaaggacctagggagcccagcccaccttcc

SEQ ID NO: 342014 - DNA, 1000 bp, Homo Sapiens
tttttttttttttttttttaaaaaaacccacaaaagtttatttgagaacaagagtgaaagcttttgcacatctgacaaggtagacttgttttacagtagatgccatccatattcagccctaccaatactatcacaaatgaaacatactatttcttacaaagatataggcataagtcaaggactatgactaactagagtgaaaggaaaggttagaccccaaatcttatcccttagaccaatcataacataggatgtaaattaaaccattcagtcttctaatgtagtggttctcaacctggcttcttatcagaatcccaggaactcttttaaagaaattcccaataactaggctgtaccccagtctctagggatgggatccaggcatgagtattttaaaacttctcaggtgattccaatgtgcagccagaccctgtcgcaagttcaccacagcactagaggcaggtaacgattactagcagattcctcagccccaacaagccctccaagaaagggagacctggtgggcaacactggctctcactgatgctatcctttcactccacttaagaacgacataagttatcacttttggtataattttgagactttccatatgccatggtgatttttagagcaatatttaatcaggtgaataccagcaaagagagaaaatacagaaaaagaaatttccataaggcatgatatgaataaataagtgaaaaaacaatctcgggtttaaaagtaaagcatgagaatttgaagcctgtgaaattttatttatacaaaagaataaaaagttatttaaaaagaactgatttaaacttatgtttttccatttttcctgttccttgaacatgaatctactaccaactcagaaagatttaagataggtaattactaaacactctttacctccccttgcaaaaaacagaggcaagtttcccattttacttatgataaaccagattattttcagttatgaatattggcaactgcatga

SEQ ID NO: 342015 - DNA, 1000 bp, Homo Sapiens; identical to SEQ ID NO: 160102

SEQ ID NO: 342016 - DNA, 1000 bp, Homo Sapiens
ttttttttttttttttttttttttttttttttttttttttttttttacatgtacatagtttatttacaataaaaatggcattgaataggagtgaaaaaattatggtcttttcaataactaatggggggacaacttgatagccatttaaaaaaaaaaaagaaacttcctcactactgagtaacaacataaactggatctatatctcgaaactaaagtaacaaaggtttgaaaggtaatatatgggagataaaaaatatctccttgcttacgaggacaacatatgggcagtatctctcagtaatgcccatatattatagggtcttcttacacagtagataaaaaaataggaaatactaatcagtttaaccatattaaaattaaaactgttgatttcctaagtttaccaaacctaagctattcacaaccctttctcagtctctactagttccctattttgactcattttaaaccagttggacccttatctcaaatccttataaataccttactctaacatcctccctttgaatcattaccaagactctgtgtcaagttgatggtctcctttgctacactacaataggtttaatgagctttgtttagtcaacaggtttccttagtgacctttgttgggggggagtagacaattgacagtccttatctttttgagaaatatacctgaaatctttaaaaaaattttttttggtagagatggggtcttgctatgttgcccaggctggttttgaactcccagcctcaagctatcctcctgcctcagcctcccaaagtgctgggattaggtgtgagccactgtgcccagccagtataccaagattttttttttctttttcttttcttttttttttttgagacggagtttcgctcttgtcgcccaggctggagagcaatggcaccgtctcagctcactgcaacctctgcttcctgggttcaagcaattctcctgcctcagcctcccaagtagctgggattacaggcgccc

SEQ ID NO: 342017 - DNA, 1000 bp, Homo Sapiens
tcagaaagaattaaaacatttattgggcataaatatattacatatacactacagatacagttaggtattacatatagcataatatttgcaaaatctatacattaaaattgatatggcagttttaatacaatgtatatgaaatagtctaaaatttacaatacaggaaaacatgattttctttttctcctagagttgaaaagcttggaatgtatgtccaacagtgaggtaaaacattttatctttcaatttaaagaattgtgcaaggataacattcaaacacattcaattagggcacttctcaattttgacatgaatactgaattattgtagccaacaaaacaaggttagaaaatgccaacatttcaagttgataagaacaaggcagagaatatgcaaaaaatctctttaaaaagttttctttttcaacaatttctttgaggacaaagggcagtttgcttcacatgactggaatttcttgtgccagggatgagtttgacatacagagaagagtcagagcatcagaaggccactcattcactcctcacatagcaaaagggcaaagagatcaggttaatagaacactttattttattgttcgtgtgtgatggcaatatatatagttatatatcaatatcacatatacatatttgtgataaaaaacagtgccatagagagtaataattttctgactgaaggaatataatgaataccaaataatggagagcaataaaataaagtgctgtcagctttgtacttcacacacttcagcttcctggtggttaaatgatagtatgaaaatctcaagaagatcaaatattcatataaattttggcctaaagtactatttacttaaaaaaaaaattcaaccaattagagaatttctttatagcagcagttctgaagtgtttcaaaaaagagacttccccaaccccccaagagggggctttgtactcagttgaattttcattgcttaaaaaatacctctccccaaaacacctgc

SEQ ID NO: 342018 - DNA, 1000 bp, Homo Sapiens; identical to SEQ ID NO: 160105

SEQ ID NO: 342019 - DNA, 1000 bp, Homo Sapiens; identical to SEQ ID NO: 160106

SEQ ID NO: 342020 - DNA, 1000 bp, Homo Sapiens
tttttttttttttttttttaacattttcctcaaaagaaacaatttatttagaataaaacaaaagcagctcaactgtgagcgcacgtttgagagacagctactcttaagctgtgtgagccataaaaagggtttttctttacttttccagaaatcttgtgtacacagcacaaatcaaagaggtcattttttttccacttaaaacaccggcattggcatcacaatagcagatacacaactttaagctgccattttagtaaaatgcacaaatactaaacagattagctttcttccatcagaggcccatgtaaactccacataagccacaacttctcttcaaaaaggtccattagagctttgaattccatatcttcatccgctgttcaaccagttttgctgaaatcatttcctccctttagggacaccactataaccactataacagggtcagcgccaagttttctctcttcttgttctcatacctaactcctatctgaaaaccaaacccacggacaatgatcatgaccaggtaatcttcttcagatttggccagtgccttggcaggggaatccaggaactgctgggagaactcacaaggtgggaaggcatgaaggaccccggtgttttccttgtctttgttgccccccacagggaggctgatcaccccggctgcctgcttttgctttaaataggacacaaggttcctaagtggcctctgagtagaagtggcagtgtctgatgcagctgaggaagaggaggaccggctgtcagaacttccaggcacagccaaaagaatggcataaccattgggccctgctactttgatgcgtcgagttacttcatccaacttgggctggtccaaacggagacgctgagtgatcttgagctgggccactttgcctccagttgaaccctccacaagaagactactagccacttggaggtcaccctgcaacagatgcatgttggaaggaaagttgctgttcttcagtagaagcatgcc

SEQ ID NO: 342021 - DNA, 1000 bp, Homo Sapiens
cccaatgctacggagggcctccagtgacacagtatttcctactcttacacatcggctgactggatggccagtaaaaagatgcagtggaggtgagctttccagttcatgggaagctccaagcagcctgcctgctgcaacacgactttggccacaggcgggagaggcagtacaaagctgtgtgatctggaggaagccacagtgtctgagatgggatctcatctgaaaccctggagccgtggcactgcttccttctatgtcaagataacgaaagcccgtggtatcagctggcttcattctattccattctattttggctgttgcagaaaaacattcttctgttccactgccttctgttcacagtctgtcagctcgaaacgtctcttcaacagaggggtccagcaggcccatgctggagtcacttaacatgttgagtccatccaggctcaggggttcaatctgcagctcctcttccagtggaaatggagtgtccacgttcaggctgacctcaggcaggcctgccagcgcactgttgaggtctttgaacaggctggtgctggagtcttctggcaggatggtgttcgggagactcccgcagttggaatacgggcttggtctcaaatgaaaagagtcctgcagttctcgggaaccttgttgcaccagaggcacctgttgaggaaaggcagggcctggcctcatggactgctggtcaaaacccacatctgggaagaagttggtcaaagatgagccctgggccgggagaagctgaaagtctgactgtggcagtgaggaggctgcctggggctgctgggcaggggcctcaggggcgcggggctgctgcaggaggggctgggtgagctcctggggtgcagggtaagggggtggcggcgacacctgggcttgagcttctgtgggcagaaaggaaagttggcttcggtctgaggacaccatctgggaggtaggatatggggccagtgggctggttgaagacagctgtctgctg

SEQ ID NO: 342022 - DNA, 1000 bp, Homo Sapiens
ttttttttttttttttttttttttgctaaaacatggatttatttgtgtattaccgtcaaatatgatcaaagacacaattctgatagctttgattatctgtagtactagtgaaagagcacttgtacagaacatattcatgtacaaagccaatcatttatttagcactaaaatcaaattataaaaacaacaattccatcttaaaacaggcattttaaaagcatttctgtggttctaagtttgcatcaagacagcctaagtttgcatctgcacaatctggatacccaaatccctctataatttccaaagacaaagacaatttttgctagttgtgaggtgtcagggggaagcagtgatgccctgcaaacagtctaatgggcccagggaaccctgtttctttctcaacctgaggttgcatccttgatctccaggaaaagagattagtgcttgcttaaccaggttcctagtaaatggtcagggatcttctatgcaataatgttgcaaaagttactgaagaggaaaaaaaaagcacaacggaggcttcttgcccatttacacttgcaatgttagattttgaaaacagggcccttcatagtcagcacccaagtcctgacttccagatgtaatgcaggctggttaacagcccttaataactacattgcaattccaaacgactccctgacagcttttctagacagggagtagaattaagtgtgcgggtgctcttaggctctccgaggcaataacaagctcagtttaaccatttcccttctgggttgactgctgagttatgcagattccagttcattaagccctgagtatagagtatgaggccaacatcttttctttagtaaaagccatgccattcgtctgcctttcccttttcctcctttatctgggcgactgtttttggaaactggggtaactccctgcaggcaggcagcaggagatatctccaagtcaggctggcatggtggggtgctatcctctgtacaaccatgag

SEQ ID NO: 342023 - DNA, 1000 bp, Homo Sapiens; identical to SEQ ID NO: 160107

SEQ ID NO: 342024 - DNA, 1000 bp, Homo Sapiens; identical to SEQ ID NO: 246553

SEQ ID NO: 342025 - DNA, 1000 bp, Homo Sapiens
gctctgtcaccaggctggagtgcagtggtgcgatctcggctcactgcagtctccgcctcgcgggttcaggcaattctgcctcacccttctgagtagctgggactacaggcatgccccaccatgcccagctaatttttgtatttttagtagagacggggtttcaccatgttggccaggatggtctcgatctctggaccttgtgatccgcctgcctcggcctcccaaagtgctgggattacaggcgtgagccaccacgcccagccaggcacttcaaattttttgtctctgtgtgtctgcgaataactgagaaagtgccacagtattgatttgggggttacaaacatattttagtgagtaggcaaattctcaaatacaaaatctatgaataaggatcaagtatacgttcatttggcattttaagtaccccaggttccctcattatctgagggagggcagcatatgaaacttatttagacttcttcttaaacatttaatgtaatttatttgagacaggatgtctgttgcccaggctggagtatagtggcgcgatctcggctcagtgcaatctctgcctcccaggctcaagcaattcttatgcctcagccacctgagtagctggtattacaggcgtgtgccaacacaccctgtgaatttctgtatttttagtagagatgggattttgccatgttggccaggctggtcttgaactcctggcctcaagtgatccgcccgcctcagcatcccaaagtgctgggattacaagtgtgagccaccgctcctgggctagaactcttttttttttgagatggagtcttgctctgttgcccaagctggagtacagtggcgcaatcttggctcactgcaacctctgcctcccaggctcaaacaattcttatgcctcagcctcccaagtagctgggattacaggcacgcggcaccacacccagctgatttttctatttttagtagagatggggtttcaccacgttggccaggatgg

SEQ ID NO: 342026 - DNA, 1000 bp, Homo Sapiens
ctgagaacacattcgtattttttgacccagaccaaaaacttttggtcctttttaacggtacattcctacattaagaaaataattagtgataaatatattctctttttgtacaaattcaattccagtttttaacaccctaattcacaaaattcatgccaatgtatgcgctgataggctgaagccaagctgtgaaacttcagaacacagttaagggcagcaatcaagcccgttccaggctgacgcgcagggcgttcttacatcacatcccggggtgccagctcaaccccggcacgtcagcacctgggtgaagggagtgccgggcactgatgggatcaatacaagacacagaccccttccgtcgggagctggctagtctctacagtgccccacaccactgatttctatcaggctccagggcctcccatggaggagaagggctgtggcccctctgattcttggggacgtggtattcaggcaaaggcgcagttatttttcacaagcctcctctgacaagaactggacatcaatccactgccacccggggcttccaggttccactcgaagacccagagagattttaaactttctgggaagtcttgctgtcccgctgtacacctttttgggtttttctccattttaatgttttcccacggccaaagcagggtgtcggctgcagactgtgctgcaggggccggccaccaggctctccaggtgcgttttgctttttgaccttggcgatgtcggcctccatgccgcttgagtattccgaacgtaggatttcagcgaggctgtgtttactctgggtcttcttatgaaggtcaggccttttcacgtgtgctttcctcttctttctagtcaaggcactaagattcctgggggcatctcttagtccgaagctcttcgccacatgcccaaggtggagggatcggacgtggaagatgtgcttcagctccctggggtaggtggcgtaggcttggatgaaggactgcagagctttctt

SEQ ID NO: 342027 - DNA, 1000 bp, Homo Sapiens
tttttttttttttttttttttttttttttttttttttattcggctcagtctaatcctttttgtagtcactcataggttttaattcaaaggaaaaatatatatataataaactggtttacacccttggtcagactgttgcctggaattctctaccttctctttcacagtccaaagagtttgtctctgttctcttccttcactgctttagcaaagagagggggaacttcaaagaggattccaacagtgaagcagaatcatggggcaaaagtcactatggggccagactgaggttggaccacacaagcactccaagctgggccaatcccaaccgctggtgaagccgcacagcacggagtagccatccacataggcctggccacatggtactcaagcagaggttttccacagtactctttctcctcacaaacaaaccccagctctcccaggtaaacattttagaaaaaacatccaggctggtgtactactgtaaaacgctgccagtttctaattaacttagcaccaaatctgtgattccccctccctcaaaccaagtccatctgtagtttaaaatgtgaagtgccacatttctctttgcttctgtgttttcattttctttgaaagtattcctattgatgttcactccatgtcagaagaaataaagttgcaaaatatttggtgatttccgtgtaacgttcttcttatactgaagtaacttcatgggtttcggtcagaattatgtccacagaagtcttttccatgtagttcgtcatacagaaagactcttacacatggctatttttggacagtgcataaatgaagatacctcacaagagaaaagatcattatctgtatccatcagaataatatacagattcacagtcaatgagatgatacgctttgcagaagagaggcatcaaacattatactattcaaacacaaaaacagcaataaacgttctgcactacagaaaatttgctagcttctaactttaaggatttaa

SEQ ID NO: 342028 - DNA, 1000 bp, Homo Sapiens
tttttttttttttttatggaagctattaagctttattttttaaaaactgaattgtatttacaatgtagaacaagtctataaaattgatgtgcagttaattgtaaaaggataacactatttgtttagaaacaagctgcttcctctgtttatatttccttattcttgatataaattggagacagatactatttaaaaataatgctttttaaatagtaaaatatacaagagattcctgagcataacaaaaatatcttgaaaatatgtggccatttgaagtataaaatagcaagtgtaagaatagcatgattgtaaaactactgtttgaaggcttataaacagtacaaaatagtttgccttttctgactgcataattatacattagtgcaaacaaaaatgtctcaaaatttaatggctacaaatctcaaagatttgcagaggtgcgcaaaacatggaatttctttagcgtcatgcgaactgaacccagttctcgattaatcctttccaaacgatcttccaaggcttcctgatttaatcttgtctgtaaagtgattcgtcctccaggagaaggcatcctgcttagtgctgcctcaatctggtccttttcttttgtaagttcatcaaaaaatcgttctgtttcagctagggtccgaatttttgctgtatattcaaaatcattcccctgtggagtgactgaaaccggcttacactgttcgtagctaactgatttattcttctcccaggctgttctcacagatactttcttcactccatttggcaccggttcagggcaagagctatgattaacatggttatcggtggctttctcagaataagttttttcttccgagtcatctagaggaagaaactggagttgctttcttggattggtacgttgtaatgtagacacaggaacagtatctaaatcatccaaaagtatatcaaatcgaattggactgctctcatttttgctaagcagatgactaaatcctggggacaagtt

SEQ ID NO: 342029 - DNA, 1000 bp, Homo Sapiens
ttttttttttttttttttttgccagaagggttgatttttaattatgtgtatatacaaacttctctattttaacattcaacatattcaggattaattctagaaagatgctatagctgatttataaaacaaaatgatttaggatcagaaagaaaataggggcacacaatttcatgtagtctctccctaactacccccaaccatagcatcacaaggtttttttttttttcctaatgccacaattgaaacctgtattaacttaaaagttgacactaaaggcaggaattaagaagtcattttttatggcttttaagcacttgaatgctttagaacccccttgaaaatgctagtgaacaggtcttattcctttaaatgttgctttgatttgaatcttggtgaaatctagattccctattaaatagctgcatgctaattttggagaaagtacaatttaaaacctttaacaactactctattgactctgaagaaggggactttagcatgtcgctgtttgggctagagaagcatttcaacacctttctgcaaactaagataaaaaacaatgaatgagagctacaaatagaaatctagtaaggcagttctatcatgtaggaaaatggtttcccaaatgttttctacactgacattttttaaaaaagatatgatacccggttcttccacattcagtgtataaaactcaactttagacatgtatgtgcggagaagactcgtatgtccaaaaccatccatttgcatggcaatcttgtctttgcattgctttgtgtcattctggcttccctcacccacaggccactggagggctgggaggcccaggagctcagcactctaactcctccatgacttccatgacaatcgtccgtgggcccgtcagaatcagattgctcacggtccggtagtctacatgcaggacattgagcccgttgacagagacgacaaactgacagaccttcattcctgctgcggctgcagggccactggggtc

SEQ ID NO: 342030 - DNA, 1000 bp, Homo Sapiens
cacacacaaatgttaattttattacagaaactcttagcctgtggctgaatcacagttaacaaattattgaaattccacaggtaaaaatcctattcctttccccaatacactaaaatatttttatagacataaaggtcattctttaaaacaataatggttttggtgttgtaatttgcttttatttcacccttcagtaaagctcactgatgtggaaatatttttggacaattatgaagtgaatgctgaaagttagagtcagcactactacaatcttaacagtctgcctttttaaaggtagtataatgttgaactaaacttgaaaaaatcctactgctgtattaaatggagaactagagaatacaaatgtttattcaagctacagagctcgagctacactccatcttaaactaagagcagatactgccacctagatacattctgatgctttggttaactagatgctggcttatcctactttttgaaaaatggcaacaatagcagacaatagtggcttggtataacaaaaacacgatgaatgatagtcacttaaaaattcatataaatataatttcaatataatttgaagctttgaaaaaaaggcatttgtgttttgacaaatagcaattcttaagcctttattcaaacctataaatgcagaagatcgatggactattagaaataggagaaaactttataaaacataaaaaataaaagctacataatcctgaggcctatgaggaagtaaatgcggaggtgatatcagtaagacttttaactttcttcttttatcagattacttttttctgagtttgagaagaagaagggattgttcaacactctcaaatgaaaacacaaataagttttggtttaataaataaaataagatcacttaataaacaatgttttaaaaagagcatttcattataatctgttctgattcacctcctagcacacaaagcaaaccaatttcccctggcttttatttctaacagaaaaaaaa

SEQ ID NO: 342031 - DNA, 1000 bp, Homo Sapiens
tttttttttttttttttaacccccaaattataggattttattagccttgaaacaggccctgtggctgtcgtcccgctgggcacacagcaggggtgtctactggaggaatgcccggaggaagtcgttgtaggagatttttgaagacagcgtcttatcgtaatactccagaatatggaagaactcttcctcagagaggttgatgctgtactgtctcaggaccgtcctgaaatctgcgacgcttagcagccctgttccagcctcatcatagcttttgaacgtgcgccgcattggcctccagcagtgcacaattttgggctgaatacgcagcagagcagagtaaaaagatggcgtctccgcgccggcttctttcatcttgtgtgcattctggatcttcatcctgtgcatcagtgagctttcctttgcttttagcaggaggacacagctctgaatgaagtcacagtatgcaaatttcccgttgctctttaagtcgtattttataatgagctgctgacactcctctttgcttatgtccaggttgaatttctccacaagagccaggaaatcggaggcgttgatgtccccctgtctggccacgtccttctccttgcattctttcaggagctggcgccagcagccctggattctcttccggagcctgctctctatgggatcacagttctgcaagggtggagtgcccgggatcacggtggtgctcgctggagtacaggggtggctctgcgactttgaccctggtctcagctcctgagtgggcaatgagagggcagatctggtgccttccgagacgtcagggacactgctccctctctgggccacggccgagtcaccagtggccattggtgtggctgctgtctcggaactgaacctgctcaggaagtccgggtatttcagcctccccttggcattgactggcatctcgttccagagtctgtcaaactgttcgtccgtcaggatttggacgcggcgattacaaatggcccta

SEQ ID NO: 342032 - DNA, 1000 bp, Homo Sapiens
tttttttgtttttaattacagctttattcagatgtaatttacccttgcaaagtatataactcagtggttttcattatcacttatttttggatcatccaattttaaagattaccttaattattgaattgaaaatttacaaaaacttggtttattctgaaagactttattaaaagcgtttctattgtaagaacacaaaatattttaagccagtaacaacatttaaattaaaaagatataaacatgtcaaaggaatgaaacctagatgttttattatgtgtgaattatgagcgcttacctggccttgtgtataacgtataaaccttcacctgttgcatgtcattcagtctctgcagcaacattccttgtgtccatgtgggtgtttctatgtgtgactgtgaatatctgtatgtaaatggcttgtctcttgggtgcatttgtgggggtgggtatccaccgctattatcattgctttctttttcagaaagtgtttccaatctttgcttcattttactcaacagaaatgaggaggttggtttatatttcatgtcttttctctttcagatacagctggtcatgccacagatagtgaagaagaataaaactcttcagaagtcctgagatttaaagatggcataatcacttccaacatcccattccatactctggaagaagtagaccatgatgctttccagcagtaagccactcaacacggccaagaaggagagcttacggttgatgtttagggtcactctaattgcctgaaaatttgatgtaagaacaaatactttaatgagtttgaggcacacagatgtgtagtcatgttcccaaatgacagctggaatcagcaagagttttccgtagctagataataataatgctttcagcagcaaaatgaagttgggctttttttttgccgtcatgggccgttctacccacaggaaggtaaaaatgccaataaaataggcagtttgttctaaagcagcaatcgcaaacattctat

SEQ ID NO: 342033 - DNA, 1000 bp, Homo Sapiens
ctgaaactgagaaaatatatttgagtacaaacagcttgtgaaacttaatactttttttttttttttgcatcatcagagggttttactgaacttacaaccgacttgcccgctcagtatgcagttcagatgtgagaggcgcttctctgtacagcagcctgtactgtcttcaatcctatgcgtgcaggtgtctaccacaggcaaacagttttttccccattttgtagtaatgtgattttcctattagcaaaaagaggtcacccagcccctgtagacttaagggactcaagtcacaggatggggatttcctcttaatattttttattttgttgtttgaactcttgatgcaacattgtagagcagggtgttcaggacctgctgtgcccaagggactgataaaggaaaaagctctatttattctttttgtgatttgatgcacagatgaaaaacttaacacacaataacagaagttggtcgttaataaatcacatcctagtctttcagcgcttccgtaagcagacgacatcttcagttttctagctcttgtagtttcaacactgcaacatcaatgatgcatatgtccagaatcagttacaaagaccatccgattctttttctcttagttcatctatttttcactgtctcttggtcccaagtgtatctgagtgattaccttctggcattctctgctattgctcgttggggtgctctcgattgtccccgtgttttgtgggctggttgggagagggcgcttgggaaggatgtgccactgtcgggaggttgtgagtcactgggatgcctccagggatgatcccttccatggctgcaggaagtcctcctggagccacacccacgatgcctggcggatatctgtatgtggcaccattgagctcaggatgaattgcttgctggtctattactgaccaaggcgctgatgtgacaaagaattccttgttcacacaatttcttaagctttctgggatgcgacctgtgatggctcggc

SEQ ID NO: 342034 - DNA, 1000 bp, Homo Sapiens
cacagtttaattgctctatgcatttattattagctattattaatgcagaatgagggaacaaaaagctcacaaacactctacacaatttcacaagacgcattgcaggggaaaaagtgactgagatggatcaacagtatgctaaggtcttggtggacgcattcctgggggaggtggacctctaatgcctggtggagggggtctcattcccggaggcggcatgcctattggcgtccctcgagcagggggaagcccaattggtgggcccatgggtggtctcataccaggtggaggagccataatgcctggaggtggggttgctctgccgacgggtgggggcggagtgccccgtcctggtgggtactgtgttggggctccagcaatactggcagtcgcagcaacagcagcagctgctacagtgcctcttccctgtggagtcattacctgctgggatggtcccccaactcctcggacagggcctgccaatccagcaggggcctggggaattggcacaccagctggtactcctctaccagctgccctaccaaccccagggcctccagcagctccagcaagtggtacccgagcaatgccagtatctttggggggtggcccctccacagtcatggataccaagttctccccacgcagcaacaccagacccaaaacccgcttttcttcacgctctggttgcttcgcattctttggcttgatctttctgaactcatcacaatcacagaggatcaaattcatatgcttgtcaaaagccttaaaggtgccaatgaagattcggccatcttgcaggatacatctcattctatagtcaatgtgctgcagcatcttgctactcttgccaacagtcatgattgctgttccaccaaatccaatgtccacagttaaaacttgatgcttctgaagacctaggggaaggctatagataaaggtatgacgcaggttctcctagaaacaatgcaagctgggcagaagcttcaaagagtagatg

SEQ ID NO: 342035 - DNA, 1000 bp, Homo Sapiens
aaaaatatacttgctttatttaccaattttctaaaaggcaaacaggtcataaaaagacacaagcagtcaaacaaatctattgcactgggtaaagaaagtttggtttgcacacaaacaaaccacttgtccagcaaggctcaacaaatcatcacagaaactctgagagcttatttacatatctcttcgggaatatattaaaaagaaggctcagtttaaaatagagaaaaactgtttaacacctgtgtaagcacacacactaaagaaaacatgacttgatgcttggcatcacgtaaacaaattcacaagatgatcctattaagtcaactgcttggcacgcgctgaagctacagttaacaatcagtgagcacatattaaatgataaaataatgctgatggtaaacattcataacagcagagtaagattttggcagttttgtgtttcggtaacataactgtaaccttagatgaacacctatcccttcatgatctgactttagaggcaaggagtttgtaacatctaatggccataagaatgcagactgctaccttatcataggcataggcagctgatgttactttgtaaattaacgaaaaattaaagtgttcttgtgtttatgaagaataggtttaatagtcaggcataagatggttttacgatgaaaacctagtggattacaaagagatttcacctccatcaaaaaacagaaaaccctggtcccagttgggcgtggtggctcacgcctgtaatcccagcactttgggaggccgaggtgggtggatcgcttgaggtcaggagttcgagaccagcctggccaacatggtgaaaccctgtctctactaaaaatacaaaaaattagctgggtgtggtggcagtcgcctgtggtcccagctactcaggaggctgaggcaggagaatcgcttgaacctgggaggcagaggttgcagtgagccaagatggcgccactgcactccagcctgggcaaaaagaaactccatctaa

SEQ ID NO: 342036 - DNA, 1000 bp, Homo Sapiens
aatgaccaaaaatatttatttgttgatccttattgatctaattctgtagattcatccttaatatgcaggaagacatcagataacagttttgtaaagaggtgcttgttgactttctcaatataatacttattatagaatatcacaaatggaacatgtaatataaatgtcactacgagaatcacaagtataattttccttttcattaaaaattgttggtaaaattgttgagaaatgtttattctctgatcacagctcaggaggacttgagggtactaactataggtggcggggagatagtcttatgagaactagagaagatgactgtacttatttggcattgatttgtcacctgctttgtagtatgcaacgtgtaatactctacccagacaatgagagctcaatgaatgtagagaatttctaattattcacccagtatactaggttaattaagctcatcttcatttctgagttttattcacaaaacaatttgaagtgtctagtgttctgggatacagctttcttgaacaaagtggaagtccttagggaaagtcagggtccacttgtaatcccatctcttaagtgcacttttagaacaataggtttttctggttgaagaattggtagattgtctaatttcagtgggatctgagtctctttacaaggtttgaaggagaagttctgcagtgctctaatgacagcaagttttatgtttgtgagagcaaacctcatgccaatgcagtttcggggtccagctccaaaaggtatgtatctgtaaagatctatgctgtccttgttcttcttactgaacctactttcagggcagaacttctcaggctctgtccagtactttgggtcatggtgaagagcatagattggaaccatcactgctaaccctttgggaatgaacactccattgatttcaatatctttcttgcagactctcgtaactctactaacaactgggaataatctgagcgtttcattcaccaccatgtcaagg

SEQ ID NO: 342037 - DNA, 1000 bp, Homo Sapiens
tttttttttttttttttttggtttcctctgtcacttttaattaagacacaagttgagtaagcagcctccacaggctgtattcccaggcccccgcccaccctgacctttggcccagaagctactgcttcagtgtgtggggtggaggagtgagactgggtccacagtgacattattgctgacctcttctgtgtgaggaaaaaggccacgagaccctttgtggggccagccctgagtgctcctctcccaagttttaaggcagggagggggaaataactgtacagcccttttagcccccagctctggagtggcagacagcaatgaggccacatccctggagctgcccgggggaagtgggtgaggaaccaaagccgtggtccctgtagagcagctgtggggaggggagggccagtcccctgctcagtcctgaccacataagccttggtcacaggtgtaggtggagagggcactgacggacactgccctaaggtgcagtcctgaggcacttaggtgggcgcctatctaggccatgcttctcagttggccttgaccttggcaatacctggagctccattttgctgaagtgcacggggcagccgcttgcccttggtataagagtgataccagaagttggagaacagcatgaagaagatggtgccatacatccagatgaggtgaataatgactgggtactggtagttacagctggacataaagtagtactgggagatgtgcagtgagaccaggacaaactggatcagctgaatggctgtcatgtgctttttccaccaaaggtagggttgtgccacagggccaaaggcagataatccgtagtacaggtacattatgacatgcacggaagagtttatcatggcatggaaagagcccattcctcccggggcaatctttaccccccaccaccagctccagggaagcacagagtgatggaagacatgtaggaaggtcacctgcccgtctttctttcggagaataaagatcactg

SEQ ID NO: 342038 - DNA, 1000 bp, Homo Sapiens
tttttttttttttttttaaatcagtgtgtactttattttgagccaatgttttacataagaccaacaaactaagtgtgggcaaactgttcaatcacttttgagaaattacatggttcctatttaggtttgaaaaagtagtttgttgccataacatcagaccttaaggtgttttaaagtgtatcctaagggtactgacagaagaaaaatacagtgttatggaagtatacacaactcatgaccacacagtatagatccattcatggtgaataatgttcatctgttctccaaaggtagtgaaaaatattaagtcatcaaataaatgctcagaattaccaaggaacagttaaaaaggaccaggatccaaacaggttatttatatatttatctataaacaagtgacaacactaaaaaacacattgaaaaccagtgttttaaactctgaatgtgggatttaaaaatattccattaacttgagattgcaataatttttttaaaccaaatagcatttgactggcaagtctcatataatttacagctgtaatattcctaaaaggaatatctacatactatagcctatcaaatataatctgcattttgcaaatcaatacaaaaatctatccatcatttatacattttatatttatatactttttaaaaattagattttattgctaggtgaatttggaattcaaattaaatttggaaacttaataatgctcttctcataaccttctccccattctttttttaatttttaaacactggaagcaaatgattatcaaaatgagactgcaacttaaggcattttaaaagaaaaaataattaggtgccatatagcattttatttcaaaagtatattttgtcccacttttctcactagcaagagtaaaacacaaaccttttttcataaatatgactacagtaatcataacacaaaaaagggttgataggcattgcttagatatttaaaacaagggtaatactttcccactcacctaaa

SEQ ID NO: 342039 - DNA, 1000 bp, Homo Sapiens; identical to SEQ ID NO: 160112

SEQ ID NO: 342040 - DNA, 1000 bp, Homo Sapiens
tttttttttttttttttaatagaatttcattttaataagtatatttaaagtttatcgcttccaaaaaacagcactttaattacattcaagttgtattcattttaaataccaacaaacccatcatttacatatagagctagatattacaaaacagatggaaatttaaacaagttttttttttaagtccttccaaatttagaacattgtgaactattaagtacatgcctaaaaaatgtacacattatcagggaaacacaagttgctctaataggaaaagagccataatacacatacagtggaatataattcaaataggttcaatttacaggtatgtcttaaagtacaagaaaaccccaaagctaataactagaactataggcaaaatcatagctgactttctaaactaatgcaccactatataatgctttcccagagaaagtagaaggttctcaagattttatgttgacccatgatttttcacgtgttctcaaatataaaaccagagttttctttttgtctttaatttacactcatgtttgcctgtttgcttttataagaataactaaaatgtatcatgagaagtgccatcaaacctgtctatttagagctcagtaaccaagacatttctttcatttttccctgttgctctattttcccttcaaaaagtctctaaggaaattttataaacagtggtggtaaaaagataattctgagatggcaaagaaatatgagacttggcacaagcacggatttacaaaaaaaaaattatcccccatttattaaaccatatatgcgaaaaaggaaaatcatatctgaaaacataagccagtgaaaacatactgaaaaaaaatggaaggcggcacttagaattgtggcgcttgcaggctttagtttggaagacgcacagcaagcaagctaccagttgagaatttttaaaaacttgtatgaacttgtttaaattttgaacttgtttcaatcaagttgtagccaaaacaaaaag

SEQ ID NO: 342041 - DNA, 1000 bp, Homo Sapiens; identical to SEQ ID NO: 160113

SEQ ID NO: 342042 - DNA, 1000 bp, Homo Sapiens
caggctcgcatagtttttattaacatccgtctagtaaacagaatggacctaacagacaactgaaagtaaagactagatctcttgaagtgcaagggctacaacaacttaattgtggttacttattttaaaaagcaaacatactgaatggtatgactagggtgattacactagtttaaaaataggccaggtactgacactgcattcccctcatgcattgctcatttaaaatagtgaatattaaaatatgtgggctttacatctaacccacagaaagcccaccgcaaatgttctgtgtatcaaatatccacctcatgtgtactatgaaagttttatttatgccccattaagtcaaaagtaaattatagtaagctaatgacctgcatattttcatatggatgaatgtcagtatatctaaataggaaataaatggcgatcctatctacctatataaaaaaaatagaatatctttccagattttgcatactcctcactgtaagaagaggtatgcaggttttaaggtttcacaatcagttgtcagaaaaacagcagttatgcctgcagtatctcgttagcatctgactcaattatttttagattacattgtttagaagacattgtaaacccatctaaaactttgtaattattttgagatggttccaatgttaaccctagaatcatcatcagaaagagtaacaatgtgatgtagaagaacagctaatcgacatgactaaaaatatgctcattttcagaaaaacaatctggtcatctggaaacaatcacagctacaacctagggaacactcccatgtgggatactgatctggccaaggcacactttctaagcaggaaaactatcagatcagggtgaatttaggccacttcagaggtgctgcctataaacatccagacagaccttcttaggcagcagaactggtcccattcctctcaaagcagtttgacactaccctacccacatcaacccaaagcttgacgttaagtca

SEQ ID NO: 342043 - DNA, 1000 bp, Homo Sapiens
tttttttttttttttaaagtgtaaaacattgtaacttattttgtaacacccagcagttacaagaaatacagcaggcctactcactcctgcagatgacacacggaatccttggccattggagggaatactgcagagcctttgggctatcgctgacctcagaatggtctcacatctcccacaccatttcctgctttacactgtgaatgagggatgtaaactaaaagtgtttgcatgttactgtctttacataaagagacatgattgggagaaacctgcagctgcccagtgtttgtttcatttattgagaaggaagagggaaaaaattagcagatagctctaaattttaaaaagctgatggagtgttgctggagaagtgtgttttggtctttttccaatcttcttttcctgcaccatacaactgttttaatgtgtttgcaatattttcttatacttaccctttttcgttccaaaaatctatccatgaatgctgaattttaactgactctttctattaaaaggaattacttcgattaaataactgggaaaaacattttgcacaaccaaatagaaaagaaatatcctgaacttatgacttagcatttaaacattacttctacagccttccaactgaaatattttttctaataaattagcttcaagaggtgtttcaaagataattttaataacttttcttatgaatcagttccaaatatattagagaccaaccatcatgttcttaaaactttgtaacttgcagtcaaatatatggattctatatagtacaaacatttccctacatcaatcaccttcagttggaaagtgcctctccttaaaaagagatcaaaactcaccttccaggtagtgattactgcgtaagtttcatggaggaaaaaaaaatatttataaatgtgaaattgcctctaaacaaggcaaggtacatttccatcacttgtataaaacaataacatgaagatcaccctgttttgtcttctccagtgaa

SEQ ID NO: 342044 - DNA, 1000 bp, Homo Sapiens; identical to SEQ ID NO: 160114

SEQ ID NO: 342045 - DNA, 1000 bp, Homo Sapiens; identical to SEQ ID NO: 160115

SEQ ID NO: 342046 - DNA, 1000 bp, Homo Sapiens
tttttttttttttttttttttttttttttttttttttcttttaaaatcacctttaatgctgtattctcccacaaataatttaaagtgttgctcctatcttacttatataaaacaatcatatactaatttgtagggtttttaaaaattctaaacatctacaattttatgaaacatactctctatcccagtccttagacaacttcttttgaggtattctataatgtgaaaatcttaagaaaacattaatcacaaacaaagccaaattataatcatgaatatgcatatgaacaaaggaaaaaaatttctataatttttgtaaccccagttacaaaagtactatagaccacaaataaacttgtggagattattcggtatcttgtctaccccttaacactttccacacagtgcctaatacatagtgtgtactgaaatatttgttaaacacagtgaattagggcaaacaatctggcacaactttttgtattcaaatgctatggagttttcagaaaacaaaatctacttattttgtgatttgaagtggaaaaaaaacaaagcaacaaatgcagagctaagtaaccatgaggttgataccatcactacaacagtagttaagatgtactggctctccactgtaagtcattgaaagggcaaaaattacgtaggtttgttaacattaacacatgctttattcaagagataatattcaaagagttaaatcctaagagttatccaccctacagtaaaaaggggaagtgggtaccacttatgacatgtacataaattccacttttatatttctgaataaagctgcaattgcttctttgatagagccatttcttaaaacttttgctaataaggctatgtgaactgtgttcagaaactttgacaacatgcacactcactcctctcaaagtcagtacccaggattttcactccaggctgagtacctattaagtaactaggacttcagactgcatgttactatatgaattcaatttta

SEQ ID NO: 342047 - DNA, 1000 bp, Homo Sapiens
ttttttttttttttttttttttttttttttttttttttttttttttttttttttttttttttttcaccagttttagcatgcaactttattaacaacatgtaaataaaatctcaaaagaatacacatatcaatataaagcacagaagtatagcttactcaggatgaatagattcattatcaggtcacgttgcagaaataccaaaaatatctcaatttatatactatatagcacaataaaaatcagcacatgttcaggatctcaagattaattggtatccataaaattgcctccctcaatcaacatggaaaacataagtattgaatttataattacaatatgcattggtttcatattgcaactccaaaaaactgtttgaggctttatgagaacagaggggtattcagagttttagtattaatcgtatgactttatctctcacttcgggatcactgtgctctgctaagtcttggagtttctgaccaaactgttttgcttcctggaatattgaaataagctcagatttagtgaacttttccttggtaaatagctttgcctttgttttgaactgaaaatttatattctcaaatatttcaataatattaagaatattggcctttgactcattcttgttaaagggtgcaaccaatgatgacagtactttggcactgatcaattctcttgtattggcgtgatttttagacaaacacgaaaacacttttaaaacataaaacttggttttgacacttcccttgtttaacaaggtgaggaaatctggaatataactggtaatcacatagtgatcttcaaattttatactcaagtgccctagtaatttcagtccagccagctgcacaggggagttcaaggggcaagagattatgcctttacaaacttgatgtatatatgactcccctgattttggttcttcggaagactcagagctgtcatccaccatacttaaagctccagggtgttctttaacattgggattattgacca

SEQ ID NO: 342048 - DNA, 1000 bp, Homo Sapiens
tttttttttttttttttttttttcatgagaagtttgcttcaagtttaatacctttttccttttaaataacaagttagaatagctccataaatacaaaattaagcctctgatactatactcacacactcaaaggatgaacaaacttcaaaaataacatatttttctttgacaaaatcagtaaattggcaagcttgtcaaagaatcatttcagtctaacattttacttagtggataaatatttgtcaacaatctgtaaatagtataaatgcttttctcaaaatgctacgtgaaagaagccaggcacaatagattacacattgcatgattccatttatatgaaattctcaaacagcagaactaatgatagaaagcaaaccagtgtttgccaggggccaaggataggagcaggggattgactgcaaaaggaaaaatgagaagttttcagggtaaagaaagtgttctgtatcatgatcactgtggcagacagacaactgtatatatgttttcaaaattcactgaatttgacactgaaaattggagaattttgtgaaaattatacctcaatttttaaaaagtcaatacataataaatcaatatgcatttcaaagaatcatttcagtcaaaatattttacttggtagacaaatatttatttgtagaaaatctataaataatatttttttcacaatcacactgtttacttgctgccatgtttattataaggaatagcttttcattttcttctagaaaaacaagcaaaaccagaaagtgcttggaaagtgaccttgaatgcaatttaaaaccctacaaaaatgctgtataaactcagtatactaatgcagtatttggcagatctttgaatattttctccagaacataacagtataccagaggttgcaaattcaggtcatacaagggccaagtggatgacataagtgagcagcatggtggcagtggtactgtggcaaagtggagagcacaaggctcttcccaagtgagcc

SEQ ID NO: 342049 - DNA, 1000 bp, Homo Sapiens
gtgagttaaaccagaaagacatttatttctctcatgtaaaacacatccagaggtaagcagtcaggactagttgggcatcttcccttccaaagtcatcatgccctgggctccttgtatcttgttgctcaatcatcctcagcatgtgtctttaacatgaagtccaggagggctgcttgagttctagccatcacatttgcattccagccagcagagaggaaggacaagaacacagctgctggttggtttgcaagctgtctccactcaacaggtctttaacagtgctattgaaatctaattgttgctctccaatttctgattgtgcttgattatctccaggagaaaaattgatctgaccggtgctattacttttggtgaggtaagatggtgtttggaactcataaacagaagtgctggaatcgatcatattttgtgggttggcactaggaaaaacagtggaaggttccaaaatctgagtgagattcatccgggctgtataattagagggcaggttgttcattcccaaacctctcactgcatcatcattgtcggaatcaagtttactcaacaaaacattggttatttttttactgtttgcttgcttctgaagagcgtttgggaaggctgtctgcatcatgactgtcaatggaactgattggcttctttgagctatgttgttggcacatgcgtctgtgtgaacatttgtgaaaacatgaacttctggggtaactggacttccaaagggggtcacattagattgtgggatattagatactggatagagggtgcttccactaagattacgttggcgatgaacagcagggctcacactccggcatctgaagttgctgctggcagatgaattagttcctttattatcaagaggggcagggactgcaaaaccctcctgtttgttggtgttatttacagtggcaccttgatgctgcacaggagagacaggagtcaaacgaccaaaatgagtgtcatgatgtctggattgaga

SEQ ID NO: 342050 - DNA, 1000 bp, Homo Sapiens
tttttttttttggcgagactccaagactattatttttatttccggacaaaaacatctgcttcacacagtgcacggcatcaaatgaagaggaaagaacttgtatcccaaagcctggctttctgtatcatccacaaattaagacagcatctgctgagcccatgctgagcctgtcacagtcaacaactgggaaaccggggcctctactgaaccaggggacaagtagccgaagcacttaaacagcttgatacttgttttttggtacatttgtttatttaaagcacaggaaatgaataaaatgccacctaaaaagtatctgcaatgaataaattatttccagtgaagcactgcagatccacacacaccagtctgctaacctttaccaaggccatgtccggtgggcttgtgcttgttccagttgactcttccttgagacctttcccttctgtgcaatgaccacagcattagagaccagtcctgcatgcgctggccttcctcgtaggcatggcagaccacgtggatgagcagtgggctggcatgcagtaggcttcaacaaatggcacttcactgtttccagtgaccctgaaatgttttacgtaagtggggcctgggctttaaagaaaagagccagggttcctcaggctgggccccttcactgaggcacagctccaggaaatactggtctcaggagccagcaacttgtccaggagttttgagccctcagttgaaggaaaatggccacgtggtgtccttgcaggcaacagtgatgtcggtgatggtgacaagtagccagcctaaggaaggccaatcccaccttgggtggaatgcagggcacctagtcctgcttggaaggggctgggaggttggggaatgtcgagaatggagggctagggctccacacagtgaattcaaataagggctcttcagtgagggaaggaagccgcagccctcctttggccctttatgcagggtcagcatctcggctcacaaggccaagggtcac

SEQ ID NO: 342051 - DNA, 1000 bp, Homo Sapiens
tttttttaataatttacccaatgtttaattgagtaatgaattcatttaatataaactttagtatagcagaatactacaggttacccacatttaaccctaaaaacaaacaaatgacaggcacttcagtgaaataacaagcccatgttcaaatataaaatgctaaaagtgagaaagaaattatgaaaatatatacctttaatttgcagacatataaacacttttggtacagtacagatgcatgatgccaaaaagtaaaatgatccagtttaagctaacacattccttgtttatacagattattttgctatagctctcatataaaataatatttccagctcacacaatgaattgaaagtgataaatcactgatgaaatagctttcttcattgcaagagattcagtaaaagctaaattatcaaagaaatctgctgcagggcttacaaataaactgttggatttaatccaaaaccaaagaaaggaagccagaaatggtagtcaacaaacctaaacaacaacaaaaagataagtacagtataactttcatataaaaggcccaactaaaacaaccagtagtgtacacaagcctctagaagaattcacttttaatatgatttctattttcttatgtgatggatgatttcaagcctataaaagtctaatatataacccaagtataaagtacgaccaacaagttgtgaaagcactaaaatgtcatgaatgcctatgaagcaactaaagattgaagcatttctttgcttctggctgtttttcttgggcacaatatctagttacatttcctgtaatgaagaatatatatatgtatgtatatatctatttcccttgtaataataacaagtgcagtggtaaagcaaacagaaagcaattcgagtacacagaaagtggaatactcttcagcaggctgaatctgtaacacaaggcaatgattttatccttgctaaaaaggaatcgcacttctttttaatgccttctctttcaaact

SEQ ID NO: 342052 - DNA, 1000 bp, Homo Sapiens
gtgatttataaccatttattagtgaaagtgtttttaagcacagtcagggtgtaaacagtgcagcattcctgctcccctccgtgggagcagcgtctccttttcaattcatgtgactacagaaggcacttggtgaactgtgcgtgtctgaggtgtggaaaccaggagagggggaaagaattctcaaaggcctgacgtgagaagttggaaaggtttgcaggttagggaatgaattgggagtgggggccggcggcacccatttcggtgactttctccccatttcatgtaaacagaattgccagggaccggttaccgtggatatgtttttctaaaaactcagtgtctgcacaatccattgatagaactggaggatgtgtctgtgtttcctgttgggtttttctcatctcttacatcatacaaacttcaatttttaccttgaatacaggggtagtaggggtggtggtggtggtggtggttgagacagggtctctgttgcccaggctggagtgcaatgatgcaattatagctcattgcagcctcgaagtcctgggctggagcgttcttcctggctcagcctccctagtagctgggaccacaggtgtgtaccaccacgcccagcttatttttaaattcttgtatagatgaggttttactacgttgcccaggctggagggtggtggtttttatattccttgtgtgaggggtgtctgtgatatttggaatttgagaatggatttagacaatgctaagtacagtctgctgggttttgctttgttctgggttgttgttgggttttttttgtttgtttgttttggtttttggttttcttgccgtggtgcaaaactgtagaaagttgcttattcactggccttggttccattgaagtctgcgtctcgagtgtccgtttcctcctcagaaccatctgcattttcaataactctacgtcctccagaccttctagaaggaacgaaagaggtctcgtttcctcgcctggtgcatcact

SEQ ID NO: 342053 - DNA, 1000 bp, Homo Sapiens; identical to SEQ ID NO: 157824

SEQ ID NO: 342054 - DNA, 841 bp, Homo Sapiens
ttttctgggtgaagtttattctgttttcacatctaggttgttggggagagtgatagacaaagttctggattctgggcatcgtcggcgcatgcttgtaatcctacttgggaggttgagacaggaggatcacttgaggctaggagttggaggctgcagtgtactatgttcgcatctgtgaatagccactgcactctagcctggacaatatagtgagaacccatctcaaaaaaaaaaaaaaaaaaaaaaaaaggcaaagttctagatcctaactggaagagttaggccaagaaggaagaagaggttctgggagctgctggctactcctcatcctcctcactatcgagatacttgtgggtggcgtagcccatcagggcaccaatattacctatgacgacgctgctgccaccagccccgaggctctgcagcgtggccactagccccccggcgggcacgccgcccccattcaggatcgcagaccagctcatcagcgaggcagccaccgagttggccgcgatgccggcgccggtgaagcccagcgcgggcagcccggcgactgcgagtcctcctccgacggccatgaaggtcagggccttccagaacccggagccgctgtccgagctctccgagcactttttcttacctgcatccttacccgcattctcacctgcctccaccccactgcaagtgaagagcagcaggtagcacaagaaaagcgataccgccttctgccgcatggtggcgccgcgcgcgggctccgtcactagaccttggaggagagaagagaagcaatcttcagcccggagcctgctgatagatgggcacagcagcgagtaaacggttc

SEQ ID NO: 342055 - DNA, 1000 bp, Homo Sapiens
tttaaaaaaaaattaaatatttttattatatacttttaaacatatagaagatagaaaaaaacagtacaatgaacagccatgtccaccagttagattctgtaacattttgccacatacgcctcacatacattttgttaaaccatttgaaacattttaagacactctaacacttcattcctaaatgcttaagtatgcaaattaagacagtcttttataaactacaacacccttctcacaggccataaaattaccaataattatccaatatcattcaaaatctaatccacattcaaattttctcaactgcctcaccaccgtgctggcctcccacccccacctcagtcttttacagatggtttttcaaaagagtccagtaaaatatttcacattgcatttggttattacataacttttaatcaagaagagttacccattccacttccttttttctttcccaacacttgatattttgaagaaatgaggccagttatcttctataacgcttcacattccagatctgtctgatcgtttctttagtggtgtcatttagtgctgctctatgccagcatttctccttaatttaaggaatgtgagcaccttccttctttttgattttgtctaaaacccatataatagccagtatgatagccactcatgtaccatgaaattaacatacttcccaaagcatcagcatcatcaagagaatctggacatatgggaggtggtgggggaattatctttcctggtcccagtcttggccctggcatggggggtggtggagggagaaaagagttccatggagcagatttgggcttgatgttatctgatttatttccaggagacctggagttctcactttcatctgttgaaacttggctttcattttcattctcttgagcattctgttctatattattagctacttcacagattggggaaagtagatcggacagattttgctcctctctatttccatatccagtgtaaaccacaacacagg

SEQ ID NO: 342056 - DNA, 1000 bp, Homo Sapiens; identical to SEQ ID NO: 160117

SEQ ID NO: 342057 - DNA, 1000 bp, Homo Sapiens
gagatagggtcttgctccattgcttaggctagagtgcagtggcgcaatctcggctcactgcaacctgcacctcctgggttcaagcgattctcccacctcagcctcctgagtagctgggattacgggcgtgtgtcaacatgctcagctaatttttgtatttttagtagagatggggtctcgccatgttggccaggctggtctcaaactcctggcctcaattgatccacctccttggcctctcaaaatgcttggattacaggcatgagccactgcacccggccacaagcttctacttcttgcagaatgcctttgtcccatgaaacctagtccacgagtgctatgacacttcctgaagtcttgggtggggtgaacgcacaaatcctgggggtgtagagaggaggaggatgtttacttaaaatgtcttaaggttcagcattgacagagaggcaatatccaaatcactctaagttttgttttgggtcctctgacaattgagtttccataatctggtcggctcagagacaccatcatgtgtggtatattcacaaatgcagacaaagaaaattctagaaagccaggggtgaaaaagctctcctttctcagacgattctgtgaagtctatgtgggccaaggagagaagaacaaaagtttctctgggccttggcctcttggggatcccttctctcattttctaaaaactgtttctcacaccaggctaaggaggtggtggggaaggtctcccttcccctgcccacctcagacagttctagggagatggaggtttcaccacttggccactagtctcaaataactggaaggttccttttttcctgaggtcatgaaatgttctggaaccacagcgcccccgccagccctccgtgggagcacagaggggcaggccttgattggtcttctcaccctacagccacttttttggcccaactctcgagcaagccttcatcaccatcagggtctcatgggcagtctgggtttgccagcc

SEQ ID NO: 342058 - DNA, 1000 bp, Homo Sapiens; identical to SEQ ID NO: 160118

SEQ ID NO: 342059 - DNA, 1000 bp, Homo Sapiens; identical to SEQ ID NO: 160119

SEQ ID NO: 342060 - DNA, 1000 bp, Homo Sapiens
tttggagatcaagttaaatgtccaatttatttttataacttgaaaccagaacaaacttggttttgaacaagcgtacaaatgaaatggcagacacatgctgaactcaacattgtgacattaaggaaaaaaagaggcccaaaatcttgtacagagaataaaggaacaataaatattttactaagccatattgaaatgacctcctgtcatctcaacattttatccataataaaaaaaagtgcctgtttcttaaacagagcacaaataccaagcaataataaatagttccaaacttgtagtaaaagacaaaacctccaagtaaacaacaaaagctcatacaataagtaatagaaaaggtaataaaaatattttgccttgccagtacaaatgcaaacaacttaaatcaatgggactttgctttgcagggctgagttacaaggagcaccaaaatcacgggtttgcctgtgttccacgagaccttcggctgacggttacttaggaccgggatgaaaggctgatttccttacttttcacattttgcttagagtaattcagtctccttctctccccatgaaagaccctctaatgccaagtggcaggttccaattgggggcaactttgaacaaagttgtggcagtgcggaaaccggcctgaggtcggctgggtcacccatgctagaggcctctctctcgggatcatctgcttccgtgttggttttttaaacacaaaacagaagcaaaattctctcttctctgcagtcacagagacacacaatgcttgtgctttgggatggcttagtcctggcaatctggtaagctggtgagcactggctagctgttatgactacaggaagaccaccctggaggcactctaggacctcagtggggcatccaaaggcaacagcagcccctggatctgcaggtaggaaactgcagtaggaaactgaaatctcagctttctctcccattccctccccccttttttttaactttgcaaaggtaag

SEQ ID NO: 342061 - DNA, 1000 bp, Homo Sapiens
taatagaagatggacatggtttaggtcaaaacttggaccagaaaccaacttcctttgaaacagctctaccagttataagagcaatatgctgttaggtgaagaactgtttaacagaaatatattatgtttttgcaaacaggcagctgatccaaaattgtgttgaaacacctcagaaacataaatgacatcaatactctataaattaatgctgttaacaaatttaaaaaataaaacatacaattttcaaattgaaggcacacatcccagttggtactggcaagtttaaattgtttctaatactggtggactcttcatttgtaacctactgagcagttacagagggtactcccattgatacaaaatgctcaggtaccggcatttctccacatccagagttctttctatattcccttctgatttccatcccttatctgttccctgcttttgtccttccccagtctcacccccatctctagccatggtaagtgagatggcggaagcaggtgcctagaagcaagcagcaggaagcagcattttcccactcctcccagagctctgggctcccagactgtgttcctacctctggacaatgctttctcttcctcctgggctcagagggcttcaccagagcctggaccaccagtggtaatagctgcattatttagattttgcttcaggatgctcagaggttaaggttaactgatcatactgaacatcatgaactccaaaagctttcacttaatccttcaggtaaaggaaaattgaggcttgatgactaagttggtagtattaataactacatcagtcaccatatctgtacaacacaaggactcttaaattatacccaaatcatttctatttggctttaggaaaaaaacaagatttccttttcagcatttgttctgttttggccaaataaaaattgttttctttcttcctctaagctcaccctacggcatgtcaggtaacaaaagccagtctgcccagccttccatcttta

SEQ ID NO: 342062 - DNA, 1000 bp, Homo Sapiens; identical to SEQ ID NO: 160120

SEQ ID NO: 342063 - DNA, 1000 bp, Homo Sapiens
cagggaggagaccacttttattgcttgtctgggtggatggggcaggaggggctgagggcctgtcccagacaataaaggtgccctcagcggatgtgggccatgtcaccaaggaagggggtcttcatgcagccggtgcagagctggtccatccagaggggtgcctcgtgctgcagcggcgtacggcgtgggtagaaggtgaagtccacgcggtagttgagcaggcagctgagggaggccatgtagaggtcagagaagcgcacgaggcgccttgagaagtaggtggggttgtggaaggtgcggaagatgctgccgaactgcgcattgaacagggccttggtgatgcacctcagctcctgccgctctttcatccaggcagccagcacctgcctcgactccgcgtcctgataggtctgcatgcgctccagcagccccgtgagcgcctgctgccacgtcagcgagtgcatgtactgctccgtgttgatgatgcggatctcacgctccagctcggggatgatggcgcctgtgcgccagccgtgccgcagcatgagatccgccagatcactatagaggtggtccccgaagtagagcacgcgggggccacgccattccgtcaagcgtaagaagtcaaacaggtttccctgccgatagatcttgcccttttccaagcgggtgatccggtcccactgaagtgagcccttctcatcgagttttctgaaaggcttgcgccggtcagtgaagaagctgggcttgtctgcctggacaatgaccacatcgaagagctggcgccaatcgggacccaccatgtgccgcatccccttgtctacgaagctgaaaggactgttggtgatgaggaacagctgtttcccatgggccaccaggcggctcaggacagcaaacgtctcatcccctctcaggatgtacttctccatgtcctgctcgatccactggtacatgaggcccttcacatgcacgtctcggatggcgtccgtcacgtccttgt

SEQ ID NO: 342064 - DNA, 1000 bp, Homo Sapiens; identical to SEQ ID NO: 160122

SEQ ID NO: 342065 - DNA, 1000 bp, Homo Sapiens; identical to SEQ ID NO: 160123

SEQ ID NO: 342066 - DNA, 1000 bp, Homo Sapiens
cctgccgcatgagattattttattaaaaaactcaaaggaagcagagtgtggagcggtatctgtcctgcgtgacgtctcacatcggagttggctcagaccctggctgtgcatccatcagaaagtgcaaggcccaggccatgagctggggaggaagcctgacagcttggacccgagcacagagggacgtgcagggtggctcatactcatactggaaggcagaaccatcacgatgcctctttgggggttcccagacagagcagggctcctgggctcccctggtagctccggtcctgggaaaaggcggccgattcttgcagggcaaccctacaaactccttgaactccaggctaggtttctggggcctggtcacaagagcctggtgtggactggggacatggctacggggtgagagactgggagtgcagctctggagtggggagctgggggtacggctggcgtgtggggacctgggggtcagggtggcaggggctgagcagatggctggtgagggctgggagctgcttctctgccctgggtctggagcagccaaggacagggcaggcagaaggctgatgctggtaccactttcctcggatgacatgtggccgggtaaggccggggttcctgaggaactgggtgaggaaggaggagaggctatgagggtcagagataggtcctgcagagccgggtctggtgggggcagctcagggccctgtgtcctctgacaggggcctagagagctcagaattagctggtcattctcagagatgcacagcattgagctggggacagtgtacacagcttctcccgtggccttgcatcgtgaggcagcccagtgggtgacagggggtgctgtgcaagggccctccagtgtcaggcagctttcagccaggcacacgagtgccccctgatgctcctggtcctcccgcatttcatccagaagctgggacagtgataggcctgcattggacgaggtggactctgaaaggtgctcctcaag

SEQ ID NO: 342067 - DNA, 1000 bp, Homo Sapiens
tttttttttttttttttttttttttttagaggatgaactttctctttttattttcagtttcacctcctcagtctcagctttcttattttaagagctggccccgtttgtctggctgaatggattatctacccccaccatccttaatgtatttccagaggtctctaatgaagaccctgagcttagaaaactcaaaaccagtgctgcttttactcaggttgattttcttctattcttctttcttcagcagattaggggccaggcacggtggctcaggcctgtaatcccagcactgtgggaggccgaggcaggtggatcacctgaggtcaggagtttgagaccagcctggccaacatggtgaaacaccatggctactaaaaatacaaaaattagccgggtgtggtggtgcatgcctgtagtcccagctactcaggaggctgaggcaggagaattgcttgaacctaggaggtggaggttgcagtgaggtgagaccgtgccactgcactctagtctgggtgacagagcaagactccgtctcaaaggaaaaaaaaaaagggaatacaaaagagacggagaaagcagtaaacagtagtataatttaagaagctgaccccagaatatattctgtattcccatgtttcttctatggggttttacttcctttcagcaatttcttcaaagaggtagtttattctgcagtacacttgttaagtctcctctgaacatcctagaaaggtttttccatcagagcctctatccaactggttccattcattagtttagtggtggcaatgacatattctgtacctccatcttccaactgggagagaaatcgcagggcagcaatttcagcgaaggttacgcccccaaggaaaaatatcagagtcactcggttttctcccggttgacgtttcttctgcagtcctgtgggcagtggctgccgctcctcaaagtggggccctgggaggatgcggaggacctcctcgatgctccgccagccagg

SEQ ID NO: 342068 - DNA, 1000 bp, Homo Sapiens
ttttttttttttttttggaatgcagagatctattttactttatttataatgccaaaaagttgtcaatcaatacctgattagttagaggtagaaaggtaatcattctgattgtcttcaaaaacacaaagtttctttgtgtttgctcaaacaactacactttgcagtctgtcccaatgaaatcaaactggacttctcaatccaccactgcaaattggttattcactcaacctatacattcatcattgtattctgcttcatgatagctatttcattttacattttacataaaatttaaaaaaatgactgcaatttataaaaatgaaaaggtaaattgtagaaatacacctttttgaccagcaaaattttactaaacaatctcagcaaatttcgtaattcatctttcaatatcacagtcttttaatgtcaatgaaaacaataatttatgaattaaaacatctttttaaacctgacaggaaaatatataagcacaatttctggataaagaaaatgaggtgcagttctcagggctttagtacttcattttaaacagtaaacacagtaccaaccatcgttttgattccaatgaataaaaagttaagattaaatttattaatcaactttgaagtctgaaaccgaaatgatcctttaacagcattgccaaataaacaggtcagttctacaaagctaatcataatgccaaattttgaccaaatgataaagtggctctgttaccatagtaccagagtctgtctttttgttgcgtttctgtttgccataacaaccaaggattgaattacatttaagcagaagtatacaaggcttgatgaaattgaatatgagggattaagcatttttaaagtatgggttataattccttttgcaacacaagttctactgcataatttgcacttgcctaaaaactttttagcaacaaaatgtattttaaaaatatcatcatccctacatgtcacattaactgtagaccacttcagctctttat

SEQ ID NO: 342069 - DNA, 1000 bp, Homo Sapiens
ttttttttttttttttttatttcaaaaaaataatttataaaacgccatttgctcctgttttcggcaggcttccagcttctctgggctcaggggccaatgctcccgtcaagacgctggggcagcagcagcagggggaggtgtggggaaagggggttcagaggcccagaacctcctgctggtattgggaggcaggaggtttagcatagcagctctccagccaggctcagccaaacccgggatggggactaagcgccaaggtccaagaagccgagcagaaccctgacatttgggccatcaggacacaggcacggcagctccaagggcaagggcacggcccttggacacggcacagcaactctgggccaggggccccatgctatcaaggtcgagcactgtgtcaggctgtggctgagccccaaggcccaaggccaccagcctatgtgcctgcacagccttgagccttgctcatgtctgcaccccagacccgaaggggaaggagctggatcccaatggcagggggtcgtggctgaagacagaatcgctggaggagcaggtgctgctggcgtccccaccagagggggaatagggtccgaaggtcaggcggaggtcgaggtactcctcagagacggccagcaggaccttgtccagcgcctccaccagctgcttgaaggtaggcctctgggagggcgctgcgtgccagcactcacgcatcagcccgtacagctctggggggcagtgtgggggtcggtccatccgatgtccctcccgcagcagcgagaacagctcctccaccgggatgccaggatacggggagcccccgagggtgaagatctcccatagcaggatcccaaaagaccacacgtcactctggtgtgtgtacacccggtcaaacaaggcctcgggcgccatccacttcacaggcaggcggccgttgctggttttcttatagtagtcaatgtggtggacgccgcgggccagcccaaagtcagcaatcttcatc

SEQ ID NO: 342070 - DNA, 1000 bp, Homo Sapiens
ttttttttttttttttttttttttttttttcaggttagcaaccaggtgtctttatttttcggaaagttcgtcgctgggttaacaaaatcgcacctgccggtttgggtgacacctctggccaccatgcactgggccccaagaagagaccaccctgagccatggccctgcaggcaagcaagggacagctgcccagactcagggcccagtaacagtacagaacgaaccaactgaattcacggcttccctccaagctttgaaaggtagcagtccaggctataaaactctagaagcattgcgtaagaagtgttaagtctacaacaaatacatcttgtaaaaactcaataaattatatatatagatatatataaacttgtaacatctaataacatcggaacctgcacacagggccggcccctccctggaaaccgtctccctgcctgggacacacagcaattagaagaatttgtatgaaaataccagcttgctttgaagtccaaaaaataaatctcctaaagaaaaatcctatagaaatctaattctcctgaaaaaggacaaagcaaataaaatatcttcactggaatcacctccaactattaacaaccttttaggcttggaggggatcctccagctccggggcaggctggacgtacattcttggccgtccctctatcggcgggataaaccttctcggttgtcaataagttaaaaattaaaactctccgccatgtggccagctaaatgctggaagtgttggggtgtgggaacaagagtgccaggggcccataaatagctttacaaatatacaggtccagttttaaaacaaaactgcggtgccagaaaaagccctggtcctctgcttgcatgggtgagacccctggggcctccctccacgcccccccacgccccgcccagggccatgcctgcctcctgtgcccccagggtcgcaggcctccgttgtaccagccttttcctcttccatatatgttatatatatatatgt

SEQ ID NO: 342071 - DNA, 1000 bp, Homo Sapiens; identical to SEQ ID NO: 160124

SEQ ID NO: 342072 - DNA, 1000 bp, Homo Sapiens
tgccatttcagacatacttcccttaattattaatacttgctagaaaatggagtttgacattatttacaattataccaatattcacagaggccaactgtcacaggcattaagggcacaccagggccaggagacctcatttcagacttcccaaatatttttatattttagctattaagatcagttaccagagctcaacttgttcttaacaagcagaatttttatgtccattcaaagagtctcttatacctttctgggcctatttacttgcagagaacagtagaaactgtaaccaggctcttcatatcatgcattcacatgtgatgtccaatcttcatatgctgtccaatttctttaagataaatggagtgactcgcagcagggccacgtagatgagaaagttctgtatggagatcatatcctcgtgcatcttccgtttcatctccgtgaggtccagcttccgggcaaggcccccaatccggaagatcagctgcctcgctctgctctccctaatggcccccttacacccggaactcggcctatcccctcgccccagctaatttttgtatttttagtagaaatggggtttcgccatgttgcccaggctggtcttgaactcctgggcacaagggatctacccgccttggtctcccaaagtgctcagattacaggcatgagccaccacgcctggcccaacatggctattattttttaaagtgctaaattatggccgggggctgtgactcacgcctgtaatcccagcactttgggaggccgaggcgggtgaatcacgaggtcaggagatggagaccagcctggccaacatggtgaaaccccatctctactaagaatacaaaaaattagctgggcgtggtggcaggcgcctgtaatcccatctactcaggaagctgaggctggagaatcgcttgaacccgggaggcggaggttgcagtgagcagagatcacgccactgcagtccagcctgggcaacagtgcgagactc

SEQ ID NO: 342073 - DNA, 1000 bp, Homo Sapiens
tttttttttttttttaaattttattaatattttaaaaaatacataaaaatacaacatccaatgtctgaataaatatatttaacaagttgcaagataataccttattttacacaaaaatttcagctttagaaatcttgttaaataacttcattgttgttatatatttcatttttgtctttttgtaacaaaataaaaactctgaaattacatagaaaaaagacaaaatatttttgtcaagggataagatagtccactgaaaacttattcacaattccactgtaaacattaataaacattaaaatatttgcataattgtgtgctcaaaaatcctataaaaagtggaagacttattacaactgtagttttcagtcaactacacttcctttcacaatttattttgtcccatttacaccttcaatcctgggcacactgctgaacatatactttggcagttctaaatagcaagtgcttcacaaaaataaaaaaaacgataatgaaaaaaaacacaacataaaccccctactcaccaagtgttcaaatacatcttagtgaaagtgcagcagtaactattcagctgggtaatattttgattgtttatcatgtgcacttgcttgtctacgatttctgtaacacctgaaagctttattatacaaattcaaatttgctaagtgccctttgttctatatcacaacaaacgaaaaacaaaagtaaagaggaaaaattatgacaaatatggcaggctgcttaaccttcacttattaatcagcttattttttgcaacaagaaaaaagaagagagaggggcatagatacaatccagcctggaaaagtatacaggatatacttagcaatgtcaaaccagttgagtgctttctgtggttgtaattcagggtttggggatttatgtccatggcagcaaactgctgggaaggtagagaaaatgtttatcacctacattctacagcaagtacattttgtgggggagacgatgatgagggact

SEQ ID NO: 342074 - DNA, 1000 bp, Homo Sapiens; identical to SEQ ID NO: 160125

SEQ ID NO: 342075 - DNA, 1000 bp, Homo Sapiens
tttttttaagaaaagagctctttattccacgtcgtccgatatttttacacaagtaaaataaaatgcatatctctatataccgcgatctgggtgggaggcggcgttctggaacaaacgctgccgccgaaccctgtaaacatgatggggtggagatgggggtggcgggcggcaggcgtccatcagggaggacctggcctggcctgccccacgggtcggccgcccggctggcttggcggcgtggagagagaccccgtatgtacacacacctggctgctgagcacgctcttgtgtccgctgggggtcagcagggcccaagcactgtccacagcaccagcgccaggcccaggggggtgaggctgcaggtgaggctgggtagggcacctgagccttctgagtcaccagtcccgccacccccgctgcctgcctggcccagacggcagtggctgcgggtgcggttcttgcgtgaacagcctggcctccggcgagggcccgaggtggggaaccctggtggctcggagccctcgggccgcactgcagtgagcgggggctcagcagagccaggcagagtcccaaagggtgagtcattgatgtgccgtgggccagagccgttgcccggcgggctgtcaccgggcggcacgcgtcccttcagcgcattgcctgccgaagctggtcttccaggctccagtactgaggccttgtcagcggcatctggctggcagcacttgggaagccccagcggctcctcatcggtggccctgccggtccagatgggatggtaagggccggtggccacagcgcagccctgcaggtcattggcagctaggcgtttgaggtcacggccagccaggcgttgcgggaggctgcagggcacctcggaggaggagccgcggaacttctgcagccaggcccagagtgggcgtgcccggcagtcacacacccaggggttgtcgttgagcctcaggtactgcagggcacgcaggggggccagggcctcagtggg

SEQ ID NO: 342076 - DNA, 1000 bp, Homo Sapiens; identical to SEQ ID NO: 160126

SEQ ID NO: 342077 - DNA, 1000 bp, Homo Sapiens
tcagtgccagacacgattttaatcagttcagacgaatcatctcatttaatcctcacaacagccctttgaagtcagcaataagatggtctcattttacagataaggaaaccaaggcgaagtgagattgggcctcttgttcaagatcacacgggtggtcatgtgtgttgaatgaatggagccctgcttcaagccgcttctcctcacctagggatcggggtggtgggtgaaaaggaacagtgtacagtgtctcggggtttctctttgaccccagaaaaaagtcacagaaattcctacagagcaacttggatcagcgctttgttatcttggcattaaacaggtgaccttgagcgccagctttgtcctcaggtgggacaagtccttggctaacatctgggccttggacagggtcttgggggatggctccgttctgttccatgtcaggcggggctgctggccagctgtgggggcttctgctcagtcaggggcacaggagataggctagaatagtcagttcctcttcatggtttccctgatccactccaagtagtggcagactttggtatagacaccaggcttggtggtgttgtcacaagggacgtcaccccaggacacaatgccctgcaggatgcccccacagaccaggggtcccccagagtcaccctcacaggattctgcgcctctgccctccgcgcctgcacacaccatggtgtttgtcaggcgccctgggtagctcttgtcacaagatgtgtccgagataatgctgatgttggcacaatgcaacgtatctgggagactcactgggggttcaggcgtgcgggctggactaggcgcagcaacatgatgtcgttgcggtggctgcgcgcttcgtagcgcgggtgtggaatgacccgagacgtggtccgtagttgctctgggccatcgcgcttgcgcaggttgtgctctcccaggcgcactctcatgaagcggctttggcagtgggccgcagacagcacccagtgtg

SEQ ID NO: 342078 - DNA, 1000 bp, Homo Sapiens; identical to SEQ ID NO: 160127

SEQ ID NO: 342079 - DNA, 1000 bp, Homo Sapiens
ttttttttttttttttaaagggacgacatttattccttttccaaatgttacagtaaaaccaggtggaagagaatggttttagcagttagaaaaaaaaaaaagtacaaatctggggtttggccattaaaagttatttacaacagtgggagaaaaaaaagacaagaagttgtttcacattacagacctccccccaccccaaagcctaatacttgcttaccaagtcaaaaaagagacacagttgattcacaggctggaggtttgaacttgagtaagacatttataaaaacctagacggggcagtgtcctccccagcccaggtgccactaggcacagcacaagagactaaaaacaacaggggaaggctggacactcaaggtttgggagtataagcaccccacttctggctcagggatttggggagtagggtaaacaaaacctacttggaaaagaattggggaagaaaaccaacaactgccttatgcaggggtggggacagggaaggaggtagggccagggacaggagcatttcacatcactaacctaacttgggaagctgtaagggaccatcttcaactggccttaagaggagaaccagatggctgatgggagaatccacaggagggagaggaggaaagggaacgtggctgggaggaggcaatagccccttcctttctgggcacaggaaggcagccagggcaccaggtccaggcagtgacctcacaaggacagcacagtttttgcagcttagagatcacccacctgcccctacctagctactcattctgctcagcgctggctggtgtagggccactctccggccccgagggagtggatggctctgtagcctggggccctgcctcttcttctgaggctgcactagcctctgcccccttggcctggggttcctggctctcaggggtggctgcggccttcccttcctgagcagtgccctcgtcgctgcaggcaccgatctccccctgctcctgctcttcctctgtgg

SEQ ID NO: 342080 - DNA, 1000 bp, Homo Sapiens; identical to SEQ ID NO: 246554

SEQ ID NO: 342081 - DNA, 1000 bp, Homo Sapiens; identical to SEQ ID NO: 160128

SEQ ID NO: 342082 - DNA, 1000 bp, Homo Sapiens
ttttttttttttttttttttttttttttttttttttttttttttttttttttttttgacattctggcttgttttattgtcatttaaaaacaacttttaagacacgattatctctgccaaaaaaaaaacaaaaaaaaacaaaaaaaaaaacagactcaaggaaatgggatcatttgacaattctgtgaaacttgcctctgggactccctgggctctggtgtagattgaggtgccaacctcagaccaacctaagcctccagggcacaccacgtggggctgtggccaccctttcagactcctttctgaatgcttgtggcatctgccccatgattaggaatggacaccctgaccacgtcatagatgcccatttcacactggcatgtggatagtgactataaaacgtcccttcagaacaaaccaagacctgaaggggaagcaggaagggacacccacacactgagtctctgctctcatcctagcttatctggccagctgcccctttgtcatttcccttctctgttgaaatggctctttgggagactgggggaggagattgcggaaggggccagggggctgaggacttccactatggtctgattttacagagcctctggcttcagtcagatcccaaatatcactgggaacagcagtgtgaggggctggaggccccaggaggagggaaggggctaggggctgcatggcagcttctcaaactcagccagaggagaaagctcctccttccaccgggggagcttggggatgcagcaagggtgtttcccctgcaatctcctcagcctctattaacctttgaatcaccaagaaggagagggcagtccagccgggggtgggatggggaatgcagggcctcagtcactgtcagagcccactgcagaggacccttttcgtttccgcttggtaggcttcggtttcgtgtcttcctcttctgaagcactgctggagcccgactcttcttcggcattggggggctgtgtggcattctt

SEQ ID NO: 342083 - DNA, 1000 bp, Homo Sapiens
ttttttttttttttttttttttttttttactgtgaacattttattttcacaaaacaaactttacagattttacaatctcccaaatttcacttatttaaaaataggagagacaaggcaacctagactccaagattgcaggcgtgaaaaaactagtaccagatattcaagttatatatgcaaactgcattttatataccatgaaagtgaaatgtgacaaacactcactagtttcaagtgtaccttataagaaacacatggacatacttgggttttttaaccacatagtctcatatcaataaacatctaagtatctgacatgtatttttccattaaaggtaggcacaactctatgaatatcaaattatatcaatcatttgctttttataatcttgactggaaactgaaaaataagaggaatgtaaagttaagtagccgaaaatgctacttactgcacaaaagcacatcatgaaaaggaatgctagaagtagttctcctcaggaatgggtttttgaaaatttaaaatattattttatcagaaaagttaaagccttcagtgggaaaaccatggtaaatgacatattgactcaatctctaaagccctggcaaattatagattttgtgcaattagtgaccaacatatacatttaagagataatactgactgttgaccagaaccttctgatggttctgaagcatctgctctttagagttacttcagctttacatgtctatgaaatttaagattcctcaatgggatgttatagcttattctgcactagatacaagtaatatgtatagatttagaacaaatgactacttttcaccttccaggagcctgtttttatttatacaaaattagattggtttttcacccacatgtatgcataagtgcttctcaaatttacaccgttcatatctgaaatcccacaataaatgcaaataaatggatactagtttatatatttcatattttcattcatcttttttttttttttttttg

SEQ ID NO: 342084 - DNA, 1000 bp, Homo Sapiens
ttttttttttttttttttttttttttttttttttttttttttttttttttattttctacaagtcttgtttattgaaaggatctgaaaagcgtaataaggctttcaatgacatttaatacattttcaagaaattaatatgaaacattaaaatttacttcaaaaatccaaagttttctagatcattcccatctcacgctgctttagaggtcagttcacaccttctgtgttcagatgagcggctggaattctgaacactgccgtcttccagccctaacgctgggcgctggtccctctctcctaagcccacggctgggcttcccctgtgcccagggtcatggcggacttcaagccaggccggctgcccagaatcacactcagggtttttggacgctcaagtccacagatgctgaggtgcccagacgagggtgagcagggagacacatgcctcggagaacgtgcccaggctgggccaggcggctgcgggaagctcctcacgggcagaggagaacgtcttgtgccttccttatcgatctccagcagatgagggcaacttcgtgtgcaaaactcagagagcagttactcaaaaaaaagacacccgggcagcagtaaccaggacaccagggtccgaccacggcctccacacacctgtgcccgtggaagacgcgggcgccggggtaggcagcatccacgtgctccacagctgctggtgctgggcaggctggagactcacgggagaggcaggaggagaatcagcgtgttgagtccctcgctgtgttagtgtgaaaaattctcattacagttgcaaataaaagggatcacgatcactagccccggaaaccctcatctcccggaccatcaggatcgcactgaacagaatggtcccctaatggtccctgaggacagcgtcttgcagaacataaatgtaaacattgaatggcagacaactcccttccccttgaaatcttcacaaaagtgtgtacgagaaagtatgtacatcagc

SEQ ID NO: 342085 - DNA, 1000 bp, Homo Sapiens; identical to SEQ ID NO: 160129

SEQ ID NO: 342086 - DNA, 1000 bp, Homo Sapiens
aagttgcgtgacatttattttgtcttgttaacattaatatctgtagaaacatttttattgtcagtataaaaattaacaggttttattaaatactttctccaattttgtaacacataagatcagtgtaatctgcattcatcttgcacggctattgcaaagtgagtgggtgtttccaaagcaaaacacaatactttagtacagaaggaacaacggcgatattttgtctgatgtaggtatgaggctggatcttttggtgaggtcctgccagaattagatgaaagcaatcccttaaaaagatggacgtatccccaaaactatcagcagaacaactctgtgtttcaattttctatgatgggacttgaagatcctaacaggcgtctccaacgcaaagagtctggaagccattatcaaaattcactgaagagaatcaggctaatctgattaatgtgcaactcagaagcagaaggccagctgccagagagaagcacattctgctatcatttcaactaaggtctgtcctcaaggaatggattaaggcatcttttaagaggacgctggtaccatttatcttgggaagtccagttagacgttgcgttgacgtaatgacagggttgcacaccaaaatgaaacaccttcctatgaatgagttcttttaatatggggcatttaggaggtctaagaacaatcgtctgacagcagcatttaaacacaaataaatcaaaacttcattttccccaaattagtcatatattgtaaatattctcttttcaaaggatctgataactagttaagtccaagcaatagattaactagtctgctgtgctgcctgcatagaaatgccacttaaattacaaaaaaaactataaatgattaattgttttgtatattaccaatttattaataaattaacgttataccattttccctgaaagcaaaagtatttttccacctctgctcggtgaaaattaagaaattatgtgtaagaacagcatttagcaaa

SEQ ID NO: 342087 - DNA, 1000 bp, Homo Sapiens
tttaatacttccatagagcccttctctaagcctatgaaaagcattttgaagggaaagagaagtgagcctacctactgctcagtaaagaggtatataaagcttatcataccctttcctagagggctttctcagattcctacttaaaacacacacacacttgattagactattgaactacacttcttgaaattcctaaaaatgaaaataaataaaggaatgatggctacttttgctttatacaaccaaggaacacatcttagactttaaatttatctcattaacaaaacttacttttctctttgttcttattttaacagcaaaaacatttctttttcaagctgcaatggcactgaagcacaataaaaggcaagaaaagaccaagggaatttaaccctccacaaaagaatcccaaaccaaccaaatcaaacaaaaaccagacaccaccaactgcttctgcctgcatgaactggtttcccatttttgctttaataaggcagttccgatggcaaaggctgtatgcactgtagcagtctcttctttttaaatgcatgatctatttgcttttttcacttaaatagaaaggaggggacaccacacatttattcttttacttcttctccatgatcttgtgattcccatttacattttatcttgctccagtattctggtgacacaggagccatggggtcatgttccgagcagcagaggcggccttccagtgcagagggaaccagggcccccttttcatgatctttacaaaatgaatgtggacagaattcacagaaggaaacagctgcactgctgcactcatcgcactgatgccacggacactcccactttccatatggtggctgagtcaggttaaggcataggaggtggtatgctttgggacagtcttttttgtcacacatgaccagctctccaccatctccacattgaaaacagtaatcttcatgcatctgctttggttctgttttgatctttcgtctcttctgtttta

SEQ ID NO: 342088 - DNA, 1000 bp, Homo Sapiens; identical to SEQ ID NO: 160130

SEQ ID NO: 342089 - DNA, 1000 bp, Homo Sapiens; identical to SEQ ID NO: 160132

SEQ ID NO: 342090 - DNA, 1000 bp, Homo Sapiens
ttttttttttaaaagaaggaacacaaaatttattcgggaatcgacaaggcaaaaaacaaaaacaaaacaaaaaaacacaacaaaagtgctctagttctctctagaaaatttggtcccccaaacaacaagctacagtacaaccaggtctatggttttcgggccgggccggctccgggccacaagaccgcctaggtcggccgctgccgggtttcacatttctccttcccaaggtgggagaagcaggaggtttgaaaaacaaaaagcagggaggacgagccgtcccagcagcgtgggccaggcaggcagtgatctccctgcctccaggacttgcatcgaaagatccggggacatttgtttttgatttttttcttcagatagggagagggtgaaacttccccaattggtagacgaaaccatcttttattggatatattctcctaactctgaacacagctttttgaaggcccaacaaaaactctaacgcaaatcttccagaagagaagatgaggaatactaaagcttttgattttcatatttggatttagcaaactccaaggccacaatacttccccggttgcccggtgaattttttttcctttttttttttttaaatactctcttaaaaagttccaccgatctttcaaacaaaacattagccagccgccggggcccggaggtgcccgaagcgacgggactgatagcggaggaaacgcagcctccctccgcgcccgcccgcggtgtaaaccgagtacaggccgtggagccaggctgccccggctcccgctgggtcccaacccccgccccgcctagtgggccccgcggcaagcggcttctgaacagcttcaagagggttcgcggagcaaacacacgtattggtccgtccctttctcgggcagcgcggtcccgccatcagtcctgtccggcgcgtctagccatggactgcacggcagtcgggcggggaacgcggagagcgagcgcaccgacctgtgagagaaggcca

SEQ ID NO: 342091 - DNA, 1000 bp, Homo Sapiens
tcagcccaggggtggggcacaggttgaggtctcacatgtggctgcatcaggatcaatgagctgcgtggtctctttctgaaaagccatctccaccgaattctcgcccatgctctgcttacaaacacgcctccttctccaggtgtagcaggcccccaggcccaacagcaggagcaggaggcccaccagcagtcccaggacccagagcagctgctggaactgatgcaggcggtgcagggctctgaccccaaagtaggtggaggtagaggcagagcccaggacatttgaggcagaacagatgtattccccttggtcgctgggcctcagcgcctcgatgtccaccctcagggcattgggggaagccaggacatggatgtgtggctctgcaggagcaccctggggctgactggaggccaccagtcgactgccaaggtggagagtcaggctggcgagcggctcgctgtccactcggcaatccaggatgccccggaggccaccctcaggctccacgaagaccatcatggtgggcgtcttgggagggtagagcacacggagcatgactggagcagaggcagcagccccagtggggagctcagccaggcagtggtacatcccagcttgagcacgagccacgtgggtgaaggcgagagtgggcacaggctccgcgtgcagccgccggtcattccagaaccatgcaaaggtggagttgcccacaggcccagggccacccaggaggcggcagctgaggttcagggcagcgccctcaggcacgtccaggccaggctctgccaccacgcgtgcaccttctacctgcaaccgcccgatggtgctgattgagcccagcaagttttgggctgtgcaaacataggtgtcatcacctgcaggcacatcttgcacctgcagccgtagggcgtttcgggccacctggacatggcctgtccctgatgccaagctgtggaccccgctgctcgtggccagcaccttgccatcatgagatagggcc

SEQ ID NO: 342092 - DNA, 1000 bp, Homo Sapiens
gagactgagtcttgctctgtctcccaggctggagtgcagtggcacaatctcagctcactgcagcctccgcctcctgggttcaagcgattctcctgcctcagcctcctgagtagctgagattacaggcacacgccaccatgctcagctaacttttgtatttttagtacagacagggtttcaccatgttggccaggctggtcttgaactcctgacctagtgatccacccgcctcagcctcccaaagtgctgggattacaggcatgagccacaacgcccaacctttttttttttaaactttaattaaatgctactttctcatagacttccctagactggtttgcaatctaaggtaataggaaacaaggcattgggcattttgaagaaactgcaggttaagctatggtgccaagcagaagactaaacactgatttgagtgtcaaatctccagcacgttctgggatagaggcaggttctcaaatgtttcctagtgttctttcctcttcactaattaaattttcccttctctggcgaatccagtgcagtatacaaccccctgattgcctctcttggtcaaatagttgttagaagggaacctgtcaggcacctgtggcttcggcttagattggaaaggtgacagactagctctgattcacctcctcctgagacagcctggacagtggagggatcaactggaaggccgaaacctggtaacagctgcctctgattcctggtggaaatgaccaaccagattcaatccatatcactgggaaagatcaaggaaaaaaaatagcttcccctccaaaaatggtaaagaggaaataaggagacaagaaccaaaaatacttagaatggcacaaaaagtgatacgcataaacttctttttgttattacatctaactgtaagtttcctaaagtccagttatcaagttgaattgtgtggatagaggagagaggccaactggattttctctcaagagttcacggcttcagtctgagaggt

SEQ ID NO: 342093 - DNA, 1000 bp, Homo Sapiens
gcggaggaaacgaggttgagggtgtgagtggctctggagatgcaccccagtctcaaaataaaattaaaaagaaaaatttctgttcaatctttgaaaaaaaaaaaaggaaaaggacatgtaatacaccgttcaataaatagaaaaaaagttacaaaatgatgtggtattttgtccttaatatacaagaagggaaaagatgtgggggtgacttgggggggtgatgttctcccttctcctccctgggtcaaggtgggggaaaggaaggatggccaaagagagagggcggcagggacttaggtgcagagagaaaggcaggtaagtgccgggaaaaatggaaacagagtaagatgaaggggcgaagcagaaagacaggaggcgaaagggtgaaaaagccagaaaaacaccaagatacaggtctctttcctttccagatcgggggtgggggtctccggctctcttgcgtctgtgtcccccaaccccaggttggaaggggcagtgtgagcctcgctcagttcctgagttgtacgtccagtgactagcaggtgagaagagagggcagcgaggacttccccaaccctgagcccaccctgggaccctagtgcccaaggaaatgggggtcctggccggataggataagggggtgaggtatgaggctgaggcctgaggcctcttcaattccttcagtgggggtgagccaatggtcctggctgggcagccactttggaggtggcataatggggggccctgagcagtagggggtgggggaggacccttggccacccagggtggggttgggggaaaatgtgctacattgacttagagggccgatttctggaaagtcctgcctcccagcctccctcctggagcccaagccagtctgggtaaggggagtttgcctattgcttttggggtgcccaaagtggggtcataccagcagcccaagcacacaccccttccaggcttctgggtggcagtatggcttctgcttctggagtcttgc

SEQ ID NO: 342094 - DNA, 1000 bp, Homo Sapiens
ttttttttttttttttttaaagagatatctgcactcctacatttattgcagctctattcacaacagctaagatatagaattgatataagtatccaacaatggataaatagctagaagaaaaggtttgaatgtttccaacacaaataaatgataaatgtttgaggtgatgaatatcccaattaccctgatttgattgctacacattgtatgcacatatcaaaatatcacatgcaccccataaaaatgtacaactatcatgtatcaataaaatacccatagaatatacaaaaaagaaactaacagaaaacaatttaaaatattttaaatgacaaaacaattaaatgacaattaacaataatgttagcctataaagctattttctaaaacaatttggtaaggagagtagcattgttttatagttctacaaatctctttaatgtttagcttgatagaaggcagctgaattaccatacctgcttctgcattcaacttgctgcaatacatgttgtaaaacctggcttcacacaggtagatatttggaaaaagaggggtatttaatagctttttcagatgatagtgtgcttttatattataccaaacattgatgaagtagttgaaggatactggttcttagtcaattctcataaaaattatctcttaaaactatgacattattggagcacaataccaaaaactaatcaggtctctgtaccatggttcttacaaatttaagatgagccttctagaggccggagtcatattcccttactttcctgcccaaagcatccattcctgtttcttcctccaaggcttcaggctacagggcagaagacagaagatctcctggcctccatgaaactttgcttatttagagattcagggttggtaaaaggtagttggtttttcttttcactcctaggctaaaccctgcataggtgttttaaaatagggttcataattgagttctcaggtgagactgattttcttctcaatgaaaaga

SEQ ID NO: 342095 - DNA, 1000 bp, Homo Sapiens
ttttttttactgtaagattattttattatacagtaagtgatataatgtccttgaagttagaatgataagttcatgattttctttcagtcagttcaggctactagaaaaaatacaccatagactgactgactgccttaacaaacattcatttctcacgttccagaggctgaggagtctctagaactggactctaaaacacaatcaaggtgttggcaggtctagtgtccagtgagagtccatttcctggtttatgcatggtcatctcattctgtcttcacatggcaaagagcagagaaagagaaaacaaactctcttctgtgttgtctcataagacacataatctcatcatgagggttccactttcaagatgtaattaccttccaaaggtcacacttcctaatgccatcccttagggattaggacttcaacatgtaaatttggagaggacataaatatgcaatccctcacaatgatgtatgctataaaatctcaaggaatcaaatgacaaggatttacagttaataagccaacaaaggagacaatatgtaatataaacacactcagctactctaagggaaagcagaaaaagaagaaaaggagaacaaagaagacatagaataaacaacaaatagtaagttagtaatttaaacctaaaaacatcaatacattaaacgtaaatgatctaaataccccagtaaaaagacagagattgttaactggataaaaaaggaaggcccaactgtatgttgcccactaaacacccactttaaatatgaaagcataaataggttaaaagtaaaaccatgataaataaagatatgaaagatataacagggaaaaacccatgtcaaattattagaggttaaaaattacaatttctgagagaaaacatactttggatgggattaatgacagattaaacactgtggaaaaaagattagtgaactgaaagacatagctatgagaactataaaaaatgaaataatgaagggtaaaataa

SEQ ID NO: 342096 - DNA, 1000 bp, Homo Sapiens
ttttttttttttttttgagccagagtctcgctctgtcacccgggctggagtgcggtggcgcgatctcggctcactgcaacctctgcctcccaggttcaagcgattctcctgcctcagcctcccgagtagctgggactacaggtgcccgctctcacgccaggccaatttttgtatttttactaagacggggttgcaccatgttggccaggctggtcttgaactcctgaccttaggtgatccacccgcctcccaaagtgctgggatcacaggcatgagccaccgcacccagccagaagacagctgcttaaaaaagtaattctaaaagctctgacgttggatcccctctgctgcgttttttgttagtatcaaactgtctttcagagggttaagggagaaaacaaaacccatgatgctccttcacttgctctccgaggcgcaggcgcacagaaacagcggccacggaccacagaaatgcaggacggagctctcctgctcccacgccacgaggctggaacatcagccccagtgcctggtgcacacacaggctcaggaaaactagctccttccatcaagttaaaaacatctcaatccataatcactctgcttataaatactatttgcacttaattggaaaatgtaaaaatcctaggtcttactactagataaacactcatttcataagtactagtttcagaatatgaaatctaatatatttagcatactatgaattgacaataaactgatatgaaatatttaagttcacagtacacatataaagcttcatattatcgcatattaaaaaaaaacagaaagcagcttagagcaatttataacctctaactaaattcctcggtttacaaagtgctttgaaagaccccagctcccagtggcctagtcacagtagtgtcaggaccacaaactgctgtgatcacagcgccgcgtggatcccggaggcaccaggcccctcagggacaggcaggcgggttctgtgggtttgcat

SEQ ID NO: 342097 - DNA, 1000 bp, Homo Sapiens
cactcaaaattgttcattcacagggacagttaaaaaggctcagttccaggggacaaatgtgtcacaaagtccttgcttacaaactcctagctgaagctgccttgggaagaatctgctccctcagcatgatgggcagtgccaggcgactacactggaggtgctaatttttaactgccaatgtctcttctagacgatggcaggctgatgtttcatcttcttcagcaaccctgaagcataacagcctttaagctgtatgttgcacgtccctcttgatctctgtgaatttactgaaagatgtgactctaaaggcaaaacgaagcccacaccaatgattatgtaagtcagagggtggtagttgtgactatttaactgttcttagttctttaagacctcaattacgtaaaccaagatacgttctgattttcaagccatcctaaccaaaataataatgatgaaaatgatgacagctgattcctttaggccccggggctgctaatttttcaaacttcctgctatcctcccttccctaccaccaatctccagggctctctagtttgctcctatttttcacagagttgccagagtttgaaaactaagacccccataaacatggctatcttcacagaacatccagatgaaggaatattgactgtaataaacattgtacagaacacccagataaaggaatattgactgaaataaacattgtaggctatactccagtagctggggcaatggatccatgtaaatggagctacaaattcaagtcccaagtttttttgctccagcaggttgaccttcaagggctgcatcagtcttcagaaacaggagctgccagcctcaagcagtttgttgcctgggagggagggtggaccacattacccaaatgttaagggttggacacctttctgctgttctctgtgtagctgctgggctcgattttttagcacctcggccttggcctcatccttatcaacaccatcccccagcttgtacatgc

SEQ ID NO: 342098 - DNA, 1000 bp, Homo Sapiens
tttttttttttttttttttttttttttttaaaagaaaagacacctgggcctgggggaccactaccaccaagacgcggagaccagtagtggccccaaatgccaggctgcactgatatttattggatataagacaaaggggcagggtaaggaatgtgaaccatctccaataataggtaaggtcacatgggtcatgtgtccactggacagggggcccttccctgcctggcagcagaggcagagagagagagaagagagagagacagcttatgccattatttctgcatatcagacatttagtactttcactaatttgctcctgctatctaaaaggcagagccaggtatacaggatggaacatgaaagcggactaggagcgtgaccactgaagcacagcatcacagggagacaggcctctggataactgcgggcgggcctgactgatgtcaggccctccacaagaggtggaggagtagtcttctctaaactcccccggggaaagggaggctccttttcccagtctgctaagtagtgggtgtttttccttgacactgatgctactgctagaccatggtccactttgcaacaggcatcttcccagacactggtgttactgctagaccaagccctctggtggccctgtccaggcataagagaaggctcacactcttgtcttctggccacttcgcactatgtcccctcggctcctatctctgtatggcctggtttttcctaggttatgattgtagggtgaggattattataatattggaataaagagtaattgctataaactaatgattaatgatactcacatataatcatgtctatgatctggatctagtataactcttcttattttatatattttattatactggaacagctcgtgccctcagtctctttcctcggcacctgggtggcttgccacccacataggcagtcatgccattcactgaaaagcagaagccaaaggaaaaccggagcctaatcaagtgtttta

SEQ ID NO: 342099 - DNA, 1000 bp, Homo Sapiens
gcaaatcatcagcgctcatgtttatttataaagttacatcctaaaagtgattcgaacaataaatagttataaagaagatctgctgccctaccctctgggtgtgaggcctccatatggagtcagcagaggatctgggagggatcctgggaagctctgggatcctggggtctctgccgtctcagtggcgcaacagaagccagcaagcttcccacccttccttgcagcaccagctggcccccagggctgcgtctctcctgacggaggcttcccgtggacccctaggccgcagccccctggcagggctgggaggcaggccaagactcaggaccagcccccacagtgcaaggctggccggcccagctgctgggaacctgtcaggccctcgggctccagtcacctgagctggcacagggggccaccctgttaggttttcatcactgccatgacggagacctcttggaggaactggcccagcatctcctggctgtgaatggatggcctgtcaatcctggttgcgatggtcactgtgaaggccccctctgtgtccggcaggtaggtggagggcacaaccttgtaggtgcctgcaggcaggaggcagagccggctcacctcctgggcgtagcgatgtggcacgcagctcagcagcggctcctgcagcagcagtgggggtgcgtcctggctccttccaccctctgggacctggaagatatggaagccgatggggtggaactcggtgtcactgggccggcagtgctgatgcagagtgatgcggacgcagcgggggccagggccctcggggaccgagaaggggaagcaggggttggtggggtatgaggcaaagttcctgctgccccccgccgtctggccgactctccaagaaccccgtagctgcacggtcccccactcccccgcaggcagggctgccccgggggtggtgttcttggccactgccctgatggcgctaagggagactcgcccggtagagaagactcggagcagg

SEQ ID NO: 342100 - DNA, 1000 bp, Homo Sapiens
aaaaactcattagtcattgttgaaagatgccaggaaaacagttcattattttataaatgaggaaaggaagggaaagaatcaagcatttgccctgcctttcctatgcaaactgtacctcaacatgaccaaagagttaatgaaggaacacttctttttatagatacatttctgctaataaataatgaaggaagacagaagtagaatatcactactttgcaaaccctgatggatgaatgaaactagcattagggttaattatctattattttagctgtgcattgtcagctacctattgctacacaaaaaaattacctctaaaatgagaagattaaaaccacagagttttatctcccagttcctgtgggtcaggaattcgggctctgccaaactgggtcctctgctcagggtctttcatgagtctgcaatccaggtgtcagccggggctgcagtctcatcagaaggctcagctacgaggagattcacttccagctcccccaggtggctgttggtagagtttcaggtctttcatgagtctgcaatccaggtgtcagccggggctgcagtctcatcagaaggctcagctacgaggagattcacttccagctcccccaggtggctgttggtagagtttcaggtctttcatgagtctgcaatccaggtgtcagctggggctgcagtctcatcagaaggctcagctaagatgagattcacttccagctcccccaggtggctgaatctggtgaagtatcggagctgactcgcagtcgacaggagattggcaggcatgggaactccagccatacaggctggactttgcaagtccagtctgcaggaagctgcacagggcaagagacctggtccaggaggtgcctgctcttctgcagcgcggcgcaggcacacaggaaccagcaatcccccagcagcccctgcttcacctgcccttcccgtgggtcatctggaaacagccggggtgtggcacaaatctcctggggccgcctcc

SEQ ID NO: 342101 - DNA, 1000 bp, Homo Sapiens
tttttttttttttttttttttttaacgcagagtctcactcactctgtcacccaggctggagtgcagtggcgtgatctcagctcactgcaacctctgccttctgggttcaagcagttagcttgcctcagcctcctgagtagctgggactacaggtgccaaccactatgcacagctaatttttgtatttttagtagagatggggtttcaccatgttggccgggctggtctcaaactcctgacctcaagtgatctaaagtgctgggattacaggcgtgacgactgcgcccggccttctttcccttttacaagtacagaacaagtggacttcaaaagtccaaagcatttgattaaaaaaaaaaaaaaaaaaaaagaatcactgcttcaaatggaatgttctatttgtgtttaacccactccctccaggactggagcaggggttgtgagtggagacagtggccaatgacctacagagcagttttagcaccagcagcaaagagaagagaagggagggccagtatatctctgagacagctaagctaggggaggatgaggtctaactctgggacaaagaggtaaacaactttcccagcttctggttccttcctgttgcgagatccactggagatttaggcaattaccttccctggattaatggagcattcagggacaatgaatgtctgggagtgagaggaaaaaggaagaaaatgccattactcctcgtcctcatatggcttagaatttatatatggcatttgtttttccaactcttcgtaagagatgctcttatcatgcaccccatttgccagaaagatcgtacgtaactcaggacacagggctaagactgggaaacgcttggtggaaaggctctggtttcgggcaatgaaaaggcaggggtccaaatgccttccttgtgtagctgaccccaaagccccagtgacgttgctctcaaagcttattacagaccagcaccacccatccctgcagccctctgttcccagct

SEQ ID NO: 342102 - DNA, 1000 bp, Homo Sapiens
tttttttttttttttttttatggaaaccattttaatgctaggagaatgtttttacttactgcctagggaagctgtagggcttggcccacatccagcagggcctggggcccctggaagccactcactgagttacagccccctccccactcctgtatctgctcagggtggtgatgtgtttgctcctagactctctctcatggttcccctgacactcctgcttgggaagccaccgagtcactgccaaggtgacatgcttccccatctgcagtgccctatgcttcctgtcaggaaggacaggttggggaatatccctttgcagagcccatacgatgagtgtgtcaggtataatagctattttcacacaaggaatctcattctgttttaaccaataatccagtgacacataggtattgttgccatttcacaaacttgggaattggggctcagggaggtgaagtgacttggccaagatcatacagctagtaagtgaatgctgaagttagaaccctggcattctggctccagagctctcatttgtgcttaaaataggaacccagtcaaaagcagggactgtgctctttctgttgctaattgttcccattgatttaaaagtttcctttggagagaaagtatcataataaacatgcagttgtaaaaacaagctctcaaagcaactctccttccagcttttggtctggagagagatggctctgtggggtgagggtagagaattatccaggaagtgggactggccagggtgactggctgctgtggacaagcaaggtaacatccacagatgactagaaattttaacaaggtgccaaagcctgccacaccttttcatccactatgttttcccttcgagacaaagatctgagagagaacgtgggggaaacaagggcaatggttcggatttggccagtggttttttgcaaaaaggggaaaagcagagggtaagaccatgaaagtaacttggccttcctctgccagagcttgagtg

SEQ ID NO: 342103 - DNA, 1000 bp, Homo Sapiens
tttttttttttttttttttttttttttacaatgcaattatttattttacaaggagattctatacatcagggaggcatcttgaagtacaatacaccaggctttcatttcttctttacattatgattgtgagtttccatataagttggtacttacatggaaagggaacacaaaatccatttttatatacataaaaacaaaacacccaaagagacttgacccccaaaatgtcttgtttcacttgaaaataacatgaatgagacgaaagatgaaccagattacttggtgacgcacagaaggcgaacaagtagctcaggaaatcaaatcctgtttcaagcttggcacattaagggtaagaaaggtagtgaaagaagggttcgaaaatatcatctcaagccacaaaaaatctggcagaagacagcctccaaatcaataagatagaatggttagaagtcaagttagagttattgtgtggctaccttatatccagacctctaatagactgagtggaattgtcacttctcttccctcagttatcccaattgttagtaaacttcaaggaggctgggcatgatgactcacacctgctatctcagaactttgggaggcgaagatgggcagattccttgagccccggtgttcaagacgagcctgggcaacatggcaaaacctcatctctaacaaaacacaaaaattagctgggcctggtggcacgtgcctgtagtcccagctacttagactgaagtgggaggattgcttgagcctgggaggcagaggttgctctgagccaagattgtgccactgcactccagcatgggtaacagagcgagaccctatctccaaaaacaaaacaaaacaaaacaaaacaaaacaaatcaaaaccaaacaaaaaacttcaaggaaggctcgcacggtggctcatgcctgtaatcccaccactttgggattacaggcgtgagccaccgcgcctggcctcatctaaccaatttggattctggttgga

SEQ ID NO: 342104 - DNA, 1000 bp, Homo Sapiens
tttttttttttttttttgacttcaaagttcattttctttcctttaaaccgttgtaacccaagaacttaaatccttttttagttttgaaatgattacttgggaggaaggaagtataagtgagttggtagtagtagatggcaggtggaaaaagagttaaaaagcatagttaagtcttggttaaaggaatttacgaactgacaaaacacagtgttagcagggtgtttcaaccaatgagtatttattaaaagccagaggtgcaccaggcacagctgtccactaggccaacagatacaaacgatgtaaccaattcgcttattagcttatctgattaaataaaatacatttcatagaaatgattatcaaatgcattgcagatagaaacagaatatcctttgtacttacagatcttatgataccctaaacaattattaataaaaaccagccaacccatatggtaaatagttagcaaaccaccagttattttattttagtcagcaaaggataaaaacatacaaatttcatgctgaaagggattttagcattattgaatgctgaatacagacatcctgcttgaaaactactaacatagtccacctacagtcttaaaaattcagtgtttttcatcctgtattaaatcactattacaccttttggcttaaaaattaggtttggtttcaaaataagtttaatttagtacttcagtcacatgcctcacagattcttgaccagggctgggtaagaatcagtccaattaactattagttacagcaacaaaacaaaacataaacataatgttaaattcaccttgcttgatattcttgccaaaaaggaattgagaaattaagacacacaggtgatttcaaccagaacataacaggagaactgaaaaaaaaaagacaaaatgtagatgttacttgtttgaagcaaacctgtccacttagagccatttattgcctttttgagactcatggctaattcttgaaaggaccacattgagttt

SEQ ID NO: 342105 - DNA, 1000 bp, Homo Sapiens
ttttttttttttttttttttttttttttttttttttttttttttttttttttttttttttttttttttttttttttttttttttttttttttttttgggtgcatgtgcacacatgtatacatttattgcataaaactcatcatagcactttcccccatatttttataatccaaaaggaaaatgattcaagaaaggatttcattgtgctcagtttcaaaaaatataaaaatggacatcagattagagatacaagttcatacgctgaactgaattgtacataccaactgcctggctatggaaacccgtgacttgacttaggggtgctgatgacatgatctcgacaagaaccccctagcaactctcaggtggaggcagcacagggatgcggttcctggtgaggagggtcctcactcggtgaccacactgcctgggctcacagctggagggctcacccatgagggacacgggtggacacccactgcttcacatgcctaattcacattagaaacatgtaaagccattcagtctgtgcaataaagagatcctgtatgaaatccactcattccttggagggaagctggcccggaggcacgctctggttgacgggtgacgcacagtcctccagggcctgcattgcatccatgacacagacacacgtgaacacccagcccgccggtcctagcagccagctgtgaaagctgtgtcaagtcacgggggttcctttctaacagctaaagctcaaaggcatactggaccctgagggaaaacaggagagcctgagatgggaagggaagaaagggatttgcaccttcacagagcaaaatgggacaacgggacggggaggttgaagacaagaccttggctcaggagtgtgtctgtcttcagcaccagccagccccaccgttcccactgcactgtgtgtgcaaagacacacactctcaccacagtgccacacctgcggcccagacactccctcctggtctctgaaggccagaatccc

SEQ ID NO: 342106 - DNA, 1000 bp, Homo Sapiens
ttttttttttttttttttctcgtgcaagtggtttattgatggagtgctcttaggagaaggggagtgagggaagcagcgtaggacagaggaaaaaaactgagtaagaatgtgctctcagaagaagactgacttcagcttgattccatgaggagctctgggaaaggaagttccttgatgtaagaggtcagtcttttgtacctccatacaagaggtagcaattcttttctagagatggtctcaaaattagaatacatcaaaatcacttggagggtttggtaaatcagaatgctgtgccaacccccagagattctgattcagtaggtctgaggtggggcctgaggatttgtatttccagcaagttcacaggtaatgctgatgatgcactctgaaaaccttcactctagagaagaggacagctctgaggtgttagcacccacagcatctcgcaaaggggatcaggaaagcacctactacatgaaggcacatgccagggacagatggattggaccccaagctggggctatgtagactacatctttgggtcagaacatctagattcacagtatcttgtatgttcctgttgtcatctcacatctcttgccaacgcattgttgaaacattcttacttggtcttgttattggacttcaagagaagggtctgggagatacatgaggctttgaaaaggaagtagctgcaagttgctaggcaaatatagtggcatcagttgcaatggagtggaaagtccttaaacgagtgatcaatatttagtggcaagactctagaccaaccctggaaattgcctgatgtttgtgaaattaaaagaaaatggctttgatggcaacttttaatttcataagccacgccagaattcataacagtctctgctcctgaggatcaccaccaggtgaaggtgaatgaataaatgttaaaatggaattcgtttcttttggtggggtacgtcaggtagaacttggagaataccttgtacccctgggcctt

SEQ ID NO: 342107 - DNA, 1000 bp, Homo Sapiens
ttttttttttttttttttttttccaatacagggtcactggttttttaggttgtgcagcaaaaagacaatgaaggccagtgcagtggctcccctgtaatcccagcactttgggaggccaaggtgggcgaattgcttgaaccgaggagtttgagaccagcctgatcaacatagtgggaaccccatctctgcaaaaaaatttaaaaattaaccaggcatagtgttgcccacctgtagtcacagccatctgagaggctggggcaggaggattccttgagcccagcaggtctaggctgcagtgagcccagttcacaccactgcattccagcctgggtgaggagcaagatgctgtcttaataagtaaataaataaacaaaaaaaacagacaatgggtattgtcttgtgggaaggtcaaagaataaaaaagaaaaggccaggtgaggtggctcacgcctgtaatcccagcactttgggaggcagaggtgggtggatcacctgagggcaggagttcgagaccagcctagccaacatggtgaaaccccatctctactaaaaatacaaaaagttagccgggcatagtggcaggtgcctgtaattccagctacttgggtggctgaggcaggagaatcgcttgactccaggaggtggaagttgcagtgagtcgagatcgcaccattgcactccagcctgggcaacaagagcaaaactccgtctcaaaaaattaaaaaagtaaaaagaaaaagacaacagagaaaacaaggttcttctctacctcaatcctcttagcatctctgggaggagaaacagcttttgcttccctgtatggaggtctggggggttctcacctcagccctgcctcagcaaagggggccttggagagcccagggcagcggggagcaaggtgctggcagaagaggctgctgagagcccaagatcagactgtccgcaccccaggccagctcttgcggtggattctgggacctccctgcaggccgctgcagag

SEQ ID NO: 342108 - DNA, 1000 bp, Homo Sapiens
ttttttttttttttttttttttttttttgcattttcatagttttatttgataaaattccatcttacattctgtgtattaaaaaaataatatttctggtgtgaggctgaggtctcctctgtgtgtgtacccaagctgaagggtggtgagaacggaccactccagtctgaggggtggaagaggtgaggaagggggccagaaagcccccacctccatcacagtgctgtggtctttccaggctcagggggcaagtcacgtggcagggggagccctgctggcagcatgctaacctgacactcctggtcctggcacgctggagcatagtgtggggcagggtagcaacagggtccaggggggcagacaccccggcgccaggccctcagggtcagcaacacagtagccagaaccagggcagcagtgagggccccaaacaccaccagggccaccaagctaggctcacctagcccagcctcttgcctccgcaccacctccttcactgagatccgcagcagaccagcccctgcgctgtggggggctggccccgtggcaggtaccactacagctgaggtgggccctagaggggtgtccactgtggttggggggtctgggacaggtaagacaagctcacaggtcttgccaccatagccactggggcagaggcagtcgaagtcgtggacacggtcccgacagcgggcccctctctggcatgggcggctggcacagtcatccaggttgatggtgcagaagcgtccagcaaagccctcaggacagaggcaggagaagcggtttatgccgtcaaggcaggtggcaccgttagcacaaggccgcatcaggcagtcatccacatttacctcacagcgggcacccacaaagcccaccaagcagcggcacgtgaagttgagagcaaagccctggtcgtcctggcactgcccgccattgcggcatggggagcctgcctgttcacagggtccagccttgcgctcgcagtcacgcccatggaag

SEQ ID NO: 342109 - DNA, 876 bp, Homo Sapiens
tttttttttttttttttttagaacccacagagtctttatcgtgtctaatactcagctggcctgagaaataaggccccccgggatgggggcagaactaggtccgggggcagcctggatgggtatccgcgaggaggcggcctccccagcctgcccaccctcaggaacatcataagcccatactcggtccaggccctcgccaaccgcggtcacaggctgccaggtggggagtgggaagcgcccagacaccacgcgggccccagcaggcagctctgtccgcagcttgtcctccagcagcgggagcacgctaggggccaggaacacagacacgttgcggcagtccctcaggctcaccttccagagatccttgcggcgatagcagacgctgccggcacagccggccctccaggcgtgcagccgcgccagcgccaccagccaggggttcagctcgtagcccacggccgggcggaggccgcacctgtgggccgccagcacgatcctgccgtcgccagagcccagatccaccgtttttccggggcgtcctcgcagcagcgacaacacgtgctccacctgccgcgcgctcgcgccgacgtagggcacctgcagccgcagcggcacgcgccggaagccgggctggagcagcagcgcccacaccgcgtaggctgccaagcccgagccggccgccgcctgcagcagctccagcgcgcccagccgccgctcgcgcagctccgtcagcgcctcgaccgggtcatcctgctccatggctgcgggacgcgcggctcgtccgcccaaggtccttcccagctcgggtccgcggccctcgcagcctggcctggggctggcggtgtgccctctccctcctgccgggagccgccgcgc

SEQ ID NO: 342110 - DNA, 1000 bp, Homo Sapiens; identical to SEQ ID NO: 160138

SEQ ID NO: 342111 - DNA, 1000 bp, Homo Sapiens
tttttttttttttttttgtacagatgtggccttactatgttgctccggttagtctcgaactcctggcctcaagctatcctcctgcctcagcctcctaaagtgctgagattacaggtgtgagccaatgcagccaccccaaaggtggtgttcaaagttgatttctcatccaactctgattctagactgaatagcacagaccctcaaatgtgaggtgctaactagcaatcctggaatccagagatatacccatgatggacagcccagagaaagccccagtgctggggcagaatccacctgctcaggtgcaagaggcctagccacttgggagtgttcatcacatgcacattatctgaggttaggtctgggaatgcctcagccaggtgtgcagagatgtgtatggggagcaggtgagagacatgggcacctggactccccagccaaagcttcaagacaagcttagtgcaaccaatcccctgggctgttcataacaacccctctctggtcctgcaggagggaggtaggctcatatagaggcttcctggcagggccctacagctggagacagaggccacccacctaaggacctgcatcctgcaaggaagccaactcatgccctgaaacccaagtccttacccaaatggatcacatccccagatggatcacaaagccatggggctttcccatgtgctgtccctgcaggcctctttctgaggggcatcaggtaccccccagtcctccatcgtgggatctagggccttgtgtccaaatgccaccctttccttggaatgagcccatatccgtgggaaaaagaaagtctgggggcatggcaggagtccgggggaaaacagcaaaaaggaggaggacagggcagagaaagcagggagaggggaggagacaagaagagagagggagaatgagcacccaggcctggccaggggatgcctgcaaccatgcggataccccacaccagggctgggatgcctggtgggaagagcccagg

SEQ ID NO: 342112 - DNA, 1000 bp, Homo Sapiens
tttttttttttttttttttttttctttttcaaatgcgatttattgtacataaaataaattaattacagtttaagccaaagcatgagtggctttttaaagtgcatctgtggaggggatgtggcaggtagcccctgttcacttgctgtaagataagtgttttagtatttcagccacccttaggcacaactcagccaggcctaggaagcaacccaacgtcattgccatgaaccatttacacaagtcacaccaaaatcaactgacacatttttttcctgatggaacagttaaaaaaacaaaaaactatacagtcaaagtctggggttgaagagcgtgaagttcacagctcctccacacacgcccaactgagcatgctcatcctgtgagggggaaccagagccttcctgtaaaccatgagagcttaccaatgtctggtatacaaaatattctggcccataaactcaacctgtttttgaggggtaggggattttccatcttgtacataaagaaagaaatctgggtatccttcaggttagaaaggcattctgtaagaatagtgttccagagttacaaatcatactggtaagagaaaagcaattcttcctcttggggaaaaagaggaaaagaaagaagaaaagagaaaaaagaaaaaagggggaaaaaagaaagcctatcaatgcttaatctgttctttcattcccactgtaaatcacatcaatacatttggtgaaactgcaacggaccaccatttacaaggtagttgaatgcagaaaccgaaacgattatgccccctccccactctaaaggaaaagacacagagtacatttcacatattcagagagtggctcagtgggctctttcaagcctcatcaatcctgtccccctgctcagaacaacacttccttttctgtagcagttccacaggccctcttggcccttctgctccagccctttctggaaccaggaatcattgccaatattcaacgttcctgcactaggagaa

SEQ ID NO: 342113 - DNA, 1000 bp, Homo Sapiens
cttgctaatctttctatttttagggggtagagacggggtttcaccatgttgcccagcgttcctcccgccacggctttccaaagtactgggattacaggcatgaaccgccgcacacaccacttgtatctcctatgcccgtgtcaagcagcagcagggcggtgggaacggctgcacctgcactgtggcagctcgcaggcctccctgacgtccaggcggaggctttctcaagtgtgggtgccttgggtccgacccaggaccccctccccagctcccgtcctgtggaggagaccccaccatgcttcctcaccaccggctggagatgtcctgaccccctgcccactgcgccctaacattactgactctaaaccagaacccagtgcccaccctgtcctcaccgtcctcaccccacggcattctgagtgagggacgcccaggcccacccactccctggactcacttctgtccccccgagagaccttgcccgggacatgtacccacctatgccctctactgcccacctcagccctgtgggacccagtggtgaggaggggagtcctcacggccagccaaggacaggatggtgacgaggggcaggggaacgagggccaccaggccttggctcatgatgcctccaaattccccagggcctccccagagcctggacaccgctgcatggcagggtgggtgtagcctgccagccacatgtcctctgccccacccctcgctggaaatgcctgtcccgatatggcccacgggtcctgccgttgcccctcaccatgctccctgatgtgtccaggctggcctgggggtcgtgctacctgaggcggcagagctgagccaaggtccaggaccagtttcaagagggtgggccaggctcctctgagtccatttctagggcagcccctgcacccttgccgtgctgggctcggtggggacgtctgggtggctctctgcaggtgacacacgtgctgtggctggccaggtgggtggcaggtatgtg

SEQ ID NO: 342114 - DNA, 1000 bp, Homo Sapiens
gccggccagtgggcagtgggaggaggtgtgcccgccccgcagccaggtagtgacggaggccacttggatgttgtgtggtgggtaccgaaggcagcgtgtgtatggagctcctgaaagccggccatggggtgggctgggcggcgggaagaggcggtgctgccagagtgcgatgctgggagtggggggactctgggctctccagatggcctcccctgcccccgcggccagtttgcccggctcccatcccggttggagcagagatggcaaagaaaagacagcagatggtggggacaccgagttctgttcccagtcccagccaggctggctggggagtggctgggggagggggaaggtgccaaccctggtcctgaggagaccccaccatgtctgcccccagtcagggagcaagaaagacagcatttcggagaccctttcgggccacccctacttcttctcccccaaaccacagcctctctgcccaaatgggctggcaaaacagcacccaaaggcccctggcatgtgggagatctgcccaagctggggcagagcagcgtgtgcccaggaaggggtgcagctgggttttggcaataaagtggggaccgggtggtaggaaggggatccgaggcagcaagttctcctctgccccaactccagcctcccatgggcctgctggagagggaggggcctggatcccaaggccaggggcacagcatctcctgtcctggactccactattctagggccacggcagggttgatgggggaagtggcccctgagctgtcattgccccctgccgcctccttctccttcttgccactgtactggccaatgaacgaaccatcctcgttgaactgaacatccacgctgcccccataatcggccaggctgtcgtcactgcccaggggcttgatgtccccgttgagcgatggctggctgctgccaaaggccttctcctcgttgtcactgtactcgccgaaggtctcatctttcatcggtcggg

SEQ ID NO: 342115 - DNA, 1000 bp, Homo Sapiens; identical to SEQ ID NO: 160140

SEQ ID NO: 342116 - DNA, 1000 bp, Homo Sapiens
tttttttttttttttcgcgttttaactttccaggctgcatttatttacacagttgcttaagacaacaatacaaaagagataaataagcttgcactgctaaggggtggcatgttaagttagatattgaaaatgcactgtctgagctaactaccatttgatatgctttaaggcgcaaaagccgacccttagtttttctaaaaaatctaactggcattcctatttttttttttttttttttttttttttcctttttttctttttttttttttttacttttttgtaaatatcaccacttcattcttcctttacacagctttaaaaacatcataaattaaaacatggagtcttatttatagtgtcccttgtatagagctttacggtttataaaagacaaatgattgcagaattaagcttaaaaaaaaaaaagaaaaagaaaaagtggatttgcttttgtcaatacagaataaatatatcccccaaatacttgggaggtacaactttaaccaacaccctgcacttgcagatccctcttccaatttcagtatttgcaaggtcggtgattttgtttgtttaaaaatctgcagttattgtgattcctcttaaaaaggcctgagttaaaagttccactctgggacttgtatcagattactctctgtagcagaatccaacctcttcattaatacaattcttcaaggcaattctttcacataggaggaacaatcatgccagatatcgcttgcaggctgttcccgttggtgctggtgcaggtgggaggtggggaggtctggggtctgacgactggtgcgaaagcactcttctgtttcacggctgagaccatgttggctggtgagaaggagaagatgcccgaggagctgctgcagttggaggggaggcttgtggaggaggccatggtggggctggatggcactatggcatagggggagttggcagctgagccgttgaggaaggtgggggagccgcccaaattggacattgcggc

SEQ ID NO: 342117 - DNA, 1000 bp, Homo Sapiens
ttttataaaacacagtatttattgatttcaaggaaactgtcttgaggatgttctatcagcgcatccacccaagtccctgggagcagggtctgaaaggctggcaccagcctgagcacagttgtggggaggaagatgggagcaccactgcctgaggctgagggagtaggatttggggaaagagggcttccactgagccaagtgatgacctgggggacctctgggtatctccagaacctctagtcaggttcattctcagccctccagacctgctgctgctggaagacctcctctccactgcaggaatctgggcggctcctctggagggagtagagatgccttaggtctgctgaggctagcccagggcgagcatcactttttgtgtggcctccagacctctgtgctgctgttgtgtctgcttgggagcacttctcacctctcttacacattatgtcctcagggaagcctctcctgatcatcccttcctgggttgatcccttcctggttgaagccctgctagcagtgccctaagtggccccttgcaggcagcgtagatagttaattcgcttgtttcaaagtctatgtcctttgagggctggcactgggcctgtgggttacctatacccggctagacagcccagttcccagtgtcaaaaaatatctgccaaaacgaaagttgcataacttagtgaactcagagtggggtcactcagcccctgtaggacctctccacctgccacaccgccctgcatgtcccattggcagcccgcatgttgccccacccctgccctgtggtcagatgggggtcaggttgggtgctgaagcctgcagcttgttattgcctgggtctggatccacctccccagcctccaccagcttgtggtggcagcggcaggtggaagctcggctggcggaggacgaggggctgcaaccccctcgaggcttgtccttgtgcaggcctcgcaggaccctgtggcagatgaggtagcagagctcacagatg

SEQ ID NO: 342118 - DNA, 1000 bp, Homo Sapiens
tttattttctagagtgatatatattttttgttctttttctttttttcttccaaaacaaacaattagagctctaggcccctcgccctccccactcccacccagaaccctcccatataatcgacaactgaaaacaagcgagacaatcacccccaaagaaatcacgaaacacaagcacaatttcacgacagccaccgacaaagcaaaaaacttctactggaatgtccccttgcaggatcaggagaagcaggagcaagagtctacaaattgaaggggactgagaagtaggggagcagggggaggaacggaagcagagagtaagcttccatctgatgcttaggtgccattttgcccctttcctttgcacgcgggactgtttcccagaagcgcgcgcacgcaccagccacgcagatctgcatccaggcccatgaagcaggaggccaagcccggccctggggcgggtctcctttggcgctggggctagagccgccaagcccggggcttctctgcgtgggtcgagaagccgacgggattcggaggaacgcgcagagcgttgcgcgctggggccgttgctcctccctgtcccagaccacttgtcccggaagggagcttgggaatcgattcacaataaattctcattcggactctcctggcctggctttcctgtctacagtggggttgacctagcggggaacggaaggtggagggatttttctacaaggggcggcttgacttgcgggtgcaaggtggatacgaccgaagagagttgatttcagagctagggagggtgcggaagaatgcagggccggtcgagagcaagagaagctacagtctgtcaagtggtgcacagatgaacaggaggacaacattgtcaaggctctacgacccacagtttgaccttcttttgttggaaggagagggaaacatcatgcggaattaaacatttcctgcaacaaaatgtatatgttggtgggaggtggggagtagctccacctaagatacc

SEQ ID NO: 342119 - DNA, 1000 bp, Homo Sapiens
ttttttttttttttttttgactatttttattatattctgaaagcgaacatcttcaactggtaaattacatggtatattaaattattttcaaaaaagatatttttatttatattattatatgtattttttgagatggtgtctcactcccgtcatgcaggctggagagcagtggcacgatctcagctcactgcaacctccaccacctgggttcaagcaattctccttcctcagccttcccagtagctaggattacaggcatgcatgaccaagcctggctaaattttttttgctgatttttatatttttagtagagatggggtttcaccatattggccaggctggtctcgaactcctgaccttgtgatccgcccaccttggcctcccaaagtgctgggattacaggcgtaagccaccacgcccggctaatttttgtatttttagtagagatggggtttcgccatgttggccaggctggtctggaactcctgatctcaggtgatccttctgcctaagcctcccaaagtgatgggattacagaagtgagccaccgtgtgggcctcagccatacaactttgacaaagttctttgtgtgtcttcccagtcaatagtggtttctcctttattcctgttcccacagacgcaattctgatttttttccccacctaaattttctttttctgtcgcccaggctagagtgcagtgacacaatctcgacttactgcagcctccacctcctgggtgcaagcgattctcctgcctcagcctcctgagtagctgggattacaggcctcaccactgcacccggctaattttatgtattttcagtggagacagggtttcaccatgttggttgggctggtcttgaactcctggcctcaagtgatctgcccgcctcagcctcccaaagtgctgggattacaggcgtgagccatcccgcctggccatatattattgttattttagatagggtctcgctatgttgcccaagctggactcaagc

SEQ ID NO: 342120 - DNA, 1000 bp, Homo Sapiens; identical to SEQ ID NO: 160141

SEQ ID NO: 342121 - DNA, 1000 bp, Homo Sapiens
ttttttttttttttttttttttttttttttttttttttttttttttttttttgcagcacaggcagttttcttctccttctgctcccctgtttctcatacccccaaactcagatgctggagctcaggcccgccgtgtgtgcacccaggcaggagcgggcgctgtccaggctgggccgcccccttggctctccctcctgttccaggggagccataggagggaaagcaggtggcccgggggggatatgggggccccagccctgtcccaaagctccctgctcggctgcccctcgcccgcctttatataaattctctgaatcacctttgcatagaaaataaaagtgtttgctttgtaagaaaagtctggaaagtagcagaatcatctcaaggtgtcaaaggagccttcagtcatcgtctggggggcaggacaggcagaggggttggtccacttaggtgttgcctgtgggacccgggccttcctaggagggggccagggactgcggcaaggtaggggacagcgcgatgtttgagggcagagatgtgatttggggaggaggagccacgttctccggaggcagcgactggaagaagtacaacttacagcccatggccaggagggcgtggagcagcacgaccacggacagcagcactgtggccaccagcctggtgtcctcacggaccacgggccagagggtgaataccagcccggcggctgacaggcccagggccagcgccccaaagagccactgcagccaaggcacagggatgagccacaggaccaccatggggatgaagacaaagagggagtagccgtagatgcacacagtctccaggaaggtgtagggccccatgcgctcctggacacccttgcgccaccgcaggaagccccacagggccaggggcaccagccacgcatagcagtagatgctgatgcctgccacggtcaccttgtggaactgggggctgtagtggatggaggggtccctcctctgggccagcacca

SEQ ID NO: 342122 - DNA, 1000 bp, Homo Sapiens
tttttttttttttttttttttttttttttttttttttcagaaacatatcgaaaactttactagaaatatagagaaaaaaaaataactgcctgggaggtttcctgtcccttcaggatggatgaccaacagatggggcacctaggtccagtggggctgctcccgatctactgtttcttcctccaggagcaaggcatctagctcctccagccgctgctggagcagggggcccacatcagggctgggggccacattgggaggaacagtcctgccccctgcagcccggaccccacgggacggtcttcgtgatcgaggaaggctgctgtcccgaaattccacagcccgccggagcttccttgagctggtgaaaatcagagtcccattgcgctcccggggttcctcaaagatggtctcaaaggtcctcctggttgtgggtgattggtaattcttgttggtgtaaatttcttccaagctgaactccttcttgttcaacctgattggtcgaggcagtcccattggtgtaaggtttagctgaggacgggctggtgttctgcgtattctgaatcgagaaacctttcccatggtcttggtctcaggttctgaaagcacctggtcctttgaggctcttggctccttccctttggttgaacccaacctgggttctgctggttcggagaaggaagtggatgccgtggacgagcaagatgtggtgagagaaggggaggctcccactcctccgagagggaagacctctttccggagacagggccgagggggtggcggggctcgggccatttccccaccacccacagtgtgccgccgcggccgtggtcggcttggttggggtggagcaggtggccaggtgcaggtacctgggccagggggccccagatcagggcaggagtagcttcggcccagagagggcttagggagaagtgctggggtattgtggtcctgagttcgccactggcggattgggggccgggggctgacagacgcagtg

SEQ ID NO: 342123 - DNA, 1000 bp, Homo Sapiens
tttttttttttttttttattttttttttttttttttttttttttttttttttttaagcaggagatgctttatttcagaacaaggtacaataggccacacctctgtcctgcacctgggaaccttgggcatggatgagcagagcaaccacaggtctgaagagacaaagcagaggaagcctgagcgtgcttctcccctgtgtggaggggcaggccgccattgttgtggtgtggctcctttcatctcctcagctgtccagggactagggtatgaagggacaagaaaaccaggcccaatatcctctaaaattaagctgaggcaggagagggacacccaaggcgagggtgacaggcctttcttgttggctggagagccagtctccggccggattctggtgccaacggcaaaggaaggcccaaagtgagggcagcgcagagatgagggggctctcagggaaaacacccagggtgggagcaaccacagaagccccccggctgtgtccactctccaatcatgctggccttcttctcccccttggatgtgaccagacacatgcccagagctgcctgctcatggtgggttgtcctgcgttggggcagtctcaactactggtcccacagaagaagtcttcaggaagctcactcaggagtccatccaggtcatctgcttctgggagttcttcctcaggggacgcctctgcctctaggttctgtgctgttctgaagccttcctcgggctttgcagccacatcatgctggaagctccctgaatccttggggaagggctgagatggcttgaggaagctcccatccccagaatccgggctgtaaatatggaccaggttgttgggtgtcacgttgaggtagtgatttcgaagtgaaggagaaaacactccaatctgcttcagcagcagcactgagccaggcttcagctcattctggcacgtctccagcagcaacctgtgcaccgtcccctgcatctctcccgtggggtccttgaaaac

SEQ ID NO: 342124 - DNA, 1000 bp, Homo Sapiens; identical to SEQ ID NO: 160143

SEQ ID NO: 342125 - DNA, 1000 bp, Homo Sapiens
tttttttttttttttttttgaggtgtccccaacaattttattataaataaaaacaagactcccagtgggtggctgcagcccctgcctcggtggctgtgagcacctgttggaggggcctgcccttaccctggtctggaggccagaaccgaggaaagggctccctgcccctccaagtacacaggggagcctgaggtactgagaataaaaaccagggagggactcccaggccaggcggcggccccgggccctctgccccacgaggctcatcccttggagcacacaggaagctgcccgtccatcacaccacactctcttccagccgctcggcgctgcctcctaccccccggcaccctgccccgagcagccccccatgcacagagtggctccgtcgggcccaagctcctcccaggcgcctggcataaccgtagcacccggcatctcccaggtccagagagcagctgcgctgcggccggggcggggggctccgcggcgggtgggccttgggtgtggggctggggcctccattggtctgggactggacgtggctgagcttgagggggaggcggccatttccggccccccggccccgaaccagcaaggccacagtgaagaccagtaaggcagccaccagcacaccccccacggccacggtcagggtcccgcccagcacgtgggcctgcagggcgtggcacaggggcgaggccggcagcgtggagaaatgggcacagcccagcagcctggtggccgtgaggtcagagggcccagcggccggtgacaaggccagcaggcagaggtcatagtcagcgccggggacgaggtgcttcagcaggaagtggtggctggaggctgggacaatccggtagatgagggtctcatcttcgctgctgttgtactggatttggaacatccacactgggtcggctggccgcccgggaccccagctcaccagccctgaggtggcggtcacctccgtcacctgcacggctggctcagactccag

SEQ ID NO: 342126 - DNA, 1000 bp, Homo Sapiens
cactttgtaaacatttatttggattcatagttttacaaaggggattccctcctatcttgtgggaaaagggtaacagagtcacatccagattgttgtacagctcaggctttttaagggagatatttaaacatagagtatataactttaaagtgctgtacagttaccacaaaaataaaataggaaactagcaccattctacctctcttctctccacacctgggttgtggggagatttgctaatcactgaaaaaaaagggtcaagagtaatcatcccaagcttaggctgatgtgggttaagatcagccagagattaaaagctcacacatctggctgggcgcggtggcttatgcctgtaatctcagcactttgggaggctgaggtgggcggatcaggaggtcaggagatggagaccatcctggctaatatggtgaaacctcgtctctactaaaaatccaaaaaaaattagctgggcgtggtggcgcatgcctgtagtccctgctattcgggaggctgaggcaggagaatcgcttgaatccgggacacagagggtgcagtgagctgaggtcgcaccactgcactccagcctggcgacagagcgagactccatctcaaaaaaaaaaaaaaaaaaacacatccataagcaaggtcccagtcagacatctggaagggcaaagagatggctctgtgcaggctgagtaaaaggcactttcatagagataaatacccactgtgctgcctcagtgttcatcatagactcattcagggaatttaccagccaccaccttcctgagggaaagccatgatgccaatcccactgtcttaacaatggtactgccctttatttacacagagaagatgctcagtaatgacaacttcatcccatgccaccttcccacctaaacaaactcactcctctctccacccacaactatattttcctacatctctatcatttcaaggtacttttagaaacaaagcttcaaacatttagaattggtgt

SEQ ID NO: 342127 - DNA, 1000 bp, Homo Sapiens
ttttttttttttttttttttttttttccttgggccacctttactgtgcccatggaggcagctccgagagtaggttaacactatggagcaaaggagtagagaagggggacaggagttagggggcccctgtgtaggggtatagggctcctgcatccctctgggatctgagcctagaaggctcgggcagagtccggcgagtgcctcaatggaagcggtactttctggctggcttgaggttgatgtatgtggccttcatctcctcggcctcagggttccgcacatctttgaatcgctcccctttggtgctcactacctggttgtcgatgtatcggatcagcttcttgggggcctccttgggagccatgggccggtgaatcttctgatactatgcgctatccaccatcatgtacttctgcaggatgaaggacttcagctcatccttttgggggcctctgaggcgtctgggcaggtcctggttggggccctcccaggctgcaggcccctcttcctttccctctaccagcatctgcacagcttcttccaagtccccccgagctttggccagcacccactgggcctgctccaccgaacaggtagggaacacctccaggagtacatccacccctggcagaagctcctcctcagcgccagttgcctcatcttgggtgtctgcagcagcagcagccgaagacctagtctcttctttgagcatttcgggccgctgcaggggctctggggagatgggcacctgaccttggacaccagagctctgcggttgcaggttctctttgttcctggcatcgctcagctgccctgagagcttctgcatcatgtcccctattgtgcccctggggatgtgggcgaagccaggcacataggcctccatcatctcagtgaaagcctccatatcgaagttctcctctgatgggcccgaggggcccaggtcctccaggaccccaagcacataggagaagatgacctcatccaagccactgaggtcg

SEQ ID NO: 342128 - DNA, 1000 bp, Homo Sapiens
tttttttttttttttttttgcgtgaacagagttcttattgatagtcccatcacctccaaagcagtgggcccaccctccctcctaccagcccctccccagcacccagcccctcagtgcagcgccacctcgcaggggtggaggtgggcagcacgggcagcctcgtaggcacggcggaactcctggaatcgtggggcacagcccagccgggcctccccaaagcggctccagcccatgaagaggaaggtgcctgggcccgggtggacgccacagcgcagtggggtacgaatggaggtcagcccctggtccccggatcgccccgcctggaacagcggcggtgtctggcggaggacacgggcggccaccacagtgatgacagactcctgcagctccacgtcatgggtgaccccatggatgatcccgtgaattacgaagtcgctggtgcatgcggccaggagcagctcagcgtcgctgcagggcctgcaggcaccgtctacgccgagaccgtgggcctgcgggggcagctcggggcgcccgtcctcgcgcagctcaaagcggaaggcggccacgcggcggctgatgtcctggtgcggcgtggcctgcaggaagagggcccggcgctcgcggggaccccagcgcacgcagcggccccctgccgggcccgggccctcggccagcagcagctccagggcgccccctgcgcgctccgcgaagacctgggcgcccgcgaagggccgcaccggccgcagacaggcgatgccgggccgcgctctgggatcggggccgcccagggtcaggcgcagcgccccagccgggtacagccactcaaccgcgccctccgcacaggccagggccagctgccccacgctgccgggctcctgggtgaggccgctgcccctccagctgcagcgctcctcggagtagccggcgcgggcagccggggccaggaggccgcagcacagcgcgcagagcagcgccgcggccgggaaccccatggcacggc

SEQ ID NO: 342129 - DNA, 1000 bp, Homo Sapiens
tttttttttttttttttttttttcgaatgcgcagtgatgctttaatccccctgtttgcaaacgagctctgtggaagctcagcaggaaggatggaaagatggggaggaagaccctggcgggtggaagtgtggccagggacacaaggctgcccttatgggactgaaagagaaagctgctgggctctgtgtgactggaaaccagggaaggagacctggctgaggcaggaactgggtttgccagcagtgcggaggggcagcgggtggctcagaagtgggagcaggtacacagaaggagctcagggcatgcctggggcatctccaaagctctgctgagagtgaaggccaggagcctgttttccttccccagaagtgtgctcatgggaaatggggcagggggcaggctggcttggggatggaaagtaagcttacactttgatattaaactcattctttgacttgctgtcaggcaagaagcccattctgtgagcttcagcatataagcattgggagggtgtgagctggggctcccagacacccccagagcagagggagcagggcctgtcagcctcctctgctgctcctggacagagacccacggggtcccatgggctccaaacctgcccagcaagtttaagggccgtgggcaggccttgtagccgggcaatgggatgtgagcagaaacgagaatgtggcctagcagtgggtgcaggacaaggagaggtgaaccccaccccgagagcattccgggaggtgtcatcaagtctcttaggcagtctggtgatatttggtgttctgagctaaggagggaatggacttgtctgtcacgcaggggccaagagaagcaggtgcaggtcttagagctgagccttggggaggggaccctagtgagacagcgcctccgtggagtagaagaaggggcaggatggaaatcaaggtgggaattttggggccgcttctccatgtgtgctttgctggacagcacattgtcccattagccacta

SEQ ID NO: 342130 - DNA, 1000 bp, Homo Sapiens; identical to SEQ ID NO: 160145

SEQ ID NO: 342131 - DNA, 1000 bp, Homo Sapiens
ttttttttttttttttttttttttttttttttttttttgaaaagagacaataaaaggaggtttttttattcaaaggtataactggataagtagatttgttccattcttgtgaaatactttttaaaaaaatacgaccaacttctttgcaaatagcagacacatacctcaactatgatgacctaatttttggtggataatgtacatgattaggcagaaataggcaagctcacactggtagattaactatcaaatactcagtcaaaactccgtttgtggcccccacttcttgatcgatttctattcccacttcgtcttctaccatcttgtcgacttcctgagcgacttccttgtcgactctgtctacctgaccggccgccagatcgaccacctgaccggcctgaccggcctgatcgaccacttgaccagccactcctctgtctggaattagaagatgtgtttccatcataatattcttcaatttcaggtaatttggctggcactgagagtatccagtcggaatcatgccactctgcctgtaacctttctgactcagttgtaggaacatcaaagcaaacacccatatttcctttcaggaggcacattctggtaatctgagacactgcattactactcagctttctgttaagttctttccaagcacagctgacatcctgtatttcctctaggctttccagagtcatggtcacaaaccccttatcagaggtgatcaaagatcgtggttcaaagcttgatgcaccagaaatgtgggctaaagctgcagccaatgcatccactgcacctttctcttctatcagtctctgagctgatggtcggaaaaaatcaacagcagcataagaaacggaagccagagacctgatggcatccatgcttttagatttaactaaatccattgtagaaggaacacctacacgtttaaaagtaattcctgctttttgttccacatatcttagttgacctctttctcttggttgataaaaac

SEQ ID NO: 342132 - DNA, 1000 bp, Homo Sapiens
ttttttttttttttttatagctgatcaagaatttatctttattctgattatgattcttcaaagagcattagttgtttaaatttaatttaagccatgcttaaatcgaatacatacaaaatatgattacttatattccttttgaccaaagagctgaaaattttgtgttccagttcatcttactcatgttattctgatgcgaaacactctaaatgcaaattgttttgaaagtaaataggccaagtggcctaccctgccctttttatagtataaattctgtgatactgccttcttttcagtatatgctcctctgtgggcctttggcttacacggagaccatcagctacaacgcatggcagtcagcttcagagtcctcgctccagtgtgcatctcgtttctcagccacaagtttgatgaattgagagtgactggcataaagcttcagtttatcattgatgtccacccatttcacttttccagcatcatctccagcttctagcataagattatccattatctcacctgtttcgtcatggtagttcacagcttctgtctccatccatgcattatcagtgtttcgaggatcatcaacatatcccttatatatcactaggtggtcttggctgaagagtttgtgcaacttttcctctatttctctcttctcagcactggttttctgtaaggagttgagagcttcctcaccaaattctcttttcagtgtggcactaatcttctctcctggatccaccatcccccctgggattgcccattctccacagtctttcctttttattgcaacaaattgtaagatatgcttcccagaaacaggatgcatgattttatttccactgctatcccttttccatctggttataatgggatctgcagcgtgatttgggccccatcgccccaaaagcccccggcccaccagtccagtccgtcctgcaggatttctcggtcttccattttcaatctcatacaggccattcttgctctttctctc

SEQ ID NO: 342133 - DNA, 1000 bp, Homo Sapiens; identical to SEQ ID NO: 160146

SEQ ID NO: 342134 - DNA, 1000 bp, Homo Sapiens
ttttttttttttttttttttttaggaaagacccttttattgggggtggacacggagcacgcactagtccatgataaaaataaaatgactcaagagaaagatcccaagggccgacttctccccaacgtgcgtgcacgctgagtgaggtctgggcatgggaaagttccgggcgaagcgtgggacaagaccgagtctcaatggcctggaccggtgttgggggggagaaggccactcggctgtcctggtaggtcaggccaccccgggcccgcccctgtcacccggccacagtaaagcccccgctagagactctcacagacacactctggttctctggagaactgggggcaggaatcggggaactggcccgatggaaggcgggggtcggggggacaatgttgttttttttaaaaagcatctaccaacatcacactactgggtctgatgtcccctttaaccaacgcttgatacaggttacagcataaataaaaactcaaggaaaataaatacatcggctcctatgaggttggaagtggtgtggacgcagggtgtggatgggccggcagggaggcgggcgggcggggtgcttacacatggcgggcaggcgggtgggcgaccgaggagcagacctggcaggaggcgcctgtggagttgagagtcttaagtgtcctcgtgcatgtctgggctgtcggtccgcgccaccttgcggggaggtgcggagctctcgccttccagctccacttgctcctggtctctcttcttggcagcgttctttttgtcccattgctgatgcaggtagcgcaggaggatgtttgtcttttctgtcacgatgatctgttcagacgggtactcgcgggtaggcaggtagactgagggccgtcggttcgaggctttgcacacggagtccgcgtgaaatcgactaaaattgcttttgttgtagacaggcagtcctttcaaaaaatctgccatcttctgtttcctccgtcgccgcctcggccgccgcc

SEQ ID NO: 342135 - DNA, 1000 bp, Homo Sapiens
tttttttttttttttttttttttaaaccacaaatacgtttattcctctaaaaacagtataccatctttccaattttcaaaatgttattatcaattgtctgcagattactctcattaagctgatttttaaaaatctcagacagagcagagcaattcaccagcaccatcatcaagtgagctacaaatctatcttttaccagagcaaggagacacttaagatcaattcaagagaatagctttcagtgttcacagaaggggtactcacattcatttgtcacatatttcaggccctcatacaccccttttaaattgtctaactcctatcccagtttctttttatagtctaaaaacaaggaatcacccaagtaagatactccttcagagcactgctgaaaacggatcaaacgtggagatcccccagatccctgttctcaagtgttaaaaatattttatattagcacatagaatacccttagatatattctgttatgttctaaagagtttgtgtttccccctttttgatgatgtcttcaatttcttctgagacctttcctgtatagtcatttggttctattgcttttaacttctcttgatactccagcggcaaaccattttcttttgcacccatgcaaataatctttttatactgtggggatgggggagcactttcgtaatttgtcatcagataacttcgacaggttatttcttttccttcttgagttgcaactttaacttctattacaacatacattccacttttaaccccttcttgctcatccagagaatttaaattgcttttgttcattttccatactactccccacacttcatcgccaggactctgaaaaatggtggctatccctccatgccaagtttgacttgttttgccttgggaattgccaaagtcaagcttaaaatcctgcaggcgggccacacagaagaacgccgccgaggggtttcggaggtggatcctctctgtcagcaggttgctgccgtaggca

SEQ ID NO: 342136 - DNA, 1000 bp, Homo Sapiens
tttttttttttttttttttttgaattttctccagatatttaatgcaagatgcaatgtagccatattccatgaaatgtggttagcagtaggggagttgtagccctatcgaatcaaagtattacaatacagctgaaagctttatatagacgtatttcggttcttaattgcactaatgcagacagtttgatagataagcttctctcttgtgctttttctactttgggaggttatatactttagatgagagacaaagaaactctactggtttaagagttctcagttttacttttactatagaccttttttcccaccagtttagatgggaagacccagcctttggtataaataacttacttccacaaaaatatttaaagggtatctttagtgttcactgtcagttgtgtagtcttttggtaagggggtggctagagcctctttactctcagtaagtgctctgggctgatggataaacacactaaatttaacaccctggttgtttgcagctctgacaaaaccactattagcagtcattgtgatggcttttagggtgtctcccgtcccaaaaattgttaatgagcggctattaatttttgaactggccactagtctcaaggcacgctcagaaggctggtctggtaccacattaattcgcttaattaacacagtggccctctctctctccccaggtcctcctaaggtatctaaaatagactgaaagtccttgacagcagattcacaagcaaacaactccttgtccttcataaaggcctccagctgaggtagaacctgctctttcctctcttgctctgcttgttctgtgagcactttctctttgaaaataaagtggcagcctccatagctgagggcagatacatatgtgattaaagtagtaatgtccagatttactcttttgcacacatcgaccttaatttctgttggaaacgcaacacttgctagtatattttctcggtcaactctggtcacctgcaaaagttcaggg

SEQ ID NO: 342137 - DNA, 1000 bp, Homo Sapiens
tttttttttttttttttttttttttttttttttttttttttttttttttcaaaatatgcatttttatttaccttagtggtccacaaagagtgaggccaaaaaaccacaagagtgaaataatacacccagcaactgcatgtttaaatattttgatccactataaatggaaacaaaaaaattaaaaatttcagtcacatatattttgctatatatccaaattttaaataaaatacagaaagataataataacaaatattttaaaggtgaaatcattacatattttgtaaatagaaaacataagatcccttgactaagtctagatttccaagacagtattcttattctgggccgggtgctgtggctcatgcctgtaatcctagcactttgtgaggccgaggcaggcagatcacctgaggtcaggagttcaagaccaggctggccaatgtggtgaatgaagccccgtctctactaaaaatacaaaaatgagctgggtgtggtggtgggtgcctgtaattccagctactcaggaggctgaggcaggagaatcgcttgaacccgggaggcagaggttgcagtgagacaagatcgtgtcactgcactgcagcctgggcgatggagcaagactctttctcaaaaaaagaaagaaaaaaaaaaaggacagtattctgttttccattatctatattcttgtctgctggtagattttgaaatctttttcttcagagtacaattttatgatttctcagtttcccactagtttcctaggatcatttaactttttgtctttaaattcttttctaccaggaatttttagtgatccaattatctggtgtttggtaatagttttcccagaagaaaatggcttttgaaacaaaaccataaaaaatgcagtcccaagttttaatataaaaatgaactgaacaatgtgaacagcttttaggagatcatatgattcgaaaagtcccacagccttcaaaaatttagtgaaacatagtaacac

SEQ ID NO: 342138 - DNA, 1000 bp, Homo Sapiens; identical to SEQ ID NO: 160147

SEQ ID NO: 342139 - DNA, 1000 bp, Homo Sapiens
ttttttttttttttttttgatgcttgataaatgtttattggataaacgagcgaaggataatcacctgagcaccatagttgccaaagccccctctagtcccaaacctaagcccacactctgtccccttgcaagtaaagaaatgcaccaagcagggcttatgcagcagccctcggtctggcctggctggagctataaacatgcatgctccgaaaagccgcctcgcggaaggtattcctttaactgcaggtgtttgttgcccttggcacagcaatatgtaatttcccatttttagaacaatgctccaaagaacggtcacaaaaacaaccttaagagggggtggttttcttcctggccgcttctacagtcctgcatttggggtggagactgaaactgccccggcttggctgctggcttccttctgtttgttctggtctttgcattccagtgctgatggctgtggtgtgttcagaaccacttcagagctgcaggagctgaagacttcacgggtccaggtctggccaggctcgggagagcggtcccccttgcggtgcagcttcaggcccaccgtgtggtgccccatggtgttcagcagctgggtcacctcacccgactgcaggttgtcaaagtagatggtggcacccacaatctggtccccctccttgaccaccccagtgcgggccgcaggggagttctgcgtcacctcctgcacaaagacgccgtcgtccctctgggcgatggtcagcccgtgggagccactaccctgccagttgggcagcagcagctcccgggttgtctcctccttctccatctttgcaggattccgctcaggagcgaatgccttgccaggagcccgcccctccttcctctcttcccctcagtctctctcgtcgggaatctcggtcacaacctgagggctcagccccagggcacggccatagccggcgcgaggcccaaggctgcggtgctgcggctactggcggcgacgagccccgttccgggc

SEQ ID NO: 342140 - DNA, 1000 bp, Homo Sapiens
tttttttttttttttttttttttttttggctttgcacacacacccagtgcctcgtttccccgactttattcagtggcacgttcacagcggggatgggggtagacacaaggtggggcctgatctgtcctggagccctgggggcaccacacaccatgcactatggatgggagggggcacaggaggggcttggtggccccacagaagcctgtgtaccagggaggaggcggtgagtgcctgggtccccctagcccaggcccgcaatgggaggggctgatactgggctgagattgaggggtggggatggggggcacaaagtgtctgctccagaagggccaagtggccaagcccttgcaagggcacaagcccacgccaagggcatgagcccacagggcagctggggacactctggacacagagctatgccactctccctcttcccctctggtgagggagaggaggattctgggctgggccaaacagctaccctgtcctgccccatcctgtcctcggccaatcagaacggcttcgatgtctgcttgaagatgaagcctcgataggcgagtgtcttcatgatgttggcaatgttcttgcagtcgtcaatgccgctgtggggccggcctatgtgttgcaggctgaggcccttgttcatgtctagaagtccattcttgggccagcagcccatggcgaagctgtaagcctttttcagattaatccactgcttgaagtaatccgccactggcaagcccaagtactggcactggcctgggagcatgacttttaagtcccagtctccacaggtgacaaaaattgacttgacgtttggatctaagaggccttccttcgccatccattcatcgaccctctccagcacttgctgcaggcttggctgaccatccaccatggcttgaataatcccggtgagctctgtacagaatggggtaagctgtggatggactacaggctggacatacatgtgaaaggtagactcaatctccatggt

SEQ ID NO: 342141 - DNA, 1000 bp, Homo Sapiens
actgtttagaaaaatttatttgaacatatgaaaggaaatttagacacccccaataaaactgagaagttcctttccgaggtgaggggaattcctgacagcctccctgagcagtgctgcacataagcttgtggtcactacgcagcctgggctcagctcacggggctgcagaaggtgcccactttttctggcggggacacatcgtcttcacgaggaaagaggccagacacacgggcttgcacccgtggctcctgccgtcacactcctcgccacacaggctgtgtctgaaatgcgcagagaacagaggctcccaggatcggcatcttttaaaaatgcacgcagcaggctctcggcagaggctggactcttccctccaccatccaatctgcatgtcaaagaatgcgaccgggtgggaagcacctggactccgtgacaccaagacggttctgccggcggggaggggctgcccgaccccttccccgaggttctcttctgggagtccggccaccccttccatctcgaaaggcttcgtccagcgagagcgcagaaggcacacacgggccagcctagcggatgggcctgaagggaaaggtcacgccggagatgaaggtgtggccggggtgcgtgggcagggcggggtgggcggcggggtgggccgggacagccccgtagcccagcgggggcgtgtggatgtgggggtagaaccccggggggagcgcggcgtgaggcgactgctgcacgggacccgagatcaccagctggaggaggttattatggggcagcctggagcacaaggttctcaggtcatctctcgtgcacagcagagctcctgaggccatggccacctgcagagcctgcgccagccggtccagcgagagctcaatctcctgggaggcgttgagggggttcagttcatccgccaacctgttgatctcctctaccagcgggaccatgtggtcgaagaggatcagccccaggcgcccatacagattcttctcggtca

SEQ ID NO: 342142 - DNA, 1000 bp, Homo Sapiens
tttttttttttttttttttttttttttttttttttttttttgagatggagtttcgctcttattgcccaggctggagtgcaatggtgcaatttcggctcacctcaacctccgcctcccggtttcaagagattctcctgcctcagcctcctaagtagctgggattacaggcatacgccaccatgcctggctaattctgtatttttagtagacacggggtttctccatgttggtcaggctggtcttgaactcccgacctcaggtgatccgcccacctcggcttcccaaagtgctgggattacaagcgtgagccactgcgcccagccagtaactgccatttctaaagaggaaagagagcaggcagagggtcctgactcccaggggacaggtagttcagctggacaatgagggagtatgagattagggtggataaggacactgctcaccaccctccactgaagttcagtggctaaaatactgctacaccagccaatcagtggaaggctatcttgctctccaggggacacttgggatgtggttggtggcaggaagaaagaatgtcatgctatctcttgctgctcctccgggtttctttgccgttactaacagggttgctggaagggccaggcgggcctgcaggtgtgtggttgggctggcttcgagtgattcgggtgctgggtgggtgggagggagtatgagggggatgtgggccaccaccgggacctggtggggcactcagtccattcccattctggttctcagaggctggagaggcagcagagggtccagtggtaggctgggaagctgaagggttgctgtcgttctgcaccgccttgttgggtgcctgctgggtgctgtactctgggtttggctcactgaagttaggaacctcagaataaaccatacagaattctccaatcttctgcagatcacccccacggccagtatatagtgtcagacaacctttgaaaactgaagcgtaccctttggtgagccggataat

SEQ ID NO: 342143 - DNA, 1000 bp, Homo Sapiens; identical to SEQ ID NO: 160149

SEQ ID NO: 342144 - DNA, 1000 bp, Homo Sapiens; identical to SEQ ID NO: 160150

SEQ ID NO: 342145 - DNA, 1000 bp, Homo Sapiens; identical to SEQ ID NO: 160151

SEQ ID NO: 342146 - DNA, 1000 bp, Homo Sapiens; identical to SEQ ID NO: 160152

SEQ ID NO: 342147 - DNA, 1000 bp, Homo Sapiens
ttttttttttttttttttttttttttttttttttttttttttttttttttggctggggtcagctgagatttattcacaggtgggccagggtcagctgagcgtgaagtgctgggcacagagttcacccggccgtcccagcaggccctgggctgggataaactccagtggcaccggctcgggccccttcttcttcaggtcccgctcaaagatctcgtaggccgtgagctccagcagtggcgcgatgctgacctcaggcatggacagggcctggttgatgacgctggcggctttggacacctcagggtggtagtggcgctggagggcctgaagctcccacagggagctctccaaggcccggctctgggctgggtcctcctctccagggtcgtaggggtcggcgtccaactcagggccgtgtggacggtgcacgaggacccggcaggcagggtgccggcgcagcaggttacagatgaaaggcaggaccatgagcagggcctcagggggagccgtcagggccaggcgggccagccgcttggcgaaggcggccaccaggtaggcggggaggtgggaggaggacaggaagaggtcagccaggtggaagaagcgggcgcggtacttgacgtgaaagacagaggggtccaagaggccgtagagcttccggtagaagtcagggtactccaggttgtgtttgtgaatcaagatgaacagcccgttcaaggccaagaggctgagggcccccccgaggtcgcaggcgcgggtgaggaagtcgatcatgagcgtgggctgcgccagctgcggcaggatggcgtcatgcacaatcagcagcaccttcttgtagaggctgaggggcagcttgtgcttgaggaagctgagccacatggcctggaaaaccctcctgtgctccttcaggtgagcaaccttccaggtgtcccacagctccgcccgcttcacatagaagctggagacggtgggctcccggcggggcaggctcacggcagac

SEQ ID NO: 342148 - DNA, 1000 bp, Homo Sapiens
ttttttttttttttttttttttttttttttttttttgacaattcctccattatttatttcatgaacacactcattaaaccaagccgcaggattctcagttgtgcaaaagtacacaggacacatttagtaccatacacaaggacatagcacctttgattagaagtatgttcaatacattattgtgaactacactaaaaataatgatttttcataagcaaaattctcagagtaacctgcaaaaacatccaccagatgaactgggttgaaaacatttaacagttccctctctaatgcaagttgcttctcagtattgggcaagttttctgtcttggcgtttaagtaaaaaggcatcttttatttgtgttaattccttgcaaacatagtgaatgttgtgagtagttattttcactactgcccagacaaaaggaaaataaacttttttagttaatgcttttgtagtttttcaaattagatcttttagtagcttccttctaaaatttcctccttcagccactgagtttatagtgtattcaaagctgagaaactaattatgggcatttcaattgccttgtgcacatcctgctcaaataccaccacttccagagaaagctgggactacaggtgttcagtaagataatctctccaattctataccattcccttcaccatccataatatttatttatttatttatttatttatttatttatttattttcagtcggagtctcactctgtcaccccggctggagtgcagtggtgcaatcttggttcactgcaacctccgcctcccaggttccagcaattcttgtacctcagccttctgagtagctgggattacaggagtgcaccaccacacccagctaatttttttatttttagtagagatgtggttttgccatgttggccaggctggtctcgaactcctgacctcaagtgatctgcccaccatccataatatttaaataagcatattgacttcttcttaaactagggttaaa

SEQ ID NO: 342149 - DNA, 1000 bp, Homo Sapiens
tttttttttttttttttttttttttttttttttttttttttttttttttttgagatggagtctcactctgtcgcccaggttggagtgcaatggcacaatctcgcctcactacaacctccacctcccgagttcaagcgattctcccacctcagcctccccagtagctgggattagaggcacccgccatcatgtctggctaatttcttttgtatttttgtagagacggggttttgccatgttggccaggctggtctcaaactcctgacctcaggtgatccgcccacctatccctcccaaagtgctgggattacaggcgtgagccactgcgcccagcctgactttggataatcttaatggttagacatccttgcttttttaatattcaacacaagaaatctataacctttatctgtacaaaggatccaaagagttcactaattctacctatgctctttataagaaagattttttttgaaccattaaaacaaacattacaaaaaagtgctttcttcttaactgcaaggatatagagtcaaaaagtctcttatcaagctgataatgatcaagttcaggtccaagatgcagacagaacttctgtggtacagtacatggacttattcttcctttattccttgcagtttgtcataaaaagttggatagtcatgtcttttgtggtcttcttcttcttcttcttctccttctcctcctcctcctccttcatctccttctccttcttctcttttcttcttcttttctttctttctttttttattttatttttgagatggagtcttgctctgtcgcccaggctggaatgcagtggcgtgatctcagcttactgcaacctctgcctcccaggttcgagcaattctcctgcttcagcctcccaagtaggtgggactacaggcatgccccatgacgcctaggtaatttttgaatttttagtagagaccgggtttcaccatgttggccaggctggtctcgaactcctggcctccca

SEQ ID NO: 342150 - DNA, 1000 bp, Homo Sapiens; identical to SEQ ID NO: 160154

SEQ ID NO: 342151 - DNA, 1000 bp, Homo Sapiens
tttttttttttttttttttttttcctttaaaataaaggtggttttattataaaattctaaaaatgtactttaaagtacagtcatgagaatactgcataagtagaaatgtgtcttcatactgcaaacaatcacacagattttatattgtccatggaattaatacttaaaaaaattcttctttttagttaagaagagtcttcagagcaccattattctaatagaagttattttgcatatcagagttcatctttggtctttttcctatggcaagtacaagggaagaggtcgtcctcagtctgtggttctacccttttcatgccctctcggatttggggctcactcacttgtaaattggcatattcctggaaaagtttgaaataataacagaatatgtcatcgcccatgagattatttcttgcaaattcttgtcctgcttttgctatctttttggcctcttcatcgtgatctttcgcccatttaagtttttctagcagatcgctcaggttgctcttaactggaatgtagtgtttccagggctgcagctcattgtaaaaatgttcatagtagatggaatcctgcttcagcacaacactgtcaccaactagcaaatatggcaggcgataagctgctacagtgccatcgatatttatttgatacttatgcttgaagaaatcaaaaaatgaaatatgtttcacaatgggaccatacaggttttcatcgtgtttaaagaagaaaaagttggtgaaagcagcgtctatgagttctgggtgttttctactgagtttaaccagctcgagtctctctttgcggctgtctcgccctctccagacggcagtggaatttttgctttcccagggaggacccgtgttagcttgcacggacatcatatccagacttacccggcccatggtttccagaacagaatcagtcaaatcgtacgtaggcatcacgatatccttggaatctgtggagccacaccaggaaaagatcggatggatgt

SEQ ID NO: 342152 - DNA, 1000 bp, Homo Sapiens
tttttttttttttttttcagaatggaataaaactttattctttttaaattccacacataaacgagatgctgaaaaagcccttgccatctctgacagaaaagcagagcagctctgtttcatgaacgacagcacaattaaagctaaaataatataaaaataattcgaaaaaatcccttttactgtacactctcaaagcaagaaagagaaacaacagttttgttttgtttttttctgctagccagaaaatgtgtttctattcatttgggctttgaaattcagtgtaccccacatctgtgtgtctgtgtgtgtatgcgtggctatgtgcgtgtgatctatgcagtgtggaagcccctaatcttttcatctagtttgcctaatcattaagctacttaaccaattataatactattatgtcacattgaacaactttacataattgcttctttgaaatactagaaacattgacacatgtatttggcttgtaaaggactgaaatattacagataatattatccagcttttttttttaaagaatatggctcttaataaattgattttgagttccagagctaaagtcccttttaaaacatttctgaagctgacttgaagcaggatgaatatcttctgatttggccaaagacatgacaagtatttcatatcacttaaaatttgagggataagtgtatgggggccctttgttgtcaactgttttcagccaaacttgccttgaagtttgttgtagtattgccactcagccagcagagggccctttaaacacctctacattgcttggggagcaaatgcagatgatgcagaaacacagtgttcccccaatatttcgaacagccctgtgatttccttttggaattcacaaaaatatcgaaaatatgcgctatactgtggggtttcatttggaaagttatgagtgtgtgtgaagtcaaacagggaggggcatacacaccgtctgtctgtcgaattgatcttcggctcacctcttttc

SEQ ID NO: 342153 - DNA, 1000 bp, Homo Sapiens
tttttttttttttttacttaaaaataacatttattcattgaattcctttacagcacatgatcaattgtttgatgtacaaaaagtatctatgacactagtattaaattaaaattaattttaaattttaccacaataaatgtatacatagtataaggaaaactacagatgctttcagatcaccagtctagaacatattctgcaaagtggctaattcacattatatttttcttttaatactgagttccataaaaatgcaagttcttccattgtttgagttctgaagtcagtattcattcttgcaaccaatgaacagtgttttgagaaaacagttttctttgtaaatattccaccaattcacgtcttgattttagcatcccaatctcatgataggggatctgaacaacttgataaccgagtaactgtaggtgtctttgtttaatagcttctttccccagtaagtgtttgctattggagcaaaacctttttggaccatcaatacacagtgctatccttttatggatatcttcattagctgtggatggcaatacaaatccttcttcatctaatttaatttcaacatctattgtataacaatagggtgtcaacacttttggagcaaaatataatcttgctcctaaaaggttagtcagcccaatcttcacatatctataaagctgagaatccacaggggtctccagggaacagcatggggtaagaaatgacttcacttgatatttaggaaggagttttggacccttatagaaagggcattccaggactgaggctaagaaaagttgggtcagttgtgcccgactcaatgtgtccaaatgagattctttaccttgcagccgttgaaggaaaagaggcttgaatatttttgccagaaagttgactggatggcattcattaagtgaacatgaatgaagaagtttcaataatgatttgggtggaaaataattgaaatgagtgaatagcacgttttccagctttctaaataaag

SEQ ID NO: 342154 - DNA, 1000 bp, Homo Sapiens
ttttttttttttttttttttggagtaaatacattttattcagaacaagataataaaatagcgtgcactttatttaaaaccaaccaagcactgataaaaaatatatatcactgcagctgtgattccacatcaaacctgaacagtaagaattgggcatttattcttcacatcatgtgccaagcctggcagagaaggacatccacctccactagagcctcaaaggaaaagtggcccctaaccaccaagacagggtaccctggtggagaggggcagctggcagctcaccctgctctctgcagaccacgtgaagggaaaggagctgcctgtgttcctcccgggctgccggggtgggcactggtcagcaactccttctcggtttcaggttgtggagcgatggggagagaagtgcatgcagttgtgcagacaaggaggcgggtcctccctcctctttcagggtctctgaaacccccacagggcatataatgcccagcaaggtcccacttgcaggcacatgcctacaaagcagcagccatcttttgctttggctgatggggaatcaagattctgagagtgactgctcttttgacacaaagcagccacagaacactttcctacatacagtatggcagcaggcaagcagaaggccctgctggctcggattaaggcacttgaaagagacacaaggtacatcctcctcccctgcagcccccacaggcctcaggggaccctgtttccccaccctttatcctcaggtccccttacccctgcccctccctactgctgggcaatgaggaggacaggagcgtgccttaaaggaccatggtttggtgggagtacagggtaggaggatgaggaaaacaagaagggagctggagatttggccaaggagcaacttcagaaggacaggagagcacgagcattaggaggaagccaaggcagcagcagagggaagccagttaagtcatgagagaccaacggcagtgatgtttgctggcgcagat

SEQ ID NO: 342155 - DNA, 1000 bp, Homo Sapiens
ttttttttttttttttttgcttttagaactatttattctttttttttaagtgatgttttttaaacaccagcatcaataggacagaagaagacatctgttttccaattagctgtgtcagtagattccattcattgtttgtagttcccaatcagctttaaaaaaaaaagtttttcaaatttgcatacaagtcatctaaaatcaataacaacttgatctaatttagaaaaatgaaagagtatcgttcactaaagcagatctcttttgggtagatggaccatcacaaaaggagctcttacatgcttttcccactcccatcccaagtccaccctcccaccaattgtattgtataaatcaataaaaagcaaaggttccagaacaactgaaagaaaaataattccaaactaagcagagtgaactttccattgggaatgaagacccatgggaaaaggcagcccagcccataactcctccctgctggaacacacaccgtaggtgtaggaactgcctgggaatcccattagaacacactgtttctcaggaagagaaaaagctgcattacaagaaaagttctcaggactttaggagttcttaggactgttatttcagagctatttattactgttattacagagctcttgttatttcagagctactgtagcccttgggcacaaccaacagaaagaggcaaagactgctgtttcctttgatgaggggaaagaggtccagtcccttccaaatgccccaggacatggcacagtagggatgtcatccagcccagttctggatctgcaccatttgaggttatagtatcttcatctttgggacacaattgctgttagctgaaattgtgattttcttaagttttttcacagatcaattaaaatggttttttttttttttttttttttttgagacagttttgctcttgttgtccaggctggagtgcaatggcgcgatcttggctcactgcaacctctgcctcacaggttcaagcgattct

SEQ ID NO: 342156 - DNA, 1000 bp, Homo Sapiens
tttttttttttttttttttttttttgggcaggtactattctttttatttgatagacaaggaagctgaagtgcagaacgattaatttgagtaatgtcatttagcttgcaagtgtcaaagatggcatttgaacccagacagcctggctccaccatctggactcttacagccttcaatctctaagagggggaaggaacttacatgacatcctactgggaatttgctagaaaccagatctctctgccctgcaggcaaaaggtacaacagggaaacacgagaatgggtctcagaggcacccctggtacccccgtcatcacctgctgagacagagagcctccctggccatccaggaataatctagaagttatcgcccaaaaccattttactgggagaacaaacaccaggaggctaccttctagaggctgctgggcctcagacctcaagaagtggaggcctcaggcccatgatctattctgaaaagactagaaaaaggctccagggccaggccactctctgctcttcagacaccaccctgagttgcaagtcctgtggccatctttctaggttgaggtctggcctgtggagtcacagggaatgtccgcaggccccacagcctggtcttcagagatggccccatggggcaattctgtatacttgcgggaagagctgcgggccagatgggctgggtagcgtcgccggttgatgtccattttggagagcactgctagcggcagatccacacggcagcgggctgctaatgccaccaggtagatgaggacgtcactaagctcctcttgaagggctgcccgttccctgggggaccagccttgggggccaggttccccatcggttttccactgaaagagttctgccagctcccccacttccccaaccaaggccaggaggagattccgaggctgatggaactgttcccagtctcgttccgcagcaaactcagcatggaggcggcggatgtcctcgagcgtgggctccgggctgaag

SEQ ID NO: 342157 - DNA, 1000 bp, Homo Sapiens; identical to SEQ ID NO: 160155

SEQ ID NO: 342158 - DNA, 1000 bp, Homo Sapiens; identical to SEQ ID NO: 160159

SEQ ID NO: 342159 - DNA, 1000 bp, Homo Sapiens
tttttttttttttttaaagagcttagaaaatttattccttttgttcttttcctttgaaataacacacacaggcagggaggtggggcgcagtggaggtcgaaggaggtggaagcgtgcggaagtcctccagcccctccccaaatcccagttcccctttccaagtccctccatggggtctccagatgatcctaagctcagaatccaactatgaagtgcagaatgtaagggcgcaggggaggaggactttgctcctctctctggtagaaaaatagatctggaatgaatttggggatttggtggtttttttttgtttttgttttttgcatcattgggtgcttgggtttagggaagggtggtctttgccgattttctcctggctttcaactctggaagcctggggaggccctgatagtgctggggtggggacatcccttcatgtgtccctggcctcagactgtctccttgccagcctccaggagtgagtgattcctcggaccccttggaggaacacagctctggggactattcgcctagaaggtgggagggggatggaagatgctgtgaagtgtggggatgcagggagtggagtggttccagggaacagtttccccacagggctgggagggggtggccatgcagaggtggggtgagggggaatccagcatccgtgcaggttgcagccaggacctgggcttccttccccacagactccctcgaccatgcaatttcatgtcatgagaagccggctctgggcaccagtgtgtgtgggatactctgtgactgggctgccaggatctagacttggggcctgaacatttgggacccggcgcctggaagattcagatcagaaaccggggattcagggcttgggattcagtgccttggaatatcaggatctgccttcaagagatgaggtttcaacattgagggactgggcagagggattggggacccagaatctggaatccagcagctgcagttgccaggatccacttgctgt

SEQ ID NO: 342160 - DNA, 1000 bp, Homo Sapiens
ttttttttttttttttctgtaatcttgagaggttccaatcaacatttattgccttattctttttatctcattcctttttgaatgtgtttatctcctaagattttatctgtgatggagatgggatgcctgtgaatacaaaagttgcagtggtggcaccagggtgggggggtgcggccggggccaccatggtctcccctgagagggggtgctgtcttaggtgccccaagaggccctcgggcagcaagcgtggggtgctgccaaaatacagctccccctgggtgggcaggacacacgtggcctcctggcagacaggtgcctgggtgagcccgctgctcctgattagtcatgaatggcacctggtctgggcgacagtcacccgcaggaagccctgagctggccaccatcaccctgggcagtggctcccggggtgccaacaagacctgggcccctcgttctttggtgctgagagccccagctgaggctgtggaggaggccctggacctggtctggtgtctgtcagaggcaggtgcccagtcctttgacttgcttctctgaattgtcataattgtgctggaattgtgccagaaactggtagtgataacagctcctggaaggcctgtggctgctgagggctgcctggtccccctcaggacggccgggggagcctctccagaagcaccagctttgtctgcaggtggacgttgaaggggggcagttgggtcaggttcagactcacacctgtggtccccacgacgctggccaggacccggtgtgtgtccctgtagagggccaggagcccaggggccgcctccatgaggatgtgtgtgtatgccagcatgcctgtccccggctgcacatcctccctcttgtcgtacctccaggcgctgttgacttggagaaaccgagacacacctgtctgggcggctgccacgtcaatgtgcagaaggacgtctgtctgggggggcaccagctggtgcagcctctgcattgcgacgccacc

SEQ ID NO: 342161 - DNA, 1000 bp, Homo Sapiens
ttttttttttttttttttgagatggagtctcactccatcgcccaggctggagtgcagtggcatgatctctgctcactgcaacctctgcttcctgggttcaagtgattcacttgcctcagcctcccaagtagctgggattacaggtgcccaccacacctggctaaattttttgtattttcagtagagacaaggtttcaccatgttggccagggtggtctcaaactcctgacctcaagtgatccacccacctcagcctctcaaaatgctgggattacaggaattaagtaattttcatgcagcttcttctctccagagtgagttcattcatgtctttaaagtgaactggaacaaatgagagctttcccacatttattacatggacagtttctcactagtgaatttgttcatgtcttcgaagtgaacggggatgactgtaagctttcccgcattgctgacatttatagggtttctcttctgtgtgagttttttcatgaattctaaaggaactggaacacgtgaaggctttcccacactccttgcattcatagggtttctctccagtgtgagtcctttcatgtatttgaaatgaactggaatgactgaaggcctttccacattgtttacactcatagggtttttctccagtgtggattcgcatgtgaattttaaggtgggtggaatagttaaaagccttcccacattccttacaggtgtatggtttctgggcactgtgcgttcgcatgtgattattaagacatgagggatacccaaatactttcccacatatcttacactcacaggccttctcttcagtgtgagttctcaaatgtccactaagatttgaggaaactgcaaaggctttcccacattcaacacatacaaaaggcttctctccagtgtgagttcttatatgttgaataaggcgtgaggatgtaaggaaggatttcccacattccttacattcatagggcttgtctccactgtgagatcgtacatgcat

SEQ ID NO: 342162 - DNA, 1000 bp, Homo Sapiens
tttttttttttttttttttgctttggtgagcttctgattttactagaaatacactctaagaacagtcgagacgccgcgcctggtggaggcgatgggtcatgttactggttctgcgatgatcttccagagctccagctgctggaggcgctcgtaaaccaggagctgtgggaaggaggcctccacgggctccaccacgaagcgcagcttgccatctgtgagctgctccagcgcgtgcaggcaggagcggaagtgatcgtaggcttcacatgtgacgtccaagtgtctcagtgtgaagttgagcctcttctccaccgacagtatggctgtgcaggcatttttcaatctgtgggcgagtcgggagagcgttttaaacacagcatcagtcaagtcgtcgtcgtaaaacacttcggctgcaaacaggatggtggtgtgatcgtacaggtcagaaatttcctcttgtgaccaactgaaggggaccttgggatctgtgcagaggtcgtccttcagccagtccagttctttgaccctaactataccacctccagtggcagccaggtggctgttgagggcaatgtttcgctggcacatggacaagagatctgcaccgacatctgtacaataaacggtccgtgccatggtggctgcgatgatgctagcgagccccgtgccggccccgagctccagcgctgtacatcctcggaagaggtcctgtcggaacaggatgtagtctgccaggagcagggcgccccgccacacctattctgatgatatcgtgcgggctgccttgtgcttcctctcccaggacgtcgtcttcttcctgtgctagaatcatgggatgtaccttgtctctcagaggccctgctgggttggaatcagaggcggctcgtggtcttctcaccacgtccaaatccccatcctcatccagctgagcttcagccacttcctggccagtggtgtcagtcccggcctggagggagaaaccctcattaccatggccact

SEQ ID NO: 342163 - DNA, 1000 bp, Homo Sapiens
acgggggtactggtgccaggcttctctgggacacccccaccgaacaggcacaggggccacggggcacagacccactgaaagtaccgtctccaccacccagaggctttatttacaagtaaacacactggtctctgtaaactggagttcctgaggcatcgcagcctcagaagctgagaaaaggtggccagcgtcacagcatatgtgggcttatgcctctgccccgggcaagggtggcagcgaccttggggaccacccaggcgccccacccgctgcctctgtgcttttggtcactccaaaagcctttgacacatcaaaatgtaaaagggaagtgcagcccccatagatttgaatcgggcctgcagacaggcggttttccagagaagtccggggcctccggttctagggaaggcatgggaagatgtccctcctgtcctactgcagaaacattctcagggtttccagttcagaccatgccaagcctggtaaagggtgaagatgtttccacagaaaagtgtgcagttacaagtggcttcactgtgtgtgacctgcacgtggtgagggttcaaggttagaccccagccagtggggagagccggcctcatgtgccaaggagcccacagctgtgccaagagggcctgggctgaggaacaggactgcattaacaggcacacagaagcccccacagtcccgggaaggggcacggtgcatcatcgggggctctgctccgtccacaccaccttcttctgctcgtcggcgatggcctggcggacacagctgagcaggccgtccaggtcgctccagccgtcaggagccaggctgctgtatagacagggcgcccggtccaggtctccctcctcctgcctcgcagcctccaggagctgctcctctgaggtgcccaaccgctgtaggcccttcttgagcttctttgccatcttctcgttgacagagacgtggatgacgatggggaagatgtccatcctgtgcagggtgcagacactgt

SEQ ID NO: 342164 - DNA, 1000 bp, Homo Sapiens
ttttttttttttttttttttttaaagagatagttttatgggtaacagtatgggacagactgggaaggttgccagggcctgtagtgatgagcttcccaggaatagaccaacacacaggcaggagtggcccagacagacaagtagatagacagacagacagagggacaagaaaacaaccaagtgggtaagaggcccaggccaggctcagcagctgtgtccaggcatcagctccagctctgctctggggaactggtggaggagaagggctggccggggcctcagtccttacagggctccttctcctcatgccctactatccctcatccagcctgctgggatccttggcaggtggaattcccagggctatggatggctgggctgagtgagcagaggatcgaggctcttggagactccctggggaggtggaggcctgggtggtgtggggttagcagcagcactggggggaatctggtcaagttccaggatggggccactgctcagcagggcccctgtgtccagggcaggccctccacctgcccaccacaccaacatggtgcaataaataaagtttcaagtagtaagtcagtgtcaagcaggagagctgcaggctggcagacaggcagggactgagaaagagaagcctccagccacccaccatatctgctcagtgggctcaagcggtcgcaagtctgtcttgtgcactggagtgggtgtctggccctgatgtccacatgagcactccccgcaggggctcagcccctcacaccagcgccagagcctgctcggtggggcagaagcagggcaacatggtgcccacagcgtccacgatggctgccaggtgctcgtcctgcgcctgaggcccacagagctgcatgaagtctgccagacgcagcaagtattcaaggttgtggccggagaagccccggcaggccaggatctgcgtggcaatggcctcttcaggcgcagggcccaggtaaccagggttctgtggggtggccaca

SEQ ID NO: 342165 - DNA, 632 bp, Homo Sapiens; identical to SEQ ID NO: 160161

SEQ ID NO: 342166 - DNA, 1000 bp, Homo Sapiens
tgtgtatttatatgacttttattttaatatcattttaatatcgaatatgtcacaagatttaatgaccaaattagtcatttacatttttcaaagtatctaaatataaaattgctaaaaattcaaatacagatagcaagctacaaatatttcttttgtttttgggtggggggtaggaatggaagacattagaaaaggacgctcctgttggctgaacaaagatcagaatgaaagaagaattcatcagcatgaccccttgtgcaaagaaatacactcagctttaagatgctgttttagacacatctcttcctgtacaacaatttaaaaaatgtttctaatgcaggtcctcagtgaaacaccggtccccggccctggctggggacagtaaggacatcaccgcaggagggacactgaagaggctgtcgaggactgcagaggcatctggtgtggccagaggcgtggtgtcaggggcatctgatcccttgcctgttcccacccagggagccggacggcacggacacaggtctccctccgctcacccctctccctgaaacgtgagaaacagcagctttccgcctgcttgaaaaaggaggcaggcgctgtaaggagaagaggaatggggaatgtggccccttccaaggcagcgaagcagagaacatgcaggtggaactgccagctgaaacctacacttgctacttaagaaacggaaagaccatgtctggctgggagtgcagcgtgcctgaggaccagccaccgcccctcctcctggcaccccacactgtccacgcagctcctgggctctgaggtcagaagctggggtgtgctgaaggggaaagtgacacggccttggacacaccactaggtctctgttcctaacttttagtaagacactaccctcgaagcaaatgcactcatttaaacaaatggcatagttaaaactattgactaagacctaaacatttcttctgagaaatcgaaccatagcttttccaatctgcctgtt

SEQ ID NO: 342167 - DNA, 1000 bp, Homo Sapiens
ctatcccattttttcatttatttttatgaggagcctcaaaaaatagaagtggccttggtagggaaggaatgtcgtgattctgagtacagtatggcaaattcttttgcctcagtttccctaactccatccagtgcatatgaaaatgtctatgtgcgtacaaggtaggtctggactaagctctggccctccggttgttttcccattgcgggagcctaagccagggtgcccaggactcctgtgtggctggtgggcctgatgcccacagctgatgattcaggaaggaggggcctggagtctgctgcagactctcccgccccctacagcccaaaccgggcactgcagcaatgaggtggtcagtccagggagaggtccgacaagttctcggcacaatgctgcaggaagtcaaagtcaggcacggagaagggcacgcgggaccactttttggcctggatccgcccctgaggggtctccagcagcatgctgcggactttgagcactggcagcttcactgacttgtagatcatctgcagaccccagacctccccacagttcctgcagctgatgacacccccaggcttccagtccttgaagactttgttgatgaccacaggatccctggagacattatagtagttcgagaagttggggttcacattgacatggtgggtgccctccaccttccgcaggtcgctgccatggcccacagccaccatgcagttgatgcagagtagctgcacgtgctccactgggaactgctgccgctggttctcccgctgggctgcctgggccgcccgcttggtcaaggctgcctgctgcagatcccggatcttggcctggtactcggcctggtccattttctgcacagcagccactgcctgctccattagcgtctccagcgcctcgttgatcagctcccgcttcagctcccggctaccttcagttgctacaaacgcgtatacactctgatcggcccaggcacggcccctggcctggaccatgg

SEQ ID NO: 342168 - DNA, 1000 bp, Homo Sapiens
gcagagactgttacatgtgattctacttctggtattctttaaaatgttttcttcttccctaaggtagggtggggtgtaaaaccatggtggtcccacccacaccatggagataaaaaagaaataaggttaaattcagatgctttaaaaaaaaagagttgaggagggatttaataaagatacatgctcttctaaattctaaaaccacataactctggagaaggtgcatattcatctgttcctcttcaaggcaaagaaaacagtatgacaaatgaaaaaggtgtaaaaggtcagcatgagtaatattttccaaggcatttacatatgtgaacattatttgcaaatattttagggaaatattttctttgcttttaggctgaatctgcaaagacactcagcagtatccttatgagaacagaaacaatatgaaactgaaatggttactatagatgtgatattaggttttcctaattatatgaaaagcctattagtaaatagcttagagtgcttcttgcttcaaaatataataattttagatgttaaagctatccatttctgatgaaaattctggacgacattaacactgaataaatatttattgtgattttttccccggtggcataaggttgtttatttttcctagctctccaaatgacacagttgcggaacctctttcagctggtcttgcctgtgactcatgatatttccatcctatcatgtaatagatctggtatgtagcaggtactgaaccatcttcatttctgtacatttctctgtacactgccgcagctgccagcattgtgtctcgatgcagcagggcttttctattccaagcacagttactctcacccataccttgtaaatcttccatcaattcaaacattccaggatagttaacttgaatttcatcagtgtccacagtcagagtattaaagccagctctcccaagcagatgtcccaggtcattgacagcagtgaaaggagaaatgtgtggagaaaatcc

SEQ ID NO: 342169 - DNA, 1000 bp, Homo Sapiens
tttttttttttttttttttttttttttttttaacttgggttttaattaggtacataaatagcaacatgagaatgaggagttctaaggcttgtacattatctctaggtgaagggattccaggttagtttgcttgtaggatgatttcacagaagataacagaggtctggtctagtttttcctgaagaagaaagccaatttaatacattcaatactgacttctatgccatttttctgtagaaatactgatttattctatggagtttccaatgtttacctataactgattaagatggcagagcatggagttttctacttagttccaggtgaattcttcacatttcctggcttttgaaagttctccttccacaaatcttctatgactatatatcctcgtaaaccccagtcatataatctctccccactgacctgggcaaacacgatggcttgttgtggataatagagggaggcagctaatcccatgaaaccaggcggatacactagcttctttatttttgaacctctagccaaaaggagtccaataaggccagcaaaaccaataacaccaagtctcggaaaaaatccaggaggtgcattttggagatagtcatagctgtctaacccccattgaaccaaactttgcatcttgggcttagtttgggagtacgtttcctgacaccaggttgtgtatggctcgcaatagtgtcggagctgtgagatgctttcttcaagctggctccttgcctcctccacatacttcgattgaccctcaggaactgagtagagtgaaagctcatcaaccttcacggaatttttgggaggtgagtccttttttggtgctgcatagactttgaaggtgagcaagctcaggctggctggccccacggacctctgaattaccttgaacatgtcgctggcagcggaggctccggcagggtcaccccggcctcggccacgcccactatagagaggtgactacggaggcccggtagggccttgattt

SEQ ID NO: 342170 - DNA, 1000 bp, Homo Sapiens
tttgtttatttctctttatttcaatcatacagagtccgggatcccttatcatcctccctcctcagtctctgcccccaggggttaaataattttaaaaaatatttaaaaagctgtaacaaaataacatcaaaggaaatgggaaggatgggaggggtcaggaatcatgaaggagggtagagaagagggcctcttccccactccccactcttggattccagcctgggcagtagggagaactaccccctatctctccaggtacatcccagctgtaggtgaggtcagaggtcagggtatgaaagtgccggtgtgtgtgaatggggagctgggcagaggcaggctgttcagaagatgccccctcctccccactcaaccaggtactgcacagagccatcaggccgtactctccgagcaaggacccggacagggtcccctcgggacaggtaaccaaccccacctcggactcctcccccagtcccaggagacaaactacggcacaggggagaagggggtgctgagcgtctaggaagacctggggatggggatgaaactgaggaagatgaggcagtcatcgagtggggggcacttttagggatgtctgtggggaaaccaatgtgaagttccaggggtgacctgtctgggggtccactgtccccagaggtccctgcggtgctggcagaagggtggaaggaagcaaacatccggatggggctgctgggcaggcagcgggcatctgtgggccggaagttgtagccgctgctgccctggtaactctggttagggctgggggatggtggagacactgaggcctgcagtgccctctgcagatgagcccgctccctctgctcctggggctcgggctgattgcgcactgctgagggtggccccagctcctccactttccccttctgcctcctcctcaggggctctggctccggcctccggcgcttccccaggggacgtgagacccctcccccagggccctgccctgaagggaagctgg

SEQ ID NO: 342171 - DNA, 537 bp, Homo Sapiens
tttttttttttttttttttttttttttttttattttttttttttttttttttttttttttttttttttttcaacatctaagtctttattaaggtgagtctttacaaacaagcatctatcccagtgtgggggatgaggatgggagaggaaagcggggcaggaagatgaggattctcatctattgataataaagctccaggttcatcccatcgtggatttcatagtcccccagagacacgtggtccttaaaaatcgtgtaccacttcttcaggacaatcttgttccaacgggtaccagtttgggctgcaatcagcttcttaaggtccccgatggtatcatccgtgttgcatttaacgcggaccttcttccccagacggtcgttgcaaacaacctcgatcatcctagctggagctcccaccgaccccagaccctgggtggctgggtcgcgacagctttctccgactccgagcctctccgcttgaccccctcacctcgaatcgcctcgaacctgccgacgccaccagctcctcacccgagc

SEQ ID NO: 342172 - DNA, 1000 bp, Homo Sapiens; identical to SEQ ID NO: 160164

SEQ ID NO: 342173 - DNA, 1000 bp, Homo Sapiens
caagttgcacattttaatttacaatttttaccaataaaaaggattagtttacaaaaagggaagtcctttatacaaaataaggattttttttttccatttgtaaagagaatccactgtcatgttttgccttgtcaagtcaaaactcaaatagcttgttttggtaaaattattccagaaacataatccagacaaaatcaataacgtcatcagcttcctaaccatgtttaagaggaataacttcatgaacattttgccctgaactgaaaagttctaaatacttgtaaacctttaggaaaaaatgactgctcgcaggcagctgactggtaagagggtacaccagagactccgggtcactcactgtcagaaatattcttatacatacaatgagtctccacgcctgtacaatgagtgtacgtgcaacataattggagtaatggcctctaaaattttacaagtaaactttattgtggccacagatgaacaacaaaacatgacagttaaggttcagactctccccacctattttatcatataaattaaatatggagaagtacacacaaactctattcaaaatgagaagttgtttgccaactctcatttcctaggataacacacatcacactgtttaagagtgggggaaagaatagtcatactgttagagcacaatgtttcctgaaaagaaactgatcaaaacgtttgaagcctttttagttgcctcaaagtgtgacagccactcaatactgctcctaacagtctgctttcagataacgtcataaaataaaataactgtgtgaaaagccatggccttcaaaaaactttatttggttatgagccaagctctgataggaaaagcccacctacgaaaaaaaggtgtgggtatttaagctggtctgattcacagagcttgtacattcatgactcaaaataacacaccctcaaacccaaatgattctaaagccatttcaaccttaaatcatgttattcccttagatgtgcttac

SEQ ID NO: 342174 - DNA, 1000 bp, Homo Sapiens
tttttttttttttttttttttttttttttttttttgctttctttctggtttaattccattcaacgcccccctcccccatagcacctggggggccgcagaacacccgcccgagtctgtaaaaagtcacagtttgaagagaatgagaggggcagtgtgggcctgcgtgggacgcctacgcagcggactgctcctcaggctcggcgttctcggccaggtgcagcttctggctgtgcccgtcaaggatcgtggcgctttggaccagtccttcctcccaccccggtctcccatcttgcacaggtttagttccctcacctgtgcaaagggccggggacgagggtctcgggccgtctgtggactgaggttgcagtccccgcctgccctctctcaccccctctctcttcatccagatcgtgcaggtcagacacactggggtgtgtgcgcgcgcactcgcgctgtttctgactgaggaccaggtgaggtggtagtgtaaattagtaaaaataattgttcaatgctgaaaggataggaggacatcggacaagctttgctatgattgatgtcagctaaagtactcacaaagattttgatcagtagtaaaacatcccctacaaccacttttcttctaattttggggaaattctaaattcctgtacctgggtttgggcagtctgtggctaaatctgacaggactgcaagaggtggggaagttggttgtgtgtgaatactcctggagggctggagaggaggaaactgacctctcaggaacacacacacatagacgggttccttggaaaggatacatagaattactgaggtcttccagattgctaagcagctggtccaggttacggtcagccattgtcttcttctgctcctctggcagcccctcagtgaccccatcctcttcctcttcatcgtcctcctcctccccacacacatccaggctgaagtgcagccgggctagcttctcctgcatctcccgaacgtgctccagctgctc

SEQ ID NO: 342175 - DNA, 1000 bp, Homo Sapiens; identical to SEQ ID NO: 160165

SEQ ID NO: 342176 - DNA, 794 bp, Homo Sapiens; identical to SEQ ID NO: 160166

SEQ ID NO: 342177 - DNA, 1000 bp, Homo Sapiens; identical to SEQ ID NO: 157539

SEQ ID NO: 342178 - DNA, 1000 bp, Homo Sapiens
tttttttttttttttaaggctgcttcctgcctctcggcccaccagctgaaggcacctctttattccagccccagacaaaaagccagggactggtaggcctgcatcagtctccctcccactctgtgtcctgaccccacaaagggcctctgaggttggagacgcctgtgccttcatccccatccatgcttcctgggggtggggcctctgactaaatatgacaccgtttttcaagaactgagccagggggtcctgaggagaagggcacagtcttgcaaaatggtctcgaatttctctgctgagtttttcatccccctgcttggatcccagtgctgttacctcttgaaaggaactgtacctttagccgaagaaacaaaggcctggggaggatagaagtcctcggaggaaagggccaagggatctgggacccttttttgcttttcctaagattgatcccacccccacctccatgtggtggggacagacaaagacaatgctgcattcttcaaggaacaaaggcagacagacttccagatggaggctttgctgcccggtcttctgcagagggactcagaggcttctaagaggggttctgccccgggggtggggaacatgattttgccctgagagcaccaccagtttctgaggtgaggaggtgccttcagaacagggcgctccccgagttggcatgccagcagcccatccagggcagctcggtggcccagcggcccgaggtggttgcctgcagtttggcctggtcgaggcgccagtagcggtcatctcggaagaagatgatggagccatcgggcctcggcagggcgccgctgacctcctcagggatgcctccccagtcctgcagacttcgggggtagtagggctccacttgcagtccccctcgggccagcacgtagtagcgggcacccttgaagaggatgaggcggcgcagaggagggaagaagagggcggcgtcaggatggcggggcaggccccctgcccggcacag

SEQ ID NO: 342179 - DNA, 1000 bp, Homo Sapiens
gttggtttcttttcagtgttttatttttcaaaatatacaatttaagtttttatttcacaaccgtagttttgtatatttattccaaaatctttaaatagctccgcagcaaacagtacaaatcacaaggtccgtcaaactgcttctctttagcctttacacttggcgagttttttaagtttcaagtagtaatggtttgtgggtaagaaaggaaccaaaaacaggaggaaacaacattttttacataagctcaacatgtaggattagaaagggccgtctgaccagctccttggtctgggaccagactaagaacatgtatctggtttataaataagaccgtcctgggagcagtgagggttttggttacgaggaggaaggggcaggaacctcatctgcggaggctgggaggcagggggaggtgaggcactgagaggtggctccttctgggagcgcccgagtaggggcctgagcggggtggaggccaagaatggccagggacggggtggggctgccactggtggagaagcctcctcagcctcccttggggagaagggctgtgattctggaggcaggggagggacggcaagaaaagctgccaggtcctaaagcaagcagctgggactcctgccagccaccctgggcccaacgacgcaggcagctggcagggccagaggggctgccccagggtctggggtggactgtgggaggcatcacgctgtctcttcttgcgagagctctttgtccacctcagagccaccaaagcctccccagaagggacagcagggaggacagggaccacagatcccacagacccacttctgactgtgaaagcgagctgtgccgtgcaggcagctcctaggcagcccatgaggctaaggcacaagggtgacacaggtggccacgagggctcagttttcttcatttccccttgcggctgctacctgtggccacggcctgaagcagtcctgtgggctgagctctaggcagggacgctccaggaagg

SEQ ID NO: 342180 - DNA, 1000 bp, Homo Sapiens
tttttttttttttttttttggttgcgatttttcttttttaatgatcaccatgaaatccactgggccaggccctggtgttctgctgccatagtcagagtcagagtggagggatgaccccaggaggggacaagaagccaagactgggctggggagccgagaaggagatagataagggggagagggtgcagtggggcaggcagaggaggaagtctggagccctggataacaacacagatataaggtgaaggcctccctctgccaccccagccctgagccacagacgttgaggtgcaagaagatggggattttggccacaactcctttcccatgtcaaagggaagacactgagagcagacaaaggccaagtgcccaggggcacaagaacaagttaacaagtaaaacaattagggacaccacctcctttccccagcccatttttcacatttacaactgaagcaatttgacaagatgatataaaaatctcaaacaaattttctagcccctggtcggggtgtggacaggaagtggtatcccgtgatccagaaatcaacacctaaaatccagaggcaggaggcaagccatgaagggtggggagggaaggaggagctcccacagtcactaggtcacctgctccgtgggcctcatctggatgtctccaatctggatgtgtgcgggggtgctgaggacgtagataacagcctcggccacatcctcgggtttgagacacttcatttgctcataggtggcagctgccttctcagggtccttgtcgtggagtttgaaggcgaattgtgtctccaccacacctggagagatgcacgtggctcggatgtgggtctgggcctcccgaagctcttgcctcagtccctctgtcagcgcagtgacggcatacttggtggcactatagaagtgggtcacagacaggggtaacactcggtggccagacatgctattgatgttaatgatgtgcccatcgtccacattccgctccttcatggac

SEQ ID NO: 342181 - DNA, 1000 bp, Homo Sapiens
tttttttttttttttttttgcagtcacagcagcaagaacgtttattataaaaataggtgaataaagtaagtgtgctttaacttccggctggatgacaaatgctactgaaatgcagtttctcagtgcagacatgtggctcgcaatggcgggggtggccaccctagtgtgacgtgcagccgcaatactccatttgactggttcgaggcagagaggcgacgctttattccatagaacaggatggggctcccaccctggggaccatacaagtgactccctcaggcagccacccctttctaggcaggctgggggaggggctggcacaccagcaccagatagctctggcttaagcctgatggagacacagactgggacctccctctgccagatgttcctgaccccatctccacctccagcctccagcctcactggcagttccctgtgacccagcctgttccatagccaaagggaccaaagtgaacgatcagagtgccccgcaactattctaggggccttggctctcagtagagctcaacccatggcatctgagagcacccaccctgtccctgagggcagctgcaccgggccaggaggccgcaagggcacgggtgagtctcggtcactggcagcactcggccacatgcctgaggagctcttccccttgctcgtcactgaagcactgcaggcagtgagggcactgaaggtccccctggcctctctggaccgcgccaggatgcccgccctctgcagggggttctggctgctgggacccagtcccaggcctccagccaccaggcaccataagctctaatgcgtcggcggccaaatacttggcagttttgctcccagcgtgaatccggccggcgtctggctctcgagaatcctgtctccaggacacctggtgcagcaaagaggcgaccttttcctccagttcttgaatcctactttgagcccgttcccgatcggccctttctgacatgaagtcatccttgtaagcgagaat

SEQ ID NO: 342182 - DNA, 1000 bp, Homo Sapiens
ttttttttccaataaactttcttttttattattaagggggggcagggtttctgttcttgcaactgagtcctaacagaaaacaatggtttcgctgaccacacggagagctgaggacaggacaaaaaggcatgagacagctggacacctggagagaggtgacacaggacagagtcctcacccggctgccctgggcctcggggagctcaggctgcagtccctgggcctggtggcacccacagcacggcagtctctggctgggcttcggggagcccacatgtctgatcggcagggcttggctggccaaggcggtgggcaccagcgtggtgggtgggcagtcctgggcttccaggaggcctcctgggactcaggctcttcagtggggtgtgcctgtcagggtgcaggtgggttctgtggctacactcccatcctgtcttccctctgtgttcccaaacctgctctggtccctagatgtctggagacctggggtcgtccagctcaggaggccatctggagctgccgctgcagcctgcagagtgtaaggtggcgtttgttaccaagacctgtgggtgttctggggcttcctgaagggaaaggcattacctgcagtgaagccataaggacacagtgtccagcaaaaaggcactgggagtccagaaagagccactccccaccgctgcacctgccaccatgggatggggtcccggagccctgggcagcttctggagctgccctcttgggggcctgggcagtggagctggcttggggacagatgttctgcaggcccggggtcagctgtggaaagcagaccaggccacccccgaggcgtagaactccacgctgctgggccagtccccgtccctgctgccctccttgtcctcgtcggagtcatcgtcatctccactggacgctccgcagatgggccgggccaggtgggctggctgccttggggaccccgcgccctgctcctccgcctcctcctgccgctgctgggcggccagtt

SEQ ID NO: 342183 - DNA, 1000 bp, Homo Sapiens; identical to SEQ ID NO: 160168

SEQ ID NO: 342184 - DNA, 921 bp, Homo Sapiens
ttttttttttttttttttgagtggctgagaatttaatactggtaaacactataaattgtaaatgtaagttgtaaatgaccttgtcactggagaggggagaaggaactggagtcagacgtcccagcagaaacagcagcggcaacatgcggtaggcacacctaggtgcaggctgggctacagggacagccaagctgagcaaggacaggtccccgcagcctagactggggcaccgcttcgttctcggtctcactccccgctgtgccgtgctttgcctgtgagacggcggcgctgggccttgctggtacgaggggcccttgggggctttttggagtcctgggcccgtcggggatgtttcctcttgacctttttgcggctgtgtgcatgtagtgatgctgtgagggaggagatccgctgagagagcagggggtctctggacttcctgggcaaggctttggttggtttctccgtggatgacgcctcctcctcagacctgtctccagcccctccctcaggtggggtcagcccgagcagccgggcccccgagaggtccaggtcactgatggtggtcacggtgactgtgtggttggggtggtcatactgcaccgactccgtctttgctgtcaccaaccggtccagctcatctgcctcctccagagcctcttctctctctgccagcatcttcaagtattcctggtggcgctcctcccgaagcttcctctgctcctctttcagccgctgcttaatctcctcaatggctgccttctttcgctcgaccttccgcttgtggaagcctgtcaggtactcccgcctcttctcctcgtcgaagctaagaacgagcctcggccgccggtcgtcaccatctcgcttcttcttcttgttgcggcccatagcagtgaggccgccggcttcctctccctgaag

SEQ ID NO: 342185 - DNA, 1000 bp, Homo Sapiens
ttttttgattacttaaataaagcctgcttttttatttcatctgattccaagaagtagaaaagaatgcttatttaacagttactgccatcttcgctcacatacagagtacatgggggagtcaagacatttcctgaaaatccctcagaggtgagtgaggtagtgacttggggtagcaagactgtcctcctaagtcagttgaggagtgacatcgggatgaagctccacccacaagccctgcccacagaggtcttctccctgagtgtgtcctcctttagtacaagatgaggtttaacttattgctaatgtgtttcacattttccctccccacccatgtaaagcttgtcccaaaaaagctgttctttgatgaggactttttcctaagtccttgtccattctccccacacatgcagaatttctattcaatatactctggggcttactggggggtgactcatggctgaagccttatctacactccttatatacctaacatgtcttagaatcaattatctggacagacaacgagacagaaaattgaggattcactggggagtgagggcaggactgggcagaggaagaagctgacctgcaatgtgtctgcaacccagtgatccttcagttcgatggggatctctggatctggaatgaccttctggagttgtccccgttgagtcaagggttggggccagaaggtacccctgcaaaggtgcattgcccctgtggtgcatgcagctccctgtggctgagagtgagttccagagcggagtgcatctctggaatgcatctctgccagcagcaacactgttctctcaagcagctggggtgttacccctgaaaaggtcatctgggcagagctccacagtgtccccacatgcagattctccctgtggtgtgtgatcacaaaagctttgcccatacatcctacaaacaaagacctccttcctgagggccactctgtgcctgagtgtccattcttttactgatgctccccaacactccc

SEQ ID NO: 342186 - DNA, 1000 bp, Homo Sapiens
ttttttttttttttttgggggtaaaaagctctttatttgaagctccagggtggggcagggcactggcctctcaccagaggtcctcacagttcagtttccctacagctcagtgtcaggccccagccacacagtccagctgtgctccgattggcaggcggtcagacctgcaggttgacaaaaggtgcgaagcccgccatatcctgcagcagcaccagggcctggtgcagcggcggctccacgtcgatgtccacgccgcgcttccgcaagcggctcaggctggactccgccacatggtggcagtgccgcacccgcagcgaacgcagcacggggcagtactcggccaatgtcctgacaccgtcgcttccgacgcggaggcagccggtgaggtcaaggtggtggagttctgggcagttccgagccaactcttgaaccgcggcgtcccccacgttggcgttgacggccagagagaggctgcggagaccagcgccgcgcctctgcgccaggtacacgatggcctcgtccttgagctggcggcaggcggtgagatccagctcctccagggccgggcagtgatcagcgaggccgcgcagcgccagcccgtccacccagtcacagtgcgcgagcgacaggcgctgcaggcgtgggcagccctcggccaaagccccaagcgcccggcgactcagttgcccgcagccgcccaacgccacactccgcagctgcggattccgcgccagcaccggcaccaggtcctcgtctgacagccattcgtgacacggcgccagtgccagctcctgcagcccctcggcatcccgcagcagccgggccaatgcggcccgcgggatctgcggacccacctgcgcggcatcgaagcgacgcagcccggccaggtgaagctgcaccagcgaccggaaggcccggctaacgcgctgcagccgtagcagctggcgcagcgggacccggttcaggacgtgtgggagcagcacgtcttcccagggcaggt

SEQ ID NO: 342187 - DNA, 1000 bp, Homo Sapiens
ttttttttttttttttttttttttttttttttttttttttttttttttttttttttttttttttttttttttttttttttttttttttttttttccctgtttagacattttaatatggatgttttctgtttttagatactattcctgttagcttattcataccatttcacctacacatatgaaaaaaatatttcaggactagaatgatatacaaaattatttcaacgagacataaattatcgggggactagtgccatctagtgccatggcccctctaagtgaggatggcagggggtggaaaagagacacaaggactccaattgctacccccactcaattggggtccagctcccaactttgctgccccatccccaaaagcccaagttgctccacatctggaactcacctggtggcattacaggccagcaacacctcacctttcctgcccccattcaggcaaaggtccagggcaatttgctcccatagcccatggcatccatctgggaagaatgaagggtgatggcacaatctgcagctaggtatttaactgggaataagggagacacaaaccatttctctcccgcactcccttcccattttttttttttttaacaaaagatctcattattatctgatttcactgtctcacgaaggccctgtgtgctccaaagactgaagctctaaataagaatcttctgggtcctctttattaagagccctctgccttcccaggggagggaagcaaatccttcagggcccccagagttcctgcaccccatatcatgggtgagtcctaccagccacagagccacccgtcaccgtggagaggcttaagctgcactcagagctccccccgggcatgccgaatgtagtgttgatgcagccctgcttcctgagcaaagtcctgaccgcactctgtgcaggcgaaggtgccaggaggggcacggacctcatgcatctggcggtgccgcctcagagaaacagcctgcccaaaggtctt

SEQ ID NO: 342188 - DNA, 1000 bp, Homo Sapiens; identical to SEQ ID NO: 160171

SEQ ID NO: 342189 - DNA, 1000 bp, Homo Sapiens
ttttttttttttttttttgtaggtcagagacagctggatcagctccagccacatttattacaaaatagtgaccgcagttctggtatagaaaagatccctgacagcccagtacacctgcaacggcccccaccccacagagttcctctctcaggtgcctcaggtgtggaagttctcagattcgaaggtttcctgccaggagggcgctgtaccgggcagttgtgaggggcaggtaggcacctacagcctggtccagaacgtacagtgggtcagacagggtgctggggtcgaagccctcatttgccatccgaactttctgctgtttgaaggtctctgtggtggccaaagactcctggagcctgaggaatcggggccgggcataaggtggcaagttctcagacacgtgggtgtagagctgcataaggtccaaagcgtgggggggacgcagaactagggctgccattccagccctgccttcatgccctggcacagtgactccatagacgttcacctcctgaagaaaatctagggcctcgaagacctctgccacctcggttgtggccacattctcccccttccacctgaaggtgtctccagtacgatcatggaagcggagaaaaccttggtcatcgcagaccagcaggtccccagtgttgaagaaaacatccccaggccggaagacatcctttagcaacttcccctgggccagctctggcccgccagcatagcccaggaatggggactgctggcttaccggggccaccagcagccctggctcacctggagatgtggccatacagtgcccctgggggtcccgaattggctctcctgtggtgacatcatagcgaatcaaggagaaggggaagatatgcttgtaaagccaggaagcacgccccacagcgccccgctgtcctgtgtagttgatggtggccacgttgccctctgtcagtccatatgtctccagcacctgcaggggcccgaagcgccgcacaaaacgctccca

SEQ ID NO: 342190 - DNA, 1000 bp, Homo Sapiens
tttttttttttttttttttaattggtgacacatctctcttggaaagacacatgtaccacaaacaaaaacaggatccaaccacttgtatctagatagttatctttctaggcagaaaatctaacattcagtaactaaaccaaatcccagagcctcagcagccaaaatggccctagctgacatttcatccagcctcattttatagaggagaaagtagaggcccatatcttgtccatagttgtacacctgggatccaggccagaattcttatagctacacgggcctgggatccagcattttaggttgagtaaaatcatttcctgctaggtccctgattctattgagaaccagggctaaggctttatggatttgggaaaacttaagtttctattgcaaacttcaaccagtgggtcccagaggtgctttgaagtctccggcttccacatttgaccacaaagtgctgcttatgtcctgatgcttacatgattcagttaaggtgctttccaaacccggtgacaacagctggggccttcatctccagtaagtttcctgatgagcagcagaggtctatacttagggttcctgtgaaaaacacaaactcccagtctcacatttggtcacactgaaggtttggccaaattatttcatacaagtagttctcactggccaaacaggtggtttttctcctggaaaagtgggatcaaagtgactttggtcctgattgttcttgcttccaagatgtgtaagaaccagatcaccaccccccaaccaaaaagcaaaacaaaatagatatagcctccagattaatagttgcagactgggattccaaatgtttaagaatcagtggggacattttccatgtcttccatggagtaattaaagtaaccaaaggcttaccccaaaatgggctcatgctcatatctcaggctgttcctccatcctgcagtttaattacaaggagcaagactgaatccatggacccttaaattctccttgtgcctct

SEQ ID NO: 342191 - DNA, 1000 bp, Homo Sapiens
ttttttttttttttttttgcctggccagtgtctgacctttattaagaggtgaggtggggagagggcccgccagggtgcccactccctcttggtgacccccccatctggagttaaggctccaagcagcaagtgacagaggagggtgcctggctccagcagcctgggcttggcggcgactcccccaaaaacaccccagctgggtgggtgcctgggggcctaggtgaggctggtgttggagctgctggtagcactgcctcgcttttgcaggcagcgcacagcactggggacctgcaggcctgtcgtcacctggaagctgccacaccataccgtgaaagcaggcagcagcggctgtgtgaacctggtcttgaaagtgtgcagcacttgtttggtgcgggcattgtagaaggacaggaggccttggtggaagtcacagtgcacacccaggcagtcgggcacgggggcgtccagcaccttgaccttgttggcgtgcttggccgtgaagctgacctgcagccaattgttgacgtgcaggcaccaggaggcggccgtcttgcccagttgctcgaagcggcccaggctgcggtaggccacgcccacgccgaacgccttgctgtccggctcgtagcgcacctcccagtaatgctccccgccgtcgatcagcgtgtcccccagaactgtgtaggactcagcggtgaagcggtcccgtcccccacgacctgagggcatcctcttgggagatggagtacctctggctggggagttgatgggagacgccgtccgccccttgccatctttctcgcgagccttgatatcctgcaccttcccgcccatagcgtcccactccacggagagatcatccacccgcaggttctggtgggatgtggacgcatccaggcggaacatgaacgctggtgtctccagagtcaccggctcagagaactctcctgcaactgccttgttacaggccttcacacggaagttcatgtatttcatgtcaaac

SEQ ID NO: 342192 - DNA, 1000 bp, Homo Sapiens; identical to SEQ ID NO: 160172

SEQ ID NO: 342193 - DNA, 1000 bp, Homo Sapiens
cgggttatagtcaaagtggcagcagctcatttatttagccaaaaatagatactttctcgtacaatttggttcacacatatgtacatttctctgtatatatacacacacacaaaggcagacacgtttattctcactgaaactccaccccccaaaatcaaccggacaaacaaacctcacagcgaatgcggggtgccacagaagcgacttggggagggctgaggaggactggttttatttctttttcttactttctttgtttagttttgcttttaggtatttatacacggacatgcttacaagttgtaactatacagagcgattttttttatacaattattacaacgattaaaaaaagttttttttgtttttttgttttttttaaagaactaggatgaggagagagccgataagaccagggcggcgtccagatggttctggggccgcctgggcacgggctggaaagctgtcttgagtaactttttctccacttccaaggcactacagcgatctgttccgccttcgggctccgctggccgagcgaaggcggcggcggcagccgggtggcccgcggctccgggaagtcccagcaggtgcggaggggcagagcccagcagggagagcgggtgcaggcgggggccgggcggtgggcctggaaacggccggttggtccaagccgggaacttgcccagcggcgctgagaccagtctgtgagcggcggcggcggcggcggccggagagagctgcagggcggaaggcgcgaccgctgcccccggtggagacccccccgcgccgggaggcgagcggcgcgggttgtccgggcttgtggcagtctccgcgagggaccagatcttgggcttctgcagggcggaggcgggggctggtgcgggagcgcaggggtccaggctcacggggggcgacggcagagacggcgaggccacggccactggtggtggcgctggagccagactcaggaccggtagtggccggtcctctaagccct

SEQ ID NO: 342194 - DNA, 1000 bp, Homo Sapiens
tttttttttttttttttttttttttttaggatttctctccattatgtattctcctgtgaattgtaagagaaaagctattggtaaaggatttcccacactcattacatgtgtagggtttttctccagtatgagttcttatgtgctgtgtcagattcgacctcctcctgaaggttctcccacaatcgtggcattcgtaagggtactcccctgtatgaatgctatagtgcgaagaaagagatgacctcgtgccgaaagcctttccacactgattacatacataatgaccctcccccgtatgaactctcttgtgccttgtgaagattgactgagtgcggaactcacgaaaacactggttacatttgtacggtttttctccagtgtgaattctcaagtgcggtctgaggtatgaggaattgctgaaggttttcccacagtcactgcattcgtagggtttctccccattgtggattctcttatgaacagtaaggtaagatctgctgctgaaggttttcccacagtcattgcattcatagggtttctccccattgtggattctcttatgaacagcaaggtaagatctactgctgtaggatttcccacattcactgcagccatagggtctttctccagtatgaatcttcctgtgccgtgtaagggaagattttgtgctgaagactttaaaacactgattacattcgttgagtgttgctccaagatgattcctctccattttcatatttctagattgttcttttcgaaaaacatgcagcttaggagttaaccctttggctttaaatggattctccacatctggacaggtacctgagagaattcctctctcttctgtcatcactttatcttcttgctccagctgggagatcagcctaggtttatcaacttggttccccagtgaggccaggttcctgcagttctccagcatcacgtccctgtacagtgtcctttgggcagggtccagcaatgcccactcctcctgggtgaa

SEQ ID NO: 342195 - DNA, 1000 bp, Homo Sapiens
tttttttttttttttttttttttgagacagagtctcgctctgtcgcctaggctggagtgcagtggtgcaatctcggcttactgcaccctctgcctcccgggttcaagtgattctcttgcctcagcctcctgggtagctgggattacaggtgagcaccaccacgcccggctaatttttgtatttttagtagagatggcgtttcaccatgttggtcaggctggtctcgaactcctgaccttgtgatccacccacctcggcctcccaaagtgctgggattacaggcatgagccactgcgcctggccgagtagagaagaatttactgctgattaaggttgtgtttttcaacctgcaatcccgagaccctcagaataaagattacttgaggttgctatgaaaaatacagattcctgtcctccccctggctgaatcagaatctcataaggtgaggctcaggtttctgcacttttcacaagctctgtaatggttacagtgcaccctaatgtttgagaaccagtggcctaaagagaatgcaacctaagagggcaaggctagtgcatagcttaaatcgctccagcctttggtaatcccttctaaacacagtaccacccatgtggaggagactgcaaggaagctgttattcaaagtagaacagtcagccttgtgcttgagtcctgctttatgcttgcgtgtttcataacaaaacacaaaggcaagtcttcatatcagcacttagtcttgatatccaagtagctgactactgtacttatgataacagcttgaagaggactgcaactctcccctcacgaatggtgacagagttggcttgtcacacctggctcagggaagaaaaatgagtaaacccctacctctttactcttgattcctcttccaccctaatactgttaacacatcatcctgtgtgattcaaataatctggcagatgaaatacagaaaatctaagtcatattgttcttatcactctatggccagatattatac

SEQ ID NO: 342196 - DNA, 787 bp, Homo Sapiens; identical to SEQ ID NO: 160174

SEQ ID NO: 342197 - DNA, 1000 bp, Homo Sapiens
ttttttttttcatgttcaaatatctcactgactttataaataaatgtatgaatgtgaacttataacaaatttatacacaaaatattattttataatcctgtatattaagttctacacaaatttcacttaaggaatgttacaaaccaatcatttacataacagcataattaatattatgacttatatcccagttcccaattcttgctatagcaactacttcgcatttccattggaaggcaccttgtccctgagcaaccatctgtttgtcaccagctatggctagtgcacagaagagtgctcagttttgtgatgtttcctatttgacagatgctttttccccaggatcatttatttatgatctaattaaaggaagaaaaaaagaagtttggtgctaggctttgtgggattcagaaagaaaagaaaatttgctctctcagcaaattatgacatcatgaggtaacactgccaggccatggatgcagtattggaaaataaaaaatacaacaccactgagcttggcaaaccttttttattttgtgataaaaatgctttcatataaatttcatcttaactacctttagaatgaaacggaaaagtaaaaacaaagtgtgcattttccttactacgtttagtcaggaatatgcggtcattttattggttactgggtttctcatacaaacagatataatatcacttttaagagaaatgtacacaaggaagtaaccatagtaccacttattagtgggggcctctgggtacataaatgtgtcctcccaaatagtcatcatacattcaatgtattggttagggccaaaatccctaaaccacctctcaacaaaacattacacctttggttctttattatgcaaaaattacaaattggcaaattcaataagaggatgcaatggatttgagcatcacagccaattgcttatactaaaatattttaattctcagactctctttccctcatacctttcccttccccacctcacataag

SEQ ID NO: 342198 - DNA, 1000 bp, Homo Sapiens; identical to SEQ ID NO: 160177

SEQ ID NO: 342199 - DNA, 1000 bp, Homo Sapiens
tttttttttttttttttgcttcaaaactattttttattcaagtgacttacaatggccctaggaaacaagttctgttattatcccccattttaaaatgatgaaaatggacaaagcaaaagcaagcaacttaaccaataccccatggcctcacagcctttagaatagtcatattatataaatatggcaataacaatgcactgaaaatgtctccaaaacaaactctacattttaaaaaatgtataacaggaatctaaggaaggggtcttacttctctgattcagggagtgcgaaatcccttaaactcatatcagacctgtgatgaacaaactcacactaagttttaaaaactgcttaatttactttatcatgactagtaatatataagaattttgtatatactttattaaaaataactttggaaaactatttttgcctgatcagcaataaaactactgataagataagctggttatcaaataattccctagtgttaatctggcaaataattgttataacccaatcttgtgaattgaagacaggcacattatagataatcaaaaatattagaaacacatttaaaatgtccatatgtttagtataaatagaaaattcattgactaaaataagtcatgaaacatggactggaattttgtgagctattaagtttcattttgttttactgttttaaaatttaaatagtttggctcatttctacatttgttaaaattgtaatcttaaaatattaaaaaaataactttacaaacacacagatatgactagccattttatctaagttataaaatagttaccccagggagccttcaagatccctatattttaaagcttatttcaaaaaccatcactacttcacatttttaaactgcatccttgcattacagaactgtaaatgtgttgtcatacagtaaatatccacatcccaattctaattacaccattcttgttgttaacacagagcactgcttctaataaaagcatggca

SEQ ID NO: 342200 - DNA, 1000 bp, Homo Sapiens
tttttttttttttttttttccaagttaatattgttttattacatctccccacatctgtaaatattactttatgcatccaatttttgcttattttaagcagccaagtttctttaaaagcaaagtaacttcttttaatagcaatactaaaactctgtttaaaacattgcaaaacaaaccccactgcattttagacagctgcttccttataaaagtaagaaaaaacattctgtatatttacataaaaaattctaaatcattcactgggggaaaaatgaaagctttaaaaatatattttcttgcacactcaaataccataaatttcaccttacacatataaggaaataataatactacatatgtgaaaatatagaaatgaatccctaaaattaaattttcatttgagagaaaagaattacaaattcgggcatacatgcagaccaggtggttttcagcatgttcaaagaacaaagagatggttagaggttttataaacagggaagtgatactggttgctctttgagaaagtttatcggcactagtaaagtcttggggaggtagcaggttttgatcggtgagtgggagtgagcaaaacacagtgggtgtttcagtagccgttagataaaactggcttctggttacagcaggaaatttcagcaactaggcttacagagaattccattctcagaccaatattttgtgccctgagttctttctccccctggcttctcgactgtcttttggttgagtatttcaagattgatccaattcgtatgatcaactttcacacatgttcaaaatgattacattaaaagaagacgactttaaacggaaaacaaggccgggagcggtgggtcatgcctgtaatcccagcactttgggaggccgaggcaggcggatcacgaggtcaggagatcgagaccatcctggctaacacagtgaaaccccgtctctattaaaaatacaaaaaattagccgggcgtggtggtgggcgcctgtagtc

SEQ ID NO: 342201 - DNA, 1000 bp, Homo Sapiens
tttttttttttttttttttttttttttttttcccaaattaccaagaacctttatttaacctaccaaactaaaagagcaataaaataaaaatattttccatccacaaaacggttttacatcaactacactgaccaatacagagaaaagggaaatccctgaggaactgccaacaataaataatatacttaaaatagaatgttctgagtgtaaaggaacatttcctgagcccgttcagtttggggaaatttggccctttgcaaaattcagtttctcaaaaggatatccaactgatgcaagtttcctgtcatgacaagaagctgtcatgttcagtagcaccttacacgaaaggtggggaaataggccgggcgcagtggctcacgcctgtaatcccagcactttgggaggccgaggcaggtggatcacctgaggtcaggagtttgagaccagcctgaccaacatggtaaaaccctgtctctactaaaaatacaaaaaattagccaggtgtggtggtgggtgcctgtaatcccagctactcaggaggctgaggcaggagaatcacttgaacccgggaggcagaggttgcagtgagctgagatcatgccgctgcacttcagcctgggggacagagagagactctgtctcaaaaaaaagaaaaaaagatgaggaaataatcaatcttcttctgatcaatttgtccatagttctggaaaagctactgcacagagcaggagaggaaactatttgctctctgtaatactgaaaaactgagagtgctattttaacttgtcaataactaaaaggtaccattttctcatagtgcacaggtgttgtacaaaaagtacatgacctccctgctgtttgtgagtgaaaaaggaaaacccaaatatttgtgaaagtgtaagacggatgcatttaaaattctggggtctagcaagggaaagattctctgtgaagacccaaaattgaggactggttttataactctaaaattatcttgagg

SEQ ID NO: 342202 - DNA, 1000 bp, Homo Sapiens
agttgcttgccatagattgttattgtggatttccataatactccccatcctaaagagcagctgtcaatgccatttacaacatgtatttctctaaactggctgtgggatgcatattcctgaagccagcgccaaggtcattccgtttcccaagagcaagcatctactctccagaggagaaagacatcctctggaaagaaggtaggttgtctgtgcaaggatcatctggaagctgggaatctggaactctcagatacgcaggtaaatatgcgtctagtccttgtacttggtgctcgcaaccattaccttaattcagggagcagtgtcaccttccaaaggagattcttttcctatgcgttgttccaagaacagaggaggtggcatcaggctgggcagggttgggacggctgtcaccttcggtccgaaatcactggctgaagcccccaccacccctttgtctccccatttaacagggcatagagattcttctgacgtccactcatgcagcagctcaggtgttctaagggaagtggacctctcctcccagctccagctgggagtcccagtcagcacgttcccctccatttgccagtgaatggttctgaggatgttgtgcaagctatgcagggtgaggctgaggaaaccaggactctgtttggaatgtggagagaggggccctctgtgtcttctgaatagtgatgcatggataagtcctgggggtgactccagccaagcatccccgtgaacagaggcagactcaggacaaagctgtccctgaaagctgggagaaaagcccaggtccgagttgctgagtccaggcaccctctcttgggacctacactgagcctgtgcctgtttttctgcttgactggaatgaggtgcaatttctgtgacttgcgatggcccacactcatggctcattgcagaatgagccatgctttcctgatacgccatgctgaggaatttccttgtcctcagatcctatgccctctctgcattgctg

SEQ ID NO: 342203 - DNA, 1000 bp, Homo Sapiens
ttttttttttttttttttggaaattctttacagaaattttatttgagatctcaagtccttataaaaagtgcattacatcaagattgcaaaagacactttttaaatgagagacttctatctactcatccattttaccctatgattcatttcctaccctaacagaaatgatgaaacagtttttctttcttccttttcttcctcctgctttgaaagggcaactgtcatgagggatatcttaacagaatgtgccaattaatccttgccaggagagcagtagcttcctactggctaaatttagagagcccttggcattccttttggtgtggctcaaagattattacaagctgaatctaaaagattgcaacctactacttgcaatctgtctccctgggctcctcttttactcacaaactccactctaaaacaaccttaaattttaagcactcaataattgctttagaaatgaagggatctaaagttaattaccttacccttgcaactattttctgtataagaatctcaaagttaataaaaattatacagatgaagaatgacctaatactaagaaggggatgaattctgagagcaaatacattttacaacccttgtctcaaaataagatcaatcctacaaaatacaaaatgttaagaatacaatttacacagtaaaaatgatttgatttgttttcagtatgaaagtacttttaatttctttactgcaggtacaatggcatccaagtcatcaatttctaagatttcaagtagatcattagtaaatgcctgaaatgctgggaaaaattcctcgtgttcttccaatttgtagataatgctctggaggtcttcaggtcctaatacctgcataacctgctcattcacatcttcattaatcagcctacagagttttccaacagtgcttactagcacacacaatgaggatgaactatctaattctaagagttcttggaggtttctcacagcattgttcatttctccaagcctag

SEQ ID NO: 342204 - DNA, 1000 bp, Homo Sapiens
tttttttttttttttttttaatatcaattgaatttattacaagttactaagctccaaggcacattacagtgttctgttaactacagaaatgtataaaggacaaacagagcagattctccatgtctagcatttcgctctactgttcaaaagcatccgtgcatcaataaagcaaaaacaaaacaacacgtgtagatccaacacattcaggtcagtagaaacaaaccaaaacattttcccctcacaaacttgcaacaaaatacaccccatcccccccgacacccccttaccattttgcaaacaaaacagaaaaacaaaacaaaacaacaaaataaagtgaagacttcaacacttggggcagtttagaaggaagctttcaccattttatagcattttttttttttttttttttttttttttttttttttaggcagcaacactggccttggcaaaaaaaaaaaaaaaaaaaaaaaagtctttttcttttgtgtgtgtttttcctttcagagagtgcataacatttacaaaaatacacaccagcagcagtcgttgctaagggctattaattctgtacctaggcaaacattctgccaccaaataaatgctaacgatatgatgcaaatgacccaaccaatactatactgcttaacacaaaccagcttatccttcaaatgaagaagttacatacctttgtttcaaaatatagaaacatacgacgaaaataatgtctatacataagactaactttttgcagtttcgttatattcacaattctacaccttgggggtgaggggagggagggtcgagttgggttgggggaggggccctcaggattggagaggagctggtctagggcaaaggaggtggctgcccagtggttcaagggtctctctcctttttcactttaacatccccagctaagatagtcgcgatttcgccctgcatgaaggcccaaggtacattcgacccgactagggggcatttctctccgctggggcaatac

SEQ ID NO: 342205 - DNA, 1000 bp, Homo Sapiens
ttttttttttttttttgcagattctataatttttattacaaaaaaaaccctttacatgctatgacattaaatgtcacttataaggtcattgcaagcaaatctttttaaaaaatatacatactgtatatatttacattcaagtttgaataatatttgtcaagatatagttcagattctactctttacccattctgtggatttgttcatctagtaactaaacagcgattgtatcatcactcaggcacatagagaggtagaaaccgcttttttaaagaaaaaaaaactggagtgcaaatgtgaagatcactgaagcagcttagctacatcaaggagaccctaactagctttggtcatctcaaaaagctgaatatatgtagccttgtcctttaaattaaaaccagaaaaactttgggcaggtgctcttctgagcacatcagagtgctgacagaactcagcaactaatggtctgccactctgcaacgcgaattgcacatgactaagtgaggcaaagatagcagcggagctgggctggcagctgggcaccttttccctgataagacacaaatcataaccaaacaagtggcttacaagacagtcaattaatatctggacatatagtctggaactcggaagccaactaaagtacttcatttcccaagtgaaatccctattcatttttgttctcccacctccatcccaaactgagctcctaagtctagatagggatgggggtcgcctgggacttctgcaggccacagtttttcggccccaagtaccggcctcacgaaggctcttgggactgagaagggctgccggggttcttgataaacttagtgggggttgttccagagaggggaagttggaggggagccacaggaatggccgtggccagaagcccttctcgttcccttttcttctgtttcatcctgcggttctggaaccagattttgacttgcgtgtcattcaggtgcaagcagttggctatctcgatgcgccgggc

SEQ ID NO: 342206 - DNA, 1000 bp, Homo Sapiens
ctgtacacaggagtgctgccttttacatttaattctatattgtttgaagtttccttttcctttctccctcagtgtacccctttccctctgccagcctctggggtgggtggctgccaaccacagcggggagggtcaggaggcttcaccatcagcctttccccaaaaccataaactattcacagcctcagactcctcgtgggttgttgttttttttttaaatgtatgtatgtgatttgttttgtttctttttaagcaacaaaaggtgtagaaaaaggcacaggtaactgcatacatgggaaggtacaacagatggggccgtgagagctcctggatggagggacagatggggctgaggaagtgggatgattcgaggaaagtggctggaaacgtctgttgctggacactggaagccagatgctgaagcagttggagagaggctaagcgttggggggaaccctgtcctcaggctgatgtggatgtgccctgggctccccacttcctgagggcttgggggagtcctgcctggtcctggattccccggagaggttcctcgtccgggctgggaagcgggcagaggcctctgccaggcagcccacagagctgctgcggtccagcggcggggtggcagaaggctcggggttggccggtgcacgcggggactccaagcgggggctccaggactgcgctgcccggcgtccctggggcggccggggcaaggtgtcgggtggggtgcaggggctgtgcgtgggtgtgggctctgcaggtgccccggtcccatggggtgtccagtcaggaggcctgcccgggcctccgccggtcctctccctctccttggggtagtccctgccctccagctctgaggagagtgtgaatttggagaccttagccacaggcgacacggaggctgacgagctctcagtgggactccagcggcctcgctcctgggcctcccgggcccctgtcaggtcgctgccacccccggagaagccactgacccagg

SEQ ID NO: 342207 - DNA, 1000 bp, Homo Sapiens
ttttttttttttttttgagacagggtctggttctgtcacccaggttgaaaagcagtggggcgatctcagctcacagcaacctccgtctcctgtgctcaaaccatcctgccacctcgacctcctgagtggctggaaccacaggcatgtgccaccacccccagctgatttttgtatttttttggtagagacaggatttcaccatgttgcccaggctggtctcgaactcctggacttgagtgatccacccacctctgcctcccaaagtgctgggattacaggcgtgagtcattgtgcctggcagggctagtagtcttcatgaaacttcatgtgggagtagaatgtttcttgatctgagaagattttcccacagatgctgcatgagcagccatcatcctccttgtgtgaacgccggacatggctgtcatgggcagcatgggatgcaaaagatttaccacagtacttgcatttgaagggcttctccccggagtgctgcctgatgtgtgtgcggagtatgctggaggctgtgaacctcttagtacaatacacacactggtatggtctgtctccagagtggactcgcatgtgtttgtttaggctggaagattgagagaaacatttcccacatgtagaacacttgtgaggccggtgcttctcatgaacatgaagaatgtggatccgaagccggtcccgcttctcaaaggatcgtttgcagagagaacagggaaatttcctatcgcccttgtccacacagggggtgtacttgaggtgcttatctctgtaatatttgtaggtaaataccttcccacatctttcacatctgtagccttctgcagactcttcagagggcccagatggctgcttccccggctctgtgacctgaaggctcacaggaatatccagaaatttctcatagcagtctccataccacacaaggagctcttggttctgatggatctctttgcagctctcataaaatatatgcccttgacactgcacagca

SEQ ID NO: 342208 - DNA, 1000 bp, Homo Sapiens
atggtgtggacttggggcagagcttggagaggtgaggctagaaattctcttggaaaaatctgaagccgaacttctcacaatggcccttcagcaccttggccagagctggggagccacagaagaagacctgcaccttgcccttcttctcagcagccactttctggaacaccttgctccagtcaggccgcccaggctgggtgcgcgtctgcagccccgtgatggagtctttcttctccttgttggccaggaggtcaagggccatctgcaggccaatggccttcatgtcattcttgcccagtgcagatgtcatgtacatatgcagctccaggaagcggccgtattgagcctcctcggcctggtccatctccagtttagtcagcaggctcacaaaccactcgaaagaccgctggtctctgttgatccagataaagtccaccttatggagcttcatgttgtcttggacaccttcgatccaggagtgctggcagctggggcaagtatgctttcttttctggtgcctgtacatgatactctgcagaatggaagcaaagggggtgatgccgatgcctgccccgatgagcacggcatgctcagaggcaaagatcctgcgggtgggggtcccataaggcccatcgatgtagcacttgatgttacagaatttgtgtttctccaaaagtatctcagagcccttggacgacctttgactctttctcattgtcacactcctcgacagcctcttagaaccacggcccagtgggtctgatgccttgaaggactcatacagcctgtttgtccactggccttgggaccgaatgtgcagccagatagtgtctttctgctcaggagcactgctgatggtgaaggggtgccactcatagcgagcaatggtggggatgttcagatacaagtagtcaccaggtctatagtgaaaaaaagggggccgcttgatgaggagatgagtgaccttggaggggaggaggttgacttccatgatgcacac

SEQ ID NO: 342209 - DNA, 1000 bp, Homo Sapiens
ttttttttttttttttttttagagatagagtctcactctgtcgcccacgctggagacctcagctcactgcaagccccgcctcctgggttcatgccattctcctgcctcagcctcccaagtagctggactacaggcgcctaccaccactcccagctaattttttgtatttttagtagagacagtgttttaccgtgttagccaggatggtctcgatctcctgacctcatgatcgccgacctcggcctcccaaagtgctgggattacaggcgtgagccaccgcacccggccccactgcttttactattataccacatcataaatccatatacactgatccaataatccttgccacctaagagtttacatttctatagcagcacaatacacatattgtcaaaaacatatctcttgttcaccacacaaaatagcaaatactatgtacaggtttgatgacctgagaaccaagattaaagcatctcttttgaaaatactaaaatacctgatccagattctaagggaatgtttgacagaaatacctggaataaggaagagagtgttacatttttaaagcaatgaaggttaagggaacacgaaagttagcaagcagaagctcagtctgcactgaatgagtgtaaaaggggcgggagctgggcttcatctgtctacatgcattccattttcaattcttagtctttagaacaattaacattcaaagtatcaagagaaagaaaggttcataaaaattacttactctctgtactctttccccaagtcttagaatccactaaatcacctgaatgcatagcagacataatcttctgagcaacactggagagcggtgtattacagagatcaaagcctaccaatgcctcataattttccattttcacaaaatcctaaatgtaagattaacataagataaatcccatatattaatcctaagactataaaacaggaaatacaattattttcaaaaatttatataccaactttcatttaa

SEQ ID NO: 342210 - DNA, 1000 bp, Homo Sapiens; identical to SEQ ID NO: 160178

SEQ ID NO: 342211 - DNA, 1000 bp, Homo Sapiens
aaatgtcatagtgtttactttatttaaatcctgaggttaaaaataaagtatttccacatggcatggcagacactataaaataatatgcttagggatacaaaagttttccacccccattgtgcaggtggggtgctggtatttgatgtgcttctagataattctttggcagataagaatgaattggggtcccagacccaccatcccgtaaggccacatgaattgaggattaatcaattaaagtgcaattccaaatgttgagccttccaaatgaggcttgggtattgctctgcagccaccagaggcagagtgtctctgcataacatacatcaagcagcctttttctttttttaaatcagagatgcctccccaaatttcaagatgtactttattattttaaaagtgcttaagaggaaagagagaattattaattcagtctctcctgtttccttggaagaaacataatgaaatgagaagaacttactaaagttcccctacaaagtgctttcttggtaagtgttttgtaaacaagaatggccgtctcgatggtctttgtgtacatgaccatccttggttctaagcatcacgaatggcttctctctgctttaattcccaacacctctgagccaaggacagtttcttggcctaaagaattctcatatgtagaatcatgcgcacttttaaaaatgaaactcctttaaaatttcatcagtggacatccaaccatatcataaaacacaggctctgtgatttcatccccaactggcgatttcctttcatttgggcctgaaatagtttcaccaccttcgatgataattttaaaatttccaaaacaccatttattcttgagttatatgacgtggcttttcatttctattctccaaaccctgtggagtttttcagttcccgtgtctttgcctgctcttggtccagtccacctggaatccagtgtgttgaggtcaagcactctgtagagtccacttggacctggaggacaacactt

SEQ ID NO: 342212 - DNA, 1000 bp, Homo Sapiens; identical to SEQ ID NO: 160179

SEQ ID NO: 342213 - DNA, 1000 bp, Homo Sapiens
tgtacaaaacctgaaatatttttacttttttaaaactttgatctaagttgccttagacctcatggactcgatacaagagtaatatgaattgggaaataaaacactttaatagccacgataaactttgttagaaatgtacatgttgccaaaataataataataaaattaaaaaaaagagagagagagaacagcttgatgtccaggttagattatataaatgttcaacaagggcagggtaaaggaaactttaaaaacaccagttctgaataagcctggggccccgtgagactccccctctcccacccagtctcgggccctagggactgcgtccctccaaacaggacaagtgggagtggataaggcctccaccaagctgcctctcccagtggacaaaaacatccaggtaatgggtatataaacaaagctcataagaaatgtacaaatataaaaagctacaaacattaataaattacagcatcacaaaacacggaaacacttcacaaggtgctagtaaaataactgtatcccccaatcccctcatcatacaaggaaaacaaagagctggtattaaagttgaagattcatcttcaaaatgtgtctgaaatagatcttttgtgtactatttgcttctgtaaagacagagtgtaaggctgcacagacatcacttgtttttcaggcaataccttagttcttaaaagaaaaaaataataataataaaaggaaaggagaaggaaaaagcatcagaacccaactgtccatctgactcagcaaaaaactcgtataaatgttaatgaagaactctatagaaagaaattcctaaagatacttttactcttataaaaaagaagttatttaaaaagctatttacacgctacattctatgaaaaatatgcttcaggaaatacatctaaaattaaaatacaggattgcctgagaaacaaatccagcccctccgtgtcgatggtggacacaccatccaggtacgacccatgcaggcgac

SEQ ID NO: 342214 - DNA, 735 bp, Homo Sapiens
tcagatgccagggaggatgaagcagaggatgatgaggaagctccagggactgagggtggtggctatggctttgggttgagctaagcctggggccatggtgggtggtgctgtgggttccagcctcttcttcctgtgcatcaggaagtccctaagccagctcttgcagtctctcattgagaccatcttgaagaaggtggtcagtccgctatccttctcccacttctctttcatccgcctggctccagcgtgaaccactgtccactttctgttgtttgagtcaaagaggaggaacttccgtccatcgaagctgaactgccaagatccacggatgtatccatcggcttcacactcacaagacatcctgacctgcagcgtgaggggtccactgggtgtgaaatcctccagctcagtgtcagccagttccagtctgagcctctgccccacctctctcagcatttccagttgttttccccaggcatctgtggcatacagctgctcttctaggtgacccatagataagaccttgtcactgccacagtcataggagagaaaattcttctgatccacctggctctggacctcacaccactgttgcccatgtctgggcaaatgaatgatggtgaagttataccagagagagtgagcgtcggcccgccccgtcccggaccagtcgaatagcaggtacggaagaatcgcgaggcgcggaaggatcgcggggctggcggccgctgccat

SEQ ID NO: 342215 - DNA, 1000 bp, Homo Sapiens
tttttttttttttttttttaggaaagacattttgcttttttattttctgtaaaactctgtaaataaaatacaaaaccaagggatgtggctgggcagcggcagggtggccaagccccagacactgatttgtggcaagggatgtgctgagccgaggctgggaggcacttgactgcaggcactgactctccaaccccaggggcaacagaagaatatattagattttcattgctaggaatctgtgggggaggggtatctggagccagcccttaccctccctgccagtgcctggtgagccctgaaagtggggggaaaggggcaccaggaacccatgggtgaatagtttagaatgctgtgctggccatgctgccaggcccaaagatgcggggcagggcgtccagggactcctccagccgtcgatgggcagactgtccctcttctccacactgctgtaggctttgccgggcagcttccctcacagcttctgtgtcagtttggcagaggtacaccaggggctcaatgccctcgggagccttgatgcagcctagggccaggcagccagccactcgagtctgcacgtcctcatcctccagctggtccaggaagcacaggagggccctctcccggaaggtagggcccagtgacaggctccggagctgggtgctgacagcagccatgaccttgttgttgccatggacgagcagggagctgagggcccgcagcccgtcccttcgcagacgcccctcgggcgccaatctcagggccttcagcacaacagcctgatcatccgagttcagattccgcaccagtagcacctcctcagcggtctcagtcacgtaggcctccatggtggggctgtccaaggtttccacaaaactccagaactggaagactgtgagctgctctccaggccctggctggggccttctgggcagcttctgccccagggcatcctccaggaacttcacacacacagcctcagccaagcctggctggcgcaggg

SEQ ID NO: 342216 - DNA, 1000 bp, Homo Sapiens
ttttttttttttttttttttttttttttttttttcaataagcagctttttattgaaggactgaaagaattaaatagaaggcacagtagcactgtaaagctttctcagaacataataatctttttctatgtatgtgtggaacccagactttcttttttgttgttaaaaatgtcttctggacaatcagaaaatctttatttgtcatccttccctttggtctttctgtaaaccatttctcgaaaactggccagaatcttgttctctctctttcgtctctcttcttggttaaaggatgcaagggctctcttctcatcagcactgtagatctggttctcttttcgcagtcgcacagcctccattcggcgatgcctgctaccactcattacataacctgagcattcaaatgatgcaatttcttcacttgtcaagccaatttcacctcttcgtgggatacgttttccagcttttacatattcagccatagctgcaccttcaccaggtaacagagcatggccatagttcaaaggtttatcatcttgagaggtaagtgtttttggagcctctgggccaattaaatctgatggttcttcagcctttgttcgatccttccagggattttccagaaactcttcttgggattctttagagcttgaatcactggactcttttctgctcttcttagacctctttttcttatatttcttcgatctgtgtttcttcttcttttcctttttcttggctttctttgctctccttttgttatcttcatcactggagtctgtttcagaatcagagtcactgtcgctatcttcagaatacttcttatgttttcttttcgatgattttttctttctccttttcttggacctttcttttgaacggctagacttcttctttttttcttcttctgaagtagaagctgaagtagtgcttttctttggctcttcatcctccactggtgtatgttcatcagaatctggttcaggattctttggagaaag

SEQ ID NO: 342217 - DNA, 1000 bp, Homo Sapiens
actgtgatcagcaaaaattccaatggcaaaaacactttaggaaagtaaagcttcctagttgcctttaaggaaaaaaaaaaaacaaagtgaaatcaaggttcaaggcaaatggtcacttgatgtaccttggatgcaacattttgtctgaagtagagaaatagtaaaatatttcactaagttaaaatatagtttttatattttataccatattgaatacagacataaaaataccagtgtttttctcttgtttcttttcagacaattaagcaaatgttttctttggtgcctgggagtttatcaatatttagggataatggaagataagaactccaagactgacaagcctaaaatagaagattcaaaatcctataccataaaaattacaatcaaaagtggactaaagagaaaaggagcttaaagttatactgcaatagggctgatacatattcttcccccaaatcatactctggctcccaaaataaaaaatactacagcctattgtggttttaatctgtgttttgagatttttttcaaatggaaagatattacagatagaaacacatcattctaggtttcaaaatcaccaaagtcagtgagaagaatgtacattcatttaaatgtaatcatttgtaaataaagaaatcttgaaaaggctgaacagttcaatcaaattgaagaattgatctagatttttcattattctttttaaataatgagtaagtgtagatatagtgtacatacaagttgacattctgattcattcaaaatagtcacatccctttgcttggttttggatgttccagagactaaaatttaataccattcataacatagtattttcagtaaaaagaattatagagcaatgaaaaatcagaagatggctcagagagccttataatctctaaatatacacacatttataacctgcatttattttctaaagaaacaaattttaagtaatgctaatttaaccaatggagaaaaaacttctatcaaaata

SEQ ID NO: 342218 - DNA, 1000 bp, Homo Sapiens; identical to SEQ ID NO: 160181

SEQ ID NO: 342219 - DNA, 1000 bp, Homo Sapiens
tttttttttttttttttttttttttttttttcggacttttgaacaaatttattacttatttttttgatagagtcttgctctgccacccaagctagggtgcagtggcatgatctcagcttactgcaacctccacctctggagtccaagtgattctcccacctcagcctcctaagtagctgggattacaggagtgtgccaccacgccggactaatttttgcatttttagtagagagggggtttcactatgttggccaggctggtttcgaactcctgacctcaggtgatccacccgcctcagcctctcaaaatgctgggattacaggcatgagccaccgcacccggcctggcacacatttaatttaatttagcagtaacttactccctgcgcccagaagaggtaggggcaagagttgctttccatgaagagtgcacctgatgagaaggcagctccagaagactcaaaggaaaaccgagaatcaggagagaaagaaacgtgcagtccttgcctacttcaggggaggaccccaaactcccggttgatagtagggacctgcttccccatgcgccccagctccctctccaccatgcagtcgcctcctgggcctggcgaccacagttcggggcctgctctaaggcccagagttctcagtcaggcgatgcccagctgaagtggtctgggcctcgtggcagcaccagatccagggtgaggtcacgctgctggtccgcagagtacacaggccggtagcccagcagctgcagcgcgccggcgcacacctcctgcacgcgcaggatcttagtgaagggcaacgcgtggcgccaggcctgggagacgttgcgcgcattcctagacgaagtatggaaggcctcgattggcttgccgatccccgacccgtgggtgatgttgtggatccaggcctcgagctgtggcgtgagggtcaggccggtgaaggcgtagagtgcgcggatctctgccagcggctcccgcgccaggtcctcgaa

SEQ ID NO: 342220 - DNA, 1000 bp, Homo Sapiens
tttttttttttttttttttttttttttttttttgccagcttaaaaaagtttaattgctgaaaacatccaaggcaggtgcgggccagtccctgcggggctcacaccccccttattggaccatcagctctgtgatgcccccttctcctggctacaaacctgggaagtagggcagctggtcccagggccctgagactggtgctgctctagaaggcctggtggggggccagcccccaaggcccttgaccagaactggaacagcaggcaagatggggcagcgtggggtgaccaaagatcctggatgaggccaatccaggctgggaccagcccaggtcagcagtgagaccaggggagacagggtgcccagggcctgcccagggacatgctgctgaccccccgccaccctgcacccctggccacatgctagcgggcagctgatgagcagcagctgaccccagagacagcagaggtgaaaacagtccctgggaactgccagaggcccagaggatgtggaagtgcccacgggaaggcaggagtgcaggggtgacatgtgccggggccagagaggtatcttccagcttgaggatgagccgtgaggtgtgcactaggaagtggcagcacaggtgaggtggaggtgacgggggcgcaggctagtcccactcgtcctcgtccacgccttcaaaggagtcctgggggagtgggtcctcccggttccccagttttgccaccatggcattcagcagctcctccttcttttgctggtcagacttttcttccaggtactgcgctgaggatggggcccgacgagcaggggcctctcggggggcttggctcactgggctcatgtcaggaggctgcaggctgagaagccagggctgcccattagtgccttgcagccaggcctcggcactgagcacaggctcccagatcacagccgtgtctgggaacacgtcatcctggaagaactctttccggactcggggcagccggaaggccacaggct

SEQ ID NO: 342221 - DNA, 1000 bp, Homo Sapiens
tttttttttttttttttttttttcacacttggccagtttattaaaggcagggagcttcggcagggtccaaaagggagaagttgggagatgccccctcctcagctccctccttccccaacaactcttctacagcccagcccccagggcccagaggcagggctggcgtcaggcagactgtactgcataaatacgtggaggccacagcccgaatcagcagcgtcagggggcagggaaactgggtttgggatgagaagtgggtggctctgggggcacgtcccccagtgcttgtccagagcccagggacccacagagccagagaggggaccagtgggccagcttggggtctggctacggccagccctgcccagcgaggctggcaggtggctctggttttgggggagaagtggggtggggtgtggccatgccacggcccacggggacagggtggggtcaggtgctgttgccctgctcctgttcaaagagtagcatggccagctgggttcgggagccgaggccctcaagcacgctctggaggcagcggtggtacaggtcctcactgagcctcgcgctgcacgtctgggcccggtagcgctgcagcagcgccggctccaccgcccgcagcacatgcagactggagaagtggaggaacagctcgtacacatccaggctctccagcagctcctcttcttgttctgaggctgccgccaggcgcccacgggctgccacgtagtcggagttgtagaagcaggcctcgctggctgcctggcgatcaaagcggccagtgtcacggcccagctctgggggcccaggcccttgtggtggggccacagctgggtggaaggcttggaaatgcatgggaaagaaggcctgccagccggagatggcatgcatgcggcagcggttcaggaagtcaggcgtgagcaccgtgtctggcccggccagcaggaacagtgtgtccagcgggtgcttcttggagagtagatccatgaggcgcagtggt

SEQ ID NO: 342222 - DNA, 1000 bp, Homo Sapiens; identical to SEQ ID NO: 160182

SEQ ID NO: 342223 - DNA, 1000 bp, Homo Sapiens
gacagtcccacacaaatcaatttttaataatttcaacttgccaccagctccaaatccagctgccttggggatttatcaccagggaaaacactaaatgccccaggctgagctatccatccagtgatcagatgacccagcctgtgatctcttaagaacctacatctacacatggcagcctgttagtggcttctctggaactagtgcatagctgctcaatgttagagccagaactctggttcccagggagggcgagtatcccaaagagatttgaggttaaatggatggcagtccaggtggtcccagacatgctctcactgctgaattcctgcacttactcctagaatataccagtgctgtttgctcccgccatcctgagggctttagaaagtgctttaaaaagggaggatctcgaagcagcagctatttcagaggcagctgttgggaaagcctatagtggttccatggaggctatccaagggaggaaccacaagccaactccccataagtcaggagatttgcctgtggccccacccagaatctgagcggacagaatggaggccttatgcatgatgctcacctggcctgtttcagatggagggcaccctacccccaggaagttctctccctcccaggcactagaccatgacaggaatagattcctccccagaggaaattctcaggcaggttggatgtaaacaacagcagggtaagggggtggaacacgtggaggggagctcagcagaggcaggagaggctgccagaggagggggggctaagggaggtgggggagctgctggaaagggaaccagcaaagtaggcaccttgagggctccagaaagcctgtcaatgtttatttcatacacaccctaaagacagtaaagcagattagaaattaaaagttaaggtggtgaccctattgtgctgatgagtcaaatgggccagaagaaggggaaagctaacggtactcctggtgccaaaactaaaattcaaaaggcggtga

SEQ ID NO: 342224 - DNA, 1000 bp, Homo Sapiens
ggttgcaacatgtttaattcctgctgttcacactggacactgcatcatactagtgtcggcccctgagggcaccccttcctcgcctgcacaaaggaggacgagagatgaacattcagaggcagaaaagggcaataaaaaaagagctgtgtatgtgacctccaactactcagaggtgggggaaaacagccccatctgtcttgcactaaaaggctcaccaagggcaggtgaggggcaaatggtaatactgggagggggtaacacaaggagaagcgacatgagtacaccaagatgtcaaagctgcgacgggctggatgagggagccccaagagggcatatgctcagggtgccagccggctgcttttccttgtgacagccttgcaaggaagctgtgaggccaggacactaggccagtggcatccacactgcgtccttcaggaggcgaggcctctgcgcctcattctccaggagggaaaaccagggaccaccccgagctctcccaagtggcaggagttcaaatcagggccagtggcgaaaccaggaggcctgcctgaccaactgcccttcacatgatctctcttcaatctgttgcccggggccccgaccatctgggcagaagcggatgtgctgacttcactttcttttgtcctctacacacacgtgcaggcgttaaggaggcaagcaggtgaggggaaaggaacacaagttgacctgcccagcctgacaattctgaagaaagactgtttcccggggcatgaggaaaaagaagaaaagctgcggcagagtctcttcggaggcagcacccaaggcatccgttgtactcggggcccagcctttcctcccctctgagtcctccaccaagtccacagcaagcaacgattcaccagaaaaaaacagaagacacaggaacagaagagctgctgatcactggctttggtgcttaagtgatgaggcattttcagtcacactcgcactgatctggctcctgggaggagacgccacg

SEQ ID NO: 342225 - DNA, 1000 bp, Homo Sapiens
ttttttttttttttttttttttacaaaaacctctttgagtcctttattaacgtctggagatgtgtggtacatacaattaacagcatcacaccagctacagaagtacagataaccaagaatgtacttcagaacaaggatctgagagcaacttatggtgttgcctgctctgaacctccacaaaaacccagttctgacacacgcaagacagacgatataacaatttcacttgggaatggttttttttaaaaaatgacaagaactaatagttcaaaccctttagagtgtgagatgtggcagctcgcttggtgccgtggcactgctgtaaaaggccaacatgggcatttgaaggtcaggcagaagaaccgaatggggtgggtggaagaggttttattttcagtgtagagagataacagatggtccgagtggatactttcagtccaggctcagtatggggcctgcaggaatccactagataaatacagtctataaaccggaaggctgaaaaacaccagccagccatccttgtcattgcttccaactggtggacactgatgcatccggagtcacttatgacacagatcaggtttaacaggggtgcacccgaacgcaagaaggcagctcactatgtccagtcagctctgatcctttcacgcccttggatgtcatgggttcctctgctttcacacgggaactaaggaacacttcctttatttcaatgttccactttggaaaaaaccaaaaccctccccccacccccaccatcattcttcataaatttgcttccaatctcctgattgttctgggtctagactttttcctttcgcttcaatttggacacttttttgacagtcccgttcttgttaagcagcttcaggacacggtctttatgatctaaaaccttaagcatggagtctctggcttcactgatttgatccatcacaagtttacacctctgcatatttccctgtatcagttcgtttattcggtggagatcatcatc

SEQ ID NO: 342226 - DNA, 1000 bp, Homo Sapiens; identical to SEQ ID NO: 160183

SEQ ID NO: 342227 - DNA, 1000 bp, Homo Sapiens
ttttttttttttttttttttttttttttaaagttagaaattccatttttatttaacatgcattcaatgttacacatgtttcactaaggaaaatccttctgaaagtaagattactcttttatttataagaaacagaaaatatttccttttcaagggattctggatttctaagaataaaatccaagtcgtctcaacctgagtgctacgtatttataaactgagaaaaatacgtcttaccatacaggaaaaatgttatgactatcaacaaataccatgagctgggagcagtggctcttgcttataatcccagatactcgggaggctgaagtgggagatcacttgagccaggagttcgaggttatagtgaactatgatcatggcaccgcaccaacagagccagcctccatctctttaaaaaacaataacaacaaatgccacgtaccatgtgatcctcaactttatccttgaaggatcagatgcttttattttacataacttcagagaagggcacctaatgactacaacagaataatagatatttagcacctaaatttagagatgcttaagtattgccatagttttaaatagctgtatgtctgtaagttgagggaaaccaaatacatgttgttaaacgatattatccttaattacaaatgcatctacctacaatattcaaacacaatcttatttctccctgaagttgcagacatatatatatatatatatatcccttttaacaagtaaagtgaggtttattatttcttcaccatcattaaattgtcttccaaatgtggaactttttcaggttagacaaaaagtagttcctaaaaagtcattcatattcgaccagtagtattactttaaatgttcttcactatgggacagaggtcaaaattgaagtgaatggccacggaccttctgctgaaatatataagtaaaaataagcaggaacagaggagatgaacatacattaatttctgacaacatgttggcacaaaaat

SEQ ID NO: 342228 - DNA, 1000 bp, Homo Sapiens
ttttttttttttttttttttttttttttttttttttttttttttttttttttttttttttttttttttttttttttttttttttttttttttttttttttttttttttttttttttttttttttagttgtatataaaatttaatctcaccgaatgtacagttttcaaatttcacgtgtatattaaggaactgatgcatctgagcattgtcaaacaaacgggaagaagaagttaaagggcagcctggcattgatggctggtggagctctgaagcctgcctctgcaggtgcagacacatccacaaaagtaaccgcagtggaaataagaatcgtcctttcatttcctgagttggcctcaggaaaggaggatgaaattagatttgcagttacattgactattttggcctgtggattcagcagggatccgtatttagtccacttcacttctataaccaaagcccctgggagctggcaggaatccttcctgttgaatgactgggtgatgaagtggatgggcacccagtccagcatgtcctgggcctgggaatttccaaaaggggccacgtaatctgggaagccctggccccacagcaggctcttcaccttctgtgctacgagctgacacgggagagctccagtcagtcttagtttacagccagattgcatagtgtaaccaaataatactggggtccggaccccctccagtgctaagcagtcttgctcagttgtgctatgaagaatagtaagctgtccatatctatttgtggtctgaataatcccagaccccttatgaggctggaatccagcagctaatgggagccccacgacataaccagggtttccactgagagggactggctgggtattttcctgaagaaaatgaatttcaaacttttgctgcagtgggaccactacgctgctaactgtccccagaacgaatgagagatcagctttggtgacttcacctgcatctgtgtatgtgaggctgtactttacctcaag

SEQ ID NO: 342229 - DNA, 1000 bp, Homo Sapiens
ttttttttttttttttttcatatttcatttggttctttttattagaaactgagaatacagcaagtagggaaatcccacatcaatggaaccatcacacagatgcctttctggaaccccaaccttctatgatccccaaaaatgtgctttgtggctttagcataatttataaaggggaagagggaaaatactgaaaaaggccactatttaatggtgaaagaatgaagctgtagaggtcccaaccagcctagggccaaaaaagaaaattaaaaatctgcacagagcaagcaagcctctgactgctgagagtaaggcattcaggcgccaacctggtgagagttctcagcgagcactgtcaggtcaagtgcacatgaggctgttggtagtgagctgcacgtagacacacacatagaaatgggcacatgcccacatacacacccgaaaaagggagattttactggattacacatcagtgatgttaatttcatttttcctaagggtttgtgctatgttgaaccagatccttccagctttggggtgtgggtgactgcacccagaggctgctacttctgttggtgttgtgacagggctgcacctatacgctgtatcccaaagtgcatgaccgaagagcaagtctggcttctgatacgtgctgttgctcccaagaaactaagtgggcttctgtccaaatggccactgtcctgctggactatgctttctcaaagggattaatactgttctttattctgtcaggcactgcaccagttcatccactgagtcttttgctcggtccacctagcacctaggacagtgaccttatccagaaccaaaacgttcaagttcttctcaacttctacactggattctttcttcctagatcccaccttttgctggagattgcaagggcaagggaggaaaataactgagaaaactctattgaataaataggagacccttcccatattcccaaacacctactgaggacgccagtccccatgctcag

SEQ ID NO: 342230 - DNA, 1000 bp, Homo Sapiens
ggctccatttgttttaattggacccttttcagcctggggctccccccagcccccaggctacggcctggaggtgtctctggccagccacagcatccagctgctggctcccagatctgtccagttgcccagagggaagaagggcgggtgggcagaaggaaggggctggagacagatcatcagccttcccacccaccccgggtggggccctccctgtctccagaaaggtggcccaggggcgccagtctagccaccccagaaatatccaaggcactggcgggggggcaaccccttacagccagccccacccggctatgtggctgttgtgtgcctgttggtcagacgcccggccacccggctctgagggccatcagtgggggctggcctgggccctccagctgccccgttctttagctgcagaggttcctgggccgccgccacctcctcactggagtctgattcttctacatcactacgaatgtccttctccatctggcccttcttcatgaagctatagagcatgcgcagaatgaggcaagaccagaacacgtgcagcagctgcagcaacatcagaagcccgttgaagaagtagtagccgaagaaggggcccctgttgctgatggactcgtagtatgtggtgtagaggatctgggtgggaaagaggaccagtcgggtgtagaagaagacaaaggagaagatgaggaagagagcgtcgcacacttgctgatactgcatgtagttgaccatcttacaggcctccagcaggtagtcagaggaatcatgtaacagcagcaccagagagccaatgcgcagcaggttggcactgtaggagaaggtcatcaggatgaccgccacgaagtggtgtatcacctgctccttgaaatccttgcgcttgacatcaaagggcagcctgattagcagtgagaggtagaaacccagctccaagaggtaccaccagtacagggatggcttcagagtctggtttgggtacctgtcccagcac

SEQ ID NO: 342231 - DNA, 1000 bp, Homo Sapiens
ttttttttttttttttttttttttttttggcaaagatttatttttattttagtagcattttcaaataggtatgtaccaagataaaggaaatataaatttaaaatctaaaggagagatatatgaatagtaattaagtcactacatactgtacagagatccttatattgcagcttttggaattttgtgtctgtgtttcctgcacatagttccacataaccaagaacaacttgaaacacggtgttgtgaatggcttgggtgaagtgcatatgaagttgatccattgctgtctgtgtttttccaagaagtcgataagcttgttgaaccttggtataatggttaatgtcaaaattcttgcagattttggaaagagctacgtccagctgttcctcaatctgttccaaagtatcttgcagctttgaattcagttcacttatacaactgtaatgtttaaaagtgctggcagctttttgacattcaaggcacaactgaatagctcctggataatcttcctcctccagcatttcacttaaccgtacatctgttctttgcaatgtttttatagttctcagagatttcagaagtccaatcagcaactgacgtttcctttgatttgcaagaaggcctaaactagcttgagtaaaaccttcctttgcaatattcaagtgtcttctcccatttgtacagataacagcagctaattgaagacctgtctgcaatgaggtaactctttcaagttcctttacataagcaggctgtttttcaaggattaaatctgccacttttttagatactgcagcttgctgttgtttcaatttgtctctatacgcctctaattcttgcaaattgagaacaggtggaagcttctccagctcatatttaacaatatcaaatgaatccacagaaaaatatacttgttcaatactattaataagctcttgttcagcttgagggtcacttggctgttctcgaagttccctgaattcttcctttccagggaccc

SEQ ID NO: 342232 - DNA, 1000 bp, Homo Sapiens
ttttttttttcaacatctaaatagacttttatttttattttacttgtttggacagaaaagaaaattcatcagctttcattagagtctccttaagtgttggaaacacattaaactcagaaatagtggaccttgtagaaaagcatcacaaattaaaaatatatttctccatgtggtaaaagtgctttcaatcccattaaagggcacagcaagggtgtttggaaacacgatctgaaatttggcctgcaatccgtggcatcgattccaaccacagggcgggggagtcaccatgatctagagcacaggagccacgtggggcccggagcatgcggacagcaacactcgcaataactgagtgaggacgaggcccatagcctgagtagaatagattctgtatttgtaaaaaatgaggtggttacatcaactgggttgaagggggactgggtaatcccagaaattccttgtttctggtctgtggggatggtcagatctgcccaccactctggcaccgaggcttccctggagacgcataaacctgggttgggaaagtgcccagatctgcctgggggacacacgagcctcgctgccagtgccgggcacgcagcctctccagtcctgccgtcagcaaccgcctccggccctcatgtcaaatcacacctgaccagagttgtcaccacagtcctgttttggggtttttccaaggccagccctgttgttctgaggggccactctgagcaggcaaacactgccagggtcactcactacacacagaggaaagacaatgagcaaatggccatcgtagagaattcggttgtgtgtttcagcaatgctacttatttttcaagacaagtaattctgccaatgatgacatctgcgacaaagcttagggcccgcgggctccccatgcgcctcgtggagagcaaccacgtctgttcggaagccagcggcccttcccggccctgccacaggccagaacacagaactgtgatcatgcaaagagccg

SEQ ID NO: 342233 - DNA, 1000 bp, Homo Sapiens
tttttttttttttttttttttttttttttttttttttttttttttttttttttttcctaaaaatgttttattttaacaaaatgctcaaatatctgaaattgggcaaaggtggagggtgggcaagctggctgaggtgtcccaggtctgtggctgcctagctgggtgaggggctggtgagcagctgctccagacaccactggacttcctccaggccccggtaggcccgcttcagaccccggggaaggcagcggcaggactccaggttgaggtagagcaggcccgggcagctgctgatcacagagctgacagtgcttggtgtgacccgggtgcccctgaggttaagagagcacagggctgggtgtgagcccccaggggtgcttaagaaggcagccagggcctgctccaggtccttctcactgaacccctggccactcaagtccagttctcgcagtgtatggcaccacttctgggtcaaaaaggggctgccctccttggctagagtcagccggtctgacgtgccatacaggcccagatgaagctgctccagctcccgacatggcagatcctgaaggccagccggcgtgatgcgcgcacagccacgaagatccagtaagcgcaggttgggagagccgtggagtaggcggcccaggacctcgttgctcacaaagttgcaggttgagctcgccaggcagagctcctctaggctagggaagcctggtccgggagccacccctcgtcccggaggcttgggcagccacatcaggttcaacagccgcagcacctggagctgagggcagcctttctgcagagcctcgacaggcagctgaaggggaatgctattacggttgatgccggtgctcacctccaggacctggagctgggggcagcagctgcccagcagtgcgcccaggatggctgtcgtctgggagctgtaggtcagccacaacttgcgcattcgggaccctgcctcctccaagaagctcaccacagctgtggactc

SEQ ID NO: 342234 - DNA, 1000 bp, Homo Sapiens
tttttttttttttttttttttttttttttttttttttttttaaatgaacaagcttttaatacagcttagttatgtaaaatactgtacactgtaaaagatctagaaaactagagcttcaagtcatgttttaaaaaagccattaagcttaattgaaaaaccaagtatagagtacaaaactgcaacaagagccacagtgattccatggcatccagaccccgagtccttcatgcagagctgcagccggtcagtggaagtatcacattggtgtgctgtgtggacacaagcatgtctagcctggggagtgggttgggagctgcatttgggtcctgctgtcgcttttattcttgaacttgaacaggcggcagaatatcaagaaccaggtggtatgaaggattacgctgcaacattcccccctcttctaccccgcccttcaacctctggctattgttactttctgggaattgtgttgggttcttgtaagtttacttgttaaacactgtctgtagtagggccttacagcttggtctaaacggtggtgatttctctagctcgctcatgtactacagcctcttatttcactgtgtgctgcagatgagccatttagctgaccttctctcaccatccctgctgatgtaccccttgtggagatctcacatgtcagtcgcttgaaatattctggaagatcggcatagtcatctccataggagatgactttaatccccttgtccagcatgttttctcgaagctttttgaactcatctacgtctcctctccgaaccagcatgaaatgttctaggtcagatttatgcttgacagcctccaagaaaagggcctggaaagtggtgtcatccacagtccagccacagcccaggaaaagaaatgacttgttttcgtagagtttctgaatttctctcatgacttcagtgttcctgagcacgttctgatatccagccggatgaaggacaatgccactagggttggtgtagactccgtgaatatg

SEQ ID NO: 342235 - DNA, 1000 bp, Homo Sapiens; identical to SEQ ID NO: 160184

SEQ ID NO: 342236 - DNA, 1000 bp, Homo Sapiens
ctcaaaaacaatgtttattttaacacataaaatgtaccatctagcaccaatgcctgtaaataccagaattccatccggttactactctttggaacaagtatgattaaagtccttgacagattattgtatatgagcgaatggcttcataacataaaacagagagacacagaacagaaattcatttggtatatacatatagaactacatttgtagttattcaaaaacctttcactgcttcatgtaaacaataccagtatttttaagccagattttcctggaacatatacataaagtgcatgagccacgtaagtgcataagcctgaaactggtctttctattctcactccatgctcaaatgaaaaatctgtaaagatatcttttgttcctccaatcttctgatttgtcttcttagcaactcattacagtacaatttactgattaaatcacatagacatgtatggtggaggaaaagaaaactttggccaatataagtatacaagacaatatctcagttctttttaaaattaaaagaacatttcagtattaaagatattttaaaagaaatgaagtggaaaatacaaatgataaatattgtataattatgtacaaaatgaaaaccttttaaactctgaagacaaactaaaatttactagtttgaatttaaaacattattatataatagcagatagttctcttcagaaatttatctctagcttcctgtaaaaggtccagtcaaatcatgttggctgtttttggcagatttcagcctcgcctcaataccaatttttatttgaataactgattcccaacatttaagaagaacttgatgctgaactaagtaacctaagctggattcagggccattggcaggcaggcaggcaagcaggaatttttcgtattgcagacagcccctggtggtcatcatctatacatcggatctctaaggacgtgccggaaaaaaaaatctgtgaacacaatcttcccatgctgtattcacatg

SEQ ID NO: 342237 - DNA, 1000 bp, Homo Sapiens
gttgttttgagatggagtcttactctgtcacccaggctggagtacagtgggggaacttggctcactgcaacctctgcctcttgtattcaagtgattctccttgcctcagcctcccgccaccacgcctggcttatttttgtattttcagtagctacagggtttcaccatgttggccaggctcgtctcaaactgctgacctcaagtgatccgcctgcctcagcctcccaaagtgctcggattacatgctgaaccaggtcagacatgtggttttccttgcctaagtaacaaaagacctgaaggtatagctataaccccggtgttctgctttccctcagaaaatgtatagaaaagccctcctacctagataataatttcatctgtctagatgattacctaaacttcccatttcatctattttatttaaaacaatgtgagcatctaaagaatactagaaaatatctaaaatttctacaagaaaaattttaattattttctgactttaagttttagattttggatcaaaactacagattcttggtttcaggaagtggctctatattagtgttgctttcaattaaagtgttcttcttgggaggtacaattttaaaaataatacactagatacgtttttcctaaagcagtagatgacattcaataagccatgttatagataactaataacaatgctaacagggtcaaaccaaaaaaaaggcacaggtctttcacatgttttcattagatttgtttaggccaagttttacaattcacatttcattttgcaagtaatttctactgaaatatttatttctgagaaacaactcaaataatttaatttcaattaagaaattaaatcaactcaaaataggaataagacaaactcattatgcttgcttcagcatttcttctacgtggccaaaaatgctggggtcttcaattgtagaagttatcttgtatggcttgccattgacaatggcagataaagctgatcgggggatcttgc

SEQ ID NO: 342238 - DNA, 1000 bp, Homo Sapiens
gtgtacaaaataatttattatagcattatctaggttggcattattttacagcgagtttttcccgtctcaataagtatgaatctaaatagattagggtgaaaagaaaatgtgtgtctaaataaaatctccctttttgaatgtatatttgtcttaataaagggaagcattaatattacagacatatttacaaggttctgaacatgagtgattccattactgttttctgtacaagatagaacaaaaagctatccacccgcccccaaaaaatactgtttaacaacactatgttttaagagttaaactaatgagtttcaaatctcattttgccgagatattaaaatgcatttaatggtcaatgcatggctataacaacaacatttcattttaatttgttttctgccctataatgctcccttgaagcacacctcagtataagctacttgttaatactcaaagtaacttagttaagaaagcattaattcttgcctgtgggcttttaagactgggagagagaaatattcaacaattttaccagtgaatttccatgactgacaggcaaaccagccttcacattctgaaatcatctacataaaactagagtacccttattcaaccagaaaataccattttcatgaatactaaaaggaaatagtaaaccatgaaatattacaatgaaaaaaggacgaattaaattttcaaataaacttcaatatctgccaagaggaattcctttttttcgagatggagtcttgctctgttgcccaggctggagtgcagtggcatgatctcggctcactgcaacctccacctcccaggttcaagcgattctccggcctcagctcctgggcagcttggattacaggtatgtgccatcacgtctggctaatttttgtattttcagtagagaaggggtttcaccatgttggccaggctgatctcgatctcctgacctcaggtgatccgccagtctgggcctcccaaagtgctgggattacaggtg

SEQ ID NO: 342239 - DNA, 1000 bp, Homo Sapiens
ttttttttttttttttttttcgggatgtattttttaatgagaacacattgttatactctgagtacgtggcattcttgcttgatagaaacatttacaaggacacatacacatttatatccaaacatcaaatgaagtagatattttaaatgaccagttcgcacaagaaataaaatatattatacaaaacatgggttatatccacagtcattagttctccttttctacacaaaacagcaataaattaaatcacattatatgcaaatagttagttgtacattagaacaataaacagtatgtaacgtgtgcagcttttacttttacttttctaccagactcatgatagatttgtactgtttggtagtcctgtatttaaatcaacaatgaataatgtgacccagaagacaggggtcacagaattggtctgtcacaaggtctatcccatgtcctcttggtttcaattatccaccatgcacagggaacaaagcttagattcccaggacccaacacaaaggtctgcaacgaacaaactcacagcaactccatgctgttcaggggctacttcattgttgtcttataagatgttgaagattttcagatcttggcaataaataatgaagaggccaccctgtttccaaatctgaatttgcctcttttttagccatctctgtccagctatcatgcaccgtgacagctttgttctcctagcaaataagaaatattttggtagcctatgttgtgatttacacttggtaagtaggccctttattccttgtgcatagaaatttaggtctttaaacatgaatcaaagcaatgcagcatttttgctaacacttaattctgcttgttcaaatctctcccctatgaatcatctcccactgatatatcacagagctattataaaatggatttttactcatgagatctggctcccattgaaacacttccattgtgtttgaagtcacttaaaacttgaacactgacagcatcagctggtttagaa

SEQ ID NO: 342240 - DNA, 1000 bp, Homo Sapiens; identical to SEQ ID NO: 160186

SEQ ID NO: 342241 - DNA, 1000 bp, Homo Sapiens
tttttttttttttttttttttttttttttttttttttttttttttttttttccagagacaacttctaagtttctctttatttcttttggaaacaacctccattcttcatctctcaatgtagtcctggcctagtgaaaaagaaggcttttctttctggcctccagagactgcttcctttgtaggaaaaggaacaataaacacttcccattaggtttctgtctccagataccaatcagggaatgactggccaggactggaacttaacggccttgagaacatgtgggatttgtctttgagccccattggcttgtgatgttttcctctgtcctccctgagacagttgctcctgtcctggggggctctgcctccacctcccagtccaggatgtctgaggtggttgcaggctgcttgctgcccagtttccagtctgttctggtccagggaagcaccaccccatggcccttgctgcttctggcaggggtcctcaagagctcaccatgtcccagtgctggctcatgagtgaggactcacatgggttgacgacgatttccttgccgttctcggtgccatcaccgaacatatctgtatcgaggcagaggtgggatgctatgtgctcgatgtgggaaccagttttggtccattgctgtcggtcatctccattcttgcaaaggacaagaaccactggggcgccagggaacaaggtgatgactgacaggcacagctcctcctggaggatctgctgggtgtatgtgaaggcccatacctgggactttgcatcttcgcctttgaccttggcacaggggctcaactttaggtttggggtttcttggttgttctgcctttgagattccaggcacttctgtctctgtcggatattgcccttctggatggaggactccttggggatgctgagttcagggtagatattctccaggtaccacttgaagctctggcagcgcagattcttcctcaggtccaatctgctctcaacattcccgaa

SEQ ID NO: 342242 - DNA, 1000 bp, Homo Sapiens
cagtacaattcattttattattttagtgcaacaaaacatttccagatttatttccaatttcagtttcaaaacaaactgacctgaaatttttagtatttactatctgtgacaatgaccaataaaatgtgtaagaatataaaaaataaattcattcattgttggtagtactccaaattcaatgcataagaaccttttctatctaaagcattttcctaaaactgcaaactaaaaatctgatatttaaaacatttatgtggtaaaataatctcatttgattatggatatcataaatagaatataaaagatattacatttcttcaaataccatttgtttcactgtgttcaattttgagtttcctaacatccattctacaggtcaatcaaaatacaaaggcgtgcaaatgaaacaagctattgaaatgaaataaaattcaagaataaaagttagaattaacttatgaggtaacttttatgtaagcaaacatcacagttgtaagaaatgcctctctttacaaagagtcattaagatgcgcattttcctagagctattatttcatgtgcccaaaatcaagcaaaataaaatcccatgcttcctggaatattaaataccatgcagtgtactatttaagaaaagaacaaggttaactaactaaaagcagaactcacttattttttgctccctagccaattaaaaataagttcattaaaagcacttgaaattatatatttaacctgaaaaaaagttgctaaaattccaatataaatgtaaatatctttaacttgcttaacccagctatccccaaaacagtgtagtggggcaaaatgttcaaaagaaaaatcatccagtgcacgtagatgggcaccaagaagctaagcttccctgagcgcgtacagagccgccaggcgactcaattcacgtgctccttttctggggatgaaaaggtgctcaccagatctttctatgcaactgagagctcctaaatcaagtcaaaggggacca

SEQ ID NO: 342243 - DNA, 1000 bp, Homo Sapiens
ttttttttttttttttttttttttttttttttttttttttaacagtatataatctaatctctttaattttatgtacatgaatataatgtatgtcaactttgtacatgagatacatatagtatttaaacattttactcaacaaacaagaatttacaatagcaatataactgactagagggctatcaacttaataatacttagattagatctgtactttaataggaaaagaatttaatagtttacaatcatagaaacactgacatttaaaacaagaatttataaaataatttatatatatcctagcatctatagagaggaatgatttgcatttgtgggtgtgtgcaatgaatggcatattttaaatttttaggtaataaaataatttagaagcagttcatgcagtggtcaaagcaaggaatggcaagttccttcaagaagccctctatctttgacaccaaccggcatcagacacacactaggtaccatggggcacgctagaacaagtctccttcaagagttacttatataaacatcaatatacacacgttgatatccttccttccatagtacaagtacaggtcacaacttctctcaactgtgggagtagtcagtttatacttaaagtgatttaatgtccctcctggagttctacataatatatctctataagaaggtaactaacagaactttctagttttcacaaccttactctgatactttacagagtgccccccatgtcctatgacataaacatccagcaggtaagatttgccaggctgaagacctttaattgtttctgtggtcactgctttctgcaggttttgactgtggaaatatttacagaggaccttttctgacttcttccttatatctggtcctagacattggttttgctctcttttcttctggtcttcattgtagttatcatccacttcttttttgtagatgcaaaacttgttcctttcctgagtgcctagccaagccacggtggccgaggaac

SEQ ID NO: 342244 - DNA, 1000 bp, Homo Sapiens
ttttttttttttttttttttttttttttttttttttttttttcatattttagtagttttatttcccctatgagaatctcccctgccctagccccttcttcctgcactctggaacagagcctctggcatctgtccaagctctgtctctaagggccaccttcccctcttctgtctttagtatccccaaaggggttctctgggctgtgcctcctttccttggttcacatgggagggggcttccctgtttcagaagtcccttatgggagaaatagagatccaagtttcacttcacctttttcaggcagttctgtttcctgtcctggggctggagtgggagagaggcctcacccctcagcattgctccttctccactagctgtttgggggtgggctggtctcagagtcaaaagcactcttgggaaggaatgaagcctgaagattgaaaagtgttagtgccaggtgagcagggttaggaagcccattatctgtgttttctcagtcaaccattttgtcaaggtggaatgtgctaggctcagggctctcagagcttcccttcgtctagcagcttcctgagtccgtcacagatcttgccaaggtgctgagtgaagtcaggcccatagagggccgtgagcagacctgggtcagagaagtgatcaaacacgtggcggatgcggccatgtgacttgggcgtgaggtggtgttccaccaactctagcagcacatcccggcactcggtcagcaggccagccagaacagcagcctcgaaggtgaagtctacctcaccaaaggtaagtgccgtcatggcaccctgccgcagcttctggcgaaagcgggtagccagggccagctcactggggccaaaggagccattgcggtgcagcacagccaccttgatggccactttgatcaggtccttgatcacgcgctgggcctggggccggctgtgcgtgtactccttggacacacggtagagctcatctagcacctcactgcttgtctcat

SEQ ID NO: 342245 - DNA, 1000 bp, Homo Sapiens
tttttttttttttttttacagaatacattcatttattgggtcttatcttaaatctccttattagatattcaattcattgtcatccaaaataaaaaaacaaacaacaaaatgcttatgacagaaatcacaaacagatggctaaaatttgaaattgacctcatctctgttctttaggataaatgatacagtagttttttcctctctagcctaaactggcttctgggttttctgataattcactgtactagtacaacatcatggcaatttgtatttccaggattttcattgtcttggttatcatttccaccttcttcgttattctcaggagatacactctcctttttttctgtgggagtagtaactgttttctcaggttgagaattcatgttctcagcattactgtccttctctgtatttcttggcttggcagcttcattgctgggctctgggctgggcctgtctgtctcttccacaggctcttttggtgccacttttttgtcttcagctgttttgctatttaaatgaacagctgaggaggaatttttggagtccttggcttttttgtgcatagaagtttgactgttatgactggaggcgagaggggaagacattttctgggctttgcttccctccgactgttcttttcgaggcggtccccagataaagttctctgaaggcgtgtagtgtttctgggcgaaccgcaggagctttctcctttctcttctgtctctaattgtataaacaaaatactctagagcactctgcttaatattgggaatagtattctccacaagagcttcatgaagaataaattttacaagaggagatttaaaactttcatatccaagctcaccaaggcttttaagaatacgagtgattcttaaatagttgtgctgggactcattcagatgctgaaatctttcctgccagttaacagcccgagcaacatttccagttttatcagtcagttttattccaaaaaattctagcatcattttat

SEQ ID NO: 342246 - DNA, 1000 bp, Homo Sapiens
actcggaccctcccaatgagtatttaagagcctagggcagtggggtcagagtctggccatgccaaatgtccagagacaggacagctttcctcagagggccaggccaccaccactcagccaccgcgccctctctgaggagcacccggagggcctgctgtgccacagggggctctggcagatgttgtccagcctgctcctaatggtgtcctgaagctcctcatcacccagcaggaccgctgctgccagggccagaaggaagtactcagtggcatcatgggcatccttcagctggcagaaggtgagtctgcccaggcgataatacaccttggcatagtacagggcctccttgggactctgcagccatggtggacagagggacagggtcttcaggtagcagtcctcagccatctcatacatgtgcagggagtagtacactgtagccaggcggtgaaaggccaccagctcttgcctctgatctcctgtgactgtgctgagcctggcggccagggtggcaaattccaaagccttctcatagccttcgaggctaatctgcagctctgtcagcttattgaaaatccggagctcagttctcaccgccttcaacctccttgctaaaggaacagctccagctcggtagtactccactgcatgatgcctgtggcgggtcccattgaagaacacatcacctgcttcttcataaagtttgagagccagcaaaggctcctctgacttcagggctgtctggatggctgcctgcaggcacagctccaccagctcgtcttcctgcatgaggtagtggagtcgccccgccccaagccaggcctcagcagccttgtctgtctcccccaggtcaatgaagatacgcaggctctccttgatgcatgtgagtgacctcctgagggacctggcggtatttaggttccgataaagctgccccagggactccagcagcctcccttccatctcccggtccctgagttgctgagccagggccagccag

SEQ ID NO: 342247 - DNA, 1000 bp, Homo Sapiens; identical to SEQ ID NO: 160188

SEQ ID NO: 342248 - DNA, 1000 bp, Homo Sapiens
ttttttttttttttttgattctaacaaaatttattatgcagtaattacaaaggttaaagactcttccatctcaaataaaaataacagttataattacacacataatatagtaccttatagaatgattccaataaatatcacaggaaatacagtgcattttcaagttggagagacaaatactttctcattcacagtgtttgacataggaaagcctatttacataacaatctgtataaagtcatgctcttagtaacagtctatacagagctgtgccaacacaattctttcagaatgtgaagtaccgggcaaaccactcctggcgctggggatctggagaagccactggagaagcttcactctgagcaggactcaaaaatgtcttgggccctttaggtggcactggctgtggaagtggtttgctgctgttgaactcaatatcgtggactggagaattaggaatgggatccaggcggttaggatgtccattgcccactccaccagattccagagcacttagattgggaacactcacaaacctgtttgttggtgatttatcattcttcttcttttgcttagccaatggattaataacaccaacagtaggacttgagttaaacactttgttgaagttagtttctcgattgactaattccagctgataaaacttattatcctcaattagtttctttatgatctggtctctttctgtaagcatggcttttaattctgtaatcatctgtatatcttctggttttgattctctcattagatatttttcttccatttcttctaatgacacttgtaaagcggcatttatttccttgagtagctcgttagtcttattaaaatctgcccgcatgatatttttctctctgaggtggtctgctgtcatgacatccaactctttttcaagtctcttgtttaaatcttgttcatgcaaccttatctgttggttagattcacttcgtattctgagaatttctttccccttaaattccag

SEQ ID NO: 342249 - DNA, 1000 bp, Homo Sapiens
tcacacatactgttctgcttccccatctttggggactggtttagttgtcccagctttgccttcttcatttgctgctgctttttctggaagagatgccaaatctttaaaaacatctacataatggccaaagccagggccccagttcaaaaggttgtcccagttgaaagtccctgcttgctgccctagcttcatgggcagtgtgttgtcagcagtgcctggtgctgctgcctgggtgcccacaggtcctccctcggccctgcgaccgtggtaccttcgaggcttcagtctggctccataattatcttcatcatctgcatcagattcattgacttgagataatttgggcattctggaagtatataccattggcttctccctgtcatattccatttctgagcaagtgaaagattcatgggagtcactatcagaagaggattctggagctggaatgccatccgctggattccttgttctagacagtggccttctgcagtcctcctctgaagaagacctcccatggtctgcactgcagatacttgggtttctagggcgaggtgtgttgagcctctccacttcttcaatagaaagtccgactggaggagaagattccagtggaatctgcccaatcggctgctttaggcgactccctggtctagaaccatgtgatgccatggcctgaggactcttgcttctccttcccagccttgtggcatagttgaaaatgccaggttggcaggtgtcaccatgcatttccaaagtattaccatcccttataggaagatgcaattcccttgctgggctgtttctatagaacgtagaagatttggagaaaggggctggactgtgtcgagacagagggttgggagttgggcatgctgagtggcttagggagctggttctcaaaccttgaccatatgaaggctggtaagtcaaactgcttgctcctaagggcatgggggattgccttgcaaagcctaggggactgtgcctctggattgaa

SEQ ID NO: 342250 - DNA, 1000 bp, Homo Sapiens
ttttttttttttttttttttttttttttttataatgacccacttctttattaacctaattgtgctgatagtgactagtaaatatgataatgtaaccaaataccaaaatggacattctaggaactcaaaaatacttagtgttattttcagttggatttttcttttgtttatatttgcaattttgagtcttacttggtaatctttatgtaacctaaacaatgttttataaactttaggaagctattactcatgtataaagttcataaaagttcataatatataatgcattatagtgttcaaaatgttataatgttcataatatactaataattctatttcattgccactacctcattcttgtttctgttttcactgagtgaacagaagtaaacaatgagagagatttcagacccagaaacagtatatcctaaggttttggttcttttatcttattctctaatctcccaaacaagctcttctaaaaatatatcttattaacataaaagcctattaaggagaatgaccctaaaaatgctagataatcagagctacaagctcactggttagccaagtcttgacaaagagcatgtttgagtttaacaaaagtgcatttgcagaactaatatactgtattgacaatgtgtaaatctagacatttttcttgttagagctggttaatgtttgcctaaagcacaaacaacttaccacttgagatatttttcatgactaaagaaaaatctgctttcttgatgtaactgacaaaatgatttgagggtactacataattataataaatataaatccatgcgtcattttaatgtttcactctttatatataattgaatacttagttattgtgacaaaaagttactatggctaaagaaaataatgcaagtacatcacctgaaataacacctgtatcccacgatacatgaatccaattccaatgctgttttctttctatttcagcaacactatacgtagtttaatagtcaagatac

SEQ ID NO: 342251 - DNA, 1000 bp, Homo Sapiens
ttttttttttttttttttttaccagtcgggacctttaataaaagaccttggctttctagtcttctaggaccctttatttgggaacataaagggacaggctccctgagcgggtgctgatgagcccttccctcccctctgagtccagtggtcccctaatctgccccatttccatgcccacgtgggtaccatttttgtagcacctgccattcctgggccatctaaggggtcagccttgagggggtacacgagaggcaaggacccccattttccctgagctccacctttccatcggatcccacgctccttatgttgaccagggggcaccatggacatggagccacatcctttacgttgccgtctcttcctgactcccttgagcaacactcactgcgtccctgatgccctcgtgggatacacttctggggtagggctccccatcattgagtgacagcagaggagggccgaagctttcagccggggccatggggtggcaaggggagaagatgcagttaccagggctggtgcctctattccgacgtatcatcacctgcatggccttgtgcttgatgcccgatggccacattaagtccctgggctgtcactcaagggcagggaccacatcttcatcttggagtcatggtgcctaacagcaaggctgggtggacagtcaatgctgggccacaggttatccaggttggcatccaccaggcccaaatgcccagcttggagagcccctgggggaggcatccatcctccagagccctggagggggcaccacatcttcccagggtgagatcctttcaccacgaggcatctcattcctatacctgaaaactactccagacacttctgttaagggataatccctgatttcctgcagcgaaggcagctctcctaagcctcaggcccagctcctgagaacactgtcctgcaaagcctctgggtccaggcacttggccgcttcttacaccagggcctgagtctggtggtggtggcacct

SEQ ID NO: 342252 - DNA, 1000 bp, Homo Sapiens
tttttttttttttttctggtaacaggcacaaagtttcagttatgcaagatgatgaagttctgaattatgcaagatgcaagactattcagttctagaggtctgccgtgcacataatctcttaaattttaagtatcgtacacacttacaattttgttaggtgatcttggccaggcgcggtgactcatgcctgtaatcctagcactttgggaggctgaggtgggaggatcacttgagcctgggaggttgaggctgcagtgagccatgattgcaccattgcaccccagcctaggtgacagagtgagaccctgtcttgaaataaatagataaataaataagtaaagaaaaaaagagagtaggtctcatattaaatgttcttaccagagtttaaattttaaaaaatcaactagggctcaccctcaacacccccctccatttgtcaacctctacagcctgcatgccacaggaatcagcagcctgactgttgcacttgtccaaacacaactgactgcaaggctcccacagacacatgcccaggcactcctgccccttaggattctgtggtaagcagaccaccagcagacagaggcccccaggagacaggcccataggaattttctacttaggggaccgcaaagtcccaaagggctacagggagttgaacgagaagagtgcccgacagattgcaggttgtggggaggtgtcaggcatttatttctggagcagaggtgagatggagcaatggcctcagcagcggacgcagttgcgcatgaagtcgacacagaggcttgtgtagtaagtagggtagtcacggaggtggctgacgtgtgcagatgacacgaaatccacagaacgcgccaggacccggcgtgccaggcgtgcctccaccatgcgttctatgtctctggccaggactacttcgtcagccctcgagtagaggtagagctcgggccagcgagagcccgcgtcctgtagcctgtcatagaagtgggtgtggaagagg

SEQ ID NO: 342253 - DNA, 1000 bp, Homo Sapiens; identical to SEQ ID NO: 160190

SEQ ID NO: 342254 - DNA, 1000 bp, Homo Sapiens
tttttttttttttttttttttttttttttttttttttttttttttttttttttttttttttttttttttttttttttttttttttttttttttttttttttttttttttaaacatgaacaatatgcctttatttttaagactcatttaaaagatactgtcgacaaaacacaaactttaggaaatacaactttacactataaaataaaatggagccatatattctagaaataaaatgttaaaattaaaatcatttaaatcatcttacccaatttagtaatttcagtactagattatagattcttttatacattttcagaaactgtgagctgtgatataaatggattatatcacagtcctttgagttgtgatataaatggattatatcacagtcctttgagctgtgatgtaaatgtatttaatggtatgctgtcataccaccacacacattttcagatcacagttataacttcaaagatcataattctagctatctgtgacttttcaagtgtatactgtaagcttcaaggcctctgcattaggagagggcacttcaaagaaaacaccagggtctacaggatccacaccaatctatgctcattgatgacccatgataaacttcattactgataatactcctttaattctcctcatgacgtttgcatgtggggtttccaagcaaggttacctactccaggcaggatccgtatcttccatttctctgtatctccccacagtgtccactttgtataagagtaaggttattacttttaatgggaaaaaccgcaactagttttgcaccaacctaatataaatattagttattattatgggaaaatctttctccatgtcatagccaaggggaagcatctatctgtaaaatcatattatattactgtggttgttagcaaaccattccttcaattgcctattagtaaagatttttattttttaggaccaatgatacaattttagctagaagttagatcagaaaagccacag

SEQ ID NO: 342255 - DNA, 1000 bp, Homo Sapiens; identical to SEQ ID NO: 160191

SEQ ID NO: 342256 - DNA, 1000 bp, Homo Sapiens
aggagatatttaaccttttattgtcctttagagcacatctcaatttggactaaccatatttcaaatgctcaacagctacatatgggtagtggctactgcactggacatcgaagttctagaactctctcttacaaatgaacactatcactgtcgttgaaaactttcttgagatagtttattttatacaaacaaactgtatttcttattattcctgaaatatctcatattggcatcctgccatttcattgtagtgcctatcatttttccattgatactgataaagttgcctaagacacaacttcctacatagaggaaataagaggaacaaaccccttttggacagaatctattaaaactcattccactatccctatgtacataaataacattgcctctgctgagtggaatttgcattcgttacttcaaaattcagactcatctacctttccaagttagacagttggggaaagaacttcctaaatcttaaggttgaaggcagagggctcaaccccactccagattcaggcaaggggaataggaaagaaagtgcgagataagagcatggtggcctcttggggtcccttgatgggggctgttgggaagtggaaggcattcttttaaggggataagaagcaaatggaagacttgctccaactctagagttttcagagagttagaggaggtggagagatttactcctgccatggatcatatgcatttctaccatcaactcctggttttgcagtatttttataaatggagtttggaccttggtgacactcagcctctcttccccttttcctatgttgctcaatcttcctttccctcctaggttcttacacatttcaaacccttgccaataacagtattttagttatcaggtctcaccattccctctggttgttgagcctttggataaaaatccacatggctatggagtgggttttgttggaaaaagtgaccgtcctctaactgcacctctatttctggctcctcaaac

SEQ ID NO: 342257 - DNA, 1000 bp, Homo Sapiens
gagacgaagtctcgttttgttgcccaggctggagtgcagtggcatgatctgtgctcactgcaaccgccacctccagggttcaagtgattctactgcctcagcctcccaagcagctgggattacagacgcctgccaccacgcccggctaactttgttgtatttttagtagagatggggtttcaccatattggccagggtggtctcgaactcctgacctcaagtgatccgcatgcctcggactcccaaagtgctgggattacaggcgtgagccactgcgcccagcccaaattatattttttaataactaatacaaaggtgaagtggctcctcccaagtagcagtgctgccggggcctggcccaggcctagccctgggctcacctctcatgctcccaagccaaccctgatgctcctggctccagggtagaccttttccctttagaggttcagtgtccagggagctctatgataattgtgtgaatgaggtgagcgctgactccatgtgagtattttaaggcttggagtcaaagaattaacctaacatgcccaggcagagtccatgtgtcaatggcccgtctccagtttgttctaatttctcaccacgtgtctgtagatacaggaccgcagaccttcgctttatcatcataatcacatctaatgtccatcctaacttacgattcatattctgtgcctggaaacagtccctgtatttaacaatacctacacataaaaacaatccactgttacaacttgtatggtcacaaaacattaatgatcttctttagaccaagcaaatgtttttttaccataattgtcgtgcaccaaattcacagccagaatccccaagatcaaaaaaaaaatttttgcacaatacaaataataacttaaaatacacatacacacatatacacacactctcacacgcacttcttacagaactgtgcttggggaaactccatttgttgaatgccactgaaggcatattttgctaaactgctgct

SEQ ID NO: 342258 - DNA, 1000 bp, Homo Sapiens
atttatttatttatttatttgagaaggagagttactctgttgcccaggctggactccgtctcaaaaaataaaaaataaaataaaaataaaaaggcccgaagcgtctctgaaacagacattcagtcatcagaaagtcacctatgagttcttaagaaccacaacacatggcaaacatgatatcagaagtcatcttgtatacgccagttccttctcttcacagttttgtttctcatttgaacatccaaagacagttttgcgagctgtgtgcagtcaccacaggccagtgaggtcactgtcattgtgacaataggtagttttcaggggcacagaccttgtgctgggtgatggaatctaagacccatttctcagacagatacttgactgttgctttcttctttccgctgtagggcccgatgacgatgctggcctggcgggggacttggctgacccggcctccgcacaggtggactagttcacagagcttggccactggggggctgctggcaggcgagacaaacatcactggctggtcggcaaagagggttccgcggtacggccctgcagacaagtggcactcacttcggcacaggggagctgcagggaagtggtgagacagttcgaacggctcctcagaaatccagtgacccaattctaaagaccatagcacccaatcataagagagaacccagcagccacgcgcaattcccagcagcacattcagggtgcgaagtggcttcccggaaagcacgtgagtcgtggtctcacagacgtctggtgcaattgaaaagcctttcaatttatccacaacctggatgacgacattctgcttttcagatggcatgcttgtcatgactaatgttcttgttggctttttgcctctcccacttttcttcaattcctcatgaggtttgatgaggtccttaaagccgtcacatgagtcatctaaaacatcatgccttgttggtctatttttaacacttccactgtatcctccgggtaa

SEQ ID NO: 342259 - DNA, 1000 bp, Homo Sapiens
tttttttttttttttttttttttttttccaaaataaaaaatgcaatttttatttgttgaacataatttgaaactgtaaaaagatttctctgtccatcaccagaaatccagaagacacctgaagaggactgactgtttctttgccacggggaaggtgtgatgaaacaattaaaatcccatgcatccctggcccttcctccacgttgcccctcagaatgcctgcagctgcagcaggcaggaggcagcaggagaacccgggctgtggaaggcccctctgcctctctgggaaagctgctggggaagccagaggtcacagtgcattggaggcctggctttcagccactggccaggccaaaatgaaacatctgctcaagtctccccaggcaccttgctgggggtgagtgggagaaagaagtggagaaaactgatgctggaccacaagttatcaccctgtaccttggctttgaagtggcccctgctggtacaggagcagggtgagagtaaaagtaaataaataaaagcaacatgcttcaaggagagagggtgacagacccactgaagcaccccgtgtcctggctcgaccagggataagccagggcgtgatgatttaaaacactctgatctgaggccaatggcatcaaaatacaaattgctgaagtgggagaggaagtgaagggctgtttgttagggggactacagtggagattctggtgagtgtgggtgggctcgccagtgaccccaatattttctttgtgtaacaaccagagtaagcattaggatgcccaggctgccctctactggcagtttctgggaaggaccacaacagcagcacccaacctgcaacccacaacagccgagacaggagagagagaagaaagcaagagagagagaggagaggaagagagagaggagaggaagagatagaggaggggaagagatagaggacaggaagagagagaggaggggaagagagacaggaagggaagagagaggagaggaag

SEQ ID NO: 342260 - DNA, 1000 bp, Homo Sapiens; identical to SEQ ID NO: 160192

SEQ ID NO: 342261 - DNA, 1000 bp, Homo Sapiens
atgaaaaatccaaagtttattgcaaattgtattttgcttcccttcgttcttcatttttacaggatttattgatatccatgattttttcacagatgtacttgttgactttggagagtctctgtgcaatttcagtttcatccacagtttcttgtgctattctgtcatacaaacactctctgacgatgcttagtttgcgaggcgagaggggtggtttagggactgcatctttctttttttttgtggcgacgcctgtgacgcttctgtttttcagaacatctgttccccaaatcataactgccaagttcttcgtgtacttggaatctccttgggttacttgtagctggtgccatttctcctcatcaacccaaatcccgcttcccagatggaccttgccattgtctaggatatacttgtccatgacaggcgcaggagcggggtaataggacgacgtatttgcttcctcactgaaagtgctccgtaactccggctcgggctcgagacattctgactttactttttccagatcaatggcgggaccgctgccaagcctcaggagcagcacgtcctggagcctccggttaaggtcacggagctccttcatttcagacacaagtgccccgtactccttgagcttcttggcctgttgtaccagctgcctccgagtccgctccagctcctgctggaggtggcgcatctcttcctgttgctgctggtagttgcgcagcagctcctcatacagagcccggggcaccacagcatcttctagactgtccatgtcctctgtgcctggcgaggcctccacgaagacctcttccggacacgtgctatggcccaggctcaggccgttctgcttctctagccgagccaccactgcctcgatgctcttgtgcgccacttcgctcggcttccgcccctcaggtctctgtgtaggacaacgagaatcagttcaggcaagggcagctgggattttcttggactgcagatcaatatttccccagac

SEQ ID NO: 342262 - DNA, 1000 bp, Homo Sapiens
ttttttttttttttttttttttctcattgtttatatttttattttcagaaaaacagagttcacttgaatacaattctcactagttaaatcacaattcaccttatagttaattaacttatgttcaaagatagtcctttcctgctatataatttcattttcttaaaaagcaaaacactttcagtagaaaaaatttacatatgaaagtcaaaaacaattatttcagcaaaaatggaaatcaaccaccgtatcttttcttgagttcttcgacagaactatccttcaatcctgacttgtctatgtgattaaataatgcacgtgcaatctttttctctgtttctgacataaacatcactgccatatcaaacctttttagttcagaaagtctttgtaagatttcaaagatgagtaatggcttttctttctcaatgtaaaagtcatgcagaattttaacgatctggttgaatacatctggatccagatttttctgaaacaacttaggatacaaagatggttcaatttgctttaaatactgatacaacatatctggagaacttttcaattgtctgaaatcagattcgagctggaacgagtttgcaggaattggaggaagaacagttgtggcaaactgagcaggtttttgttctatctctatgggcattttctcgctgtaagactgacatacatcctgcttcaaactggcttgaggttgcagggatgaagtatcactgacttcttctattttcaatacttttgctcttggagtatcacttgtgggaaaaaggacatcttggcttgaattcttcttacttgtggtgcctgtggctgctattacatttgctagattaataggattattctctggagcagcagcagtagtgctatctggcacatcaatagtctgtatcaaattaccagtttcttcaataataaccttcttgagtggtttagttgatccaggatgcggtggattatcaatgggttttaccacattttgtctttg

SEQ ID NO: 342263 - DNA, 1000 bp, Homo Sapiens
ttttttttttttttttttagtaaattacagtttatttcatttacagagaccttgaggcaaaaaggtggtgtttggaaaacagcacacgggtgaggagcaccgagaagcctgttacaaatacgccagtgcacgctgccagtgcagtgagtgtggggtcctgcaggtggccgtctaggaagggcaggcttgagacgcgcgtctctgcttccctctgacttgagaccatctcccttgcaccaacagcagcttctccaagctaggctgccacagccaagcacacactctgcaaacctatcactgcgagtagtacagttccctttaaaatcgcagcagcaggtgctcagggaggagagggagccagggtggctctggtggcgtgactgccagtggaggcgacacaggtggcagaaggctgccctccctctcattctatatgctggataattaaaaatcacaagtcccaatacttgacaaatgaaaagtccattttgcgaatcctgacattcccctcctgatccacaatcacagttctgtgtggtgcgtcccatccctgcccaccaccccccacccccagggctgactgtgatgatggtaactcccaagtgtggaggtacctgtgggtgcagcccagagcctcggaggaggaagacagctctctgcccccaggcaggtccctgggtgccagggtcagcaggggctctgaggccaggagctacagcagcttgacgtagttctgtggaatcagccccctcttgccgttcagagtcccttctagccagccaggttccctggaggtttgtacatcctcaaaaattgctcctatttcaaaagataattccgagctgtgttctgcttcacacggatacacggctcgagccttccgactgcggatgctttcaggtggcttgtccgctacagtagcaggaggagaaaaggggaaaggggacgacccgggtgaaagaggtgtcacagctgagttggagcttgttgtggttggaga

SEQ ID NO: 342264 - DNA, 1000 bp, Homo Sapiens
agataaaattaaactgactttattaaacagagtcacttcaggcctttttcttatgaacagagtgatccttagtcgggtaacatgtcaatgacagtgcactctgtgcctctcctgcattgtggggagggcacttcttaaggcaaagtaaaattcaggacctgcatgaaatcagttttgcttccatttgagttcgatttatgctattaatagttctgatcaccaaatttataacatttaaagtactgtctgttacccgatgtctggtatgtttacataaaacgtggttctgcccagtaacagcataaggtaaaaatgtgatttcccctaaaattataacatcatgtcatcctagagtgttacccacctgggagaggtacaaaaaacaaagcattagatttcaggctaagaacagccagttttaggagtaagaattacatcgaatagccttaagagcatttaaaaagtcaaggcatcttaaacttcagaaatgaaaacaaaaccaaaacaaaacaacaacaaaaacaacctaacccaaccacaaaactctaggagccaaggcactcagtatctgcctgttggttatgtacaaagccacaaatgggaggtcttttcaaattaatctggaaaatccaagcacaagactcttagcttgaaaagcctgacaactctgcctccaaatccaggcaactgtgcttccactcctcttcttgcttgccttaggaaaacttcactttagtaagataaggcaaaacagaaaataaaagagtcgtttaaccaaactccaaaaacaaacaaaaatagaaaataaaaaaccaacttcctacaagtatacttgtaaaaatatatttttaaaacacccctaagtaaacaccaatcttgcccaagaaaaatcacaggtttggggcctatctgataatgactgtcccggaagtctctcttttttgagacagtttcactctgtcgctcaggctgaaatgcagtgacgtgatctcggctcact

SEQ ID NO: 342265 - DNA, 1000 bp, Homo Sapiens; identical to SEQ ID NO: 160194

SEQ ID NO: 342266 - DNA, 1000 bp, Homo Sapiens
gaattttaatgacactaatagctttatttaacaaacactgagtgactactatgtgcaaagcactatgctaggtgcatgaaagatacaaagatgaaaaaagacacagtccctgcccacaaggagcgtataatctagtgagggagacaaatacacaaataactagaatacaaggcagtaaacaagagtgggcaagtgctgagtgtggcctgagtgtgatactaactagcctcaaggttccaatttgaaacacgatgaaatagtgttgtctgcttcgaaaatcccatcccaagtttggcataatggaagttaaatggccctacccaaacaggtggaaataacagagtaggccaggtggaggcgctgtttgaaagtactatcacacctacatacatggtgctgatataagtacgtaggtacagctaaaaaagaacttatatatatatatatatcatatatatatatatcatctgtcctttggttaatggctatagctactgttttaaacaatatacttttatataaaaaggaatttgtataatcccagaaaaatcaatttaaggattaatattaattcaagaaagaatcctgccataggcaattttatttactaattgattaagtcttttctctaaatatctataaagctctgtagcaattaaacagttagacatctaagtattgctgagtagaaacctcttatgttcagccttctgaaataaatggtcacatacctgatatatagcactattctaacagcaacaagaaggccttaaagagattttaagaaaaataatttttaatgcttcaatgcaaatggagtacacgctgattaaatacaactcaatgttctttgaaaacatctcaatgacagcgtttgataccagttaaggccagcaaaattgtactgaggaaaatattattacatgtactgtctttcattggtttcatgtatcattgcttatgactatggcaaccaaatcttttctttgacaactgcatt

SEQ ID NO: 342267 - DNA, 1000 bp, Homo Sapiens
ctttttttttttttttttgagttgtaaaatattttttattgtaaaaacaaagtcaataaaggttgacaatgtaaatgttatctcacaacatttccccttggttcctgaatttgctagattcctatgtaccagcaaatctccattagcatttctcaggtttcatgatccttttcagatatgttggttgattttatgtatatattgcttagaaacaaaaatccacctgatattaaaacaaaccaaaaaaaatcataaaagcaagcaaatgaacaaaaaaccctagttttgttgtgcttttctttcacatttcctacagggagatttgtatatctcagatactttcaaaatctaataggtaagtaaaattagtgccttaaccaaacagtaagataccaaagaatcctccatcacaagttactgaatcaaacttctcatgacatttgcggtatattcagatttgaagattttttaaatttagaatttaaaacaaactttagactgctgattttccatatttcaaagactgtagttgtttgcagcatataaatggaaagagtagtgcaaaacgcatcaagttttatatgataaatatatactttcaacctaatggctgcctcaaaagtaaagagtgaacaattacttctcaaaataaatctagattgacttaaagttcacaatttagaaatagcaattgctactctatttccatagattgcaaaatgatttcaaatacagattatacatacaattgttttacaaaaatagaaatattgtttgggattttacaaaactttataaaatataacactatatttgcaaattcaagatagtttcacactgaaatagacaatacttccacgatatgaagtctagccaaacttaaagtggtctgccttgaggccattcttacatattatttcttccaaatcttcaagcctaggtaaatctgtgctctaacacaggctttgtaaaaaagagactgtttattttcaagggtttt

SEQ ID NO: 342268 - DNA, 1000 bp, Homo Sapiens; identical to SEQ ID NO: 160195

SEQ ID NO: 342269 - DNA, 1000 bp, Homo Sapiens
tttttttttttttttttttaatgtattgtaaatgtttttaaatcattctccatttaaatttttcattattttctacaaaatacaaatacactaaggttcacatttaacatgcaaaaaataaagaggaagaagagaaatccactagtttcactagtttaaggaacaatcactaaaatgagacaatgatctatagtacatgtatcttctagttaaataggaaagcaaattcacattatccagagtcctgggtcataaagaactcaagtcaaatctagtctgaggcagacactctggctcgtgcccgcacacagctgcccttcacactgactttaacccagggctcatttaactgagaggcgagatctctcacaatacagcacaaaactctttctcctggtaaatttcttttcccaacaaaacaatcagttccctcacaacaggcaattctgtatctgtagacaaccaatacagttgctaatattcctcctaccccccagatagctggcaaaagcttccaagagtttattttcaaagaagagtggttcttcttgtatcacaaccatctgtaacaggatacacaatcattgcctgaagacactgagtcccacaggaaggtttgtagcactaggcaacaaaaagccaatgcgtaatatccagagcagatattaaacagccttaatgattctctaatggaagtttataaaaatataaatggagtgactatccaaagtgatagtagtgtgctcaaaactcacagagacccatatttccaaaaaggtgttcaggaatcacaggaacaacgaggagctgcaaaataatgaagaaacacatagctcccgtctgtaactagctatatacatagatttcaaagtaaccttggtggtgttcctaaggctggctggctaagatactcaggtacaggtcatggaagtagacacagaaccacactgctgaggtcttctaaagtgccttccttttcttcacagcctggcttagaggt

SEQ ID NO: 342270 - DNA, 1000 bp, Homo Sapiens
tttacaggttgaaattctgattttatttcaaaatgataaataaaccgaggcatagttctgaccaggtactatgtctgcagggcttttgaaattaaagaaacagtccaggagggctccagtcagacccagaatgacaccagccacacttgtgactggcagagataacctctttgatcttcagcaattttaaaagttcttcatcctaatttctgagtatcataaaaagtaaaaagtactttcattttatttttcctttgaaaatgtttttagtggcaaacaggactacttgttttccttacttcatttttataagcatagtagttatatgtcaatttacttaaaattagagagggaaaccccagagacctgagtggcactgcccatccactgaaggcccacataaataggtactcatgttcatgttatcacgtctacaaatagcaataaaatgatgtccgtaaatcggaagtacagcagtagcagttcatacatatctgatatgctttcacaccaggattcagtaaacaacaataaatataatttcccctcttcaaaacaaaaaatggatttatacggaaaaagggttaatttacttggggtttatcagcacaccatttttaatgtgctttgaaagaattaaaaaccatgaaactgtattcactgaataccggtccatagttatattttttcttttaacgtggcttaaatacatacatcatgtctttctattaaaatccttaaatctatggggatgtgtggtagataagactatattaaaaatttttcctcattaacaatttcattaaattaaaaaaaaatctgacatttcccttaaatgttaagttgaagcctgatctacactgctgtgtcctgtgaaatgaacctaattttccgagtgaataggaacgcctgagtggccatttagagtgctgcattttccttccctcatgattcctgctgggtcctcttcgctgaggcttttccctgagtcatatattta

SEQ ID NO: 342271 - DNA, 1000 bp, Homo Sapiens
tttttttttttttttttttggtagaaggcacacggctttttaatagcagcaagtcaggtgcatctgcctcgaggggctaccaagccatcataccattgtggcaaagggggcatgaggatgaggagaaagcaccaatgtgagggcatcctcggtgtccacaggtgagcataaggcaggaggggaagcttccaacacatctggatggcgacacccctggcatggcagacataagatgtgagccccttggtgacacagtcagaggctctttgagaggagggggaggcaaggttggtagtggtgcttcagggcactctggccatccaaatgccacatgctttggtccttctagctgaatggagaggaggcatgttccatctccaagcccgaagcattgattcaccatctttaacttggagattccagactcagtcctggtcaaacatgccctaggagggcaactggctcagctatgcccattcctctgcctccagacctgaaggaatctttctagagggagcagtgcaagccaggaggccacagagggaaaaggtttagggccagtggtcacatagctaggtgcctgccgccagtgtctcagcttccagagcttcccagctgctccaggagggccctgacctcgccctccactcgcagcagctgggccttgcgccaaggattaagggtggcaccccggctatcttccagatcccgcagtaggagctcaaggtgtcgctgaacccgggcccgatcccagctattgaggttccgctggacttcactgaggatcactgaccagtattctgacaccgccgtcccctctgtcagtgacaccaccacccgggcaccaccttcagcagcaccccccaagtctcgcaagacctggcggccctctgagctcagctcattgaagtagaggtgtagcagttccagggaagggtgctcccgggcagctctggccagggccagggccgctgtgtcaccagcaccgttgtacgccacg

SEQ ID NO: 342272 - DNA, 1000 bp, Homo Sapiens; identical to SEQ ID NO: 160196

SEQ ID NO: 342273 - DNA, 1000 bp, Homo Sapiens
atttttgtgggcatcagatatattctgaagtcaatactaaagctgttagagtatgacatttactaagaatcctgccattttaggcccttcttcttaaaggacaacaattccattggtatttagtaaaaaacaacatggcttggtaaatttagctctttttcttgacattggcaatgataatacaatgcctgtggtgtataattgtcatggctgacttataaatccctacagatatgtggttacttctctactttccctttctttggcttgggcaactgccacgttgatgcactggagccattctgctgcattcttctcatccttggccttaaagacataggttttattgtctgtgaagatttcgaaagcccgggggagagagcggtccctgcgtttcttggccacagccttcacactctgtactttgctgagttctattgggcagtcgtcagggtcatctttagactttcctttttgaaacagaagttgatttccagccagtgtaaaatagcgtgttttccaccttttgatgaacttccatctgacttgcttctctttaagttttccttctatgagaggctggccatcttgatttacaacagttgctttctcaggattgttgcacatgaagcattgccatgctcctgctgtttcactgaagccaaacacgtcaaagaacctcacttcttccagatggagctgtacctggtccagatccttctgctgtggaaacgtggactccatcatggcagtttcaaagctgtgagcaccccctgcctgggtcttctcccacagagctctgaggaattgcacagaatgactctgaatggacaggggttcaggaaacaggctctgctgaaatagaaacatgatctggatccatggctgaggttcttggctgatgagaataaaactggacttactgtataggcagtaatgacccttcagggagcaggtgaagaacaactttgctacacaacttctcacagtgtcttcaatg

SEQ ID NO: 342274 - DNA, 1000 bp, Homo Sapiens
tttttttttttttttttgagacaggccctttattaaaataggtccaaatgtaacacacgatgacattcattttaaataaaaactacaaacatgacttgacttctccaaatatacattctctcaggtagtccatccgagcatcctttgttgacagtgccatagagttccattcaaactgggaaatctgaattacacgataccccagaatttccaaatgtcgttttttcatagcagattttcctttcatgtgagggatatttctacaaagtgcttttgaatccaaaaattccaaagcaatcctttcagcccctggtggcagccttgatccaactatttcgatatttgattcccagggcatttctggtagttgtcccaatgctatattatggcttccatacggaagaggtttttttcttttatccaagatacactcaaaatctactttgtggtaataaggcgtaagaaccgaggcttttacacaattgattcctcctagtacctctgctaacattttaaaaatctgctgttgtgttccatccatgccaccaatacctttattatattgttgacagaagcggtcatgaaaccatggaatctgaaactcagggcattccaagcagactgatctatttaactccataagatgaaactggactcttgcacttcgagatggagataaaatttcaagttgagaatccaatctagctaagaatttgatgttaaaaattgcctttagcagatcttctggaaaatattcaagtgtggccaaagagaaaccaagaaacactaatataaaaggatccaatatacctaagtaagaattaagatgttgcacgcaagttcccaaaaattcatccctttgaggtggatcatagttcaatacgctgaatggacgaataatagcagggattgtaaaaggatggatcttttcaatctgctgaacagccactgaggctatcctatctagtagcaaagtactgaggtaatcagtactagaaat

SEQ ID NO: 342275 - DNA, 1000 bp, Homo Sapiens
cttgcaaagcactttatatacgtcagcgcatttgactcccaaaacagctctaggaggtaggtgctaaatgaggaaacgaaggcaccaaaaggtgaaggctcacctaaagccacacagctggaagtggcagaagcagaatgggaacccgggcagcctggttcctggccctgccattcacccccctgccatctagaagatgctactggtggcccacccgagtccactggggggtgatgcctgctgctgagggttcacatctgtgctctctggaggcttcccttggctactggaaggcaccctgccctggaggtaagtgtctgggaagttattcactcctctctggccccctcatccaggagccagtaaccggtggtgtgggcacactgtggtactgtgggctctgcctggagctctccgtggggccagctgaggctggacgtcctctgaagccacttccttgcccagctgctccctcccctcccctgcttccctgactccctcgctgaagccccattccagaccctgcttctgacaaacctgaactaaggcagcatctttgcccatagaatgacccagaagctggcacaccgttgagccaagaagtgcagtaggctgcggggattttatttctgcccccagaccaaggcaacggagccctcacctgcctgccacccccacactgggcccaagcaagctcaggtgagcgcacatacatccaccgtggcgggctcctctcgggtgaagccatcaccgaagccctcatcgtccaccaggtcgggctcacggcagcacatgggacagaggctgttgcgcacagcagaggctcggagccagacgacaaggttccaacgctcaccagtgcccaagggccgggctccatgcagctggccgccacggtggaggacaccctggcccaccacgtgctccacctccaggggctccgtcagggctgtgggtgcctggaagaggcccccaaaatacagggcgccccctgtgaaga

SEQ ID NO: 342276 - DNA, 1000 bp, Homo Sapiens; identical to SEQ ID NO: 160197

SEQ ID NO: 342277 - DNA, 1000 bp, Homo Sapiens
tttttttttttttttttttttttttttttttttttttgttcatgaacaatgtagagtttactgagcagttcacaaggagagttacaatgaatcccccacagcaacatttcctttaaaatcccttcaatcaatattatctctcaccaaaacccttgctctaacagctagctcatcccttttttctatctctttctccgcccctcatcctctataaatcgtgtaggaaaacaaaagacacccaaaagaatccacagcaaagccaggcacggtggctcatgcctgtaatcccagcactttgggagactgaggtaggaggatcacttgagctcaggagttcaagaccagcctgggcaacaaagtgagaccccctctaaaaaaaaaaaaaaaaaaaagaatccacagcaaaacaaaaacccagtatatatgattattccttaggtgtactgcatcaatccagctcttcacagctggagaagctaaagcccagagtatttaggagactcgctcagacttccctttcagaaagaaaattcattttccgatctagtatcctttcagtcacaccatgctgcttaacaagcatcttactcatcgataatgcaaatggaaactgcagagtaatgcaaacaggaacttttcaggaaaacaggctccagattcacgagtgacttgatgagcccagggcatgaacatctcaagcatctgtcagcaaacagctgcttcagaacacttactctggccctctcttcatctgctgcacataccactgaggcacaaatgttggtcttctgatgacatccttttgagttttggaagctatgtttgtctgaatcatcccttggaaactcagctcatagttccgtgagcccgcctgaaatggcacaactcccctcggacaggattgatagagagactccaggtatgaagagtcgacgtttgaatttttccgtttgtctttctcttctccatactgaatccatgtgccagattcattcttcca

SEQ ID NO: 342278 - DNA, 1000 bp, Homo Sapiens
tttttttttttttttttaggaaatgtatatttaatcattctcttgaacgatcagaactctaaaatcagttttctataacaacatgtaatacagtcaccgtggctccaaggtccaggaaggcagtggttaacacatgaagagtgtgggaagggggctggaaacaaagtattcttttccttcaaagcttcattcctcaaggcctcaattcaagcagtcattgtccttgctttcaaaagtctgtgtgtgcttcatggaaggtatatgtttgttgccttaatttgaattgtggccaggcagggtctggagatctaaattcagagtaagaaaacctgagctagaactcaggcatttctcttacagaacttggcttgcagggtagaatgaagggaaagaaacttagaagctcaacaagctgaagataatcccatcaggcatttcccataggccttgtcaactctgttcactgagagatgttatcctggtgcccgatagagttctggctctctgtgctgaggcagcagccaaagagacagaatgcttatttgccaatgactaatgtgaggaagcagacagatttgttggctcccctctttccaggcccttttctactcaaaaccagggtttcttagccctgacacagttgactctagttcacatgaattattttcccaacttctaatatgtctttgaagatagatttatcttgttcatattggagccttctgcttttggcttctttttgtttcttgctcttgtttgctcactccagacttctagatatgaattcatttcctcccagaaatataaaactaggtcatatctggtggtgaaatagttctgtagatccctgttgtaacaatgactttgcatgcttttttgtggccgaggcacattattttagcatcaggtaagggctgagaggcagaagtgcccagctgatggcaaagaaagaagagacacacagagaagcctttgagtttagcagctgtaggtgactccg

SEQ ID NO: 342279 - DNA, 1000 bp, Homo Sapiens; identical to SEQ ID NO: 160198

SEQ ID NO: 342280 - DNA, 1000 bp, Homo Sapiens; identical to SEQ ID NO: 246556

SEQ ID NO: 342281 - DNA, 1000 bp, Homo Sapiens; identical to SEQ ID NO: 160199

SEQ ID NO: 342282 - DNA, 1000 bp, Homo Sapiens
tttttttttttttttttttttttttttttttttttccaaaataacagaggacgtcattttattggctgtccacgggaagtttcatcacacacggaggtgaagactgtgggggttgtggcacacaatatctcaacacgagacctcatcgagcggccaaacagaaggtgaagtgacacccgacacgacggaaccccagccgccctctgcagccccggtgccacctctccacagacgcctcagcccagtaagctgagtgatgacactgtccattagtctcagttcgttgcactgtcttccaacaaaacagcacttgaaaattcacaaaattaaaaaaagaaaaagaaagcagcacttccttggaaatagcaacaccactgtaacacagacggcagcgtggcatgcagatccacacctggtcggttttttccctttaggattttttttttttttaattaacaaatggaatggcaggtctgtttcaaatattagtagcataacacataagtgcaattgcagtctggccacaagcgtcagaagccttccgtgtgtctgtcacaagggcgggcagacacactccgattccacccctggagggtcaccaaaagaaagcagccacttctctatttccattgttgtcaaagcactcaggttggggaagaaaattcaaatgaaaccaagctctcagcatccggggccagccaccctgtgccatcctaagtggtctctgtaccccagacctggggctgtcatctccaccgtggcattggctgggaaagtcgctgtgggacacacccctccgctcactcctgctgcccatggaggagcctctggtgtcccccggcctggggccatgtgggtcacacggagctgagcttcaccaggccgcgcacagagtcctcatgcagggagtcctggctggccaggcccagcacgtgcatggtgcggctgtgcgccagggggctgcccgccgccagtagcctggggggcgagggcgcctcat

SEQ ID NO: 342283 - DNA, 1000 bp, Homo Sapiens
tttttttttttttttttttttttttttggccaggaattactttaatttttttttttttaaaaaaaggtttaaatggcaacacaactgtaaagttggtacatcacagaaacaaaggtctctgcaagcaatactgattggaaatagcaaaacacttggctggtgaaaaaaatgaaaatctaaattatatacaatagtagctaagggtgatattgaaaaagtctttttaactgtgaatcaagatttaacttgccattatctattgcttatttattcagggttgtaaatattacttatatagagacatagagatgtgtaaaaatgaaacattgtgaaaaaaatacaatttttcaatttcatatgaaactcaaagtataagttttgtccaatatggaatgtacctacatttgtttatattagggctctaaaatccatttaaaaattgtttttctgtttttaaaaaagaaatagctgacccaccatgcaagttcgctatatatcttgcttgctcaaaatgagcattttcaggtgaggtctgttttttctggcccaagtctactatgattccttagaagtcgtactggcccaattgaagaaagggtttccatgaagagtctgacggcggcatctggatgaggggtggtccgggtaatgggaagtgagtagagaagaaggagctaagagcccaaatccttatgaaggatgacattcagttgttaaattttaaggggtatccaatggctttttccaggcactcaactaaagagcctgcggaaagaaaatccctctctacttctacaaatttgatgtagatggatttgggggaaactccgggatccacaatacagttctgagacaaaaacccgttaataccaacccaatctttgctgaaggttttggtattcgcttggaaatgtaaaaataagcactgctgtagagtcctgacctcagcaatcccgaggtagcaatagataattcgggtgggttctatttccacctgtaa

SEQ ID NO: 342284 - DNA, 1000 bp, Homo Sapiens; identical to SEQ ID NO: 160200

SEQ ID NO: 342285 - DNA, 1000 bp, Homo Sapiens
ttttttttttttttttttcatagaccaaaatagagatttttatttccaaacacaaagcagatacatttttaaaaacataaaacaacagcaaaaacgtcaaaccatcttttagaacactgctacttccaacttgcacaaaaggaaggggaggaaaacgtcaatgcaactttaaaatatagcactaagaagaaactccggggtcctggtgttcctccctggatggcggggaaggctccattagctttggacttgatatgaaccgagataacacacacatgttccgagacagtcgtttggctccaatactgcttgccttcccagaaagcttaatttattgcaaatgcatgttttaccatcacaaataatatgacaagagtagatatggtccctctgcgtattgtttacataatagaatatttaaaacaatggaatgtgtttgtctttgacatcaaaaatcatttatgcagcatctacatgcacatatacacacacaagtgtgaacgcatacacaaacacacacacacagacacacacacacacacacacacaccccatgccattgcttggtccacactgcatgaaacacaccattccagctacatgaacaggtcagtatcaggttagtgtaaccaggtctccaggtacaaaggatgaagtgggtttgctcacatagacttagcttagggtagagtgaacttgtttatgagaacctcgtttatgcagaggctggactcaaggcgatcgcagcactcaatctggtgtgatcatcagcgtcatctgggagcagcttcaaaaacattctcagcatcgccccagacatccttgttcacaatctcaggggtggaggtcatgagcaggccaaactcactctacccgacctgctgcctccaggatgggttctgaggagacatggggccctcccatgggacggatgacaaatgaaacgaaaaaatccatctgggtggggggctttggaatgagggctctggtctttcggact

SEQ ID NO: 342286 - DNA, 1000 bp, Homo Sapiens
tttttttttttttttttttgtcaagaaatttattaacctttataaacactattttcactcaatcattcataaaaaatgatttgtgattaaatctgtaataaaaccatataacgttcatcaatgcattcaataagaccagtttcttccatggaacataataaaccactttaaaacagcagttttcattcatgtcatataaggctgtcaaactaaaagtattccttataatgagttgttacccaagaaatccatctcacttcccgtgatgtggagcctggtgatgtgccctctaagagttgggtctgaaagaagactctgcccctttatggccacctccccagtctctctcaaacaagtttcacaacaggaaaatatttatgagcagagaaatcaaattcaggaggaactttagattcctttttgtgtcctcctgccaataacttcataaccacaaagttgggtttggcaacctttaaaattctattaacctcatggtccgggttaggaatattttccaatatcatttttgcctgttgaaagtgcttactagctgccacatacagttcaggagactgaggaggagggctatatttattgaggtcagacatttccttgaactgtaagtagtgcactggcggcggggtcatcacactgttgaatggagcaaacctgtgttcataccgaacttgttcactatcaagctcaaacttcggtttacgtactttgccgtccatgtcaaatgctaccatggttttaaacattccagcacacatgttctgatatgcttggctcattgtgatctctcggctcaatgggcgaactttcttttttttctttgtttttttactactacggcctttctgctgctcttccattatcctttcctctgccatttgagagccatcggcacgactcaatgttgacatcaaccatgcgtaaaggaattcagagagataccaatatatgtaatagtactcgtgcatactgtagagttccaatt

SEQ ID NO: 342287 - DNA, 1000 bp, Homo Sapiens
tttttttttttttttctggtactatggaaatttaatattttgtttaacagacctactacatttacagaaagccaaacacagtaaatttttaaaattaaaaatgttttattggctattgcctttaatagatttactacaataaaggaaaggaatatttttctcaaatgtgctaataagaaaaagacccaggaaactgaacgatattggacacagttttcagtgttttagacataaataaactcatgaatttcatatggattctggaatatttaccactactcccctaacgatgcatttagcatagaacaaaaatatgaacatttgaacaagtccaatctaacacatttcaaaacaatcagatctttggaaaactgttttccataagtaccccttgccattcatggaagagttatgaggatgcccatgaatttattcatggacactcccatactaagaaaaagaaaaccatgtagatgggtaatataatttgactatttgttcccgcccaaacctcaagttgaaatgtaatccccaatactggaggtggggcctggtgggaggtgtttggagcacaaaggtggatccctcatgaatggcctgggccatccccttggtgataagtgacttcttgctctgagtcttgttcctgcttttgtcatgtgatgtgcctgctcccccttcaccttctgtcatgactataagcttccggaggcctccccagaaaccaagcagatgccagtaccatgcttcctgtaaagcctgcagagccatgagccaattaaacctcttttctttacagattacccagtcttgtggatcatgaggtcaggagatcgagaccatcctggctcatacggtgaaaccccatctctactaaaaatataaaaaattagccaggcatggtggcgggcgcctgtagtcccagctacacgggaggctgaggcaggagaatggcatgaacccaggaggtggaggttgcatagagccgagatcgcgccac

SEQ ID NO: 342288 - DNA, 1000 bp, Homo Sapiens
tttttttttttttttttttttttttaaggttaccgtcctttcctttattggatttctgaattttttaaaaagtaaaagtaaagcaatcattaagtagttcagataaaagaaaagcatctttacctgagttacccatcaggtctactctgacccaccctagcttctcccagaacaagcttctgggtatctaaaaaactattttcatactgatttcatgtaaagtcctctctaccatatgagtcaactaactatgagaacagtcttctcatacatattatatgtacatagattctcacccacaattaaatctctcactgcagaacaggttttttggggcctgataagacaggagcttctaccaaaggttttctcagactcaaggtaagtatgggttttttcacctatgtgagttccctgatgtaccacaagagttgatcattgacaagcactcttcattcagacacttgcagtctttcctcagattgggtttttttttttgggtgcaaacccaagtaaggctctccaacgaatgcttttgccatacttaagacaaatatacaatttttcaccagtatggcttctctgatgggtaagtcagagttttgttagaagcttttttcacacttgctggggcttctccccagggtgggttttctgaggtccaatgagatgttcatactgtctgcagcacaactgacactgaaggcatttaaaaagttgttctccggtgtgaattctcttacaacgagaagggctgagcattagtagaaagctctctcacactcagtgcatttctaaggtttcccacttgtatgaatcctcttgtgagtgatcaaatttgagctcagacggtaagttttcaaaacctctgggcatctgtagatttctcgttggagtgaggatgaagtgttctgttagggcagctctctgggcaaagaatttctcatatttccaattgcaggctctctggtccccactgaattctgagctctgagcaaag

SEQ ID NO: 342289 - DNA, 1000 bp, Homo Sapiens
tttttttttttttttttttttttttttttttttttaaaccatttacaaatatgtttaatagcagcatttctttaaagaaaaacaaagttcaaatgcccaataataattatgtttaacacttggtacacatataaatagacaaaaggctgcggagaacactggatttaaataaaggtgttatgggtataattaactataatttattttatgaataaataagaaaaaagtccctggctataaaggatagtggaggtttatttcccaatattcttccatttggactgaacccctgccaactaagcagacatcccactattacaccaaaaagactgctctccctgcgagcaattacaatacatgacaccactaggcccaatggctcagagggaagagtggcctgtggctcttcaatctttatccaaacctggttctagcttcaggagcctttggtcacctgagactttttatttattaatttttatgagacggagtattgctatgttgcccaggctgattctgaactcctgggctcaagcagttctcccgcctgggcctcccagaatgttgggattacaggcatgagccaccacacgcagccacctgagactttttaaacagcaccagcacttctggctggtttgaaccttaaatgccaccacccaccagagaggaggctctcactagattctaaatctgttatttaattacttttcaattgaaaaacaaaacagacagaagaaacttattagaataaggccacctaggaatgttcttaacttttccattcagcttttggctgatatatgaaaatacaaataaatacatcctttccccaggtgcaaggctaaaccagcagctccaagggcttggtctacagtgctcagaaagacacactgccttaaaagtcaggctagtgccctagctccggtggcctctgcaaatgaggccttgacagtcgtcagtggacagacacatagtatccagcaccaggtcttgggcc

SEQ ID NO: 342290 - DNA, 1000 bp, Homo Sapiens
tttttttttttttttttttcaatgtatttcatctatgtttttattaggtaaaaattaaccattccatataacaaaatagtaatttttaattacaatcttaaaacagaaggaagttaaacaactcaagtgaagttaataacagcagtttttgacaatattagtccttaaaagaaacagtaaaatatttggtttctataacagtcaaaacaattagactgattaaaccataaaaattaataacttataaaagaatccattatgattcatgcattgtatgtattataccactttaagttataccatattgaattcaaacgtatagttttgaattaagaaataaattctttgctcttatttacttgttatcataacaatttaaactgtgttacaactaaaatggtaaaggcagttgtaataaatacctgaggaagattttgaaagttttcctctctaagaattaacagaattattagagttatttcctaatgcagttggctcaccttatctgtaggttctacatccatggccaagaaattgccgactgaaactctgaagatgtacagactcttttttttcatgtaattattcactaaccagtatggtataacaactacatagcatttacattgtattaagtgttataaataatctagagatgacttaatgtatacaggaggatgtgcatagattatatgcaactactatgccagtttatatcagggacttgagcatctgcagattttggtatctataggggtaactggaaccaatcccccacagacactgagggatgactgtaattattttattaaaaagggagaaaaaaactatattaatataaactagtaattatgagatcagatgccattcttccattgagaataactttttgcaatgaagacagaatctgctttatcttactctgaaatctgttactgctggctggttagggtaatgtgttgaggaatcacaacaaagctcagagatgaagtatgctgtg

SEQ ID NO: 342291 - DNA, 1000 bp, Homo Sapiens
ttttttttttttttttttttttttttttttttttttttttttttttttttttttttttttttttttttttgcaagaaaagagctttaatggagcctgctcatgactcttcagtgtcttcacccatcaattctgagggcaataacataaagcataccagcccaaggttgtaatttagtgggaagctggggcttccttctgcctcctgctgcttagcagtggctctctcctcacagattttagctctgcaggcagatctgggagctgtttgatttctttctgctttgcatcaaattctactcccatttactgctgaagagaagcagagctttctgaactatccaaaagtttccattgttgtctgctcaactataatgcttccttagaggtggatgacagttcttgatggtcttacacttgggaatgtgttgctcagccaccttgggagcaaagtggtggctacactgaggacactgaatgcagtctgggttttctgcaggcaggatgggaggcaagtgtgaacagtttccacctttggcagttacctgctggacctctcgagcctggcggaacgtatggataaaagattcatgcttctatctccagttgctcttctgaggaggttcagccttggctgaagctggccccttccagttcaagtactgctctagttctgtgcccttagcccgggccctggaggagtcaaacactttcctcttggaaccccgcatcctgctgcagatgttggagtgtctctccagcctgaacgagaggaatttgcgcccacagtggctgcactcacccagctgtggctcttcaatggagccgctggaacctgaggagtctggtgccatggacaggctggaatttctggcagatccctgcaaagcaccgactggtgtttctgaaggcggggagaatttctccaccgatggctctgagactgggtctcgaattttattattgcttgctaccagcctttcccttttgagcctctggatt

SEQ ID NO: 342292 - DNA, 1000 bp, Homo Sapiens; identical to SEQ ID NO: 160203

SEQ ID NO: 342293 - DNA, 1000 bp, Homo Sapiens
ttttttttttttttttcagtatatgaaaattcatttatttagtgaaaccctgacattaaagcgtcccaacacaaagcagattcgaacataacaactggtgattggctcatctcacaggctcacatcatcagtgtgttaacatacaataggactgtacccttttacaggattgagtgttttggatcccactcacacactaaaaccctgccataaagttgtatcaattagggctgttcaaatgtgaaactgtattggaaaatgggaaactttatctccttatatatgtatattttttgagatggcgttttgctcttttgcccaggctggagtgaagtggcacgatcttgggtcactgcaacctctgcctcccgggtttgagcaattctcctgcctcagcaacaagagcaaaactccatctcaaaaaatatatatatttattaggacagaaaagcaaaaccttaccataattccataactatgattattggaattacaaagtaaatgaacacttcaattgtctaatagcagtgatttgtcattaaggtctcaggtcaataatacatttaaaatctaacaaagtttggaaagatagtatcattaaattatcttaaaacactacattagttcattattatccctgcagacaaggataaagatggttggtaacactataggtggctaaaacaaagtaaaaggatcaaaatggcaaaattctttactctgatcatatcatttgattaatcacacttttatctatcacatttttagtttggaaatagtttgcttatcaatatagaattctactttattgcacaatgtccagtttggcaactttcagctatgctgtgaagctaaacaaaagcaaagttgggtctaacaagctgaaagagttctgctcaaaaacctattctgaaaaaggaacttgtcaaaacattttcaccttaaaaaaatttcaggccgggtgcagtggctcacacctgtaatcacagcactttgggag

SEQ ID NO: 342294 - DNA, 1000 bp, Homo Sapiens
ttttttttttttttttttttgctggttcccttcatttactcacagatgaaaagattaacacgtcagcaaatcaaaatcagagaattcctaaggcactctgtgcaacaggagcgggtggacgtgggggtgggtgcacgactggcgcggctgcctccacacgggccctcctgaagttaccttggcccggctgctggctacgggaacgctgggtcctcgatgccatggtcggggttgcagctgaaggcgatggtgatggcgtaacgggtgccccagtggaccttctccacgcggtgtaggttctcggaccccgaggtgaagaaggagacgcgaccagctctcggctccaccgtcttgttggcaccctcctccatgaacatgaaccgccctccgccgaagtcctccaggtagttggagaggtacagcagcgaggtgtagtcgaaggagccgtaggtcaccttgtccacgtgcgcatgccagtactcgtcgtgcgccgtccgcgcttccgtgctgtttatgcgggagaagaaggtgggcttggtcagatgcagcgaggatgcgctgatgccaaaagcctcagcaatggtgagctggaccttctgccgcacctcccggtataaccggaagtcctcctctgagaagatgttctgtattttatccccgaagtatctgtacaggttcacaaagtgcttcccgacagacagggcccctgagtgcaagtccagaatggatgcccctccgtcagatcctcccagggagagccccttttcagctacgctgcgaatccgctccgcttcctccctggtgatgacgacatcggtgacacctctgccgcactttcggggagtgcagccttcgaacctgcggtgactgtcgtagtcctcagagcagggcacctcgatgaatctccctgccacgacctcgccacggcgggccaggacctctgcgaccccgtcgtcggcccccaagctgctccagagcaggagtgcggtgagcacaaagc

SEQ ID NO: 342295 - DNA, 1000 bp, Homo Sapiens; identical to SEQ ID NO: 160204

SEQ ID NO: 342296 - DNA, 1000 bp, Homo Sapiens
ttttttttttttttttttttttttttttttggacttggtgagcgcgcggcagctttattaaaccacgggataacggctgcccgcagcctccggatcggtgggcgcttgcggaaggggacccggctcagggcccagggctgggactcagccactctgacaggttggagacctcctgcagccacagcacgtcctccaggcggcttccgaggctcgccctgcccggcgccagggccctgccgtgagcctcgcggtgctcccttcctctaggagtgaggggggccgcggtggcttccgggcggcgcggggcggcctctgacgggctcggggccctggcagagcgcagagctcgcatctcctctatgcgggggctgcccctcttgagcctcttgttttctgcttgcccgctggtatctgctaggagctccaggctgctgttatcaggtgcgtcctcagtgccctgggctgagtcctttttttctagggttagctgctgcttcacctcacatgagcagtggtgaagaaattggtgttgggtgatctcacgaaatactttgtgcagtttggtcctgaactcttgtgtgtcagctgcttgaagggtctggagacacatctttcggaagctgctcctagtgcttccagtcagaatactcatgatggagttcacagccactgagagtgaggcctgtagtttctgctgagccttggcagcctggtgatgttgctccaagaccttgtccacagtgaattggatggaaccttgcactacactgtggctctccacaaggatggcattgagatgagttgtgagcaaagtatagactccccagatttccatttgctggactggaaatgcactgtggaaatccacaaagagaaaaagcagcagagtttgtccttgaggatccatagtctgagactgatcctcctcactggattccacctgataactcacatctggaagcaccaaatctctatccaaattgagatccaaattgggtat

SEQ ID NO: 342297 - DNA, 1000 bp, Homo Sapiens
cttgaaagaatctgtttattttgagattaaaagagtctcatctccctgcatatccagcaaatactaaatttgatctttttaattttagaaaagggtcaacaaacttcagctggagtatgatctctctttcaaactcccattctggtttaaggagccccaaagggtaactcttgacaaaaaagtggctatgtttgcacatgtgtgtgcatatgtgtgtgcatgtgtgtaatgcatgtgcatagtttataaaatgtttgctgttgtatccataaatcccctgtggacaacgttccttttcgtactccgctgtacacgtgtgcagtgaatgtttagcaaatacataatttggtataaatcccatacaatgtgatttcacaaccagaagcctgactgctgagatattactgaattttttaaagtgataaacaagattattatgtgcaaacaaacagggcctgtgctccagctgcgtccaaatttacttgacaaagctataaacacaaggccctttctgaagtcctgctgattgagtttccccttccttttgtcggtggagaggaatgtaaaggctaagcgggtgcactcggactgtgtgcctctgggcttgctggcggtggcacttaaaggaactcattcattctctggatggggcaacactcctcacccgggatcccccaagggctttcccacacggagaccttcccgaacacagagacatctgatcttggcttgcccaagctggcccaggcctcggggactcaggagcctgtggaatgtgctgagagcccgaggtctctggcggggaaagggcaggggtcacagcccccctcctgccctacctcaagtgcttcccagcggagggcctctagtgtaattccatctgagacctggggatggcaggaaggcccggccctgctttgtttgacccagctcagaacaggatcctgcacccctgctcctgcaaactgatgggggaggccagaggaggccgctcccagcc

SEQ ID NO: 342298 - DNA, 1000 bp, Homo Sapiens
gaaaaccaaccaggaacatttattaaaaaactaagcaagttatccccaagagggtgaagcaccgctggctggttctgacattcgattcaggctgaaggcacggcaactcctccagcccttgctgggaaatgtcctacccaggccacgggcagtgccccagtgcagctgggtcccctaaaagcccccaaacacatgatcccaccaaaggcttgaacagagcaacttcatcaagcaggcagggaccacacctgagacacaagggcaaggaggtaaagcacaggggactgggagtgggccagggacacccagcccccgtctccaactggcgccccctccaggggggctaacatgtggcgtggggccaccaggacctgtgcttgcccctggtggcggaagagctaccctccctcttgggtggtggggggatgttgtccgcacacagctcagacgaccgagggtacaggaagaatcaaactcagtcaaccattcttcaacccaactgggagtctgtgaggcctggcacacaggtgctcaataaacacttgtggcatgaagaagtgaaggaaccgatcttgttcatctctgtgccccagcactcggcatgtagcccatgatcgaaaatgcagactgaacaactgtcacactcttttgtatcactagtgcccggcacacagtcagtgctcttcaggtgtgtgggaaagaagccaatgagtgagaagttcccacaccgtctagcagtgaggaaaaaaagaaaaaagtgaaaagtaccttgtttactcccattcccatcccatagctcagctccctgcacacagcaggtgctcagtaagtgtaccgaatcaggaacttatctttgtgacatgagtgccaggcacacagtaggtgaccaatatgtgcttgaataaatggatagaagcatcttatttatctcaatattcccagagcctgggctgggcacagtggctcatgcctgtaaccctagcactttgggtggccaagg

SEQ ID NO: 342299 - DNA, 1000 bp, Homo Sapiens
ctttttaaaaacaatttatttttttccaatgtaagaataacaagtttaatattgaaaatctgaaaaaggcaggaagataggaagaagaaaaatatcaaccatagtcctaccacctaaagaacactcactgacagtgtggccatgctcattctttaagccttaatttaggtcccatttctggtgtggtgccttccttgaacttcctcccccagatcttccatgtcatatctgtaccactcagttgtacatatcatacacttttgtgtataatgtgatgtatgtcttatgtttccaacgagattgttacatcttcgaaggctgcaaacatgagttgtacttgttagcttaccccaaaataatacctggtataccggacccaatatctgctgattgatctaacctaaatgaatacaaaccatttcagaaaaagatatacaatagaccacatatccaggtcatgaaaattaaagctttcaggtcacctagcttagtgactattgcttttctgaccctagactcttgaaagcctatttaaactggcctctttctccacaccaaaactgataaaaaggagactgattatgagccaggatttacacagagattctctatataaggcataaaggtgagggtgagagagagagagagagagagagagagagagagagacgtgagggagggagagaaaagagaacagacagaagataagagaagagaagggtatacagtctggtgctcaatccagtatgtgatttgcctccagcaccgtgtacaggatcccatccacttgttctgagtcatacccgatctcacgaagctccaagtgagggaggacagaagtaaggagatagctgacgtggatacgtagccgcgtaagctttgccaaagccctttctaggtcatctccctctggggtccggtaggagacctgagccttctgcagcatttccaggtgtgtctctgtttccttcagtttctcttttaactcttgcttttcctc

SEQ ID NO: 342300 - DNA, 1000 bp, Homo Sapiens
tttttttattgttcaagcagaaaacaagctgcttttattacagtatgatgtcatgactcatttgtaacagatccagcctcagggacagccctgtaaggcagcaagtggggctggctccaaatgggtatgagtctcagaatctttggtaaggcagaactgaactgggctgagaggtggtcttaaggcctgggcaggctctattctctctggactggctgcagcctgcagtctaggagaggcccagtacagcctggagctcctgagccttgtcaacaggcagtgagcccagagctgcttgaaagctgtcggtgtgctgtttggccaggaacgtcaggagcagcaacagtgcggccttggtgtctggtgggatcttgttgtcagccagaatgaggctgcagatacgcagaagctcgggagccacatctataacctggtcagggctgctctggtacaggaagctgaagaggcgcccaatggtgacccactcctccaagtcctccttcagtggcagggcatgcagtagggcagccagcacctggggctctggtttcctggtgggactggccatcaacaggcgggcaagtgccccacagatgttgtcacggacacgatcatgtcgctcccgcgccaggaggggaaaaaggagccccagcagcttggggaagtgttcctgggcagggtggcccccatgctctgccagcacgcccatcccgaagatggcattgcttcgcacctcggggtctgcctcttgggcggtgctcaacagcacagggagcagccgagacacaaactgggctgaggcagcacccaggccctgaatagtctctgccaaggtccccactgcaaaggacttctctgccactgtgcagccctgttttgtcttgcacaccaataatggcaggaaaccggcaaagaatggggcaaaggagtctcccccagccgcggctgccagggcagggatggcctctccagcgtgctccagcaacatggcgtcgtattc

SEQ ID NO: 342301 - DNA, 1000 bp, Homo Sapiens
tttttttttttttttaaataataaaactcaggatattttaattggacattagcacaaagttttgataattaatgtaaatgaaccttgtctacaaagcgaagcatgcctgctggtgagccacacagatactgctccttcagattgaggttgtacatgcccccaaaggctcgcttcattgctacgattctctacttaaatccacattcacagctattgcctcagaccctctggaggaggggccaggggttagctggctttgaatagcatgtagagcacaggcagtgtggccacaaatgtcacacaggtgaccagggtgctatagatggtgttcctgttgacttgggcttctagtctctgctccgtgtctgacagtgccaagatcatgctcccctgctccagcaagaagctgggcatagccccgtctgctggttccaccaggcctgggtgtgctgcagactttacaagctgaaccaccccagccatttggctacaagtcttttctaggccatcaagctgctctcgtaagccttctagacatgaatggacttgcctggaatgactaagctgctctttcaaggcagctgaaaggacatctacatctctgtctctggtcgggggactacctgcctgtgacccagagtcctgccctggcccagcagcatgtaccaggcccctcaagtccaccatgagattgtggaggtccctctgctggcgggagtagctagacgcctgttctcgaatggcctcttggagactcacaggccccttctgcgcctccaggagtaaagccttcagctcctgtagtcgcacacggttcacataggtggagccagccacaccaatcagggcccccaggactgagccaatgagggaccagttcttggtcctctcagcccttgtgcgctccttctcatgactttcccgcacagctgcagagaagagggagaacttctctcgctcagagtcttctgcacgcagataggctgtgcgaagcctcttc

SEQ ID NO: 342302 - DNA, 1000 bp, Homo Sapiens; identical to SEQ ID NO: 160207

SEQ ID NO: 342303 - DNA, 1000 bp, Homo Sapiens
tttttttttttttttttttttttttttttttttgagggggcggtgtgactgtatttaattgaacctcaagtgaattctgagaggccggagtgtgacttctcttgccctataaatcaggtcccctgcagcaagtcagctccatctttcacagggctgggctggctggatgcgctggcagccccggctggagtaagagcctggctgtcagccacgcaggtgccctgcacaggacctggggctgggacagggcaccaggcaggcaggaggcctcaccccggggtgcagaaggccccaggggtagcagtttacagaagatgtctcagtcctgtaagtaacaaacagaaacaagccccagcgcttcccggtcccctccccgtggcccgcaccaaaccctaagctgtctcctaaaacttcagctgtttccaccaccacgctgacgaccagaaagacaaaccaaaacccatatgaagggcaatctttcaattgcttaaaattaatcagtgcaaagtgaggtaaaagatccccgtttgtcagggccgaggcaggaggctcacacaagcctgcgtctcttggagtccctccccaggtccccctcctcgacatccacctcacagcccagtggggacaccaggttcagcagagggtcctcagaggcacggccgaagagcgccagcaggagggccacaccgaagcctgtggctcgctcaccagcatgcaccggtgcagcaatgtccaggtggacccagactccgggccagtcgaagccgatgtgtgaggcgatgaagaggccagcacaggagctggggctgttgtctcggtccgccactgagttcttcatgtccgccacagctgaggtgaactcgctgaagtgcagctcggggcagtagaccagcgggtgcaccaggtccccacacttcctgcccgccttcacacaggcggcctcccactcagcgctgttggtgagcaccgcggcgtggtacttccctgtggcaatgccctg

SEQ ID NO: 342304 - DNA, 1000 bp, Homo Sapiens
tatatgccctagttattcaccctgcttcaacactgtcaacgtaaaggcagaaataaagcaagctatcaatacctcagaactactgatataagacatcaaatttctaaatcagtgtattaaaaaagtgaacacttcctctttcttctctcttctacatttaactagaatcatgtttaaaaaaaactgatattaaatgtgacacttcagagctactactggaaggagtaattcataacttccctaccctccttccatccctgctgattcaggagaagggggaaaaaacaaagaaaacaaaacgaaaaaccaaccagggtctcttgtagatttgctgctattccacaaaatgttggcatttgctgccatgccacaatgttggtccactgaaataggatttctgcggaaactgtcaacagtagtaattcaccatatgcaagtaccatccttatcatgcgagaataatcacaggttctgtagaaatgtacaatgtgcttaagataatgaaaattgtagcgctgcatttgagatttatttctctacttagctagtaaaacttgtcatttttgctcacttaagtatgatcatttgtgattcctttaaatagcaaaaatgcacagtcctctttaggcctctactcaataatagtttacattactcttaacaaaatcattctacataaacagatagctccttaaaaatagtactctctcattaaatctaatttgacagaaagaagtttaagggaaaaaggagtgctttgtaagtgaaaaagtacaaatctttggcctttctcttgacattttcgtatgtcaaaaagcaaaaaaccttcatgtatttcaatctagtgattactttttgcaccataatttgttttttacaccacaaaaggaggcactttcagtatctgtaaaaggtatttaatcctaaaacatacttacctagagaataattaaaacagaattcaatacaatctagtatctattaggaaattaagagttat

SEQ ID NO: 342305 - DNA, 1000 bp, Homo Sapiens; identical to SEQ ID NO: 160208

SEQ ID NO: 342306 - DNA, 1000 bp, Homo Sapiens; identical to SEQ ID NO: 160209

SEQ ID NO: 342307 - DNA, 1000 bp, Homo Sapiens; identical to SEQ ID NO: 160210

SEQ ID NO: 342308 - DNA, 1000 bp, Homo Sapiens
aatacagacatttgtattttagtcaaatgtaacaccaaagggcattagatactacacatatgaatcttgctttacataaagatcaggtacagagcttggatttatataagcaataagttaaagttggtgattttcaaacaggcttcctttaaataagatttatcctggtgtatttaaattcaattctatttacaaacaacaaaaagcacaatattcagacttctcagcaataagttttgtataaaatgaagtataaactggttacacttcaaaacttaagcctctgtttgaggtagaataaacaaacatcaaaatatacttctattttagggtatcctgggacaaggggatttttgcagtatttgatatttgcttgagcctaattttcaaactataattttcatatttaagtaaaagttatcttcaaagttttataggtattgtcaatattcttaagaatcgtaaaccaaagatctttcagaaatgtagtctagtcataaatggagtcaatattttgataactcatagttgttgtttttcttgtttttgaagcagattgaacaagttaaaactgtgtccagtaacactgcttagtcttacagtagtaaattcaaagacagtacctgttggctagtttgctcctactgacctactgctttctatattttggaaaactcataaatgctgcaagccataccaaaagtataaggagattttgtgatatgcagaatttgaaattttaataagtcagaattgcaaacttgtccactgtgcagaatgcgcaatttataaaatatggtaaattgaacttcaaaaaatgttgatcaagtattcttaattaaaatgttaatatattttaggtctctcatttgaatggatatccatcgttacttagcaaatgcctgaatttactactggtattagcaaaacttgaacatttataatcctgtacaggtgaccagtgtttccttgataaagttttcatatcagttctctctga

SEQ ID NO: 342309 - DNA, 1000 bp, Homo Sapiens
ttttttttttttttttgaatgtataaaaataaatatttattgccatttgaagctttatgtacacctttaaaagcacatgtacaaatgtgggaaattacaaaaatcaacctaaaaccctttttctcaaagtatacataaatgtacatccaagatcagtggtgctaccatcattagaataaaaaataagtctgtctggacataaacaagcaatcattttaagtgtcattcagatattctcctttatatttaaaactccaaaaaatactaagaggcccaatatatccagaaaattgtgttttcactttaccctaacttatgaatagtggtatacaaatatatttccatctttttgtccagccagcaaatgagagtctgtacccgaccatttcacaaaagaccaatgttggtcagagacaggtgggaggagggcagtacactgaccgagaagtaagtcccaaatggcaattgttccagaagtcaagattgctgctgcacagtgatctttcacgtcaccttccaggaacctgccagcctgccctggaggaagacagtacagcatcacacccacgctgagagtcgtcttagggttaatcacaatgagctgaaacacagggcttcgcaacgactcactctctttggcacagggatgactcaggacaataaagagaagccccatttcagaataggctttgtgacagactgaagcttggtaagaatcatcaatgtgcatctttttcaggagttgaccagtttttaaattccaaataacaatgttgttcataatagtagtaccaagcagagcttcttgcatcccttggacctcagcaaaagttagtatagtctcctcagggggcatcaaaaattggttttctttgcctcctccatcttctgcaaacgtcatgacttctacttgttgatcagaaagggtcccactgctactaactagcctcctctttgtcaggccaagcacagcttttatatttccagacttcagtagtac

SEQ ID NO: 342310 - DNA, 1000 bp, Homo Sapiens
tttttttttttttttgtatcttaattctatttaatgacaatttctgttgccatgatgaaaaatcagtagacccagaaatgataatcataccaatttttggtaggcaattgagaatacattcaagatgaatcgacatttaatataattaattaacatagtgctacaatatatttaattgtgcctcagaaatgatttaccaaagtttgattcctgtgtgctatttgaaatgacttgtagattttgttgtatcccctgatcttagaatcagaaataatttgtgggtttcttcaacaataggtatcgcttgcattcaacagttttgcctcttcttcagaattattaatatttagatggaaatttgctcacagtcttttgtaacagtgcttgacatagaggaagggagagatgattgtgtccagtctgctcaggatcctggaagctcccccagtgagagacacctcactgtaaaaggaactctgagctacacacacctggcacttgggaacttcctgcgcttcctacttaaactcaacttcagtcacgttacaaaaactcatgttcattccctgttcaaagaacagcttgatatttaagaaaaaatcacccttgatcgtgactgagaaagtcacgactacaaccgcatggatgctgaagagcggtcagctggcgggagaggccaggatcgtttgcctgtttggctttctaatgagctacctgctgaagggaggcagtgtttccttccctgcaggggaaacttggcagctttaagtccagcctgaaagttcacaggagtgagataagttctgaccgctgatactgagtctctaactggatcctctcagagcagcagtgattggctgaagtctctgaattctgctttgctgactcctacattattgtttctcacttgtctgaattctctgaaagtaatatcacacttagaagatccctaggtgaccaaaagaatgaatatcttgtgtagagatgtagaatcttcaga

SEQ ID NO: 342311 - DNA, 1000 bp, Homo Sapiens
tttttttttttttttttttctgcaatgtttaatgaagtactgaaaatgagataaggatttatcacaaagtatatggcaagggagaaaagatgcaacattattttatttcgagctactagatggttctcacaaattacacagggagtgatttaatgattatagacaacgtaaaatacattatctcattctgttttagagtttaaaagaaactttgagactaattcaatttcttcatttcttaattgaggtaatggatttgagagtccccttgctataagtacctcttcttgcgggagctcatccttacgtgaaataccctcaactttctaagaaaatcacaaccacttatattttttctatgatatcttatggcacaacaattacatattgaaatctgcatttctaaaatccaaacatgcattctgctgtatgcacaatcatgtgcagtgtctctgccatggggggtgcttttccttaaccaatcttccagctataaaaggcatgaatgaggaaaccttgggaaagggataacatctttgatattgtcaacacccaagatgcactgcaggtagcgttcaaatcccatcccaaaacctccatgtggcacagatccaaatcgacgaaggtccagataccattggtagacttctgtaagtcccgatctggctaagcgctcctctaagaaatggtatcgttcttctctgaggcctcctccaaagagttccccaactccaggaaccagaagatcaacagcagcaaccgtgtgctgagggccatcttcattatccctcatgtagaaaggcttgagtgttaatggataattaataacgaagacaggtatgttgccacagtgcttcaccaggtacttttcatgttcagtccgtaggtcagcaccccactctggggtaaaggtgaagttctgggatgcttgctttaagatctccactgcttcagtataagaaatgattaaaaagttgttttttagcatatgttctaatct

SEQ ID NO: 342312 - DNA, 1000 bp, Homo Sapiens
ttttttttttttttttattttttagaaaagttttaatttgaacaacttatgattaaaaatacattttataaataatttttccatagacttgattgaggattgttgcaaactttacaaaaagatacactgcaacaacagattaaagaaattacaaaaaatatagctatacccctatttaaaaatacaacattatacatcacacagcattttctttgtgcaaaatgtttaagggaatgctgtgttaggcatgtcaagcatatttgcttagagggaagtaaactttaatacagttactttgcataatagtataggcatagctaaaataatggatttttccccctagaagttaatatatcttagagttcaacattttacttttattttgtaggattgaaagctaaacttagctttatacaaatatatgtgtgtgtgtgtgtgtgtgtgtgtgtgtatatatatatatgtatgaaaacaactatctgatttcacattgaacaaatccccaacgtatttacagtattttcagagaatgtgttctccaaatcagtctgtgtacattttctctattaaacaactctttagaaaattaaactaagccaacatctgttgattaatggacatcctctgttgagacttccagttttcgctgtgggacaaagagagttcctaaggaggttttattagcaccctcaaaatccatgcaggatgagctggttggcttggtgggtccacctggggtacggaagaaactttcggccactaattgtgaccctttgggtgtcacaggaacaggctgttgtgcccctgtcacagcaactgattgtccatttggctggctctggcctgggactggtgagtcatagttggtggcccttccttgctgagtgcctgcattttctggtgcgacattaacagactctattcttggagacacaggaacgattccagacccagggctggcagacaactgcacattgggtgagatgagtcccaggtgctg

SEQ ID NO: 342313 - DNA, 1000 bp, Homo Sapiens
tgggctgttcctttgggttttattacatggtggggtcggacacagctgagaagcaaggacccatcccgggaagtcaaacacaggagggcccctggctcagccgccatacccactctccccgggcagttcctgagtcctccaccgcccctgcccagccccttctgctgcctctccccgccccccaggccaggcgctgggccagcaatgcaaatggctgggggtgggatcaccaaagagaaggccaagccaactacccctactctgccaggccagctccccacaacctgcatccccaatacctgaatctccatttgcaaacacagtgttatgcccaggggtcgggctgggtccttcccatcccagggcagctgaaggtgggcggcccctatatactgcctgagggccttcagggactttgctcctctgtgcaccctcacaacaaccctgtgaggtaggtggggtgggaggagtgaccccctggactaaggctcaaggaggcaatgtgaccgggccaggaaggagcacatccaccatgcagcaggggagcccgggagaggggacgcaggtgccggagagacacagccagacattgccacacatctgccatgagcagtccactctgcccagaggtcctggggcccaccttgggccttaagaggtcccaggggggccccgccccgcccctggaggcaggagtaagtcacagccccacgggtgcagacagaggaggccggggagagggtgcttcttccttctcaggcccggggcccaccccatggtacaaaaataaaggatttcagatgggaaccccaagtccctggaggtgatctggggcctcacatccgggtgcctctggcttgtaacagcagggatggcagctctgggggcgggcgaggggccgaggagaagccctcactgcaagctcagcctcaggtctgagagggtgcggacgggaacctttctcctgtgcatctgcctccacctgcacctgttccacctc

SEQ ID NO: 342314 - DNA, 1000 bp, Homo Sapiens; identical to SEQ ID NO: 160212

SEQ ID NO: 342315 - DNA, 1000 bp, Homo Sapiens
tttttttttttttttttttttttttttttgctgatgctgcccatcctgagcaaaagttttatttaatagggcatacagcatggcttccatgatatgaaaatgtaacagtattggaaacagagatgagttctgaatggaaagtcctgttttttccagaacatagaaatctgctttaggcatctttgaaatgatcgaggaaatctttttaaaaaaagacaaaataaaggaacagaaataattcattacattttatgtttggtcccctctctgtcccacttctatttaaaaatattataattagttaatttatactatactgacaattttgaaataactgaaaaagccattttatgagcagtctggttctggtcatggttatgccacaacaacagctaagctaagctgtttagtcctcctaagtaccagtttcttgatctgtacagtggacttcataatttctaaaatatgtattggctttaaggttagacaacttaaaactgttttactaaaccttcaaacattttctgggatagagcatacggttagaataactagcaagaatcaatcacctctgcaactgactaatcacatcagatgcttgactgaaccacagatttcatatgtataatcaaggtggtaattcctgaccattaaggtgataattcctgaccatttcgcaaggttttgaaaactcaaatgagacaatgtgatggcattttgaaaaataagctttataaataaaagagtgataatgttctataacatttagaatgaaataccattgattttctcagtatctgccttcgatgcataaggcatttcttgaactaactaaaggttgaatttttaaaaatcaaaggtgatggaaaacataataggaataagtgagtaacaagtaccagaagagaacccatctttactattttattacattccttttgggaccagaagattaaactacacaaggagctctagcaggtaggaatctggaggtgcaact

SEQ ID NO: 342316 - DNA, 1000 bp, Homo Sapiens
ttttttttttttttctgctaattcttctttcatatatcatttaatataataaatatatgttattagggtgcatatgtgcatatattttcacacatatatatgtcttatatacataaaacagcacttaatggtcatgttctttgcatgttcaacttcagaggaaaaaaatgaattgctgttatgtataaccaatggcgatcttcccttctgtttcacagatggccatatctggatgtaaacaaaacattggagcgagtcattccaggtgaattgtacttcaagttgtaggttggtgttctcaagaagaattgggtgctccctggtagtaaataccacatttttggatgctcttgctctggacttttgaaagtgaaggtatataagtcaaacaacttcatttccaagtatgttttatcacctttaggttcgtgattgctgtccttgttcagtccctggaattaccccagtcaggaccaatgcctgaaagtgatcctcttttgtcagttgcatatttgtaaaccactagcaggcactgtttacaaagctccactaggcgctggcaacactggagctgcaaaggagtcaccacctccgggcttttattgaatatactctcccaagaggatctaatttgattttaaaaagtttgttttattattgggaatgttgacaggcaaaggcaagaatcaaggccttggattcttggatataatcaaacacttggattatatttttctaagattttacacgtaacctgaatcacagaaacagttccacagcccttggccacgactccagagtaagcgattaaaaacccggttgaaaatccgatataaatttacttcttcaacatcaggcaccttccagatgcgtggaagaactgtacgaatacttgttttcactatgtccaaaacttttcgttgttttacagagtccaattttatgagccaatatgaagccactttggttttatgatacttccagttatcaatgatatctt

SEQ ID NO: 342317 - DNA, 1000 bp, Homo Sapiens
tttttttttttttttttttgaacttataattttacttttattagtttgtagccttgaaacatcaaagacattagtaatcaaaatctccagcacttggataggtaatcacttggttacttttctcagttgtttgctttactctgggtacaaaatggaaacagtaatgaacaaataatctttaagtactctttgaccacggtagtgtgatgacatgttgcttgttgagaaaatcttcctcctcctcatctgtactgctctcagaaagtgacagcaaagactgaattttggtatctcttccagaacagctcaattcctcaactccacagggacccctcacatgtgaggtcttaaggaaatctgtggaaatctgacttatattcagtgattggctgctgaaatctgggaactcttctgaggttaagctgtaaagcttttctgaagtatctgcaagagatctcagcacttgtaattctttttccaaattgtctaaagtatgttgatcagtagtgtcatctaaggaaagctcattctggtcagtaatatcaatatattcaatttctgaaatttcagaagcagctctagatgatgattgagcagctgcacttcttgatcgaggatgagaggatgaaaggcaactggagctttctttaacagagttggaaagtggaaaatttgctgttgaaggtctctgtgatttctgacccatcttttgctgttttctacttgatgatggactctgagcaccctgcagaacacccaagacaattgcattatcagcatattcacttaagctatggtctggaatccattctctgtcttctgcaagtgtaatcctagtactggaattgttgcattctaaacgatgagaaggaagtaagttgagtctttcatttgtatcaaaaataaagaatctctcaagtccttgatattgttttgttataggcttacttctgcaggctatttcttgtaacaacagtgatgactttgtagtttttgattc

SEQ ID NO: 342318 - DNA, 1000 bp, Homo Sapiens
atgtgttgaaatggtttaatacacaacaatagataactgctatatttgctgagaaggttctgagcaacctctataactgtagcaggaacaggcttaagagaccatttttactaacccctccctttatgatggaggcagctcctccccaaggtcccacttacagagtgagacctttgtctacttctgtttggcatgtgctggccatgtgcaaacccacaattatattggccaatggcaaacagaattgggaaaccaaccatttccaataaaataaggtttcatttcaaaccagatacacccattttggggattaccaattgctttggagtttctaaatcacttctcccatctgcatacatgggcaacagggctaacttaccacctcccagtgaaaaataaaaagataaccaaaccctggacctctgttgcccctccctctcccgtgcctggtttcctcatccttgcatttcttgtctggtgctatcccttgggaagccagccaaccagtcaatgtctctattgactggaattttgcttggctatattgttacttgataggggcctttggttcagggtgatgctgagagtggctgtcacagttctctaccacaatccttaacagtctgaagacggtcgataaaatttagcaggcatgttgctgtgatggttaattttatgtgtcaacttggctaggctgtattccccagttattcaattgaatgctaatctaggtgttgctgtgaaggcatttcatagatgtgattagcacctacaatcagtttactttaagtaaaagagattatctaggtaatctgggtgggcctgatccaatcattcaaagcccttaagaacaaaaacagatttttttaaggaacaaggaattctatctgcaaactacagcatcagctcctgcccaaaggtttacagattgcaggcctaccatatggattttggacttgccaatccccacaatcatgtaaatcaattctttgaaataaat

SEQ ID NO: 342319 - DNA, 1000 bp, Homo Sapiens
ttttttttttttttttttaatggtcataagggtgtatgggaaataaatatttattaaagaagatctaacattcacaagaacagcaaaagtgagtcacatttgaaccaagaccactcctttcctcccccaactccaaactcagcgagatcaaaactccattcgacgggtacagccaagaatacagggctccctctctctggagctccaaggcagagggctgtcttctcaggaaggacaatctgtcaggaattctcatcttgcctccagtgtgcatatttagatgaatgatgttcaattgccagctccctcataaaggccatcctcagagtttctgttttaagtgaggtcatattgattcagagacagtacataacctgtcaccctaaggcctttctccattctaaactttctggtgttgaatagggttaggcctttggctgaaacctttttccatattcactacattgtccacattgtaaactgtccagtgttgaatgagactggaggtgtggctaacggatttccatctgttaccttcaagattttttccactgtgaactttctggtgttgaatgaggttgaaacgctggctaaaggatttcacacaatcactgcatttctccagtgtgaatccttcgatgtttaaaaagactggagttgtggcgaaaaaacttcccacattccctgcactcataaggctttgctccagtgtgaaccctctgatgtttaacaaggctggaattctctctaaacaatctcccacattcattgcacttaaaaggcttttctccaatgtgaacttttcgatgttgcatgagggttgagctttggctaaaaaatttcccacattccctgcactcataaggctttgctccagtgtgaaccctctgatgtctaactagggtggaattctctctaaagaatctcccacattcattgcacttaaaaggcttttctccagtgtgaactttttgatgttgcatgaggcttgagcattggg

SEQ ID NO: 342320 - DNA, 1000 bp, Homo Sapiens
ctttttttttttttttttttctttttttttttttttttttttttttccaaaaccacacagcttccctttttattgatgctcaagaagtgaactttaaatgacatttcataagcaaaacacaaatgaaaacacctaatgtgcatgtatagtatatgtaaacatacatagtatatggactcaatcatcctcatctaaatataaagagaacaactggttctttgacctcaaaaataaattcaatgttggcattactgtttttaacttacagtgttttatatttaacaggaaaaattatgaataaccaagtttggtgtggtcatggatttcatgttaaggtataaatagagtttttaagaaataatctgtataataaaataagtttacttttgaatcgcagtacagtcatttccttcaatcaataaaaatattccttgattacaaagcagccttattttgcaaatgtatttcaggaaaatagctctagcaatatttgaaataccacactattttaaaaaggcagcgaagtgacagaatttagatttaaaaatagtatattgcaaaatagttcaacatattatttctaagcacaaggcaagctccattctgaaggatgctttttaatcttataaagcaaactgttccaatatttctgtggtaaagtctaaatatttacaataaaagatgaatctttacacagacaggacataaacttcaatacctaaccacaatgcaaacattttacattatgacatcactctaatgtgaagcttagtttgttaacatgtgctcaagaaggaaaataaaaacaatacagttctgtagctttgtaacaggcagaactctgcaacaattagagaaataaaaacagcaaacaacaccagttctatgagtaacaaaacaaaaaaaatccagatattataaacatttaagtaaataactaatacatccttcctgatatatctttatttgctctcttctgttaaatacgttttttaaaatg

SEQ ID NO: 342321 - DNA, 1000 bp, Homo Sapiens; identical to SEQ ID NO: 160214

SEQ ID NO: 342322 - DNA, 1000 bp, Homo Sapiens
tttttttttttttttttttttttttttctacttagaatatttatttattctctgacatgacaagacacaaaaagttacaacttcttaaaactcttcaaaagaaaaaaatataattctgtaagcagcagcagcagcttccaaggttctgatgtgacgggaggggcagctcccaggagcaaccgtgaactgggggggtccaggcctgagccccaggtagtgtcgctgggaaggggcctctgtggagggccccggttttggggacacagcaccagcacatcagggtctgtcaccaacacgatcacatggccagggcggggcagggagagcttcggctcacagcagggatcgcccggtggcaggggggatggggcttctgaagtgtggtcaggggccttatgcccggaggcgggaaggatggggcttctgcagtgtacccaggggccttatgcagaggctgaaaaaggagggtgggccctgagaggacttgggggtgtggcagctcctggccctccctccagagcagggcaggcaccctcaggctccacactggtcccaatgcccgccctgctccctggccaatcccaggccagggtggaggactcaggagagaccaagctgggtaagttagttcctggacggggtcaacagagcctggggcacacacagcacacagagcgcctggccacggcgggaaggggggcagtccccagcagccccatccccaagggccaggccagatccccacaacacacacacgcatgcacacacacatacacacacacatgcacacagacctcacaatctgggccccagcctggggtgggagctgaggagcccaccagaaagtcccacagtgggtggcgggcttgccccaagagtcagacctcagggcaacccctcacttgggattcctggctcaacagagagggcaggagaccccagtcctcttgcaaggctggccagggaggcagagtcaagtcctgccaaggcgacaagagcg

SEQ ID NO: 342323 - DNA, 1000 bp, Homo Sapiens; identical to SEQ ID NO: 160215

SEQ ID NO: 342324 - DNA, 1000 bp, Homo Sapiens; identical to SEQ ID NO: 160216

SEQ ID NO: 342325 - DNA, 1000 bp, Homo Sapiens
aaaggataacatagatttatgtttatttgcattttatgtttccttatggttcatatgagtttattggaaaattagcaacatacacatcattttggggaatggaaagtgaggcagagtaagccagaacattcactgtaacattataagcaagtagaataaattgataataccttcaccagtaatgcactttccctagtggaaataaattatttgtataaatagcctcttgatgtttgtgtgttatttagttatacaaatcacatttttcttttttacatatggcactttaatgttagtactgaaaatgttttttctgacattttttcagtaattgtcatttacatcaaatatgcagctagagctaatagaaaaacagttaaaacaatttgttgtaatggtgagatatttataaggaaacatttataaaagatcttctgtaagacagcttagacttgaaaatacatatcagtcttagagtcattcaggtgtttttacaaccaaaagtagaagcaccttttaatattcatgcttaatatttataaaaactgaattggagggttttttgtttgtttgtttgtttgtttttttgagaagcagcagctgcatttgtaaaaatgtgaaagtgccagttcagaggtgttgtagcttgccaccttggaaggcgtgtgtgtggccgtagctctgtgaacacacgtgtgaacccggcgttaggacacccgggccctccttcgtagtgtgaacactctggccgtgtcctgcagcttcgccttcttagctccttgctgggattttccagcatcccttagacttgtcctcttttgtcctttgggtctgaggtcacactgggcctcttggctctccatggagctcagtgtgggtgtgtcttgccggcaggcaggttccggggccgcagcatccccatcgcccacccggatgttcctggggctgtaggccgccagctggcacagggccacggctgccgtctgcttctgctcctcgc

SEQ ID NO: 342326 - DNA, 1000 bp, Homo Sapiens
ttttttttttttttagatgccataacttcatttaatattgatagcagctcaatttaaattttgaaaaagcaaatacatttaataaaattggtgtgaattattacatattttgatggaactactgtacagaatgtatacatatataaatctatagatagaattatatacatttgagtatataccacatacatattttttccactcacatttttctctttagtaaaacaaagcagttttactgtacacagaagtgcaatgctacattaagtcctgagtaatttaaggtatcattaataaactgctataaattctagttttccagccaaagatccaatagattctgtaacaaaaaatgtgaataatacttaaaaatatgcatttagctttgcgttcattttgtgcttagcagaaaaagctcaagaatgcacagtagccatttagatttgggagaatgttcttgaatattcaaggttaaataaatatcctaattgtagggatttatagaagttttaagtaatgttgtctacatccaatttgtcaagcatggaagactacagtcatgattggatcaaaaaatcccttttgcagaatatgaaattctgtgtaaacatcagtgtttgggttttatataaaagttctgattcaaatgagggaaaaaaagaaaaaaatacaatgaaataatttaaaatgcttttcttggaatatagccagccacatggaagaaatataaaaaatacgagtatattttggtgaaagaggaaaccagatgaaagtcatttaagggtggtctggtaagccacccactttgggaggtcccaggctggctgggctcagggaacccacgatggcccaaccacatctatcttgccacaggggacgaactttgctgcgcagtgagaaggaagcactgtgggaaaaggccacgttcaaccgcaatggaacggtaacggctgcctgtcagggccacatcagcaggcagagcatcccatccccaaactca

SEQ ID NO: 342327 - DNA, 1000 bp, Homo Sapiens; identical to SEQ ID NO: 160217

SEQ ID NO: 342328 - DNA, 1000 bp, Homo Sapiens
tttttttttttttttttttttttttgccaaaatgaaagctttaatgagtgttactcctagacagtcacgtctcagcttctgccagcctccactgtcccagctctcttagctggccgacaggggagctagttgctgaggggtagggatctggagtctaaagagcagagccaggcaaaaggaggtacaggaagcccccgatgggggctgggctcccggagtgtggtgctggggggtcatgggcttcaggccggcccctcttcaggcattcctagcaaagccaccaggggctccaggggtgtgggggtccccatgggcacagggtgggtgcgttcatgcttgcgcaagtcgctggcactcaagaaggccttgggacaatgggggcaggtgtaggggcgcactgagctgtgagtgcggctgtgtttgcgcagcccagcccggtcagagaagctcttgccgcactgggtgcaggggaagggccggagctccgggtgtgagcgctcgtgccgacgcagcagcgtcattgtggagaaggtctccttgcactctcggcacacaaactgggggggcttctcgtcagcctcctcaccccccgcctcgcctgccccttccaagggaccaggagcctcccggacaccagcatcttggcattccacatgctccaccgtcatgcccaccacctgccactgtgtggccatcacaccacctgactccgggggcagccctagcagccctgctggagggtcccccagccccgcccctgctgccggggcggctgaactctcacctgccacgcccacaggcagcgccaaccccaccaccagctcctgtgcagggggcacacccgcggcctcactgcttcgatgggtccgctcgtgcttcctcaggctcgacgacaccacaaaggatttcccacatgcgttacagtggaaggggcgctcccccgagtgcacccggctatgcttcgtgaggctggcacgctcggcgaaggctcgcccgcact

SEQ ID NO: 342329 - DNA, 1000 bp, Homo Sapiens
tttttttttttttttttacagtcaaagttttttttttatttcagaagaatgaggcatcgcttaccaagcagtggttataggaatgattaatatctagtcatcttaagttgcaaaaacacattaagctcctcagaagatgcaaatttttaaaaaatgcaataaagtaataattatattacatacttgtgacttcttgtaagaaatccaaacatggtcgactacttccagaaatacttattgaaacagccaatggggtctgtccttcatagttccgtgtgttcgtgtctgctccgtaattatataacatccgtgcacacagcacatcatccctaagggcagataagtgtaaaggagtctgtccgtcttctaagcgacccaagtttgtgtctgcccctctctgaaggaacattcggcaataagagtgattgcttttgatcacggcgtatcgcaacaggaaaccattctgaatgtcgatgttggcattgtggtccaggaggattttcacacagcttgacctctctcggataatggcgagctgaagcggtgtggtacctttatcactgagtgggtcaacctcagccttgaactccaggaggagccggacaaatgagtccctgccgtagtgggcagccacatggaggggagtccagccgtcattgctttttgcattaatgatgtcgctcctgtattcagattctaacatcaagcgtgcaatgcgggcccggccatgcatggctgcatagtgaagagccgtgaagcctccgattaagtctttaactgtaggatcagctccgtgttctagaaaaacccgaacacatctttcctttcctcttgctgcagagaaatgaagcagagtccagccattcgcatctcggccattcggggaatagccttgttctagcatctttcgcactgtgtggacatccccagcagccaccgcggcctgaatctgcaactcttcctggagctcagggttccttcgacaatgatggtgtaacat

SEQ ID NO: 342330 - DNA, 1000 bp, Homo Sapiens
ttttttttttttttttcttttttttttttttttttttttttttttttttttttttttttttttttttttttttttacataaatcgaggcttttatttacatcataggacaagaaaaggatacaaaagaagtctcttggtcaagcacatcaagcgaaagctctaaaactcaatactcagtaaggtgtgggcactgatattgaaaaaaagaaaaaaaaagaaagaaaaggtaaaaaggtaatctgtgacacaatccaaatgcttacactccagggattgagtaagagaaacccagggcagccctgccacagagaatgacggctcaggttgagtgacatctgagattcatcttctgtacccgtgaacctgactcccaggacaacccctaggaggttttgacttttgacattagtgagttaattcttaaccagattcttaagaatttcagggccaaacaggcttgaatgtacggtttttccaatttgggggatgggagtggggaagctcttcctgggacagattcccaggcaaggaaaggccccagcagctctgtcccctaccctgggctctgcctccatctccccacgagaaacttgtgggctgcctggggctcgtcagcagcctgcacaggctctcactctctttcccactcactatgcttggctttttcttccacttatgactatctctccctttctccaacacccagtgttgtggggcaagctgtaattatctcacgtgtgtgaaaatgtgccatatccactttcatcatctgggctaaaaccagatcacttgtttcacttttcctcacaaatattaacaatgcaggaattgggtcccagtgaatcttcgacatgaagttgaagcttcaggaagtgaagcagagtctagctccacagcttcaaccttctcctctaccccttccttttttctgtctgtctttctgtctgtcttggtagggcttgattagagaagcatgagcgttgaggcctcctttgtatg

SEQ ID NO: 342331 - DNA, 1000 bp, Homo Sapiens
cccaagagccaagcagactttatttctgcagcaatctctgctggtcagggtgcctgcactcctctacccactgcccttcatggctgctgcagtggccgcagctgtggcccatggccagccacactgtcaaggttcagcgatgctgcagtcatagcagaagttgaagttggtggggggtgggggcacagggggtggccgctcggggatgggcacgttctccagctccagcagacgcagcttggtctccatggtcagcagctgctccaggtccagccgtgtctgctcgctgcccatgggactgcccagcaaggcactgagcccatctgtccacaggtagaactcccgcttggagggggcaatgaagttgaggtacgcttcctcctccccacggtcatagctgattgagaaggccaactcatagaggtccttgttctgcttcccggagcccttctcccggacatgggggcagtccttgcctgtcaggagtgccctcatgtcggccacagggagttgctcgggcagactctccagggtaggcgggctggcgccctcctccatgtctccgtactgcagcagcttgtggttgggggacaggcagcagaaccacagcttatcctggcgccgccggctgctgatcttgcggaagagcgtcccctcacagaggcggagcaagcgctgctggcggatcaggcccatgagctctggcttcagcttctcccgcagctccagtatagggggagccagtgtgccctcctggtgcagccgttcagtctgccgcagccgcagcacctccccataagtgagcgcattcaccttggttcggaagagctccagggaagtgggcttcagggccagagtgcgggccagctgctcccgcaccacctgcatgaccttgtcgaagtcctcctgtgtagcccgcatctccttccaggtcttattcaacagctggatgcccacacagaagagctcgtggaagctctggtcttggccgaagaacatg

SEQ ID NO: 342332 - DNA, 1000 bp, Homo Sapiens
tttttttttttaagcacaaagaaaggttatattttatcatgttaaaagtttcacagagataacaggtttacaattcaaattcccatgtcctgaaaactggcctcttaaataactcacctctcaaatcacagacgtgcaataatctgaaattattataatctaaagacttaaggaaataaccaattattacaattcatgttcactgtgaggaatatctagctatataaaatatagctacacaaaaccagaactcagtgaaacataacttttaagagcaagaaatctgcttgagattcgtatcagtagtcattaaacgaataaatgctaaaggtttacattcaagtgcttgaaggactactgcagagaaattcaattactaaaaacctttgctcagatgcctgtcaggcatattaaggatgggatgatgtgtgaaccaccagcagtggtattaaaccccaatcattttcaagacaagtaagatttagagctgttaagacattccagaatttggttcactgacactaaaagtggtattttaaaaaaagacctcatacagtctgctagcatatcatactaaccattagaggaggtagtgacacaaagtgttggaatttaaaatacaagatcagcattaactgtaaaccattctaaatcactgtatgtaactctttaaaacatatgtagtgaaaaagaattagaattcatataaaatcagaatttaaaaaagcaaaaaaatagaaatatttagtgaatttactcaaatgaaggaagtttaaatgatacaggaatgaaaaatattagaaatctatgtacaataaaaagtaaatataaattagccaagtccatggacatttccagttaaacattcatacaaaaacatattcacctttttccttagatagggataacacattcatacatgacatgatgattctggcaaaaaatatcagagatactaaaactattctcaagttttaaaaatggtgcagagagtgtttca

SEQ ID NO: 342333 - DNA, 1000 bp, Homo Sapiens; identical to SEQ ID NO: 160218

SEQ ID NO: 342334 - DNA, 1000 bp, Homo Sapiens
tttttttttttttttttgagacagagtctcactctgttgcccaggctggagtgcagtggcgcgatctcggctcactgcaacctccgcctcccaggttcaagtgattctcgtgcctcagcctcccgagtaactgggactacataagcgtgagccaccacacctggctaatttttgtattttttagtagagacggggtttcaccgtgttggccaggctggtcttgaactcctgacctcaggtgatccacacgccttggcctcccaaagtgctgggactgcaggcgtgagccaccgcgcccggccaacatggtcttctctttgatgaaggcccagctgctgaaataccgcccacgtttgccatgctgcacccagagtggccccgagcctccactccctcttaggaaactactgactcccaggcctgagcctctcctggcgtcttggcttcctcagaaggcctgtcaggtacagctcccacaacgccctcatcaggacctgagtctatacggcctgcgccaggtccaggacccagtggggaggccgggcctcgggaagccacacttctggcaccacacacagcagatgagtacagccattaggaccaggagcagcgtccgcagtgccagggccaagaagacagggccgccatagacaggaaagccctcggaggccaggcgcagggggcagatgcaggacagagctggaggctcatcctgtgccctatgcccactggtgcccgtcctgtgcaccctccgggtggtcagagcagcccccgggctgcaggtgaggcggggccccctgggaggggactgagccacgtgcagccccacacacctgcataaacgtgtgacactccatcacgaagctccctttggttatctgcttaaacttatcgcaaatgtctggaacgctggtggcttccaaaatcaactcctggtgctgcttaattaaggtcagggccacccggaagataatcttcgagccttcgttaaacaaacagt

SEQ ID NO: 342335 - DNA, 1000 bp, Homo Sapiens
tgataaagataatacttttaatgcatatatgataaaacaaaacaggttaaaaaaagtatgtaacagaacaatacaacacaagtgcccagagtatgaatggaagtacaataacctatccactaaatggcagtgtatagggatatcactgaattcagtcctacgtgcgcagggctaacctctttatacaaaacaaatttttagtcccctttttattttttaaagcagcttctttgctttcccgagaagcaaatataccttttcataatttttgttcaacttgtacttaaacagtttcaagtatacagtactactttcatttatgcaccaattgttaaataggtctttgggttgttaggagttaaacttctaacaaatgcagaccaaactgttgctgcactacacacaaagaaaggaaaaaaaaggtatcttattaaatttcacatggtctacaaaatcataagtgcactagagttcagacacaagcaagtaccttgacagtatagcattaaattcacaaatgaaaaatgtcctgttcacataatcctcagagtctatcaaaactagaattattacctctttcagaaaaaaagaatgacgtcagaggtaaaagtgagaaggtagagttggcacagattattagtatattctacaagaaaagggtgacactggtataaatatagcttgtggcaatacaaactgcaatacacagggcagacacatgattccactgttccagattccctctgcggtaaaactgtactatcctgcagcgtgagctcaaggatctgtgtgttgtccagtaagggttataaagtctctttgtacactaaacacacctagaaaatgctttctaataaagattgacgtttggggaaaagtcacagttttaccaggcttcttgctgcttttaacaaatgagaaatgttatgttctgacctgagaatttaaagctactgaattacacctaactaaactaagagaaattctctttgaaacatct

SEQ ID NO: 342336 - DNA, 1000 bp, Homo Sapiens; identical to SEQ ID NO: 160220

SEQ ID NO: 342337 - DNA, 1000 bp, Homo Sapiens; identical to SEQ ID NO: 160221

SEQ ID NO: 342338 - DNA, 1000 bp, Homo Sapiens
tttttttttttttttttttttttttttttttttttttttttttttaacaattttttaaacaataaaaggttttaatttattctaacaagatatgtttttcatactgagttttagatttttaatcactttttactaagatttatatgtcagtgactatcattactgttcatggtttatatctgagataaaaggcaccagaatataaaataataaaccatagaaaggtacactttctgataaaaacctacatagactacattaagatacatatagtaatagtaatgatacatgaaactattagacagctagtgcctttcacattagaattacacacacacacacatacccctttatatttagaacatttaacttgtaggaaaagaagaggcaaaacatttctgggcaagaggaaagcagttgcagtaccaaaatctaaacacttttggcaaggcttctaaacagcaaatgaactaattatatatccaaaacaaatccattgaaaaatgccatttttgtttcatagacagagaataatggcatgctcatattagatattatatatatatttacatatatatgtgtattatatatgtatattatatatatgtgtatatatgtatattacatatatatatgtaatatatatatatatttacaaagctcttgtaatataagtcccattaaatggcccagaagttgaaattcagttcatgactctggaattcgttcatgttcttttcctttggagaatggtttgtagcttagtaggacatgggaaatcagtttactgaaacccaccatggtcaaagtgaatgcttcttttttttttcttggtcaaagcattctagttcttcctcctgtgaagctgggagaatccatcttttcattcctatctcagtgatctgaggaagcttggtcacagcatataacaagtgtctaaaccattgtccacaatctcgaaaatttgatggtcgaaggctaatatccagctcgattagct

SEQ ID NO: 342339 - DNA, 1000 bp, Homo Sapiens
ccaggaaaaaaattaaatctttatttttaaaaatcccacaaatccataatgaaatcatcatctgaaaaaaaagatggtagggaacaaaacgtgggatacatttaaaaggcactagattcattaataccagagccattctggagatgccatgtaagaaatctggagttactctaaatcttcttcttagtggtatcagaactggggagaagggtccaagcaaagtgttgcctttgccagtgtattcggatcgaggttatgaggaagagcccttttcctttgtcagtgagtttcatgttggtccaccactccagcgctgagcagctccccgatggccctgtcatcgtatctcaggacctccttcaggatgtgcgttgtgtgctgcccgagcagggggggcggcctggcctctgacatcttgaacttactgtatctcacagctgggcctgggacggaaatcttccccacagttggatgctccatctccataacgaggccattgtgtaatacccttgctgatccttgaagatgaaggaaggggccatgggccaaggaatgcagcaggctttggaagccagagacagcgttctgaggttctgcaaatacattcttcatgttgttgattgggccatacgggactccactgccttcaaaaagatataaccacttgctggtcagttcttcttcaaaccgttcagataatattttaataagctcttttctattgtgtacccgaaggtggttagttttatacttggaattatcaatcaactcaggcaaatccaagatcttgcagacggtggcaaactgctggttatttcctgctccaactacaatatagccatccttggttttaaaagcctggtaaggaacgatactgccatgagctgtaccccaacgttttgcttccttttgaccaataagataatttgcagctatgtgagacaaacacgccacctgggatgacagcaggttacaatcaatgaacagtcctttcccagtt

SEQ ID NO: 342340 - DNA, 1000 bp, Homo Sapiens; identical to SEQ ID NO: 160222

SEQ ID NO: 342341 - DNA, 1000 bp, Homo Sapiens
tttttttttttttttttataaaatacatcaaattttattagttaaaacattaaatctatgatgcattcttaaatagtagcaaaatgtgattccagcagttaatgtaaatcctagtaacaaacatgggattctggttactttgattaaacttcttatgctcggccggccgggcacggtggctccagcccgtaatcccagcactttggcaggccaaggtgctggcattacaggcgtgagccactgtgcccggccagtagagaatttcttcccatacccacagtgctcttctgtcagaagaagggcacctgcagtgcaataaggatgataagtgacatcatagttcatcatcctctgccctttccaagtgctctctaattcagactatatttaattttaaaaggcagagtctttcttcttcaggagcttggagagaaataatcctcacctaatgaagtgagtgagcccttccatcctttgattctttcccgaacaacaccatgttaggcatataatcatgtataaaatcagcacattgcaaagttctggttggaagttataaatagtagccttttcaataaatcttaaatacttcaacaaaacattttataagctgaaagtaattggccatttccaaacatcctacaacctttgatatgtatcatgtaatgagttttaacacatttggacttctgattatgctgaagtatataatatcagagggttatgaggaaactagagactgagttctactcttcctatgaatcctcacctacagttgtggtccaggagtaacagtctcagcatgcatgttacgtttgtgtgacttcatcaaagatgcatcttttgatgcctattgagctctgagacctggataaagcttctgtcatacatagtatattcacaggatttgaactctgatgtctgttaatgcttaaactcatcaggagtttgccacagtcaccgtatttgtaagaattgtctcaagaatgaattctctgat

SEQ ID NO: 342342 - DNA, 1000 bp, Homo Sapiens
cagggtcctgtcttttttattatccagacacacgtatcagagcctgctaacatccagttgtgggaagagcagcaagcagtacaccaggagccacaggaagagaataaaatacatcatatccggctgctggacaagctgtgtcagggagtcactctgcgggctgtggctccccagtgacatggcttctcctgagctgttggccttcctggttaatattcggtttcttctgtcatccagatctgctgcgttcctcaactgaacatagctaaaatgatccgattccgaagacctatgagtatgtcgtcgaaggtaaatgctggagtcactgtgactagtcctggaaggaatgctgtagtcgctactgtcttcttctaggtcatctgaggattgaacacttcctggtgctacaaatagtgaactttctacgtggtccacatgtttccttttttccttttttttactactgattgattctttcgttacattttcttctagggggtttgctatgttttccaggtttggggattcctgggactgatggctgtccatggggtcattctctttggtctccctttgctggtggtcctcatggggggccagtggagcgggttctgaggctggtgtggtacccacaccacccctgctgagatacagcacctggtcgctggcactggggaggctctctcctggcaccgaggaactggagctgctctgagagccatcggcctcctcctccctggagtccaggtctggcatatagccctctggctcttcgagatccatttcttcattttttagatcctccgggtcttctacataagcctccaaaactgcagccaggggaacctcatagtgtgggaaatagaagaggtcgtggggaatgacggaaacctttgagaggggtggggagggcttgaaatccaggccttcttcgctgtgactcccaagggtctccaagctgacacagctgcttggggggctggaagataattcctcgccc

SEQ ID NO: 342343 - DNA, 1000 bp, Homo Sapiens
ttttttttttttttttttttttttttttttttttttttttttgagatctgagattcctttaatcagaagcacgtgcgtcccacagtgtgctcttcaagccccaaagggcacgcctctaggactgcgtcccttagagcgaggctcgggctcttggtaaaaaagcatttgcttgattttatttaaacaatggtgaatcttcaaggtgccagtctacatgcccaacagtcctccaggcttcaaggccacagtcaccgtcactcagagactgcctcatttggcaagagagaaaaacagtgaccaccacagagggcagggagtgacaaagcttgtaggctaatgctgcaaaagccgctagaaactggggccacacacaagagccagcaggtgcgcctcggggtctgcgtggctcccgctgctgccgccctggaagggcgctttctccactggcttttctcgtgagtctttctcccaggccggccagattaccatttaggaacctttgccaattctctgactctgggaagcaaagtaagcatttgccaaatgcactgaggctgggcaatgggaattcttatgttctttaaaggccagtcaaggagaaattcatcaggaaaacatttcccaggacatcctcaggttggtctccacaccaaggcacacagactgtcaccttcccgaggtccctcaccagcaggacgtgtccagggtgcccagcacaaggacttggagcagcccagacacaaggacaagcggcagagagggaaggctcgctggggacgcccactcgggcacggagctggctgtgggctgggggaagggccagctctggacaccgtgctctctgttcttcaggagatgccaacctcagccaagacctcagatggggtccccacacgcaggtgttaacacaacatggggcacacagcagtggaggcatcagtccatggggtctccaggctggagggtcccactttccaaagtgtgtccccagatgcaggtg

SEQ ID NO: 342344 - DNA, 1000 bp, Homo Sapiens
ccttcgtatgccacctttattgtgtttccccaactcctgggccccatggtagactggccacatggctactgggctcctggccttcctagggctagcagctggtgggcaaacactctgccctgctggagagctgccaggccatgcccgggcacaggctagtggggctcctggctcagtcctgatagcagtgccagggaggcgtagagtgcacacatgcggccctgggcctgcggctcccagcacacgtggggagtgtcctcccccagctctaggccacactcgtccagcaagacccaggccggtgctccttcgccccagctgttccccaggagcccggggggcagggacatggtgctgcgctcctgccacggggcactctgctccaagaggctgcccaccagctcgagcggccccaacagggtctgcgactccagcgcctccgccagcagcttgtgctgcgtttcactcagcatggtcagtgcccccagcaggtagacaacagggatagcgagttccggcaccagcattccggaggacaacaccaggcactccaggacagcacctgctggaccgtccaggggctccaccggcccaaggctctggccctgctccagctgtgggcacgggaagggcaggtgagtctggctggctgggcaggccttgtgtgccccgggcaccctcccccgctcaccgcctcctccaaggctcgcagggccagctggtcccgcagcaccccctccaggccctccagcagcagctggcacagctctctgtccaaaagctccagttccttggagatggtctccacctctgcccgtaggccctggaagtcttcagtgaacgccccctccgcagggaccccatctgtcaggaagttgtggaggcacctcatcatggagaggccagagggcagctgtggccaggcgccttcgctcgtggaacgcttgtggcctgtcgcgggtggctggaaggtcctctgcttcttatccgggaagagaag

SEQ ID NO: 342345 - DNA, 1000 bp, Homo Sapiens; identical to SEQ ID NO: 160223

SEQ ID NO: 342346 - DNA, 1000 bp, Homo Sapiens
tttttttttttttttttttttttttttcatgtcagaagacctttattacaaatgttacaggcgatgacttgcagggagtcaggtcactggaatcaatagttaacaagatggttgtcctttggggccacaggtgtgttgctaacctccacttttcttcctgatttgctttgctttccggggtttgaggatggtgtagtttacgtacactgtatactgatctgacaggaaggggacatagaatgcccgcagcagctttgaagatctagaagcatcaaggaatggtctataggccaagctgatccattcttctttattggatgaatattttggctcccggggtgtttctctcatggtgtccaaatccactaaataatggcatttactgatatcaatatatctggatggctcttctagattctggtcattcatgtcagtaggaacaatccgggtggccagaggtccttctgcaaaaggttttggtaactgacctctgaactctgatggaatgaactgaagctgccaattgtcaggaagaaggaagctgctgggaaatcgataccactcttttcccacacagacattcacaggtctgccttctgggacagtgtggatggttgggtctgtagcaattcggtaaaattctggatacaaatcaaggggcccgtgatatcctctgaacagtgccacagagcgagaaaatgacaagagcccaaacaggaagacagttcctaatgccagccaattcgatgtcacagtatagtgctccaggcgatatcgttgaaacacaaagtggtaacatttctggaagtacagaaaactgtgctgaagtgcagagagagccacagcgccacagagacatataagtggatacacagggaaaagaaatctctcctctttgtgaggctggatgaagaaaattataaaccaaatatacattggagccaaggtaagccaatacgggtggcctaaattctgaacatgaaatctctgcagcaggtat

SEQ ID NO: 342347 - DNA, 1000 bp, Homo Sapiens
gagaaagcacgagtctttatggagctgtgtcagcaaaaggcaaagctgtcaggtgcccatctccacctccaccacctctgcccaggcgccgaggcccatgtccttatggattagcaccaggctgggggcggcatctggctcctctggcaccacaaagcacttctcctggctttctgaaatggtgacctcaacaacatccctggcgggggagacttcctcctctctgtgtgtgtccagcagttgtggctcagcctgcaggagcaccacagtgggctcagaagcagcagaaggcacagagggtgggctgcagggtgcctcaggccggtgactgagctgatgccgcctgaggctctgcgggagggtgtagcccatgccacaggtggggcagcggtagggcttgtcctccaagtgagatttgaggtggcgccgcagcttggtggccagcgtgtaagcacggccacactggggacagggaaagggcctctctccggagtgcagacgctcgtgagctcggagcgtgtgtgggtctcggagggccttgccacacaccgggcacaagtgggcctccccggtgtgtgagatgagatggcgccgcagttcaggcagctgggggaaggcatcggcacagtgtgggcagcggtaaggacgctccccggtgtggagccgcaaatgcccacgcaggttgccccgctgacgaaacgcccggccacagtgcgggcacaggaaaggcttttctcctgtatggagcctcatatggttccgcagggagccctggttggccaggggccgcccacacacagggcatgggcaaggggcaggggcagctggcacctggtgggtcttgcgatgcagccgcagggagggccggcgggcaaaggccttgccacactggtcacaagcaaagggccgggcacctgaatgtaccacctggtgctctttgaggtctcgctgggtgccataggccttgtcgcattgtggacaggggaagggccgcacccca

SEQ ID NO: 342348 - DNA, 1000 bp, Homo Sapiens; identical to SEQ ID NO: 160224

SEQ ID NO: 342349 - DNA, 1000 bp, Homo Sapiens
taaaacttaagaaactttcaaaacagtaaacaattttatttatatttattgtatacatacacaagaaaaatacttatatttatttttatatcatcattttaaaattgaaattaatttgtagatatacctaatcaacatctgtaagaatttcaaaattttcaaaaagccagataagccaatttatttatttaaaactattaataggcatatcactaagattatatgacagtaaaaaaatgagaagattaacatatttgcttactagtgtaaacattattacactatatttagctttgtgtagagctttacatatcaaaatatttaatatataatactatttgttatgcaggttttctaataccttaaatttttactatgtaagcaattatttgatgaatttacaattctcaaagattgagactgaaaagcagttcactgatcttactttcagaacaagcatctctttatttttctacagtaaattatacttttgattatagagataagaattatgagtattcatcatttttaaagaataaacatataaatcttctttaagtgtactatcaaataaattttataaactcagtaattatcaccacatatttcaaatagttactaatcccaaaaatatctgttcaccttgaatatcttactgacatgttctctatgtgagaaaaaaaatagtttcttttgttatttgatggcaatcatgagaaaggtctttttatcatcaagaaaacagaaaaaagtattggttgagtgatggcagaaatgtaggccatgacatctagatgaggtctatggaaatacagcaaacttttctaagcataatgccatgtcatcattattagcaatttattttctgagatcactgatgctggctatgtagaaaggcttatttaaattgaaaaagaaacatcattatgtttctcatagccagctaatctcatagaacacttacctgatttgtgtggtttactgaattttgtgaatttta

SEQ ID NO: 342350 - DNA, 1000 bp, Homo Sapiens
gatgtagctgctggactttgtgttatgatgtaaaatctaatacttcatctttcttaatgagatagattataaacattttcttacctgtctggcaattaacaatttcttcacaactttaaggagagaacaagttctttttcagaacttaaaaaaaaaattcatgatatacatacacacatacaaacatatattcacacaatgtttttgttgctgttgttcttttctgttttgtaataaccaaaattgaatatttccaaggataagttaagtaaactatttgtgttcagactatattactgtggataaattcagaacagcttttgaaatactggccttattagataatcaaagagcataaaaattatacaaaataagaagagtaaaacatctcttaaggaaggtaaaaatatggaactggcaacaaatatatcagttttaaataaaagcttctcatcaaactggtcttcagtccaattatctcaatgccacgctttgactatattcaccttcctttctaagacatcagaagtcaccagagttgtaaattctgaaaagcttcaataatttatgtagcagataatttcttatagtccacagttttttgcttccatagacaatgctggttctttgggttcttgtttaacttggctcacagaaatggtactttctggattttcttcaataagagctgagtggttgtctataatctgtattggaatagtctgcacatctcccaacagaatccgatgaacagttccttccagattccctgtatcctcaacatctccaacttctaccagctcgtccattgcaactagattttgatctggttctggaaggttacccatggtggaggcagtactattgttttgggttaagcatgtatctctttgaaggctatgactttgaccaagcagtagagaattattattcattacagcacttcctattgtatccagaagtcctgaaggactagaggacggctggttatttactgata

SEQ ID NO: 342351 - DNA, 1000 bp, Homo Sapiens; identical to SEQ ID NO: 160225

SEQ ID NO: 342352 - DNA, 1000 bp, Homo Sapiens
tttttttttttgtgattccaagcaggctcatggactagtgcttaccataacccaggtgcaccagcaatctgggatatggtctcccacagaagcactgcatacagagaaggtgcatttatttattcagtagacagcaagatttcccagggagaggaaaaccgccctgccccacctctaccctggcttcccagacttctaaggtctttattcagcagtgactttcatttgatgaggtggctctcctctctcacgtcaccctgtcggccaccttgaccaataggtcaagggagacttctgccagctcgcttctgctctgctgatggcctcatcctgccactgtggcttttcaggctcttcctcctcttgccctggcggacgtggggccccactctggctttcttctttgtaccaggccctcgcaatgtattcttgctgcttgtaggagaagccagcttcttggaggagcctttctcagacaaaccctgggctgggccagaagctaaggttgcactggaagattttctagcagctttctctgattgttcctttagcaagtccaagactgtcttggcgagtggtctgaacgggatccgcttactcttggttctcacgggcactggcttgtatttgcacttgcctgggggtgctcgccttgaggggtcaacaaacttgtaaatagatccacgtggtgcataggcacttgggtaagaggtcgccaggaaatacagctcccctgcttcatcttcagcaaaggagatgatgaacttgctatgggtgctgatcagccctgggaaggcacaggacgtggtgctgcccaggcaaagatcctgcttcttccatttcttgttttttctatcttcctgcaaagccataagtcgaccactcatgaagtctccaaagatatacaggccattgagatttggggattcacaaccacgatagacataacctccagtgactgacttccccactgcatggccataagcatagattggcagaa

SEQ ID NO: 342353 - DNA, 1000 bp, Homo Sapiens; identical to SEQ ID NO: 160226

SEQ ID NO: 342354 - DNA, 1000 bp, Homo Sapiens
tttttttttttttttcgaaattagacatttttattgcttttatgtaggcaactagacaataactattcctatttatgtgcatagtctccagtgacttttctatttcttcatacatctcaaaccttccacctggaataatttttcttctgcaacaaatacatcccttgaagttttcttaatgtgtattgctaggaatactgtctttcagcttttgtgttctatcaaggtctggaaaggtttttctgtatataaaattctaggaagacagttattttctcagcacattggcaacattattccagttgccaaggcttccatgttttttgtttgtttgtttgttttttgagatggggtctcgctctgtcgcccaggctctgtctttaaaaataaataaataaataaaagaatataacaaaaacactttaaaagagaacaatgcattttaaatatatttcctgaaataatattccttagaaaagatacagggtatttaattacctagattttaacaaaatattctttatagaaataattatagtctttaccacagagtcaccaaatctgtacccaatcaaaacagagtcaaatagaccagctctcattcaactccattaggaaacaccaatttcacatagtacttctcttgatgtacagcagcaacctctgctggagaaaaaagggtatacttctaataacaaagcactgagctcaaacctgttttgaacaggaagaactgaaagttagatttctttcatttcctgttaaaccaacacctaagttaaaattattttcaaggtcttaaagacgcacgggccttatcaagtatatcctttctgatttttggataagttggatgtgcttcaagaacctggtgacatatgtcaattgaatccacatatctttttgcttttaagtaattaaatgccagtttgtatcctactgccggatttgtccgattgctatatttccatgccatctcatagttcaaggcagcatctgt

SEQ ID NO: 342355 - DNA, 1000 bp, Homo Sapiens
ttttttttttttttttttgcatgtgcaaaacaccagacacatacagaaacaattaggattctatgagggcagagaatttgtttctctaaatggggctgttcaatgtttcacagagcacaaggacaagaaattcaatatttttgagcagaaggaagaactcatttgtttttataattccttaactagtttcaaacatattgcatgtactatgtgccagccactatctgcttgctttatattccctatctcatttcatcctcacaccaagcctaagaggtcggtaccattatccccatttaccaaatgaggaaactgaggatgcccagggccacacagtaatgggggcccttagtattctgtttcttaagagctgctcctttttcccctctgaaaagagataatgtggtacagtgggaaggatactagactaggaatctggattctaatctcagctctaccacaaatcaattataccaatgtgcgactctcatatgcggatcctgtcctcaggtgggattgtgatctcagacctggattcagcaaacacctgaagctgtgactctcttactgggacacagtctacagttgagattgggcctctcttgcatggatcgtttccttaacctcctgaattcagcaaggatgtaatttgcaagtaactactcctttgaaaatcagagttatccacacttgtagtgaaattcattcctgatggtgcttactgggttccactctggtgtcggaagctgaaccggagactgaccaggttccttcaaggatcctcagccatgcaaaagggaagcgcctttctgagggagccaagcttgcatctagaccttcacagtggtgcaacataacttctcagagatcggcatggtaccattcagtgaatttgggaatttcaggagaagaccaagtgtcagcacactgtctgctgaagtgcgatacctggcttcttaggaaaggtaataactcactagaagcaggcccctcagatcca

SEQ ID NO: 342356 - DNA, 1000 bp, Homo Sapiens; identical to SEQ ID NO: 160228

SEQ ID NO: 342357 - DNA, 1000 bp, Homo Sapiens
accattctagatttttattaaaaaataaacaaacattagtcctactttttgtctctaacgcttcatgaatttatgtgtcagccttgtgcaggggctgtgctaatctctgcattgttcctattttagtacatgggctactgaaacaagcagagtcctacttcttaaacttcctcttccttacacgtaaaaagcccaccagtcaaggtcttttaattttggtgtacactatcactgaatgccatttataaattctaattttaaagagacccttaattttcaaaggaggactttgatagcattagttttcagaaaagatgacttgcaattctaacttagtacttgaaaggtgagatttttatagggaggcttataaaaggtgtcttagaaaaaaaatgagcgctctcaaacctttcttttgggagtgaggttgtggggctgaagtgactttttaaagtgaagcaactgacactacccgtgggagaagccacctatgcgacctgtggccaaaccgcaaatgtatgtttctgtgcaacattcctgctagagcagccgggctctgagtaaggtgtagctggctagataatcactagggagaggtccagggtgtggggaacactccaaatcacattccatggaaatattagactgtcagagcttaggaagtccccgattgtccatagacgctgaggtgggggaaaggactgaaatgaatgctagcacatgttagcttataaaagagctgctgacacaaattgaacatgtgcaattttttaaaaaggtggtatcgaataacaggccaacagccatccttctcagcatttagacctctttcttctctccactttggctctttgttgagtcacttccatcaggcaaagttccataggataagctatgtgaatctggttgtattttgtccaacatttgtttccctccaagcctttctctctggggttgtgtcaggaatatttccaaaatcaatataagactgttgcagatg

SEQ ID NO: 342358 - DNA, 1000 bp, Homo Sapiens
gcctttcccgggtgctttattacacgtgatggcgaccagtctacaccacagactagatcgtgcgatgccacagaagagccttcccgcttccctccaccatgtcccccttgttggggggggggaaggggggggatgaaaagaggagccggagtgggatgacagcagcgaggcccctcagtaggtgatctggtacacggaggcgtgctccccggagcctgtgacaacgaggcggttgttggaagagacgtcacagcacgtgactggagacatctcaggcacctcgaacacttttgtccccgccggcatgctgtagacgccaaggaagtcgtccattccaacgcttgcccaccactggccaaagggggagaacttgacgctcaggatgacgctgtctttttgccccaccatgtgccgctggctcccgctggtgctttgcagccactgctggccattggccatgcccagcagcacccagtcctcctgggggctgtgggacaggctcattatctgagacttgaattggtactccagaggtttcatgatggtcctctggtcccagcaccgcagacaggcatccggacccccagtccagatgttgtagcccttgaccacgatactcttgactccatcaggataacccttgaggtccctgaccacactctgatcccgcaggtcccagatcctgaccacaccactggtgaagctggcgaaggccaggttggcatccaggttggcatccagggcctggcagttgagacctgcacagggcaactgctccttcacatgcagggagggcgccgccaggtcccacacgctcacgctggccaggttgtagccaccggtgagcaggctcctgctgtttgaggacagcaggcaggtgcgcaggaaggccccaggggtctgtataggcaggtggctctcagggaacctgtcctcagccacctgtccagtcaggctccacaccttgatgcctcttctgccacaggtgaacacgtgccgc

SEQ ID NO: 342359 - DNA, 1000 bp, Homo Sapiens
ttttaatggttatatgctttttatttgtgacatttgaatacccaagctcacatataactgatttcctaaatatcatttaattttatgttgcttttctaattgatttaattgttagttttccttatagtcaaatgcttaatacaatcataaatggaaccaaaaatatagtaaacatttctttttctgatgtatgtaaaaaagatacaggaaaattctgaaatcagatcactataagctagtaaaacaggtgaattatttgattagaaatggactcttccttcataagttacacaaatccttatgtagtcactgaaaattcttactcagaattaatacctgtccagagggaaacagcctgttataaaagctttctgttaatatattttttaaggcaggaaaacaatcattatttccaaacacactttgtttgtctaattctaggagagaatcaccaatttcttcaaggtccaaaatgatcagaacaagaatgacaacagtgtcaaccaaatgatgcctccaactccttttaatgattgtgccttggtacacatttcctcaaagataatggctatacttttcccacaatctttttgcttttgttttctcccagtgtggtactcatggagtatggaagggacataaggtttagagaacataggaagcaatttgcttccatcaataaccagaatgatggattgacataaatcagcacaaaaagataagtgtaattctattcaagtcccttaatgttttgccaattaaggtttttttttttttttttttgaaacaacaacagtgtaatctttaacagggatgttaaaggtaagaagtcaggaagataaaccaaaatgattgagtatgataaagaattttgcatggcgattaaaatagaaaacctataaatgtagaaaaagcaggtctggacttagcaaagaaacaatatagtttggagaaggcatgaaataagttcttttcatgttcactgctggtcacagccata

SEQ ID NO: 342360 - DNA, 1000 bp, Homo Sapiens
ataagaggaaacactttattacatcagtcagaaaattctagaaaatggaaagtattatacagcagagtaaatcaatggttgtctgcatagagaaaaactttataaaggctccaggtgaatacaaaggtgatagattagataaattcattattgtgactctgatgatggtttcatgggattataagaaaattcaagccaggagcagtggctcacgcctgcaatcccaacactttgagaggccaaggcgggcagatcacgaggtcaggagattgagaacttcctggctaacagggtgaaaccccatctctaccaaaaatacaaaaaaggtaggagtggtggtggttgcctgcagtcccagctactagggaggctgaggcaggagaatggcatgaacccaggaggcagggcttgcagtgagacttctggataaatatcctgtatttgtcacactagtaaggccttcattcagtgttaactataatcctgaaggaatacagaggtgtggctacaaaactgcccaaatttattttacttgtaaggactcttctctagtgtgaactctccaatatccaaggagagcagacctttgggtaaacattttccacatttgctgcaatcacaggatcttactcaggtgtgtattctccaatatttaatgagactggactcactgcactcataagccctttcttttgtgaactctctgatgatgacgaagtgaagagatttgcctaaattttttttcacattcactgcacccgtaaggcttttctccagtgtgaactctcctgtgtttagtgagactggagctttcggcaaaagatttcccacattcactgcactcataaggcttctgaccagtgtgaactctcttatgaacacggaatgtagagctgtgggtaaatgacttcccacaatcactgcattcatatggcctttccccagtgtgaactctctggtgtgcaatgaggtggtacttgtgcctaaaaaatttctgaca

SEQ ID NO: 342361 - DNA, 1000 bp, Homo Sapiens
tttttttttttttttttttttttttttttcagttagatcaagttttttattttcttacacaaggtgttatagaaaatccaatctttcagaaagacaaaaacaaagataatcacaatgacataccagtggaaaatttataatcctaataacctgacctaggctctaaatccatgtaaaatttgccttgcttttgtttaagggattggtccaaacaaatggagtttatgaagcaatggatacttgtaaaaggtagttcccactgttgcactgattccagtcttggtttttaatatatacatattttttttccagagagtttagtgaatttcatatgccctatcgtctcctctccacttagaatgctttatagaacagcccatcatgtcctgtggcctcagtttaacccaggatttgttaaaacaaactgcatagaatggcctgttagcaatgaatatttggaggagtcactgctccccatctccaccccgatttccgcaaccttgctctagaactcttcataaaataacatcctgatgtggcctatagatcagagactttatattttctatctgggtccactgaagtctgggcttaaaatccagagctgattctgggcaaacagagaagagtaccctgttgtgtcccagatgaatttttctcactgaattgggaatgtgataagcgctggtcaaaccataaaattctgatatttactgtcatatattttgcttgccaaatagtctaacaaagttctatagcttcggctcttagatctaagaggataaaatgttaggtacaagaatccattattttcatctactaaaaactacgtaattataaactctggaaaacagagcctggaaagcagaagctttaaaatcaatagaattgtgtcttataaagattttggtttaagtgattctattaatttccaagtttcgcttctataggtataataattttctaacccatttagacattgtataagaatgtacatgta

SEQ ID NO: 342362 - DNA, 1000 bp, Homo Sapiens
ataatgacaattctttaggattttatgtagcttgcatatttaacatttaaatatattgttctaggaattggctgataaaactagaaaataaagagaaattatgatcaccatgtgttcactcttcagactttgatctatgaatcagctcactgagagagatacttgaaaacttctcttggtttcttctaatccatctttggaatgtcctccacggatggatgccttgcagttgaaacataaatgctataaaaattaatccccctagcactaccgctgttgccacggcaataagcgtgtgtcctgggaatggcaatggtgcctcatcaacataaatctgaaattcttcaattaagttacaaaaagttactcctgaaatgacggtcactctaaagtggaaaagttcagagccctttatgcttaagttgagacctgaaggattatacactgcagcaccaagaattggttctactaattgtttcattcttttaatattttctggcacagtgtgtttcagtttccagttgtgcctcatgttcacttcagtcacagtaaccagatatggagattgcaatgggacacgtccatcctcgttgataatttccaaagaaactggatattgtgtaattggaaacttaaagcgaggaactttttccctgcaatccgagaaagcaacagcatgtgaaaacttctgatcctttgtgcagttacactcctcccgagtggaaacattagcacactgtttgaatttaccggttttctttgacatgtgaaacatgtttcttggtatgggtttgctaggatctgcatgataaaaattatctgtgagtggaatagcaattcccatattagatggaggcctgtagtttatcggcaaagttttgatgaggttaaaaccctgactgtctttatgaactccactaatccagtcttcaaatgggataaatttgctaggaatgtgatgcatagatctgagataactacagctgcttttcagtgttgg

SEQ ID NO: 342363 - DNA, 1000 bp, Homo Sapiens
tttttttttttttttttttttttttttttttttttttttttttttttttttttttttgggagggagataaaaagatacactttatttatttttctaaccaggaaagaatcatgatatttgctgggtttactgattaaaaactaccaccaccaaaacagaacaaagaccaaaaaaaaaaaaaaaatgaaggagggatgggtatcatcaaaagaaattctgtctcaattacagggaaaaatatttagtttgttcaccagtcaaattcaagtcacagacaggcagcttatacacatttaaagacaaacaaaggtttagggcaggacgagcaacaagcagagtgtaaaaagaggcggggagggagctggagagggcagctggggaataacgtgggtgaggacaggtggagtccatagcccacacgtgaaatgctgcaaagggcgcaggcaggcgattataccccttacagatttccgtttttgtaaaaatattccctatgcacttgatacgtttcttcgtctttgagaagcttaatcttctatccatgtttggtcaaaataagcagaagcgggtaatgaaggttttcttcatatatgtccgggttttcctttttcaacttggagtggaagtttgaaatgtgttcatcataattttcatgtctttggatacagaaaccagctttttcagctagattgcaaaactggtttaaagtattccctcggcgtggggcaaataccatcgctttccccctgggctggagtaatctctttattgcatcaacaaggctggctctgtactggtccagaaacaggcagtcagcacacataacaatgtcaaaatgtccttccagttgagagacatctgtctcattatcccatcgtaaaacgcagcttgatattttctgggtcttaaacacaccagccttctgattccttgtgatgatgtcttgcacatttctgatggccttttcattcccatcagttaacagaacttctttgacatc

SEQ ID NO: 342364 - DNA, 1000 bp, Homo Sapiens
tttttttttttttttttgtggctgcccgaggaaattggagtgcagtgttctgccaggcacacaccggcctaggtgatgttttcttctccagcaacatggaaaagcctcttctggggaaaggtgtaaggagacaaaccaattgccacttccgagttggaaaaattggatccctttgtgctcttatcttcatccacttccaactttactgattttaccgcagccttttccttctctgaaataccttgaatagccgtagtcttgggtttggttccagaattggctactggagtggaagatgggaggtccgtggactcagtgtcagaagacaaatttactcgtgtctgatttactgaaatggtatctgctccactttcagatcctgattccagatcaggaacgtgccgccgcaggtttgttggtgtgcctgatggagaggagctggtgctgagggcattttctatgtcctgatcaagctggtccagtttcataatcagcagcaccatggagtccagccgcgccctatctcgatcttctcttatttcctttctcttacgaagtctgacttggttatctgtgggttcctgggtggccagggtctcctttaattgtaaacactgcatgccatcttctgccttgacctttggtggacttttgttttgatgttgtgaaaaaccactcttctccaggccattttcagctgacattccattggggcaggaaggaggctgcagaaggcagcttccaaaatctgtttttaataatggcagtcctctgtttgtgcaaggagtatccaagaactcattttgtactacattgcaggtgcttctttcattttcatctttaggggggtcaggtttccttcgttgctgagcaattacagcagagttaagcaattgtttctcaggtgcaatatctttcacgttcaaagtatccactgcatttactttgggtgcatcttttatttcacttaagcttatttcattgcaaagctccaggcttt

SEQ ID NO: 342365 - DNA, 1000 bp, Homo Sapiens
gggctcttacaaactttattttacctccatttagcactggtttcacccccatggcactgtttggcaatggatctttctctctaatgacagtctaagttaggtgagactgggtatcttggcctactccttcctgcaaccccatgacgcagttcaggaggaggggctcgcagttcaggagttaatgcgtgttcaggagcaggggctccaagcactgcattcctggggcccccctctggttccacacctttgctcttgccattaccttagattctatgcccttccctcctttctttacctgtctaaatcctacctgtcctctagagctggttcaaggccagcttctaccagggagcctacagtgattgttccttccttggaattccctcagcctttcctagtcatcaacatttcctggggtgtggagtgctttcctacagaccaggtatcccaaaggttgggcccagtctccgttgcagcaggcatgccagtgggaggaaggagacagtgctgggaggggaggagatcctgaaactctggggaagagatttggggtcagactcagtcagaaagtgggcatctctgccctgagggcaggggaaagatacggcatcaggtgcaggctgatccagcaactgcagggctttaatgtggactctggtggcaggaatgcaggggctgcgaggtaatgtggaggagcccgaggaaggggtggctgccaggtgctgcaatgggaggctctgggctcgggcttaaccttggaaggagccagcagagactcaagttctgatgatgtgacggtggtcagaccagctgtcagtggttgggctgatcatggaggctggtccaaaggcagtcaggctgagcagggtgcccacagggtgggccagtaacctcagcaggagacgaggagggggttggtgagcgcagctgctgcagaggctggtgccgagggctgtctccgcaacagctggcaggcagccaaggcttggtgcagggcatc

SEQ ID NO: 342366 - DNA, 1000 bp, Homo Sapiens
tttttttttttttttttgagatggagtcttgctttgtcacccaggctggagtgcaatggcataatcttggctcactgcaacctccacctgctggattttcctacaggtgcctggcaccatgcccggctaccttccttgacatattaagagaaaactgatctaatctccctttctagtccacccagtcttgcaattctggtttcacattttctcagaaagaagagactataatggtatgttgggtaatctttcagcattcctagatccctttttctctagaagaattctttctaaggacgttgataaatgacatgttgtattttctccttccagaaatatctagcaggaaagtccttagaggcatctgatttgaggggaaatccacaattgctccattatatatttctaatgtttgtcaacaatcctcataacatcatgaagatggaaagctcttcacaatcctttgtcacaaatttttgtctcctttcatagttattttgggctcaatacaaatagtgagattagtatagagtgggagaaactcattcactcttctccatctcccactatttcaactccccttgaaattaatatccaaaccttatgacaaatgaagttaagtcagaatagaagacacatgtttccttttttggagtttcttagaagtggttagctcagtacatggtgtagacaggtgtaataaggctgtgggttctgcttgactgtctgaataactaataatccaataagtttgcagaaatgcatagaaaatttacaaacagcatcccatttcctcttgaaaattgtgaatcaaagcactgatacaaaatatcccacattaaaagttttaggtatattcacctcacctttccccaaccttctcaccacaggtcctggtcaacaaatagatttggactcctgctttcccttactctggtctaaaggcacaataagatgcctttttacagatgaatcagcttacatccttttgcttgtttgg

SEQ ID NO: 342367 - DNA, 1000 bp, Homo Sapiens
ggagacaaggtctcaccatgtcacccagtttggagcgcagtggtacaatctcagctcactgcaacctccgcctccgaggctcaagcgatcctcccacctcagtctcctgagtagctgggaccacaggtgtgtgccaccatgcctggctaatttttgtattcttgggagagacagggttttgccatgttgtccaggctggtcttgaactcctgagctcaagcgatctgcctgcctcagccccccaaagtgctgggattacaggtgcgagccattgcacctggcctaacaacttgtatatctaagaatagcctgaaaataatgtcagcatgggctgtacttccccaattttaggaaaggaaagaggaactaaaattctatttcagatatgagcctctgaatttcaaaaaaaaattgggagaaaatagacaacaacaagacaaaaaataatacactttgaccttgggcttgttgtagctttccctggaaataaggtgtgctttctctctgcaatcagatgacaatgggaagagtctgactgtgtttgggaactggtttactaagcctaaacaaataaacaattttttttacttgcaaaaaatgtcaagttacattttctcaaaattacttgacataatactaacttaattgaatgcttataaaaatcaaggaacaagcaaaatggttagatgtaataaattcaaacaagcttgagcatatcaagttttcaaagcacagaaaaaggcatactgtgctgaaccacttacatgtgcttaaaatgcacaaaggagctcacctatgacaaaacggcaggaaatacaaattctcttctttttttctcattgtcttttgagaaacaatagacttacagtagtccttgaatagcacagtcctctggctttgtaccttaacatgttacaaagttcagtcttgtgaaaggagtgtagataccatattggagctattctgagtctggtgcaatggtttctggaatttgccttga

SEQ ID NO: 342368 - DNA, 1000 bp, Homo Sapiens; identical to SEQ ID NO: 160229

SEQ ID NO: 342369 - DNA, 1000 bp, Homo Sapiens; identical to SEQ ID NO: 160230

SEQ ID NO: 342370 - DNA, 1000 bp, Homo Sapiens
gagggctggggaaaatcttaatggccaaaacataaaacaaacctgcgtgcacacaaacgagacacaattacagaaagcatagagcctggctctccccctggcctcaaatcccccaggtttgagagtcattacttctgggggatggtgactagaaggtggtgggagggaggcttctaggagctggtgatggtttggtggtttcttcacttgggagcctgctcctgggtgagtgcgggtgaaaagtcatccagcaagaccttcgctcttctctgcaggcaggtaggttatccttgagccatggggatgacagaaagctcccactgctcagcaggggtcccggctcctgcgcaggtctctacggactctctcctgtgacctgggcaatgcccagctctctccagtattcaggctgtggcgtccagcaggccgttatgggaaggaagggcaaaaggatcagagtaattgggatcagtgacagcggctaaggttcatgcagcagcaggggctcggcaccgccttctcggccctcggcagtgaggactggccttgccctcttttccatatgggcacagcgaagtgggggatcctggccaagtcacccagcaggtgcgcagcgcggccgggtttgaatcaggtagccaacctcagagcccatgtttcacccctgcctgtgtgacccacccgtttcccaaaaacattcggctttctgatgccggagtccccatgcaggctgtctgtctgcaatgtccttctgggctctccccaccttcctctgccatgcacccctggcctggagtgtgctccttcctgggcagcccctgctctgtgcctgcccagtgctggagctcagccccccagggctgccactgggcagtgaaggctcttcaggacacaggttcagtcctgcttgtctctatagattccaggacccaggaaattagtgaacagatgaatgctgtctgcatgtcaggccctttcagctcctatcctggctacgacc

SEQ ID NO: 342371 - DNA, 1000 bp, Homo Sapiens
gtgggaataggtttactttctttcattcttttgccatgtaaaggcacattgttcatatcaccttgccctccaccttctttcattctaaggcacagcaagaaggctctcaacagtcaccagatacaggtaccttgatcttggacttcccagcctctagaatattctgctgctctgatcttctggtgctgctaactgagacgctttgcatttctcccaacattccggtatgatttagaagttctccaaatttttcaaagaggtcctccacccattttacatttttcatacaaagttgaacaatttcctcctgtcctaaatcttcattttttttctgcaccgaagaaatctcatccttacatatcagataaacatggtacttataatgatggagtgaatgatacaaagaatacaactgtattttctctggatcgacagcaaactcttgtgcagatttggtggttgttttagaagtccttagagttttcttattataggctttgccattcattttgattttagaaatagcagttcctccactctttgctttagaatctcgagtaattattgttagttcaggaaaactttccaaagcattcttgaatgattgatccaaatgaagattcaaaagaagtctctttcggttatcatttagcatgccatctatttttttcatatgaggtaaaagtagctcatcattgctcttctctaaggcttgcattgtgtcagggtccaaggcaatgctaacaagctattccatgtagctcttaaaggtttccttcattgctcttgtgttcaaaaagcgagtgacaaagggagcgggaggttcaaattcctcatcgtcactactactagtatggatctcaggagatgagtcagattgggatgatgaaaattcttctttccattttttccgtttctttggtggtggctcagcctttacttttggctgtttaactttgggtttcacggaaggggcttttgtagttgtagtttttgatgc

SEQ ID NO: 342372 - DNA, 1000 bp, Homo Sapiens
tttttttttttttttgctggtgtcacagagttttattgcattcatcgggggaaagggagatggttggaatgaaaaagatccatcagtcttctgacaggaagatgttatatgggggctccaacccctaactgggtactcctcttgctaccacctttggagcagaagatgaaggggagagggagcttctccctatggcctcatggcttcttgtgagacagatcagtccagccagatacagagcaaagcagctttgcatcaccacaggccagttgctgatgcccagctttatgtctaaaaaaaaaaaaagtggaagcctcaagggggatggaggatagcaagaagaatgggtgccttggccccagaggcattgtagggagaggaagacaatgtatctcatcagggttctcaacattatgagattatcacacatcaactatctttggaggggctgagtgattgagttatggctctgactcctctctgggggtggagagtgaagatgacaaagaaggccatctgtcccctaggagacacagttgcagtataagacaggacagaagagaacagaaaaacaaatccaactggaaaaaggggtgggagaaggaagtgtgctaggtacacacatccagggagtaggggaagttcccacacttgaggcctccatcctcttgaaatgaccagaattgatccaagtagagatattcctttcttctggaaataaaccttggggatggctaggcaggatgaaaggaaactttacatggagaatgaatcctacaccctggcccatcattccagcctccaaaactggccacacacccactgaagggttccagtcccaggagaggtgtgaggttctggtgaagagcagcaatagtcaaacatcttcccccaggcttgaatgcttttggccatctctgggttgctgtgcccagatgtagagatgggtggagatggaattgaggtaagggaagagattactcaatctatgacagagacc

SEQ ID NO: 342373 - DNA, 1000 bp, Homo Sapiens
tttttttttttgactctgataaaagtggtctttattcaataatgaattagtaagatttcatttttttttggctaatcaatggagggggagatgagtaaaaccagtatgttattgactgagttaaatcttacaagttgccttcagttgaaaataggtatggaaaattataagtgtctttttgttcaaaataacattttaccttaaaaactaaacttaaatatgaagcaataaactataatgtacataaaagttttaaagaaatattcacataaccacaatttcctaattttctctattcccactactcagagggaaaccacagcttaattttggcctgatttctacctagatgctactttgcaatgctgatgcctttccatgattttactgtagaaatgtctatccagataaaagtcaaaagtccttttagtttctcagcgatgcttacagcctgtcttagattcaatcacctggttatctgttacctttaaaatacaaaacaccttttttctgattcatcttgctcacttctgttttatacaaagattagaaatgacttataaaattatataagaaatgtattgttacacctctagaatgattcatttttgttaatacaacctgccatccccaccacatagacaacacgtacataaaagtttaccaattatttaaacaaaccagtactttatacttaaagtcaatggttttcttattaatgacccagcgtcttgtatggttttcaacttactttttcttaccgatattataactctttcagattttatgtaaaaagtattctgaaagccctttttgactttcaaaatatttacacatcttagaattaaagttgtttttaaatgacatttaaattgtctttttgagaatatgcagtatctgttaggcaaaaattagaagaagtgaagaagcccattaatttgtgtattgtctacgtttttttcattaatatttctagttaataaaaacaattttactgata

SEQ ID NO: 342374 - DNA, 1000 bp, Homo Sapiens
cacgtagtaacttatagatatatttggaaaactgattatcttttaaaaaatgactactaaacagattaaaatgcagagttcattaaaatacagaggatgcctctggttctctggtattgactctttttgtctactaagataagaagtctgggctaggctgaaaaactcagaatccaggtctggggtttcccagtactatgctcccatttcccagtactgtgctcccatttcccagtactatgctcccatttccgagtactgtgaactcccctttcccagtactgtgggctcccatttcccagtactgtgctcccatttcccagtactgtgctcccatttctcagtactgtatgcccatttcccagtactgtatgcccatttcccagtactgtgctcccatttctcagtagtgtactcccatttctcagtactgtgctcccacttctcagtactgtgctcccacttcccagtactgtgctcccatttcccaatactgtgctcccattttgcagtgctgtgagcccccatttcccagtactgtgctcccatttcccagtactgtgctcccatttcctagtactgtgctcccatttcccagtactgtgctcacaggtgtgagccaacatgcccggcccatcagctcttaagcagcaagaggccctgcagctggctggctggctggacagcacagttaagcaggtggctgcatcctctgcagttgctggcagcccatcttcctggagatgtaaaccctcctgcaaggctggctcttctttgggtgtgatgaagatgatgacagagatggatgctgggctctgagggtcctggttccttcgaaggacatccaggggcctctgagatgatgggctctggttcctggcctgtagcatgggtaggagcaggaggctttgcaaggtagactctacaggcaggaccttgatggagggtggggtttcagggtagaagacctggatcacaggggcacctgagctcctgaatc

SEQ ID NO: 342375 - DNA, 1000 bp, Homo Sapiens
aggttagagaaacttgttattaaatttatttttctttaaatatgtaactttctcccaccctcacccactccagggaggaacagaaaatccccacccccttccattctggagatttcgtatctaaagcctgagaggcgaggatgaagtataaaaatactatttacaaagggaaggaggtatctgttgcttaaccgtagacacccccatccccacaccccttttgatcaaaaaaaaaaaaaaaaaaaaaaaaaaggcccctgggaatcaatttaagtatagaactagccctcctctagaggggcccacaaacctcaacatggaataggaagctccgagattaactgaggaagagactgaatggatagcaccgtgggtcctggcaggggaagggccctctcttactctggagtcagctggcgcccgccagcctttgtttccataggtcccatgtaaacactgacattttcctttatgtccctgctcttctgtttcatacagagcctccctcgcctcccgtggaggcgcttggttccttgatctttccttccttcccttctaaccttactccggaaggagtgggaaggggagggaaggttgtagagaggtaagagcccgtctcatcccttctgggtcaaggcagctcatcctcctaatgggagccttgaaagaggactttctccatgttcttgatcggggtggacaccttcccccagaacagggacaaggcaggtagatagtccagtaccaggagacagtggtcttgatgggtgaggccaccagcatggagtagcagggaagaaggcttcaggaggcaggaagtgggggcacatctggcactggtcttgcactgagggtagaagcccagtcctagaccacccttctcatcactgggaaagtgatcgtcatcaccctacagtcctgttggttggagctgtgcagagggaccagacatccatgaggcaagaggtcttctccaggtctcggtgtagcggcagcactc

SEQ ID NO: 342376 - DNA, 1000 bp, Homo Sapiens; identical to SEQ ID NO: 160232

SEQ ID NO: 342377 - DNA, 1000 bp, Homo Sapiens
ttttttttttttttttttttttttttttttttttttttttttttatttttatttttatttttatttagttttcttctttttttgtttttgttgttgtttatttttaggagtggctgtcatacagacatctcagttctgggttgacccattatccctgagattcagtgattgataggaaataaatttgaccaggtctcaacctctctcctgcaggagccgcatcccaccccttgagcctgaggcccttttggtcccttcacaccactgccccttacccccaccaacacaaacacaggcagtcagatttatggcgaatggccatttctataacaaatgcaacggtgaccaagcaccaccctcccgcaatgctaaggcacccacagagggcaggcatagctggtctccaaatttttgcattacactcaagggtcctggagtcatatctagaaaaggtccagatggcttcaatcctagccagacccacagccacaccttcatccttgggacacagctctctaaaactcccatatgacatcctctggagcctcagactccttcagggacctgtctgaggcctccaaccacaccctctgctggcaggtgggcctgcaggaagggagggagcacctgggccagcctgtgatcggtggtgtctgagtccctctggtctggcttagagagagcatcctgccttcaccacctcaggctggagagtgaagacacggtagcccctgagtatgtctgtaccaagcaggggtgctctacagtagatccgaggccagagcccagtcctctgcagccccagggggaatccaggcttccaagccccgcagagacctggctgccagcttcaggcagaggggtggctcagcctcaggcagctgctgaagcctctccaggtcattctgtcccccaacaggatacccgttcacttccagaatcacgtctcccacttgcagcccagcccgggcagctgagcctcctggagtcacctgggaga

SEQ ID NO: 342378 - DNA, 1000 bp, Homo Sapiens
tttttttttttttttttgagacaaatcagtcctttagacgttcacagacaattgaaaggcactttaaaaatccactttttaaactaccacttgagaacacatggtagcacagtcttaaattcatcctagttgatcgggaatgatgaatgagtgttggcaccagaaaatcctgcttgcagaagggggcgcaggtgtcggtccacgggacagccactggccaggctagctgccgcctcactccgcagccttctgtggctaaatggcaggacggacacacaggaatgggctttggaccacaagctctggcatatcgggaggcaaagcactcaagtactctgcagtctagatgacacatttcatggtttggaggacagaagtaggtttccacatcacatgaaaaggacagtgtcacagtggggttacccagtaaacagctaccaaagccatcatttcacgcttccctgtagttttatgagctcgccctctgcatgtggatatggggaaagccgggcatgaaggggtgtgtgaaaaagaacagcctctgtgactgactgcagtaagctcacaagtttgtcactgtcagacttagcaagtcagcctgcaaaggttgtgctgatctcttggccacactacctactcaggttcccatccatgcctcctgcctgcccccacccccagccccaccagtgagacttctgattggaagtctatagacataagaattcaactctgacccatggatgagaggatgaggcaaagaaccaatgggttatctagtaaacgatcaataactacctacccacaatgattgtcccaggccaatgtcacaagacgacattacttccaagaaccaagtcatcccttgcttctgcgggcccagtgccacgggtactgtcctgagtggtttggaaggtgggtagccgctgatacagggacaggcagatgtgcagacacttaccaccctggtccaccgatcccaccccatgcttccacctcccag

SEQ ID NO: 342379 - DNA, 1000 bp, Homo Sapiens
aaagacagggtctcactctgtcacccaggctggagtgcagtggcatgatcacggctcattgcagcctcaacttcctggtctcaagtgattctcctgcctcagcctcctgaatagctgagaccacaggcatgcccctccacacctggctaatttttaaattttttgtagagatggagtctcacttagttgtccaggctagtctaaaactcctgggctcaagtgatcctcccaccttggcctcctgagtagctggacccaagggcgcttgccaccactcccagctaagtacttttcatattaaaaaaaaagaagaagaaaaaagaaaaaaaccaactccacttctaatttcacaacagaaaaattcttctagtgctattactctacttaattcaatcctgtgttgttgtttttttaaatcagaaacatgaatctgtaccaacactttttcttaattggctccttcccctacagaaacacttaggtagcgagctgcaggaaacctgcctttgtccctgtgttgtgcactatgtcttgccacactttagacaaaacaaagctcctttagagaaaccctggctggagggaagaaaagtgtcccggctgtcattgccatgggagtctggagtttctgagagggcagcccaggtcaccagagtttccagatttagtaccaaccgtggaaacatgaaggtggctgtaatccaaggtgaactggactgccagaggaatgtcagcttcggacagaaaatggaggattcctcatctggagcctgtctctattgcctgattttcaaagaaaccaagttttcatttaactttagctaaccttctttcagaaaagtttagttattaaaatacatttaatgcttggtattgtgaacatgcagacgaaagaaaataagattacaaaatgaaataagagctagaattaaaagccgatgtataggaaatgttctcaactgtgcaagtgattaacagccagatgttcccctacgattcc

SEQ ID NO: 342380 - DNA, 1000 bp, Homo Sapiens
ttttttttttttttttttagattttagctttgctgttttacaacattttaatgtgataaatacccttgttatcctgttttttaaagattggcacatatagaaaatagcttttgaaagtcttgggtttttctaggtattgttttttaattaatgaataatgtaaacataggaaaataggagggtataatgaattgccatgtacctgtcacctaaatataacagtaaacatctccccgttgcttttggttgaagtaattttaaaacatataaatatgcatttctttttttaaaaatgaggacatttctgtatacaggttgagcatcactaatccaaaaattcaaaatccagaatgctccgagatccaaaactttttgagccagtaacgtaacaccacaagtggaaaattccatacctgacctcatgtgatgagttgcagtcaaaatgcagtcaaaattgtgtttcatgcacaaagttatttaaaatattgtgtgaaattaccttcaggccaggtgttcaaagtgtgtatgagacataaatgaattttgtggttagacttgcatcccatccccaagatgtctcattattataggcaaaattccaaaatccaaaaaaatgtgaaagccaaaacacttctgatcttaatcattttggataaggggtactcagcctttatactataaaaccattatcagacctaccaaaattaacaataatccgattcttctacatactcctcccaattatctctgacaaagtttacatgtgtttagctgaaacatgcctctattctcttaatctataacagttccctcaaaaatatttttcttttataacattttcctgttgaaaattgggccattctgtgcccgctgacccactttttggatttgtcctagtgttccctgcaagctgagaattagatctaaagacttgattgcattcaggttatgtatttattctttaaagaaatacaataaaaaggtcctgtcctttaggcgc

SEQ ID NO: 342381 - DNA, 1000 bp, Homo Sapiens
cacactcacagctgtcttttattcctgttcattccttgttaagaggctttgactctccagaatccaaggggcagcccctcttttctgcccctccccacacatctctggctgctttctcctctgcagctatgcctgtgtcttttgtgctcataggaaaacaggctggtcagccacagcagtcctccttttctggagagttccgaccctgttgactcccctgcatcctgcacggcacttccctccaccaaagtccctccgtggcaggcctgggccatagctaaggggagctgataacatgcgccttatttaaaagccacaaaactatcttctcaaagtaatccttctgtgagctgttcaccacatcagcctggcctgatgccccacttggcctcagtcagcatggcttggctctgaggccagaagataggaaggacgctgcttttatgtccttgtagtccactccagcctagcctggcacagaggacaggttaagccccctcagtcctggccccgaatgtctgcttggtttggcgcaatccagcgcccctgacctgctctgtcttttttcccaggaaagagcatctacggtgagcgcttccccgatgagaacttcaaactgaagcactacgggcctggctgggtgagcatggccaacgcaggcaaagacaccaacggctcccagttcttcatcacgacagtcaagacagcctggctagatggcaagcatgtggtgtttggcaaagttctagagggcatggtgagttgtggaagcaagggctactactgggcaatcctcaccggggattcaacacagaccccagggcaggagctccatgtgtccatccctttcccaaaaggacccaacccacagatgcagcccagtgctcctgtccagaataaaccctgtacctccatgcctccaaggttctaaattcttccagccccctcagagcccagccaggaaggctgcacaactgccagagcctccctcccctccttc

SEQ ID NO: 342382 - DNA, 1000 bp, Homo Sapiens
tttttttttttttttttttttttctaaagataaaataggtgatttattttgtaactgtgaaaactatgtttattttgaatacaaatcttgaattatctatggatgagtttgaaataaatcatagaagagaatcactttttggatttttaatccaggtccttgtgtgtgtatgaaatacacacatatcttccttattagtcatggaagggcaaaagtggaccaaaaacaggtcagctaagacaggcatgtctggcttctgggctgtagctcagcatgttgtaggctagagtccagtgaccttcactggcaggctgcctacagtccatgagaccctaggcagtcaggcactgagctctgtcctccagctgaaaataatgaagagcacacggcttctccccggtcatcgtcagggtgactcaatcctgctggaagccctgagggcgcacatgagagaaatgcttttcaagggagccaaacttgatctataagcttatctcagggtatagtccaaataacacttatgactccaagcataggcagccatgcttactactctctaaagaagccagtacttctgatgaggaattgaaagtcaagatgggagctctgcttttgtatccattccccataatagagttcagcttatatgttaaatgaattttcacataaatttgtccacttgaacttctgcttctttttgatagttgcctagagatggttctggagagtaggttcttttcccatcgtgatcagcaactgctcttcaaagtacaggagctggtccacttcaaaacagtcgctggcttgaggcaccactttttccaaacactcgcggatctctgcttcgctagcattctgatgccttgctctcttgaggtaattatagacctcttcaaatacttctgtccccagcttctgcatggctgattccctcatgcgtttcatcttggtcctggccatcacactgttgaaaattggtggtcctggggacatgtcttca

SEQ ID NO: 342383 - DNA, 1000 bp, Homo Sapiens
ttttttttttttttttttcatactgaaaatatttatgatttaatcagtgtaaaaaatgtagacatgggggaaaaaacattcgtaatcaacatgtgctgttttctacttccggtaccagaaaggaaaagcataaactttaggatttcattgtctcttggtaaaacaaaaaaatcccacctagaagtgactcagcagttcaaaggactctaagcttccaaaggctcccaggtagcagagctgacttgtaccagtagaccaggaaataatgtgttcattgttggtactgacccacttaatttagtgtggaacctagagtcttgcctgatttgagttcatttttctgctcatcaggggaactacccactaggcatataacggcttgaaaagaaaacatgccattttaacttgacattcatttgcacccatcatacatgcctcagaaactttgcgccacttcctcatagtccctctccagggctgccagatcttccctggcctccaagaactctgcttcttccatgccttctctgaggtaccagtgcagaaatgctctcttggcgtacatgaggtcaaacttgtggtccaggcgggcccaggcctccacaatcgccgtggtgttgctcagcatgcagatggaccggtggactttggccaggtccccacccggcatcaccgtgggcggccgattgttgatgcccaccttgaaaccagttggacaccaatctacaaactgaacagagtgcctcgacttcgtggctgcgattgctgcattcacttccttggggaccacatcccctctatagagtaggcagcaggccatgtacttcccaagccgaggatcacacttgaccagctggttggaggactcaaagcaagcagtggtgatgtctgacacagagaactgctcatggtaggctttgtcagcagagacgatgggggcgaaggctgtcatggggaaatgtattctcggataaggtaccaggttggtctggaattcaat

SEQ ID NO: 342384 - DNA, 1000 bp, Homo Sapiens
atcttattttttgagacagagtctcactctgtcacccaggctgaagtgcagtggtgcgatctcggctcaccgcaagttccgcctcccgggttcatgccattctcctgcctcagccccccgagtaactgggaccacaggcgcccgccaccacgcccagctaattttttgtatttttagtagagacggggtttcaccgtgttggccaggatggtctcgatctcctgacctcgtgatccacccgcctcggcctcccaaagtgctgggattacaggcgtaagccaccgtgcccggcattattttattttttgtaaagacagggtttcaccatgttgcccaggttgtttcacattgttttaatccaggctggttatgaactcctgggctcaagcaatccacacgccttggcctcccaaagtgctgggattataggctgagtcactacacccagcctctatatcatgacttctttcatggcgagtaaggtgactggaacgagtgtaggctttaccgcatttcttacattcatagggtttttctccagtatgaattctttcgtggaggtgaagggaactgaggcgactgaaggcttgatcacattgtttacattcatagggtttctctccggtatgagtacttctatggttacaaagggaactcaaacgactaaaggctttgccacattgtttacactcatagggtctctctccagtatgaatgcttccatggtaacgaagggaagtggaacagctgaaggctttatcacatttggtacatttatagggtctttctccagtgtgagtcctttcatgcgtcttaaaagaacaagaaaatctgaatgttttcccacattccttacattcgtagggtttctctccagtgtgagttcgttcatgtattagacaagaaccggaaacagtgaatgctttaccacattgtttacatttatagggtttttctcctgtgtgagttctctgatgtctttcaactgaattgagaaaat

SEQ ID NO: 342385 - DNA, 1000 bp, Homo Sapiens
tttttttttttttttttgtgagaatctgtgataagatggccatttaatttttaaattacacacagtgcatggaaaaaaaaacagtgacttgtgtagcaaattgtgtttagatacacggaaaagctagaaaatgttgaagtagcagaagagcagatggtttaactccatcaactgcctcaatgaagccacatgctgcgttgcgtgccaatgcttttccctgcaaatgtgggatgggcagagcctctccatctactccctgcttgctccgcagctgtggccatcctctgttctgccacctcctctctctgcctccaactcctctgtgtccggggcatagcattcgtactccggggcaccaaccaggtccaggtcatcttcaacctcctcgcctgacaggtaactcttgagggagctgtcctgctccaggcggggcttggccctcttccttcccttttgcatctgcgttgtcagctcagccacctgcccctgccacaccaggcccccgagccctttatctttcctccttttgtactccataatctgcttgttgagcgcctcatgatcgatcccacacagactggagcttgtggtcggctctgtggtgccgcagggttgtggggcatcagggtccctgaaatcattttgtacaaagttgtctctttcatcccggggtccaaagtctgcgactgccagtaactgatcaagctcagctagagctgcatttcccttgtcttgaacaaacactatcggtggcacattcctcagggtctgctgggacatcaaaaggtgcctcatgtgcgcggcacttctctgcaggacagcctccatgtgtgcgttctgctcagcagagagcgttgtcttccagtacgctcggcaggctgagaagtctggagtcagggaaaccttggagagctccacgttaaggtcatacagctcctgactcacttcaggggtacacagcaggtctgtcagtgccttatagaggaggccgttcagggcc

SEQ ID NO: 342386 - DNA, 1000 bp, Homo Sapiens
tttttttttttttttttttcaatataaaacaaaagctttattctctagttattattcagctccaattctaactgatttgaaaataaataatttaaaaaattttcttcctagaaagtaaaatatggcaccataatccaattgggcctcatattttaaatcctgcagaaagcaaacatggacggcagatagatgataataataggccattactctcaacgcagagaaggtggttggcgtttcttttctccacgttcattcctggaccatttttggtctccttcctatcaaatgttgtctatacgatgtgaaggactttgaaagcagccacagcctgtttttccctttcgtgtctgttctgcagtatttccagcagtgagatttcaggtaaactttcttctttcccagcataggttggatttttttgttcctttgatgcttgatgagtcagatttgatggtttgggtttggggatggtcttagcgtattccaaagccttctgccgagggatagcagatttcttttgagttttttctgtttgtggttttgatagaatggatagtgtcttcatgttgtactccttgacttgttttgcatattccttttgctgtattaatttttgcgttttgtctctgatggactcaaagtcaggtccgaggcctccaagcttcacgtctcttttctgataacctttcagcttggtgttcttactgctgcttcttttcttatgcttttttcccttttccagttgaaacagatagccttcagaattgctacggctaattttcacttggtttctttggcttctctctgaactgagttgggattcactttctacccttgacagtataggtggaagcgtgacgctggataaggccccttcactgggctgcacgtcggtcagctgcaccaaggcttgctgatgctgctccattatctgggtgagccatgaatctggagaagctctaaccgtctggctgtcagaagaagaatggaatttcca

SEQ ID NO: 342387 - DNA, 1000 bp, Homo Sapiens
cattgtacaatgctaatgttactttatcttgaaaacaatcttgagaagtaggaattattgtcctctttcacaagacaggaaaaatgaggccaagggttagtgacttgctgagggtcacacagtgacagagtggtatcctggtccctgtccctgacttcttccctagggctcctcctcctgggcatctcactcagaggaagcagggccatcagtggtactggtgccagctcttggggagctattttcccccaggtgggttaagttctctcctagtatacaacaggatggtggctacaccgtcatgatagggagaacagctatcttaggaggctgcttgctagacagagatgggtgtgtgtgcgtgtctgtctgtctgtctgtctgtctgtcctgggtccagagccgtcaattcttcagcctcagtcttccctctattgccctctcctggacatagggaagaagtgcctcctccctgctgtcccccaggattactccctgcctcttccactctccccacatccatcctgaagtggcccctctggctgtccaccagggtcctggctgtgtcactctcttggccattggaacgtccctgacccagggttcaatgcacagttgtcacatttatccccaggtgctattccagtcactccaggtcagtagacacctgtgtgtgtgtgtgtgtgtgtgtgtgtgtgtgtgtgtgtgtgtgtgtgtgtgtgtaggggaatccaggctgcattctccagccttcattgctggacgccaagccagtgctctggacaatagaggctgagtctgagccctgagtcagtgggtgggaggcagattcctcgggacattgggtccctggccagaggctacttgggctccattttccctgtccccctgcctgggccagtcctccaggccgtggtcagttccaagttactgtcttcactgtgtcccaagtgtgtcttctctctctatcctgaggggtaggagtagggttgctccaccc

SEQ ID NO: 342388 - DNA, 1000 bp, Homo Sapiens
ttttttttttttttttttttttttaattttctacaaaaataagacatttcatttattaaaattttatagagaagcatacaagactacaacaaatcactgaagtcaaggtctaaagtctttgagaagtcagatggaccggacgcagtggctcacgtctgtgatcccagcactttgggaggccgaggtgggcagatcatctgagctcaggagttacagaccaccctgggcaacaaggcgaaaccccgtctttaccaaaaatacagccaggcatggtggagcatctgtggtcccagctacaccagaggctgaggtgggaggattgcttgggaggcagagattgcagtgagccgagattgtgcactgcactccagcctgggtgacagagaccccgcctcaaaaaaaaaaaaaaaaaaaaaaggccgggtgcggtggctcatgcctgtaatctcagcactttgggaggccaagatgggcggatcatgaggtcaggagttcgagagcagcctggccaatacggtggaaccctgtctctactaaaaatacaaaattagccgggcgtggtggtgcatgcctgtaatcccagttctccggaggctgaggcaggagaatcgcttgaacccaagaggaggaggttgtggtgagccgagatcacttcagcctgggcaacaagagcaaaactccatctcaaaaaaataaaagccaggtggttgtctaactataggctttgcatattctggtccaggggttgctgaggaacaaggccaatgtgaggaacaacagcaacagtaagcccttagcaacacactgagaatgcagctccccttgataatactgagtccatggatatagaagctgcggccaacacacctcatttctgttgcagtcatactctgtataattgatctggaatcttgtcagggggtggggtaactgtgcaggaattttaataaactggacggatgcactgatagggagaaggtcggccttgtgctcacaggta

SEQ ID NO: 342389 - DNA, 1000 bp, Homo Sapiens; identical to SEQ ID NO: 160233

SEQ ID NO: 342390 - DNA, 1000 bp, Homo Sapiens
attgtgaacacaattttctttatttcatttttggagttttctgaacagaaaaatacaattgattttctgtatattgatctagcctgtgaccttgctgaacttgattaattctattacactatgattttttgttgtggttagacccttacacaatcaaatgaggttaaaaaaaattgtcagagtggccccagaccaacaacaggatgacagtagcctttgcccatacagagataaaatttagtttttgcagtcctttcccatagagattgtatggcagtagccaattctatggcctactgccatacaacctgaactgaagtccagaaagtttaggtgactgggccacagagctaattactggtggagccaagaagagaaattatatccctacctccttgcccactaagctccccattccagtgggctgctttctggtccttttccatgattgggctttagtagctgtcatttcctccagtgtccaagagtattttcttggccttccagtaaagctccccaagttgtctgtgttccgcctcaactgctaacttgcctacctgataaacattttgaaaagcaatctaaattctagaaattgtctctcctgcaaacaaactacagattccatttaaagcatttccttgagtccagaaagttctgagattttcctgttttggactagacttccaaagggcttcatcttaaattgtatgtatttattgacctaattgcttactgatctttagaatttagagtttaggttgggaggtcaaaatcataactttctcaatttttttggcaaactgatatgatggctggaaatcatccagaaaaagtagagatcattatattttcttgaatattcattcaagtttcaatttaatacttaaacattcattttcgaataaaaatactatgtcttgtactagggatacaaagacttggttattcttgttggagtaatgattctcctctatctggggaggtcatcctctgcagt

SEQ ID NO: 342391 - DNA, 1000 bp, Homo Sapiens
caaggtgagtaacacctctttactcagcaacgtgctcctccctcgggggaccttccccagtgcccctccatgctcgaagggcctggaaggatcagaatgcaggcctttcccaaggacggcacagaacgtgatgaggagatgccactgggggtgcagaaagctccccatccccctggggagaggcgtcagcgtgccctcagggtagtcaggtcctgagctttggactcctcgcttggttaaaggcactgtcccttgtgcaatctagaggaatgctcctcaaagcatctctcctggggaccaggagagccgcccctgctcccaatgcaacaagatccctgatcgccagcctcttgcctccctcagagggagacaagtccgcactggagggagcacggctgcctagctccctgtcacctcctccacctctctatctgttcactgggacaacagaggatccctgaagccgctggaggagctggctttgcaggtcttcctccatcaccttccaccaagagaagttctcaccccgaacttttgggggttcatcctggatccctgggctccgaaaagccacggtcaccagcacattcaaacagatgccatcactgtgatctcggcccaggtgctgcagtccaagcaaccccttgatctccaccaccaagtggtgcagggtcagacactcctgcagcagccgcaggacggccatcttcatgccacccctctgctccacagggtcgaggccacaggcagtgacaggcaagtgaggcatccccactgtgcccactaacacccacactgtctgggcgctggtaaaggtagccacgagccgctggcagaccagatcacagggtagctcttggggcagaatgagagggtgcctggcttgctggcgatactgggcggctagttcaaccaggtgcaggatgtcatgggctcgcagcggagtgggcagggaggtccgtgggtaccaggcagcctgcagggactccgcatcggcctc

SEQ ID NO: 342392 - DNA, 1000 bp, Homo Sapiens
tttttttttttttttttttttttttttttttgcgctgagctgcttatttattgaaaataaacgacggaaaagtctggccttgcctctgtgcaagcttggaggtctgggtcgccgctgtggacaagcgtcttagtgtcatgcagaccagaaggcagctgcctgtcccagggccggggcccacctcactgcctctgatggggactcccagcccccatggctccgctgtgccctgggcaggggacgggctgggggcaggggagggctggagcccaggaggcagcacagcagccagaaagccgcaggcctgagcctgcacctttggttccgggaggggcttgggcccctcacccaggtgtgacccctgagaacaggaggcccagccaccctgggaggaggcgctggagggcggggcggtggtggcccccgtcagtcccctcaaccccagtctcagggacggtggaaaagccatccaagaccccagagcgaggcctcatggttcaggagtggggaaaggcgtctttcccagggtgggggtggggatatcctgacccctcaggtgtccttgatgtccctgacgtccgtgagtggcgcctcatccatgatgctgcgcacttgctccagggtctcagcctggcggatccgctctaggcgcacctgcagggcctgggacagtcgcacgaaatccctctgcactgctcactggtctccagctctgcctgcagccgcagcaccttggccctctgttctgagaggaggtctgggagctgggccttgctctgttcctgctgcacccgctccatctctgtcctcaggctgcacagggaggcctccagcacctctgtctcctcccgctgcaccctcagctgcccctccaggctggccctggccactgtctcctcctccagagcctcccgcagcgtcacgatctcgatccgcaggcgctcggccccgtgctcctgggcctgcagccgggccctcgcctcttgccgcgtgcagcaca

SEQ ID NO: 342393 - DNA, 1000 bp, Homo Sapiens
gaccagaaagagactttttctaatacagcagtgttttggctgggacaggttggccggactctccaggaacgtggtgaagagcgtgggggaggcggctgaggcagggcagagcccaggctgcagagctgtgtgcttcacaagttggctctgtggtcgggaaggctccacggccataaggaccctggcctttgatttcctgggaggaacagcacttggaacggagtaagaatttcaggcaatcacctggtttccccaatggctttcttgtctcacggacagtttaacaaagctggcagagtcctgtaactaggatctgtaactttgggggtaagggcaagtaggaacagacatccaaaacaactgagtgctgggataaaggcttgaccggaaagatttcaggggcctgggctttgtttgcattctgggaaacttctcagtctcttggtcagaaatgaagcagcacctttcacatctaagtacaggccccatgctggatactggtagatgactggggcggggactcagctcttccactggatgggtgaatatacctggcaggtcaattacttaagttgagcctcagtttccctgtcagtaaaatggggataatgagtcacccccctgcctccattctgggatgttgtgagctgctaaggagctagtatctgtgagtacacctgctaaataaagcacaatattcatgtgagctatctgtgtcatagggcaggaaaacagtctaatgtctttgagaatgaaaacaggcacatctgggctgaggtcacagagggatgcacgcgtgtcagcaaggcttagtggggcgctgggttgggggcgctgcctccttggactctccagggtgctaagtttagaaagaccagtagcaccagggatggggcagtgctctgtcagtggcccatctgctgacttgaaggtgccagatgggagcagggctgagagctccatgtacttcccactgcttgactttcaaagggcaccatta

SEQ ID NO: 342394 - DNA, 1000 bp, Homo Sapiens; identical to SEQ ID NO: 160235

SEQ ID NO: 342395 - DNA, 1000 bp, Homo Sapiens
ttttgtcggtccaaagggtctgctggcttttattgtgtctctgcagaggggctgggacctgtgccaggcagctctgtgacacagtggggccagcagcagggtggcaccctgacccgtggctcagaacctagttctgctgcttccccaccaagggcggaagccagctggccagaggtcttcagccaccaacagggtccaggcaggcatcctcctgcctcccccagcagtctgcacagggtcatatttccagcataaaatcctctgaaggccccttcagcaggaggcccctgagagaaaatccagccatctgaggctcagtcccttcagctggggctcagacccagctccagggggccgggcaaatgtggcctccccttctggaaggggctagctggtgctctccaccacaaccacacctccacctcttcttcctcccgacctgcctccttgtggccccctgagccctgagctgctccagggctataactcagactgggatctggagatccttgggccttttcggatctccttccgcttctcctctttctttcggcgtttctcttcttctctcagggccttctggaaagggtcagtgctgggaatgaactctgtgcggtcgattttaaatgggttctggaagttggagtctttctcactgatccccagctcctgggccatcaggctgaggatgggcgagtggggcccctggttgaagacgcctgtctggttgcagaaactgataccccagcggatgaggaggttccagttggagttgtggtcaaagtaatagtgcacaatcctcgggaagcgcagcaccacatcgccgaagaaggccgtgttctccaccacgtgggagaaagcatccttcagcttctcgtcctgggggaagggcccatctgggagcacatcagcagcggtgagcactgtccgggagtcctccagcaccttaaagagccccttgagcatgacatcaaggatcttgtactgctggtggatgtcg

SEQ ID NO: 342396 - DNA, 1000 bp, Homo Sapiens
tttttttttttttttctttttttttttttttttttacctctttcatcactttttttttcaagagacagggtcttgctctgttgcccagtctagagggcagtggcccgatcacggctcattgcagcctcaaacttctgggctcaagcgatcctcctgcctcagcctcctgaatagctgggactacaggcatgtgccaccacgcttggctatgtttttttggtagagatagggtcttgctgtgttgccaggctggtctcaaacccatagcctaaagcgattctcctgccttggctccccaaagtgctgggattacaggcatgagccacctcacccagcctcctcatcaccttctaacccactcttatcattttcttgttctgattgctttaccagctaactagaatgtttgggacgtggcagggcaggcagggggatggaggggccctggggacagtgtggctaaccagcctgtgcctgacctggagggcttggagctcatgccaggtgcctggcccgatgtcgccgacccggagccggttgtgcgccaggctgagctcccgcagttggtccaggccggccagaggctcgggctcgagcatccgcagctggttgcgttgcagctgcagggtgcgcaggccagtgggcaggcccatgggcagccgggttagctgattccctgccaggtcgaggctgcgcagggcacgcagccggcggaaggcccggtggtgcacacgggcgctggccaggcggttataggccaggttaagctccgtcaggcccggtgtggcgaccaggtcacgggcacccagcgcggccacgtggttgtggggcagcaccagggcacgcaggcggcggggcagggctggaggcacgcggtccagcccattgccatagaggtgcagcgtgtgcaggccccgcagcggccgcagagccccggcgggcagccctgagctccccagctggttgtgctgcagcaacaaatagcgcagaccacgcgccc

SEQ ID NO: 342397 - DNA, 1000 bp, Homo Sapiens
tttttttttttttttttttttttcatgaaggtggagactttaatcatctacaaagccctcagacctgttttactttatatgtttaatcatacagatgccatctacagtattttgtagttagtaagcagcaataaagtttattctgtactactttagcatattaactattacttttaagttgaaatagaaaaattatatcactgtcttttcatcttgaagcaataacaatgaactcataactcaaatctgtttaccagcttaagagaagcatttaaaatcatataggctttttctatgctttattagaaagatttatggagggggaaaaaatggtagaattattccaaggcatgttcaggaacaacaacaacaaaaagaatttgtaactgcaattccagcgtttcataaatgtcctctatttccatttaaaaactctctaaaattaacataattaaagcagctaataaaacacaatccctgcaacttttatatataaggaaagtcctcatacagtatcagtagaccatggcttataaataaaatatactgtatttgttatcaaatatagaaacaacagttccagatttatgttttttgaaaaaattaatttattttaagttaaggatctctacgtaaatttattttggtatcaaacaactgcaattagtgatggggggataaaagcatccctaattgtggaaggatggtaatttatttacaaaaactatacaaaattagattaattataacaacaacttatcaaaggttcctgaaattaattttgcttttgaaaaagtatcaaaagtcttcagatccagaatgatagcattttattatttctgattcatggaattatagcacatcagatctttaagcaactacatcagataaaatcctagataataaaatattcttcatttcctgacagcttggaatgtaaatgaaaacttgttccatttttattaaagaaaaaacctagaataatgcatccaatggtatc

SEQ ID NO: 342398 - DNA, 1000 bp, Homo Sapiens
ttttttttttttttttttgaaagtgacaaattaatatattttattgcataattctgatgggaaaaacatagctaaaatagtgcctttggtatcttatttacagtcttctagtccgtcatctccctccttcattttatatcaagtttcaaaattggtttcatggtaataaaatcaaagttgtagacctctggcatgccctgatgtagagttttgttgaaacggtcccagcgaaaaacagggaggccaccttgtactgtgggaccacttatggcataggatgtgtactgagatgctaggtagatatctgccacctttgtgtcataacaacctccaggacttgggttaggtgagttcaggtcctcacggcagcagatggtattacaggggtcacctctactgtaaggatccttcttataattgttgtatcgcatgatatatttcatggatgccgtatcagtcactttcccttggtcacgccggaaaattttggctcgtggagctaaatcataagagtagtccaagcccagcttctgaactaacagtggatagccactccagttgtagattttttcatggaaaggaacattgtaggagggccaatatcctttccgtagaacatcagtttgttcagaatattctacatatgtaggaatttgctccacaatgtacagagtgcctttgtcaagactgtggttcagctttactttcttcaggtccagaaccatgtattgattgttataggtgccagagttgtattttgaaaagatgtctgcccacctcttgccactatctgccatcatattggccacacggactctttgccaggacaggagagtctcgggtattacctgctttagcagggttttattaaacacactgtttgtggtctgcagcaatatcaatccactgctaagaatgtaaaaatcatccagagactccaaaaaccctgggtaactgctgaaagagaggcgactactgctggtatctttatctatgatgt

SEQ ID NO: 342399 - DNA, 1000 bp, Homo Sapiens
ttttttttttttttttttttttttttttttttttttttttttttttttttcccaagtatagactttatgttttacttattccattgaaaatcccaagttccttcatggcaaccctccctctgccctcacaccccagcaggtccccgcaggccagggcccatgccccacctgcccacgggtctggcccccaggccaccaggggcccgctgcgtcctgtctcacacacaaggggtttaactcaacgctatgtacattcacagttccgaatatccgccaactctaagtcgccacgaagagaaaagagaatcaggaggaacaaacatccattcaaagtctgtttatcagagatttttttttctgaaaatgcacagtggcatttcattcaaaaaacccttcatctgcagacctgcggaagggaggtggcctgggtcccttccctcggaatatcttagtttatttacctccttcattggccatttgcaggctcttctccttgaaaaatgaatctttacgcattctccaattataaaatcagtgactgttagctaccaaaggctgcactaggatttcttctgtgtccaacacgccaagagccctgaaattgacttcggtttactccatccctgtctgtcctgctggcagtgtccatgctaaaaaacaagtcgaggtgattgattgaaacggagctgaaggttgtttttaaatgtctgtcagtggagaaacgcgtatcacgaatctctgaggaagttagtaaacattttttcccgtacttactggccttggtggtcactttctatagagatgccccaaatataaaaatcaattcatttcagaaatcaaaaaaattttccaaacaaacccggagcctttgctttaggaagcaaactcaagtctgtgatgattattgtgcttgaaggatgggtttctaattctgtcataaaaaatgatgaaacaaggtgatgtcagagggacttcaggtgacaccaaaataccccatcca

SEQ ID NO: 342400 - DNA, 1000 bp, Homo Sapiens
ttttttttttttttttttgctttcattgccattttaataaaaaaatagaaactcctatattacaaaatatattgcgtattgatgtcacaatggaaattttacaaacacaaactttataaaagggtgttaagccaattccagatgaagcaaagacatgaaaacaggaaagttctagaaaaagtctaaataaatgtattcatattctatgagtgaaaaagataattcaaaaggatgtccgtaaggctgggcacagtagctcacgcctgtaattccagcacttggggagggtgagatggggggactgactgagcccaggagtttgacaccagcctgggcaacatggtgggacctcgtctctacaaaaaatacaaaaattagtacggtgtggcagtgcccacctaaagccccagctactgaggagactgagacagaaggattgcttgaactcagaaggctgaacctgcagtgagctgtgatcatggcactgcactccagcctgggcggtaaaagtgagatcctgtctcaaaaaaaaataaattacaaaggactcatatatattaattttgtataattcctctaaaggaattattcaaagatctcaaaatatttcactgatatttaagtcctgtaagtttccatttcatacggtgatataagaccatgggtagaaaatatcagtgaataaaggaagacatgccaaatgtctcatctgaatattttgaccactccatgatcttttgtcctcgcactgctgcatagttaggtttcagaggctggtcttcgaattaggtcaccaaaatatgcagtgattgtcttcaatttgttgttaaggaagttctgttctatttccacttgccctccaggcccagctaaggatgccacctggtcaatatcagcatttcttggaagaaaataaacaatattattagtgatcttcttagaaagtctgaaaatttcaaagccatcaggagacatcattgttctaatgtcaaaggtctct

SEQ ID NO: 342401 - DNA, 1000 bp, Homo Sapiens
tttttttttttttttttggttgcttaaaggaacaggcctttattatcatgagcaatgtgaagcaggcagttccagagctgggtgacttggatattggatatatccataacgagcatcatatgaaatcaatcaacacaggtaagtctccgcaggctatttgcagaatccttctgtgtcctcttgaacaaagctgattatttccatgccatttacatcaaaagagaggaaattaagacccctagtgggctgtgagaccactcacaacaccttttagggactggggagagaagagaggtctgcccgtcacaagcatgctggggtaaatggtaaacgcagtatgattctgccagatggtaggagcagatggctcctgccccagcaaaggccaatagccatttaaaaagtgcaacacagctgctgaaagcatctcacatacttggcactcacagggaatctccccagtgggaatgtccatatctatgaagtttcacttcttactgatggttccctcccaatggctgctcccagagttccactctagggtgagctgttgggctgaacagagacagcacattgcttagactgctaaggcctgtgtccggtgtgaaattcccaatggcgggtaaggttcagcctccaggggaaggctttcctgcatctgctgcactcattaactactgctagttccccaccatatagtaagtcgggggcattggcctaagactttcccccacatttgctacactcttaaagcttttctccagcatgaaccctctggtgcagaacaagtgtctgtttccggatgaattctctcccgcactcactacacacataaggcctttccccagtgtggactttccagtgcctgatgaggttgggtctttgagtgaaggctttcccgcacttgctgcactcataaggcttttctccagagtgaactttctggtgctgaatgagtttggagatgcagctgaaagctttaccacatctgctacactca

SEQ ID NO: 342402 - DNA, 1000 bp, Homo Sapiens
gaaaaatcattttaagaaggcaaagttccaaacagggttacacaggagtctactcagtttcctggccatacaggattaacgctgtgccttacgttagagcaacaaacttgactgtccgtgtatatataggtgagggacaaagggtttctgcagccaagcactgcactctattccgctgcctgggcgggccttgagcaggaaggtccctcttgcaccacctcctccacttcagttcagctctctcatgtcttccaccaagaggacatggtctttttccacacagatcacatgggatggtgaatcttcttactcatgaaaaacagcccaaggtactgctaatttgggacgttttatttattggaaaggttctttcaagggaacttttctgcaagaccaagcaatgtatgtatttttctttggtaaattacaagttacattggcacaaaaaacacatggtgactaatgtactttgctctaggacaattaaagaaaatgtattttatcctcacaaatccagtgaagccttcattttatttctaaaagtttaaggaaggtctagtctaccagttataaaaatgaaaaccagttcaactctaatataaacattatttacatttgtttataaaaatagatttgagtttaggaaaagttgaacaactagttatttttacttcagttattaggtacaatgaattccttgatttttcaaggctgaccctgtttccttggttaacaatttcaatttaggccttataggaaaaaacgtaagggatcctttatctgcctccaactaggtaagttatttgataccactgacagcttaaaaagtaatgtcctaacctttctgaagattctggttgccataaccatgctactacagtctgttgttagtttgctctattaaaactaattggtctggagaaaacctacctgcagttgtacgaggctgttactggagtagcagatgttagctgatctaacatacttggaaccaactgat

SEQ ID NO: 342403 - DNA, 1000 bp, Homo Sapiens
ttttttttttttttttttttttttttactgtgcgtattaataaatattctttattttaaattttgcacattgcgctttaacattacatccaaacattttgcaagtggatgtctactttgtaaaaccatatattcagctcattgtcatttctgtacagaattataagtacaacattactttttgccactaagttgctttagtaagtctcacaggaagagaaacatttaatgaaaagagatggcttaaatcatatggcaggcctgcgcagccacgcaactaaagacacaagcctgaagaaagaactaatgaggatacctccaccgtctcccaaaacaagaaagaatcacattgatttaagataaaattttgccataagtcactaaattaagagtttttcgaaagagaaggcgcagtagtcatcgtgagtgtttcattgaaagacagagctattttatttatttaatttgctccagccgttgtcaaccagccactacaaatgggcctcttgtgatcatttaaccggcagtatttattaaatttctccttcagatgctgtcggtattgttctctattgctgtagaaagactggttattagccataaatgactgtatttcatcttgtgagataaagatttcctcatctgaagtacattcagactcatcaaggagttcaactaagctcttggcaccttttccggaatcgggaccaaacaacgtttctgtaggttctgcaaactgtggtacatttttcctatgctcaaaccaaggcaatggctgcccacccttttcagagctgcaacagctttcaggatgtgtatctttggtcttgtcacggtgaaacactgtgtgcatggtatttcctgaggtctctcgattacctggatctgtaatacagcttccaagcttctggatatgttcatcacatttcagtatcttgcttttcttcttcttctttttattttttccttttgtgtcgttctcttcagaatttgcccaacat

SEQ ID NO: 342404 - DNA, 1000 bp, Homo Sapiens; identical to SEQ ID NO: 160237

SEQ ID NO: 342405 - DNA, 1000 bp, Homo Sapiens
tttaccaatagtgccaaaacatttactgaaagttttcaaatcttgcaaaaatgttacaaaaagtgagcaaatgtggtgaaactaatgacaaattagacattgaaaaccaacatctggttaagtgtaggcaggcatgtaagggaaagacaacgtccataggcagttactatggtaaaggactgcatttgactcttttacacatattatttcatttgatcccatttaggaaagattatcccagacttgaaaattttggttttaaaaaattgtgacctatagatatcacattagctcattatccatcaaactcactcaagtgtcacctgactctcttgggaaatgtaactttgtctgaccaagaatttaatagggaccagattaaggactctgtagaattagaagttgatttgtagaaaaccattaagacatgatgctttatttttgctttctggtagagaaatgtacctccacggttataattttatttccctgtaggaccctaaccagttttatatctttctggcaatttcattttatcaaagccttcctcactgactatttagattccagttttttcatattctcttccaattgctctgttatactgatgttgagttaactggaacttaactcatctgtttatgaaataattatgtttttaataatttcagagtttgtgctttgacagacaatcatcaaccaaccacatgaggtaggtagtatgtcctcattttacagaggaagaaactgagtctcagagaaggcacattatcgtccaagtttatagaggtaagaagtgacagaactgaggttttcacacaaatatgcccgaatcactttatggaaaatacactgatgattcatatgtggactgaaatttgagctgcaacatctccaaaaaaacaaccttacctacatatgtttactacatgtttgaattataaacatgacagctgagtatcaaaagcaactaattttaaacaatctaaacctgagtttt

SEQ ID NO: 342406 - DNA, 1000 bp, Homo Sapiens
ttttttttttttttttccaaatcagtgtttgagatttattattgcatgcttatagctagaaaaaaaaatttactctgaaagctttcatatgaattgattttggacaagttgttccacatgactcttcaagacattcatatcagctgcacagacctggtactccatcttctcttgctgttttgttctctctaataaagcctcacgcagtggaggtaatgcattgtatgaacccagcaaatagagctgacttgatgaagtctcattgatttctttaatctttaaagcctgcatgatagcaggtgcaaactttgagtaatgggctgtagatgagataatcacagggcaagttttgtcttgcaccctatctgcaaccacttttgcaacagcagtgtgtggatccaaaatataccctgaagtattataggtggagttaatagctgctaggcactctccctcagagcaccagtcagctacaaaatcctgctgaagtttctcaactagagccttttctatctggaaatgatgctgactttctaatcgattaaataattctgtcattagctgtccatctttattagccatcaagtgtaaatgtcgttctaggtttgaagatttgagaatatctattgacggtgaaaaggtttgtgctagttttctttcccttagatcataatgtcctgtttttataaaatcagtcaaaacatggttctgattagaggcacagataaattttcgaatcgggattcccatcattttggcatacactgctgctaaaatgttaccaaagtttcctgtgggaatacagacatcgactgggcttccaaaagaaataaatccttgactaacaagatcaagatatgcggaagcatgataaactacctgcggaagtagtcggccccagtttatggagttagccgaacttaagattgttccatattccacagtaagaaagccagtaaaatcagaatcattaaaaattctttttatagctgtctggcaa

SEQ ID NO: 342407 - DNA, 1000 bp, Homo Sapiens; identical to SEQ ID NO: 160238

SEQ ID NO: 342408 - DNA, 1000 bp, Homo Sapiens
ttttttttttttttttttttccaaaataacttttattactatataaaagaagtcaagaaaaaatagatgcatatttttcctacaaaattataaaatattcaggacagttaatattttttccataaatgcgccaagataaaaagatagaaatctttttcacttaaggttttcaagtaccttgtaggaattaaagaataataatgttctttcttctacgttttcctaaagacatagcagttacagtttcctgctggagttatctaaaaaaggacataccaagataaattttctatcatattgaaataaaattagcataaagctttacttctgtctttgtgcttttagattggcaactgtggtcaatcagtgctgcactggaatttccaactcagcaggggaaagaatctaattaaaaatgacacacactctgtattttgtcctttagaaaacagaaactgcttgtcgatatcccttaaaaagtgcaattgccttctttgtcatttctttgtaaagtctgagatgttgtttctaaacagcacagcttacatgaaaccacgcaagtaaaggaaagaaagtgctttagagggcaggttccatttgacacaagcagcacaggaagccgtacacttttgatgacagtaattcaaaaagtatattcatttgagtttctcaataaacgctttgagagaaaaggctttaatgttgattcagatgagtgttaaaataaagctttcttttctgaaattagattatggggtaaaccaagccagattatctctggagatgacagaagccataattattttgggaaatttcaatcactgttttggaattgatacctaaggctttcttctcccctattatttatgggctttttaatgagatatttttctcgggagatgcttaggtaggaaatatcagcttttgaaagataaaggtacaattatcattagaatcaaaagcccattaaataagagtctcaaacaaaggttttctagat

SEQ ID NO: 342409 - DNA, 1000 bp, Homo Sapiens
ttttttttttttttttcggggtggtatgactgtagttattagatttagaaacccataaaccttaccaagtcaggaaaagaccgaaaagctcattggtatcccagttacaaaaatattccactttaaataatatctttgtggaaaagcaagaaaatggctgtaagaaagggacgagaagatacctttgctcctctgagcaaggattcaggcatttttgagtagtggagtggagatggccgggagaattattgttaacagcaacagctttctaaaacctgcacccaactttaaattccaggctactccccaggaaacgtgtggagccagtgaacggaagaaaaacaatggaaggaaggcttgaaaagtccattacaaaactacagtcctttgaaaaagatttcaaagatattaaaatgaaaactgattacattaaacaataacttaaacttctgttcttctgttaaaaggttgacatctatcaattttgggtaagcttacaatgaggtatttattgcatatggtttttaccataacggaaatcttaagagatattctacattttttttttagggagagttttgctctttttgcccaggctggagtgcaatggtgtgatctcagctcactgcaaactccacctcctgggttcaagcaattctcctgcctcagcctcctgagtagctgatattacaggcatgtgccaccacacccagctaattttgtattttagtggagacggagtttctccacgttggtcaggcaggtcttgaactccccaacttaggtgctccgcctgcctcggcctcccaaagtgttgggataacaggcgtgagccgctgcgcccagccacatgttttgtgaaataaaggcacatgcattaaaaattgtaagcacaggaaaacaaccctaaaaaatgtggacgtgtgtgtttaagaaaccagcctccaattctgtttgttatacactcatgggctggtctgattaacaggctgagcttcag

SEQ ID NO: 342410 - DNA, 1000 bp, Homo Sapiens; identical to SEQ ID NO: 160240

SEQ ID NO: 342411 - DNA, 1000 bp, Homo Sapiens
tttttttttttttttttttttttagtttgccatattttatattcaaacgaaccagatacatcaacatttgaatgtcactggtaggactgggaaaaaaatgtaggtgatgaaggcaagggaaatagagaaataaaggcggtagtgggggtagaataaaagggaaagaaaattccccaatggaatgaactctaaaatatataacagacacatatatatctattatcaatccagatctagatatatatgcatatgaagtatggatgtatatattttaaaaatacacagacaccttttacaagaatatatgaatgcacattaattttttgcacacataattctgaaaaatcactttgattattcatgaaggtgtgtattttttaaaccatcatttactttttctttacttttttttgcaaagatagttgtgctgccaagcaacttgaggtaaaggcattaaaagggttagactacaagaaatgaaaacaaaacaattgcgatacttcctataggagaccgcacaaaaagcagttggctggtttcatattgcataatgatgctgtgttccttgatgaagtaaacaatcttccttgtattaacataaggatcagaccttggcccccacacagtgttggtttctgtatggctggaggtgtccttactcaattgacttcactggaaacatacgttgtatgtcaattcatctttcagtacttcctctcagagaatatacttggactatttaagcgaagtacattgtgcgtaaggtatcttggtgaatctgtacagccttggcaagagcttgtggatctcgcccattgctttgtcctgaaacgtgacttccttcagcactgtcatgttctttgtccacaagatgatatctggctctaaatgctaccaggtgagcataatacgctggtgcaggtatagaaacagatcgtgtacagcgtacgtaagtgtggcagagctggtaagttagcagctgaagttcatctgcagtaaa

SEQ ID NO: 342412 - DNA, 1000 bp, Homo Sapiens; identical to SEQ ID NO: 160241

SEQ ID NO: 342413 - DNA, 1000 bp, Homo Sapiens
ttttttttttttttttttttttttaaattttaaagaattttttttaaaacaagaaagactaaaatgtggtaagaaatcagtcttgtgcattttgtacatttgtgtcctccactctgtcttcatttactgctccaggaagctgatgccacagctggccacagttgaacaaagacatcagaaggccagttagtctctaccacagaagcccccaagtgaaccgaattctgaagggcaggtctcagtgtcccttaactttgttctccccaggagaaatccattttgctgccaaatgtgaccagcagacttgggcaggtacatctagcacaatcacagtcctgtcacactgccaacgtggcccaaggcatggcgtgcagggcagtctctctggagggcctctgctatgcctgctcaccagcaccacctccaccagcagcggagcccttgctggatgcctgggcatctgaggagcgggaggcctgcttcggcaggcggatggggacatagatgttggaagcacagtgctccttgaggtactctcctcccttttcttcatactctttcctggtgatccaaacttcattatcatctaggtggttcaaggcccagtcacgagcaccgtaccaggcatccagcacagggttcgaggcaagttgaacctgaaaagaagaccggaagggtctcatctccaacagttccttctccattctggctttcatgccaggatacattgtgttgccgccagtgaggaaaacgttctgaaccagcatttcctgaacgtcctttgggtacctgtccagaatgtactggagagtctctgcaatcccagcctgttcttctcctatgagagatggctggaaaataatctctggagctcgaattctttctgtcccaacaaatagctgatgatatgctgccaagttaaacacgggctgaacagtggtgaccggcttctccactccaggtgtttcctctgaaaacaagggatcaaaatcattcatgc

SEQ ID NO: 342414 - DNA, 1000 bp, Homo Sapiens
gtgacactaatgttagcagccaagataatgtatctgaatattaagctaatatataatataaacacttgaaatagggagttcatcttaatgaactctaccttccagaaacagttcactcacatacaaaaaatactccaacaaagctaaatcagataatacaaaaaattcagaaaaaaaattacaatcatatataaaatttgtaactcaaatattttaaatatttacccgccaataaaaaaatatacaaattgtttgtttaaaatgtacatcgagaaatatacttttccatgaagatccacataatataaaaatgtatcttaaggaccacatgataatctatacaaagcattgttagtatggaacattaagggaagtcagctgccaaagtattcacagtctcttttggaatgtcaagatgaattccttcaaaatagtgcaggaatcttcttttactttttccttgttcttttagcttctcagtcttacagatgtttcgaagggttggcaggtattcaattatactagcttgtctattacccacatagagaagagatcgactcgaaaatacacttttaatgactgatatcctcttccaagcattgtctaaattagctgctgactgactaaagtatacattattgcgcttttgtgaaacataaaaagtaagatcgttggttggatctcttcctaatttcttgcaagaattcaaggtttccaatgcttttgaaatagcagaagaacatttagtaaagctgagagcttctgcagctgcctttaattctccagagctttgagaagtccatccatcattactctcaagactaaactcatcacaaagtccacttgtaacctttccatttgtccaactaaagtcatttctaccgtatttgttttgttcccttacatcagttaaaagtgcatctaagaaggacatgttatccatgaactcagagagagaatttaaacaatgagaaacaagggcagaacatttttttcctgc

SEQ ID NO: 342415 - DNA, 1000 bp, Homo Sapiens
ttttttttttttttttgagactgattctcgctctgtcacccaggctggagtgcagtggtgcgatcttggctcgctgcaacctccacctcctggattcaagcaattctctgcctcagcctcccgagtagctgtgattacaggcacctgctaccacacctggctaatttttgtattttcagtagagacggggtttcaccatcttggccaggctgctcttgaactcttgacctcgtgatccaccagcctcggcctcccaaagtgctgggattacaggcgtgagccaccacgcctggcctggttttttatttattcattttctcgtcttttttgtctgacatctgtctactctcattacatacatcagctacacaaagaaattttatgtcttgttcctccagcatctccacagtacctagcacagtgcaacatatacagttggggttcaattaatacttgtcaatgcaggtgaaattgagaggacagacttgggaatcaggccttgattaaatcgtgctttgaccctcctctctgtagctatctgcactccctgggcctcactttcctcctctgcgaaatggacatattcggatagttgagtagatgtgcaactattgtagatgaaaataaatattgcaataaagccagtagcagggataaaactaagtacatggtggctggggttactattattagtctcctgggtgtgactgtatttatagactggggctcttgagccctttgctgacttctgaagaaccacacctccaccaggctctaagtcaggggtagctggaagccaccctggcacacttccccacaatgtctatctacagctctaaccactcaagtgttcacctcttcaccctccagctcccagctctcgcagcttgtcttcaccgttcctctttcctctccaaggccacctggactctcgcattccggtcctttaaattctttcttccttccccgtcccctccccacaggggcgaaagttgcccat

SEQ ID NO: 342416 - DNA, 1000 bp, Homo Sapiens
tttttttttttttttttttcccacgtgctgagtgatgttttatttgagcctcacaacaaccctgtgaggtaggtgcagagtcccgcggcacagaaagatgaggcctgcgctcaaggccccagggcggggccgtgtgtgggcctgaggtgcgcactgtctactccacatcagggccccgccctccaccccccacattctcatacacacatttgccacaggcaatgactggttcaagaggaacgggtcccctgggctgggctgcctgcctctctgcagatgtctaaactttccctcaacttccaggcagggcctgggaacagattccctccatgctaggccatcatggcttcccatggaaattaacaaatcaccatgtcctactacaggtccaacatcacaacaggaaacagcttcctctggtgtccaccgcagtccccttccccccccctcagactgtggtcaataaacatgggcctggtgcacactcaggcagaggctccccgcacactggagccggcggaggcaggtgcggccgtccctgactccagcacatgaacactgtggacagtccacgtcagccctcattttgcctctctttctctgggcctgaagacagccctgggtgctgagccatgctgagcccttcagacctggctgagggttcttgggggtcttggagaagctgccttctctccccctctgtggggaaacccttcctctggctgcaaatggagtgaagaagaattcctgcagccacagagacgttcaaggactcaagtccaggaggcagctggcgccggggcaggatggtgaggagaagctggcaggaggcctgcacctcctgggatagacctgagccctcattccccagcacaaggagagtaggccgttcccagaggaactccaagcaactcatgatggggatctcggaggactggggatcctctgtgcttgggcagcccaccgtgccggccacgagccagccctgctgggctttggt

SEQ ID NO: 342417 - DNA, 1000 bp, Homo Sapiens
atgtttaagctgtatatttactcatcgaaacactcggtgaaatcagggtaaaatcaactaaaggaaaaatatttgtttcattcatttgaacttaaaccaactaaagtagtactcatgtcattacgatgcagcaaatacaagacctctttctacaaagattagcacaaccaacaaattaggggatatagcaaaacagagccaaaaacggtaagaaatcaattaagtatgttacagcttaaccctttacctcaatagttttaaaaaaataagcaaagcctcccaatcccaaacaatacgaatacatcttcatcaccaattcgtacttgtatttcttattcttgaggttagattctaaaccctaaagatatccaaactagtattagatctacttatctatagccagagacggcttctatcaatgttgtccttagcagccaaggttattaaaatgtcttttctaggcagggcgcggtggctcacgcctgtaatcccagctgttagggaggccgaggcgggcggatcacaaggtcaggagatcgagaccatcctggctaacacagtgaaaccctgtctctactaaaaatacaaaatattagccgggcgaggtggcgggcgcctgtagtcccagctgctcgggaggctgaggcaggagaatggcgtgaacccgggaggcggagcttgcagtgagccaagaccgcgccactgcactccagcctgggcgacagagcaagactccgtctcaaaaaaaaaaaaaaaagtattttctccaggaagatccaataggaaaaaaaaaaaaagaaacctcgctgattaggctccaaccatactccaccctccatgagattgactggataggcatcatggaaaccagaacacgtggtttccaaacaagaaaaatcctatgagggatgggaggaggggagaggaaggattcagccagtgtccagactgaaattgagtaatatcagtttcactcatcttcacacgtcttcaggttgca

SEQ ID NO: 342418 - DNA, 1000 bp, Homo Sapiens
tttttttttttttttaaaatggtgagaaaagctttattcaagagagtggtgagaggagctcacctccgagttcaacaaccacagctggagattgatggcgttggaggggtcagcggatgggaagttgttagggcggccttcgagggtagggggattctcactggagtggctcaatgaggatcttgcaggaggccggcagggtgatgagatcaagggtgggagatgaggaatgggatcagatatcgagggtgggtaattctccataaactgatttagaggattcttgctaacaccggggtcggcgggcccagcgaggatggggatggggtcaggcctcgtcgaggaaaggactcaggggcacctgcctagagttcggccacagagtgtgtcaggctctgggagaggggcctcacggagagttggagcaggcacggaaccgccaacacccaggccgccaacgcaacttcccatgcatgggccctgcaggcatggaggacaccgtgagaacaaagtgcccgcggcagagctggcgtcttggagcgtggccagggaagtctgggaacagcagtcggctggggcaggagagagggcagtggggtgctggggccatacctagggctgtgaagatcagagttctgggcttcaggggtcaggcaagagggctgtgggcagctgacctgactcaacaagatcctggcacagctgagctgagaagcaactgtgaggagaccccagcgccccccatttaaacggcacctgccccacactctccttccttgtctgacttcctgtggcactcagcactccctgccactccaccacccacttattctaccttctacgtttgtctccttctatctccccctagaatgtcagcccctgggggtcaaggctgtatcctcacgtgtcccaacacgggtaggtcacgtgctcagcatgcactggccagagggatgcagacaggtgcctgggaggaggctacggccatcgccccgaaagc

SEQ ID NO: 342419 - DNA, 1000 bp, Homo Sapiens; identical to SEQ ID NO: 160244

SEQ ID NO: 342420 - DNA, 1000 bp, Homo Sapiens
atgtcccagggatggattttactctaaaagtgaatacttaatgtcaatacagagagacatcagttcgtgaagctgaactgtctgattgaacttctatccatttccagcataaatatcaaagtataaactgatcactacttgtttgcaatgggaagaaagatttacagaaaaaaaaaaaaaaaaaagcattgatgtatcttcagtggagaatgtttagccagcatgtagtttgtctagtccagcattcaggagcttctgcctgcctggtttcttgggagttcttttcattcttctccagctgggggaggtggctcgcacagcttgtacagccttggtgcagactgtggagtccggtctctgactcccaaattcttcgctgtgttctgaactcttgctccctgcttccgcatcacatctgtagcctgcatgatgtaacgaggtggcagtccgtggcttctggccagaatgatggcttgctccagcgtcacgctcagggtgcaccgatgcacaccgctgctgcacatgatgatgtggcaggcgcccagcctgttgcacagctccgaggaaactgacagcagtccaaccccagaagcactgcaagctgtgtttgcacaggcagctgtgcgcttggatctgataaacgaggctaccagtcggtaaagttcatccaaagcgttgagaggcctcattagcttatctacataggcagctttggatgtggagtttggtggtgaatttgacttgtccaagtagaatgccctgagcttctggttgtactgtttgaccttttccagtgaggctgcatttatctgagcttgaaattcttccacagaaacattgtctctgtaataatatccttccatgctctctagtgcttgtgcaaaaagaacaggatgaattttaaaccctcctccatttttcagccgttgaggaagttgttcaaaatgataactatcaatgtagaagtaaactttcagagcttgccgacttccttctgctt

SEQ ID NO: 342421 - DNA, 1000 bp, Homo Sapiens; identical to SEQ ID NO: 160246

SEQ ID NO: 342422 - DNA, 1000 bp, Homo Sapiens
cctgggtactgggttgctcagcactggcctctcaagttgctaactttttgaaatcctgaggtatagaattctttgttctattcctggtctagctggtataactcagcccatgcaaactgtcctggcccttcagtcttttcatgctccataactttcacaagatgctgtacacctgctacagacattggtctctaaggagttattctctagtgaatctctttctcccactcaactccatgtggggatatctgacccttctatcagtacaacgataagactcagattgggtcttttgtttgtttgtttgttttgagacagagtctcgctccgtcgcccaggctggagtgcagtggcgcaatctcagctcactgcaagctccgccttccaggttcatgccattctcctgcctcagcctcccgagtagctgggactacaggcgctcgccaccacgcccagctaattttttgtatttttagtggaaatggggtttcaccgtgttagccaggatggtctcgatctcctgacctcgtgatccgcccgcctcggcctcccaaagtgctgggattaccggcgtgagccaccgtgcccggcctcagattgggtctttattttgacctcccctcttattcatgccttagacggaagagcacacacacacacacacacacacacacacacacacacacaggcctaggtatatgccagtcaagcttgggaaagcagagtggggggtgggggtggcttagtgcaaacaggggtcagttcagtccctttgctgtgtgcctggtggtgagcttcttgcctgaagtcccagtggtcacttctgctctgtttacttctcactgaacattaaaatgaggcccagggagaaaagcacaaatgtcaaggaagagagatctgtggaggaatatgggtggagaagcctggaaataaagacagagatccaggaaaggaaatgcagagacaaagagaggcaaagataccaaagcagacatacttg

SEQ ID NO: 342423 - DNA, 1000 bp, Homo Sapiens
tttttttttttttttttttacttgtaaataaacaattttattgttcatcttcacatatgtgaaagacatcactacagcatccattactctcaagttacaaagttataaaacaagattttaaaacttaatatcttgataaggtgcttaacttctaaacaaggaaaaattaacattgtttttaaaacttactgagttattatgcatctaatgcaagttttatccaaaagtaaatataacatgacatatccctaatacaattaaataatctataattaataagctgagaattggggttcaagaccacagtttgaatttttaaaaaatataaataagtccattagcacagtaagttttgactacaggcctgttatcaatctatgtcatgagtgacattactttaactcattaggaaacagaggttagtaacaatcaatacctctcctttaggtctattgctgataccaattgagatgtaattaagagctttataactcggctttttaactatgaagcgaggctaacacataggataaaaataagtgtttgttcacaaaacattttcacattgaaatcaacctgaatgacaagtagaaaatgagggaatggcatggtgttcctgaaaatctaaaataatttacaaggttttcattaatgattgttggtctctttgttacaaaactggcaaggactctcaaaagtttttaattatgaaaatagaaacagccgagttacacaattttcctttcttttttaaattcaatttcaaaacgtggttttctgtacttctctctaagacgggtactgccctctacactaacttccacatttaataagtacttttcacaatcacattcacctcagcaggattgtgcataatcaaagattgacattgtaatgaattttccagaaacattttattacccaagtccctgatttatcgcattctgagaataccataaacagtggtgaaaatacaaaatattgttatatctgggacgtt

SEQ ID NO: 342424 - DNA, 1000 bp, Homo Sapiens; identical to SEQ ID NO: 160248

SEQ ID NO: 342425 - DNA, 1000 bp, Homo Sapiens; identical to SEQ ID NO: 160249

SEQ ID NO: 342426 - DNA, 1000 bp, Homo Sapiens
gagacaagatcttgctctatcatccagcctggaatacagagtcatgaacataagctcactgcagcctagacctcctgggctcaagtgatcctctcacctcagcctactgaggagctggaaccacagaggcaccagacccagctaactttgtgtagaaacagggttttgccatgttgcccaggctgttctcaaactcctgggctacaatctacctgccttggcttcccaaagtgctggccacggcccccagcctaacattttgaaaattattattattattattttcttgctctgtcacccaggctggagtgcagtggtgcaatctcagctctcagctcacctccgtctgctcggttcaattgattctcctgcctcagcctcctgagtagctgagattacaggcatgcgccaccatgcctggctaatttttgtagaaaattattatttctatgttacatcattttaacaatgcagtggttatctttgacctaaaaacgaaagtttaaaaaccattttttaaattaaagaatgcaattagtacattcttgttgctgacatgaagattacagtgcatacctagctcctttcattatttataattcaaatctttgttgtacttcatctgcaatcattccagaaattgcaatggaagaagtagcagcaggagaaggtgcatttctcacatgaagaatgcgatttccaatatccccaactcctgcatcaaatacaaaatcttctaccagatttccatctctatccagggcctgggctcttactccagctgggcccctaagtatatcactgatagtaatttcagggatgaatttttgaagatacttcactgttgcaccaagaaaacatgctttatacatttcagtaactccataggaaaaattctgggatgccagtttaatcaagccactattgataattatatccataacatctgtggcactgaagtcaaagggtctgtaaccctctcgtttaaaggcaagaactg

SEQ ID NO: 342427 - DNA, 1000 bp, Homo Sapiens
gcggccgcccgcgccctcggcccgccccccgcccgcccccggccccgccgcgctagtcggggaagcggcgcgcctgcatcttgcggaagtagccctcggcctccgcctccgcctcgcgctccgccagccccaggccgcccgcgtggcgccgcagcgtggactcccggctgcccgggcccagcgccccatcggccgcgcccagcgggggcagcccctcgcccgtggccaggttgacggtggccacggccccgaaccgcggctcctcctggtccacgtcgctgaccgacgagccgggggacacgcccgggggcttggccccgccgcggaagccgcgcgccaggtcccccagctcgtagccgccgtcggcctccgccttggccccgccgcccgccgccttccactcccagggcgcgccgccggccgacaggtgcaccacggggtggtgcggcgcgtgcgcgtcgatggtcacgatgctggcggagtcgcggtccgacggcgaccggtactgcgaggagtcggagctggcgctggacgacgacgccgtctcggccgccttggggcccggcgcgcccggagccttggacatggcgatgacctgcagcagccgcggagggttggccactgccgccccgctcttctcggccatcatgagccacttggcgcgcaccccggcgccgcttttgggggacaggccggcccccgtctgcgcgccctcctccgggatgtgcaccagcggcggcggccccgcgcgcggtgggaggatgacccgaggccccagccccggccgcgcctgcacggtggggtagagcgagggcggggccgggccctcgtcctcctcctcttcctcctcctcctcttcctcttcgtcctcctcctcttcctcctcctccgccatgggttcggcgggcgcgcgcaggtgcccggggctggcgtcgtcgggcagccccaggccgcggccctccaggctcttctgcttccactcgctgatgagctgcttgga

SEQ ID NO: 342428 - DNA, 1000 bp, Homo Sapiens; identical to SEQ ID NO: 160251

SEQ ID NO: 342429 - DNA, 1000 bp, Homo Sapiens
gctgctgtatcttttaaaaaagcaaaatcaactcacatttaagcaccaactccatgcaagtaacctgaacggttcagtctttttgtcatgtatgtggcctttggttctccaactacatgggatctgtgttgttagcttaaaaaatacagaattggcctttcaaaaaaaaataataatctacagcaaccaataaatagtctcaaacaaccctgctgactgcagctgccttctgaaggctgggaaaaggaggtggagatagagcagaaagaggcagggaaaggggacgctgcagctagctacatagcaaggaacacgcccccatcatgtcctccttgctctgtcagaaggcgggttgttgtcagtctcctgatcaggctgccttagaaacgattaaaaaaaaaggaggcaggaagactaacaactaaaaaatgccagctccttgaaaggaggggccagggtccttgggatctcctccctccccttcttcccaggatctttccgtaaatctaaaggggtgcggggcacaataggggacaaggggtttgcccaggatattttgtgtgcaccaacggcagagcacgcaggaaacggctggttgttatctttccctttctgtttcaatcaagagcactccagagcagcaaccccctaccccccttcgcttcagcccctagcagctgctcttcctcctcctagcatcccccatgccatcctcccccctctacaattcgaactccccccttctgcatccaatggaaaacaaatgcgcaacgccactggctgaacctgaactcaacttcccttccttgggcaactttcctttttgctgaagggggccgaataatgtttatagaagcaactccgttcttgccccagtactaatggggaaggggcaacgctctgacccttcatccaccttgggtccccttacaagaatcagagacaaccccaagtcctttctaaggaataactttgcttgataatcctttttctcccatcc

SEQ ID NO: 342430 - DNA, 1000 bp, Homo Sapiens
caaatgaaagtatatttatttttataaatgtttcctccagtaagtttatgtttgactgtacttaagaaacaggaaaaaaaaaaacctgtaattaaacttgtgccaagattaaccaacagcctctactgcttgtttcccattattacaggttgggtatcccttatctgaaatgcttgggaccagaagtcttttagactttggtttttttgtgtgttttggaatatctgtattatatttactagtcaagtatcccaaatccgaaaatccaaaacctgaaaagctctaatgagcattttcctccagtgtcatgtcagtgcttgatatggttttgctctgtgtccccacacaaatctcatgtcaaattgtaatcttcggtgttggaggaggggcctggagggaggtgactgaaacatgggggcagacttcccccttgctattctgtgttagtgagttcttggagatctggtgtttgaaagtgtgcagcatctgcccctttgccctcctcctctggctctagccacgcaggacatacctgcttccgcttcaccttccgccacgattgtaagcttcccagggcctccacagccatgcttcctgtatcacctgtagaactgtgagtcaattaaacctcttttctttacttataaattacccagtttcaggtagttctttatagcagtgcaagaacagataaatacagtgctcaaacagttttagattttcggatttgggatgctctcaacctgcaccattagattatactctcttggtataaattatttaaaaacaaatcccaaactaatacataaacaagccgaacaaacctatcagcataaacttataaacacaaacacaggcaatacacagacaccaggtaaaacagggatggtatttctggatggtttaatcatgaatggcggtaggcagtgtaagaaaaaagttcctagagcatgataaaccttggtttctggcacaggataaacctttcatttcatggtgt

SEQ ID NO: 342431 - DNA, 1000 bp, Homo Sapiens
tttttttttttttttttcagatgtttagacccagcttaaatcagcagctgagccaagacgtgctttatttttcttttactttttttttttctttagagacagggtcttgctatgttgcccaggctggtcttaaactcctgggctcaagtgatcttgctgcttcagcttccagagtagttgggattggccaggtgtggtagatcacgctgtaatcctagcactttgggagactaaggcggatagatagcttcagtccaggaatttgagactagcctgggcaacagggtgaaacccccatctctttctctatgtccaggcgagggtaagttttggccaggctcccgctgtccagtgtccaggcctctctgcgcccgtcccgcgctagcctcccctgccgccctcccttgaagaagaggttcatcagcgtcttggagcgctgcagggcacccttctccccaggggaccccgacttctccttcttccgctgctgcttctcctcccacaaggtcagatagctctgggagcgcgtgatggggggccggggtcggctgagggccagcagcaaagccgtcttgggagactcagagagcgcagagtcaaggcggcggccgggatgggggccgtccgagcggatggcggtgtccctgaggatgactgtgggccgcacgctgcaccaggtctccacccggcctcccgcatcgggctccgtctgcatggctgtgtccgcccgcccccagcctgggccgcggctgccgggctcctcctgcccgaggcagatgtccatgcggtccgacggcagggagcccgagctgtagggggcgctggaggcgcacgaagagacgctggagctgctctcagaggccggggacagctgctgcagcaccccgttgctcagtcggtccagccagcagtactcagaaaccatctccttgtaggcaggataccggccggtctccttgatggtcagcatgatgtgcgtttggcccttcagcacctccac

SEQ ID NO: 342432 - DNA, 1000 bp, Homo Sapiens
tttttttttttttttatattaaacagtttatttcagtaacattgtaaggcaacaattaatcctcagtaagtcagcaaaccagtgacaagaaattgacaaacactccttctacagcttcctgagacagcaggctggcttgtggccccctgggtggtaacatcttaaggaatcctatcatgtttgtttatatatgctaaactgtaaaaacaaacacttcatgcgacaatcattcttaggtcaaacacaagaacgaactattttgaaatcaattcctcacactttttccctgaatatgcagtactgtactactaacatctaattctgtagaaaataatgcatttgttagtgactttgttagagcttgaaaagacccttttagaaattatttaaatgatcactctttaaaaattttttttaatctcagaatctactaatgtgacagacaaacggtatgcttaacagagtcataaatactgtgtataattgcttgaccatttctggcatttaaatgacctcccagaatattacacaagccctgagactagtgagcatcttactactgaccttgtacaataccaaagcttcataatgctaaagaaaaccaaaacaaaagacaatggtttacacagggaaataaccctaaggcaatatgaaaacagtcataatttattactgataaagagtaaaggcatccttcccatagagggggggaattcacagggaacactaattatatcagatgaaccacggggatagaaaataggcccatttttaaaattcattgagaaattattactttttctccacaactgtgattctatacaaaatataaaccctgcaaaccttatgtgctacctgacagataaaagtagcaggagccagactcttgaagcacttgagactgatttctacaaagtccaggaagagcaatgattccagtgtgcagtgctgatgcatgtgtgagcctaacatgttattcagctctggttgcagccccatc

SEQ ID NO: 342433 - DNA, 1000 bp, Homo Sapiens
ttttttttttttttttcgactgcaagatcacaatttatcagtatcataacaaagaggtataataaagtttttctaaaatacccaattcatttttacaacaaatcacagtgataaatatttctaaatgattcatgtactttcatatgaggttattaatatttatgcttttctggtattagttttttcctactcttgcttcaaggtccaaccataaatttctggacagtctcaaatatcccaaggaccacgaataaaccacaaaagtggtaattcattaacatttattttcaccaatgcaataaataaatctgtcatgaggttaatttctcctaatctgtataaaataattccattaacctgtgaaaagtaatgatcatactgatttgtctagggctcaaacccttagacaaacatctctttgattacctgtttgtgtaaagaaaactgaatgcattttatattaatatttaaactactgataactgtaaacaaagtagcatttattaaaatagaatatacacttaatttatactaaattccagggagatttatacaagtttttcagccttaatttttaaaggaatgcatgattttttttaaacattaccagtcaagtatatacaaaattgaagtatgccattcaagccagattgtgattttaaaataacaaacctctaaatagctaagtaatgtacaatgtgtaaaattccaattaaacacaggtataaatcttatataaatattggccctataataccgagcgatatttacaagcaaacatgatccaaacagcacatgcagattcagggtaagtaaatactcggacacgaactgccagtcgcacttggtctccacggcaacagattatttcttcacagaaaggagatcgaagacatgtggcaaatgcacgtcttgcatttctatacacaaaatgtattgggaaccctttaaatgtgtgaccatcaggtacagcccttcttatggcatcttgaaattcttc

SEQ ID NO: 342434 - DNA, 1000 bp, Homo Sapiens
acacacacaaatcctgatttattccctgtttctcatacatcgttggcattgttctacttaaacagcgacagtgatgactccaaaaaaaatgtttagaattagaagtgcatgttaatctgagtaacttaagtacagaaaagagttagtacaccacaagcattttctacacttttattttgtggtgattgtgagacaaacacagtccaaacaatagacttcttgtcctccccctcccaacaactatctgactccatagctcatgcaccccaattacagcaggtgtcgggctggcataaaggcttcttaccaggattccagtttatccttctcaatccttttctcatctctaacaaaaatgccacacatacatgtagttgtgagaggcaaagtcttctttacactcaccaccagggggcgtatgggagcacaaaagcctcacaaaactgctccaggatcctgcctcttccagggccggaatccgcggccttcccaggaatcctaacctggtctgggaaggggcatcacaaataagctggcactcagtcgtgtattaaaaggatctctaatgctccctttaagactttcacttctacgccatctctaacagggccatgcaggtctccatgagatcaggcttttttggtccagtgtttcccaggtctttccctacactgtttcaggccacttgggtacctttcagtgcagactgcttcaggccagaaaacctcactcccacctctttcacactaatgaatttaatcggtagccagcagccaggggagttgatgtggaagatgctctaagaagcatccccaattagcaagcctcagccagaaactacctacagggagcaggaggccctagcgggaggcagcccacgcctcattattcctgtagcaggaagggacgtccagacgggactccagaggtgatggaaagtgggggaggcacaaaagcagcaaacagcagaaggaaatgccagcagctgaggctcggcagc

SEQ ID NO: 342435 - DNA, 1000 bp, Homo Sapiens
ttttttttttttttttttttataagattttcctctttactctcgtccttacatgtccacagacttcatgtagagaggctgagcctttcgaccacaaagtgtgttctgtgttgaagatgttataatgatgggagagggcagttgcagcagcttctaaccaagtgtctacaacacatgtactactgtttcctacctgtgtcacctctgcaaaaaatggagctctgagcccagttctgtgagcatggtgtcagagccctccaaagtcctgagaaatcaataccagggatccaaatctcagacaccagtttgaagcaatacctggataccaagactcagagtgaggatatggattttgggagctgacagttttgctgatcctgccacactggcaggggctgaagtccagaaatggtgtgtagctctagtcattcttattcaccacagctcttatttcacagttttttcccttggtttcttctgtttcttctgttcctcatattcaagtattttctgttggaaatagcctgcaggaggattcttgctcttctcggcttcctggatgaaaagtgagaagagctgtgtcttcacaaacttcttcacaaatcggcggttggtcttggaggtcagagccttacagaaggatctttcttggaagtggccttgcccatttgcctcccgcttgatataggaagcataatggcccacaatcttgacaaagaactgcacaaaggggcctgaaacatgctcgttgatttgttctgcagtctttaactcattgatcccctgaccaagagagtctaagatgtcatcctgaagcttcggtggcaggatgtctttttcatcaccaaccgacattaagaaggttccttcacaaagattgaccagcaggacctcttccatagggctgtccatgacctcctgctggaagcgcatttgtactccaaccatgaagggggtggggcagcagacggtggccagaaggctctcagggacaacaggga

SEQ ID NO: 342436 - DNA, 1000 bp, Homo Sapiens
tttttttttttttttttttttttttttttgagacggagtttcactcttgttgcccaggctggagtgcagtggcgtgatctcggctcactgcaacctccgcctctcaggttcaggtgattctcctgcctcagcctcccaagtagctgggactacaggtgcctgccaccactcctggccaattttttgtatttttagtagagacgaagtttcaccatattggccaggctgctggtctcgaactcctgacctcgtgatctgcccgcctcggcctcccaaagtgccgggattacaggcatgagccaccacgcccagcccctgcaagcagtttctttaactctgttgggatgccattcgtgggcaaagctagatttgggacaagttgcccagctctgctaggaagagtcagtcctcagggggaagtttcttttcacctccgggatccccagggcttcctgggttgactcaggacttcatacgcagcctggatctccaggaagtgcctctgtgcctcctctgtctggtccaggttgtggtctgggtgccagaccttcactagctcctggtaactccgatgtatttcttcatttgttgccccttctgagaggcccaaaacctggtaagccagctgacgcttctcatcctgaaaactgtgaacaaactcatagagcttcgcccactcctgaaagcagctgctgttgaagccagtctcccccatcagtagcctccagatccggtaaggcagaaggaggacaaactccatgaggcggccaagaagggggaagaagctgaaccaattcaagaaggagccaaaggtttctgccacatagctgagggtggcagctgtgttgcagagggcactgtatgccagtgggcctgtgaaagcaaggtaagccaagcccagacgatagagccgcacactgagcggctctgatgccaccaaagctttgtagcggcgatgcctctgagctgtaatgctggcggccacgctaatgggcagtat

SEQ ID NO: 342437 - DNA, 1000 bp, Homo Sapiens
agggtgtggagtgggaaatcaggggtctcacggccttcagagctgagagccttgaacagagatttacccacatatttattgacagcaagccagtgataagcattatttctatagattatagattaactaaaaacatttcttacaggaaataaagggatgggctgaaataaagggatgggtctggctagttatctgcagcaggaacatgtcgttaaggcacagatcacttatgctatggtttgtggttcaggaacccctttaagcggttttccgccctgggtgggccaggtgttcctcgccctcgttccagtaaacccacaaccttcagggtgggggtcatggccatcacaaacatgtcacagtgctgcagatattttgtttatggccagttttggggccagtttatggccagatttgggggcctgttcccaacaccagagatttccccaaacagcagatgactttgttagtctcaaggacagactgcctcagcggacctctgctccctgcccacgatcattacccccaaaacatgccggcaagtctctgctccctgcgtcggcagagggatttataagccctctcttataaatcctggtttagcctttgttttgtgactgagtccaccgagatccttgcaggagaagaaaatttgcaggcaaatgaactaaatgtctcttcctgacactccccttctggggggctgaggaagctgtgaacagcctggtttgtcacacagcatgatggccaccacactgaagcagcagcaagcagattcatggaaggtgtgctgagaaccagccacctgggagccctactgtccctgggtatcctctggcttctggctgcaaagctggtctttttttttttttttttcattgatatagggtcttgctttctcacccaggctggagtggtggtgaaatcacggctcactgcagcctcaacctcctggtctcaggcaatcctcccacccaagcctcctgagtagctgggacta

SEQ ID NO: 342438 - DNA, 1000 bp, Homo Sapiens
agatcacaaaaactttaatagtcaaagctttgtaatttataatgttagaatttctcaacatactgtcttgattacaagttctgatggccaggcatggtggctcacgcctgtaattccagcacttttggaggccgaggcgggcagatcacctgaggtcaggagctcgagaccagcctggccaacatgatgaaaccccatctctactaaaaatacaaaaaaatagccaggcgtggtggcaggtgcctgtaatcccagctacttaggagtctgaggcaggagaatcgcttgaacctgggaggcggaggttgcggtgagccaagatcgcgctattgcactccagcctgggcaacaagagcaaaactccatctcaaaaaaaaaaaaaaaaaaaaagtcctgacggcacctcagcctcccctcaaattccctccccgtcctgcagaagcaaccctccaagacttctcccttactaaaagtacactcttcttatagtcttattaataaaacaatgttataattgctaaatgtaacacattaccacataaacacactaaggcacgccgattactaggctccttagacagtggtcaatttgaacaaattgatgttcctaaaccaaaaactcagcagcttttttcattcataaaaacatgtatcttcccgctggaattacctccagccaaaatataccgagttgggtgcatggcattgatggaacacacagagacaaggtattctccaccaaacgaatgcaccctctttcctgtctcatggaagatttctacccgtcgtggatgggccatgctgccaactatgacacagtcttcttgtttaggatcccacatggcttggaacctggtcagccatcgcccagtgaaagtgttgtgcctgatggtggtgaggagcggaatcttagaagatatacagctgctgtcaaaaattctcagattacaatcagcacatgtggtcaccactctgttaccagtaagaggtgaaaaatagg

SEQ ID NO: 342439 - DNA, 1000 bp, Homo Sapiens; identical to SEQ ID NO: 160253

SEQ ID NO: 342440 - DNA, 1000 bp, Homo Sapiens
gcaagttaagcaaagcaactttattccttacaggcaggcaagggacaacagaagcctgggatgtagggtgaactggtcccccaaggctcaggaacctgcccagggcagatggagtctcacctgtgtgtcccacttcacactgcagctgagggaccctgaacgccctctgctgtcaagttttataccccaagggcaacttggatcattgggctaaagcgttgcaggacatcctgttctaggtgtgatgggaacagagtccaggtttaggacagttcctccttatctcaggacaacactcccagtacattctctagttattctgagaactacaaccaagaaaagagggaagcaccgggttggccaaggccatccggagacttgtcctgctgggtcatttaaaaagcttttctaggataacgttggctttccaagtggttttccaagctgatgtctttcccactgaggagaagctgtaggcctgtggactgccaggtaggaggaggttgaggtttagaggaaagaggagagcaggaatgggttgtttgcagtggggctgttcccatggactcaccaagaagaaatcgaggtgctgatggggctgcacaagtgcttatcagaaacagctgtaacaagtgaggggtgcaactgaaggtacagcatttgcctgcaggccaagcggtctctggttcaaatccatgtgcctcccaccccccttcagttttctacttattgaacaaaagccttttcacctcgggtctattatactggaatcttcctgcaaggagagaagagaggatagacagcatagagctttgccaggaagcctctctagtttcttgtaggccccagtgaacttctccaggcgactctgtcccctcattaacccttatcctcagagccttgaaatgggcccaattgtcccatagaactgatgtttatggtttttcttgaataaacctagaaattgaccctctcagtcttgaaacccaaggagaaattt

SEQ ID NO: 342441 - DNA, 1000 bp, Homo Sapiens
tttatgagttttagcaggaggggatatgcatgtacacatatgcatatacatacaggtttatttaaatgattggatctacacttttggaggctatttgaagtatcttatcaaaataaaacgcattttaagcaagaagttaaaaaagcttttcagacccgaaggccatttaatacagtaaatcttacttgggtagtttagcaaacattttttaaaacccacatccaacagattggttagtattagatacacagatttggtttcaaagctgaaatacccctggtggaataaatcttctcatgaaattcagttatattatgccacaaaacagggacacttatctattgacaacttaaatattaactcagtgggctacctggtgatataaataggaaaaaaacagtggtcatggattaggagtgagaagactatgacaccagcctaccttggactgggaccgcaaaggatgttaaaatctatcctagaatttaaaacaggaaaaatgtcaaatattccactccccattcggcccaaaccatcccccaaggaatacacccccaccccacccccacatgaggtttactaaccagctgctacagatgttactatgtcactaattaacaatgatcacagaaaatgtgtcataccagagtttttgttatcatacacaatgcattagtggctgcaggaatcttcctccaaaagctaccgtcagaaggcaaactgacaaatgtccatgccgctggtccaagaaaccacagctaagagccatgaggcattcatttgtacattgagctctctctggcatgctccccactctagttagaggggctggggtatggagagaccgtcccagccgggcgctgcagcctcctactcctgggcctccttgcgggtcaacttgtagatctcagtgggtccgtccacatgggtgatagtggtggtgagctggagttcttccccactatggacacccagatcgccattggactggtcttctcca

SEQ ID NO: 342442 - DNA, 1000 bp, Homo Sapiens
tttttttttttttttttttattactagtaagacatttattaatgatattattacaattgtttctaaaatccattattatttcagcagcgaagagataaataccagagtaacctcagtcagatggtaacagttaggtctaaagaaaattatatgaaatactgactgtaatactgctatagagtatacagtatgttaaaacatgatggagaggctgcacacattggtaacgttttatgtcattaaaaaaatcactgaaaatttaaaaatgatgtttgcatttaagtgtatattagaaaagttttatttttaaagttaattctgtatcattcttctaaaaaaattatcatctgtaagatgcagatttgtattgtttatatcaagtgatatttgcatttatgtaaatataatttaagacagttaaatataaattcatgtttatcttcatataaaaatatatataaaaatagagtatttaaaggaggtggatattcatacaaaagaactgatcaatcaaaataggtgtttttttcttgtatggtagtgaaaatgaggtatttatacatttggtaatttcagccatgtattgaattaaccctctcagcttcccaccccacccaaaaaagacaaacctctaaaatccattgtaacagtgtgatgttatctcacaacaaagcattcatataataaagaaattcaccattttgaacctaaagagataaaagaaatagttctcactactataattaggtatgtattatatgtatgccacagtttaattaaaataataattttttgtctaatctaaatttggatttgatacagttgctcaggaaaatcaaaatatagatactagtaacataatactatttgtggacatatgcaaatgcttggtgggaaaaagcacctatgcatttcagaatgcatagtcctttgcaaaatatttacataaaatataattgtaattttaagttacatagggctgtaatggcaaacacaagat

SEQ ID NO: 342443 - DNA, 1000 bp, Homo Sapiens
tttttttttttttttttgagatggtgtcccactctgtcacccaggctggagcgcagtggcacaatctcagctcactgcaacctccacctcccaggctcaagcaattatcctgcctcagcctcccgagcagctgggattacaggtgcccaccaccagggaaaactacattttcaaggggcattcgagatgccttaaaaccaagaaaacccaaaagaattaatctcatctgatgatcactcagtcaccctgtattcacttcatggcttaccctgcttttaaaaaacctcgactgtttctggttttaatccttaactacctcaagaatccagaagtcttagaaatatctaaaaattgtagcatctctgagcaaatgcacaggctccagtcaatgtaaaattattaccagctgcttaaaaaaggtcatttgtccacaccataagcagaaacggaggagacaagactataaactagaaccaaggctgacagcaacaggaagaaacagtccagatccaggagtggggagtggtcaaacccaagcaaacgggcatgattgaaagggaatctgaaatctaaggttaagtcagccgcggcggggtgtggtggctcacgcctataatcccagcactttgagaggccgaggcgggtggatcacttgaggtcaggagtttgagaccagcctggccaacatggtgaaaccctgtctctaccaaaaatacaaaaattagccgggcatggtggcacgcacctttaatcctagctactggggaagctgaggcacgagaatcacctgaacccgggaggcggaggttgcagcgagctgagatcacgccacgacactccagcctgggcaagagtgagaccccatctcaaaaaaaaaatctgcctcagaccagaggcctaatagattcttcctattcacaaaccaaagattggtttccactgtaatgctcccagggtctgcaatgtagcaatatgccaaacctgaaagtttctgaaactt

SEQ ID NO: 342444 - DNA, 1000 bp, Homo Sapiens
cattttcttacaatttttaattttttttaagacagtgtctcactctgtcgctcaggctggagtgcagtggcgcaattagaactcactgcagcctcaacctcctgggctcaaacaatcctcccacctcagccttctgagtagctagcactacaggcacacgccaccacacccagctaactttttgtattttttgtagacagggtttcaccttatttctcaggctggtcttcaacttctgggctcaagcaatccacccgcctcagtcacccaaaatgctaggattacaggcgtgagccattgcgcccagcctcaaaactcttctacctaaaatcaccttcagagccatgctagaaaattagtatcattcctttacaatcggaatccaacttggccactaaaatgtttccttagacttggtcctaaatgatttttggattgtttcaaaacctgaaaaacaccttcacaggataaagataaaagaatgggccactggatctgaagatcatttcaaaaaagaagtttgaactttcaagcattttgcacattcctgggaaaattgtctatacaatattcatttggatgtacaaattccatcactttttgaaaaaagtcaaagtgttctacagtcagtcctgccagttatcttcaaaggcaacgagcagaaatcacgcagtcaccacgtgctggggcactcttcccattcctctcctcttgggcaccttgtggcagaaactctcataaagtcactgacaagatccagatccagatccatgtatggcaggtgggttctgtagctgaagcttcaacagttttcgagctggtgagggatctaattgttgcatgcttctctttccgagctgtactgacaccttctggaagcactgggtactttcatccataaaggcctgcagctgtttcactgatccttgcagttcatccatcaccaactccatacagtcaaagactttgctctggttctgtaatattttctggtagtcag

SEQ ID NO: 342445 - DNA, 1000 bp, Homo Sapiens; identical to SEQ ID NO: 160254

SEQ ID NO: 342446 - DNA, 1000 bp, Homo Sapiens; identical to SEQ ID NO: 246557

SEQ ID NO: 342447 - DNA, 1000 bp, Homo Sapiens
aaaaaatcacatagaactttattaaataaaccagtagaaaggctcctatttacatccaggttgtcagtttaagctcaagtaatatgcaaggcacaattcttcctttctccagctttagaaaaatcaaccacatggcccagccctgaaggactgaagggagcttgtgcgggatcccgtcatcctggactctccacacagcgtccacgcatggatggccatgggcatgagtctctggatctccctgagggtagcccagcctcggcctggagcacaggggcctgtgatctgagaatctcagatccagaatcaggagctgggaagagaggacttttccaagggtctcctcccccaggccctggggagtcccttctggatgggcaggccctgggctggcggccgccctccatcattggcccaggccgggctctagggcctgctgggaagctgtctggggccctgcgcctgatgagctgccatgaaagtggccgcctctcacactggcaggcggtggctcagatctgctgaggttctggagtggcacaggaacaggaggagcaaatgacactgggtctttgtgctgaggcaggacacagcggctttccgaaacacacacacagaaaatatgactcctgctgccatctcaaggacattttcctaaggacagtcctggtgtcctgatggagtgaaagggatcacacgtgggatgtcccagcagggcctaagccaagtccatcagatgtctcaacggcttatgaaacaaaaacagaggactgaagtctgttcacagtggcccatggttgggcagcagccctgggtgagctcctgtgttctccagcctctcgctcacccagggcttggctatcctggcctccaggtgctggttcctgaggcttcccttgcggcagtggcgcagatacagggacactcatgtcccattgctcctcagaagtcctagcagcagccagactaggggcaaagtaagttttcacagggggaaaaa

SEQ ID NO: 342448 - DNA, 1000 bp, Homo Sapiens
cagaaaaagtaaaattatattttttgtagatgacatgatcttctgtgtagaaaatcacaaagagtcaaccaaaatactactgtgactaataaacacatcagtagatttgcacaatacaatatcagcaccaaaaattcgttgaattttcatacattaacaataaacaattttaaatgaaaatttaaaaacacttccatttgctagagaacttaaagtaagaaataggaataaatggaaagaagtgagaaattcatacattgaaatctacaaacattgatcaaaatgattaaaaacatatataaagatataacccatattgatgttttggaaaaattaatactgttaaatgattacataacccaatgtgattttgattcaacacaatacccataaaaatctctatcagtttttgttgaagaaacaaaaaacagactgggaaaggtgctcacctctgttggccaggctgctctcaaactcctgatctcaagtgatctacctgtcttggcctcccaaagtgctgggattacaggtgtgagccaccgcacctggcctaatcctcttaacataaacactttaatctcaacaaatacttgaactcaatgttaagtcaactcaaactgaactcaatgctgatttgaatctaacatcaattgtgcttgatggtttgctatactcattgcatttgaaattattacctcaaaaatgaatttcctgatgtcctgcaaggagtgacctcagactaaagatcttgccacacatatgacttttgtaagatctctgtctagtatggattctctgatgtgtaatgaggcatgaacctgaaataaaggctttgacacaatcatcacccttgtgaggtttctttcttgtatgaattcacctgtgttttgcataagatgaagcttgactgaagaccttgccacaatcatcacatttgtaaggtttctctccagtatgagttcgctgataaactgcaaggtatgaacgaagtctgaaaaat

SEQ ID NO: 342449 - DNA, 1000 bp, Homo Sapiens
cttgaacatcaaagatgtttgttattgcagccaggagacaatgccataaaatgctaacaaaaaaaagttatactgttttccttaaagtcagtaaattgcataaaagtactctgagcatttttggaagaaaggcaccagataagtccaaaatcttattgctactaggatcatacagggtcacagactatggcactctgttcagccaggagactaagtctcagcaagtcagtctctgaccttgaggcttaaagagcaaggaaggaaaatgtcaataaaacagagccctgtatcacagattaaactggagtgaaaatgatttccagttttatgtcaaagtagaagctggttcctaggacgctggcgctattttagatggacactctgttttctttggcccatttcttcatgatccggatcatgtattctacttgggtgttacctgtgcttctcagtaaatggagcacttctcgaagggtctctttgggttctctcccagctatgatcatctggaaaatgcccacacaggcaccccgtttgccttcccaatattcagggttaggatccagcctctcaaggacatcaaaagctttggcagaatagtaaaactggcccatcttgtagcagacattagcaatgagctgtaagagactgaaggactcgccggaggtttccatcttaagataaagttcccaggctagtcttggtttcttattcataatatagcaccgagctaaccagctgaggtaaatgtaatcatttttcatcttctcactttggatcaagaggaacgcctcttcgccctcactggtattgcctgttgcagctttggcttgggcataattaaagttaaagatgtcatcattatagaagtaactcttaaatgagttgaggtaaatcaaaacatcatcaaattgcttaagcaggaagaaacaggaagccatgcactgcctccctggtattgtatcacattcactagctgatcctcccaccaactggaaga

SEQ ID NO: 342450 - DNA, 1000 bp, Homo Sapiens
tttttttttttttttttttttttttttttttttcccaagatgactatattttatagtttattatgaggtaactgcctccagacagataagcccctgcatgatgctgaaagtcagagcctgggggtgaatgccaccttatctttgtcctcctcagctggtctgcgtgtctctgctcagaacgctgtgtagtagtgctccattgtgctgacaatgtcactctggtcctccaggagctccagaacttgctgcagcacagcctcgctcaggcccgggcggatgctcaggcgagcacaggccaagatgtgcaggaagtgacagcccttctccatgtgatttggtttctggcagtcctgctgaatgatccggtggatctttctgtgcaggtctttgtcttctctggttacatagtataggttatcaaaaccatcatctttctggaaaacaagtcctttttcctgcagcagttgtatagcattcttaaatatactatgaattgccttggaagtggtgtccttcttaaaattcacttggtcggagcaggcactgtgaatcacaggctgattggcaagggacagcaaagactccaccatttccagctcctgctggtaaaagctctgcactctgttctccatgaggaattctttggctttttcactcagcaaactcgtgagactggggaggtccagggcgcctggattgcttagtgcctcttctttctctagggctgagctgtgaaaaggctggtcataaactttcctgtagatagtgggcagctcaagcatccttgcaatttgaatgttccacactgggtcgtccactttatagtaagcggtggcatgaatctctcgctcttctctgtatgtgcggatactgcctctgactcggatcgtgtccccgatctctatctttgttttctgctcaatggtctcttgtagcttcttaagttgtgaggttaagctgagctctcttgctgcactaggagcagctgatacagactcag

SEQ ID NO: 342451 - DNA, 1000 bp, Homo Sapiens
gcaataccacaaatttattataatacacagggaaaaacaaactcaaactttgacaacatccacagaatgttccagtctttaaaaagttagcagaaataaagggtaatggaaagaatataatctcgtaattttatacttaaggctgtaaatggcaaagtcccatagatatttaaaaatctatatttgtatttatttataatatagatataggccctcaaggattcatagagatttatgtaataaactagattttggaactatttattttgttgttgttgttgcttgttaggtaagcaaacccaaacaaattaagtcctgaaaagtgggatgaaatcccaaaggaactctatgtgaccacacagaactcttttaataaatatggcccatacaaattccatatccagtgaaaatcattttgatccacaatcatgttgatgtttctatggaggatacttctagcagctgtgatttcttttgtagcattctggctctccacttctattcatataattgagtatgtgttttattacatgttagcttataggcaagttaaacattttaaagactacagggaggttaggagaggttgtatgatgaaggtcggaaagtatgcaagaaataaactctcctgtttcatctcttttatttttgcctcattttggtctctatactacttgggttctttggaaatggtgtgatttctaacagcacctagcataccttctcattttagcacaggttagatatgaagagccaaacctggaaaacagttaaggagtcctgagacctttccagtggaataaattagagcagcagtttcatttagctgtgctcttttgtccttcattctttattttctaaaaatataaaattatggccgggcacagtggctcacccctgtaatcccagaactttgggaggccgaggtgggaggatcacctgaggtcaggagctcgagaccagcctggccaaccctgtctctactaaaaatacaaaaatt

SEQ ID NO: 342452 - DNA, 1000 bp, Homo Sapiens
ccgaagagtggtgaggagggcaggacaatttctagaggcaggggaatctgaaagtttcatgccaggggaatggagctcagtttatcttcgaagcccttctccccatcccaggggggccccttacccacgcctgcattattgaacatgccgggaagcaccagcatgatgtggttgggccagtacttgcggtacagaggcatctcatactctttgaccaccaggaggtgaaggtggctgatgccctccatggcgtggaaaaggtttaggagtccgtgctcatgtcgaccactggaaggagtgaaaatagggctcttgactgcattcaaattcttgtctgaaaccaggggcagccgcatgctctccaggtgcttgccctgcttgctgaagacaaaatgactctctttggatttgggaatgatgaaatagagctgaacctcttctcccagcatagaagaagagaatgtgaaggcatgaagggtggagtcagacatctgggaggcagaggtgaagtccatgtactggcggcactgttcacagtggtgaaaggtgttataggctgcatatttggtcagcattatggatacagtttcccgtttcctgggctcttcaactttggattcctttatcacttcttgtttgacccctgccagcttctcagtatacaccaggctcatcaaactgtacttggggtcatgcacactgacatcaaaaggcattttactgaagctctcgatgtcaggccagggctctccctctgactggctcacttcactgctttcattgtgatcggtgttgatctcctcctcatcatacacgtccacctccaggagcctgatgagcatgcggaagaggatcctgaggaactgtaaataggagcccgtctttcccacctgtgggggccctgtcagcaggagccgtcgggggtggaagtttcgggtgccagaggccgggtccagctggttgctatagtcagcgtggtgctgccgggccaaggtccact

SEQ ID NO: 342453 - DNA, 1000 bp, Homo Sapiens
aatgctttcctatttaaaataaacattaaattttaaaatagagctttgtatactatgtaagcagttttatatcagctttgtaaaagctttggtgttaagagtcaatattttttggctttgtagataaagacttaaatttttgtgcaacatagtggtgttaaagcacacatccattggactatgcaaatcaatttctactagcagcactgagcaactgggcacgtgctagtacgcaccccctcctactctaactgtgctagctcttgggttgaggaatggaatgggtagccttctgcttactggagatgcacagagaaacatggctgaaaacagctttaaaaagaacatgtctttgggttcatgtgtggtgctgctgcccgggtgtaaactatccccacccagggccagccattatcaccagacctcttctgggcctggctgtgaagccctgtttttggtattcagaatggatctttaaggctcagatgggctcaaattgaaaccttgtgttttataaaatggatgtttagtaaaggaactggttctcagttatgtttacagcacttggaattgtgtgttcttgtacattttgtattttaaaaccttttatgggagtgcagtgctccttacacaaatacaaagggaagaagagccagcagttgaggctcctcagttttagtgctgaaataataaacagtgacaggtcaacagtatccttaatctgtctgagtgttcctccgcctggggttggtgtggagcccctcactttggggcaaagttaagggtcctgtgtcttttaaaaagtccatttggtcaataacttttcatttaaggaagagaagatcgagttccaaattgcttccgaggcttcagttctgtaccatttaatgcgtgcaaaggacattccatggtgtctgctgggttcagggcaactggctttcccaaggcatacaagaaaagttggcagaaagtcctcccctttaaaattcaagcctgaagg

SEQ ID NO: 342454 - DNA, 1000 bp, Homo Sapiens
ttttttttttttttaatttcaaataatttttgtgagtttgcaaagttaacagatgtcataactgggatttgaaaccaaatgggtttaattccaccaaatgggtttaattccaaagcccatgatttttccatgctagcacaatgcaggttttcctgggtgggggtaaaggatcaccttttccacaccccttccagaatctgcatactcatttcttaagtaacgccctggacacatctgagagcttttgcttccctgaccctcatgatgaactggtgtagttctctcctgaaagggtggcggtgaaacaggaaacacagagaatcaggcaggcaaataccagctctggcagcagaaatggaaatctctttctctgttctcttcacctccttagtggaaaggactctgggcaaggttgtgggagagaccaccagcaagtttcccccagtgctgacctctgccttcacagtcaaaaagctttctgctttgccacaaatatctaagtagcatagaaatatccgggacatttcaaatattgttccaaccaggggtaaatattaaagagtctgtcagagttgtcttctagagattacctaggtatagcctaatttagcaagctgggttattagtaataatctgtagcacaattttctgtgtgtagcctcaatttccttatttactaaataaggggactggttggttgatctttgaggcttcaagtccaaacgtctaaaacttcatgtggctatttatgtatgtaatatttggtcacctaaatcgctccattttttcttctgaaaggagtactactagtaccattagcaagcaatcaaattaattccacaatcaagaggaataaataatcaaagagaaatattgcactgtattctccaggataaaatcaggtagcagatgcggctgctgagtcacccaaatgggttttagaaaagaaactgctgaatccagactggtaagtcccttgtagccagtgatttgcgctcag

SEQ ID NO: 342455 - DNA, 1000 bp, Homo Sapiens; identical to SEQ ID NO: 160255

SEQ ID NO: 342456 - DNA, 1000 bp, Homo Sapiens
cccagagcaggtgcgtttatttttatatgcaaatatatcacccttcaatgcatatacaatagttataaggtctgaaaactaagtctatcagagagaattgcaatcccttgactcatatgtgttcatccttccatggagagcctcattatttcatacaataaacatgccagaaaaggattctggggaaaaaacctgtatcagctcaaaaggagaggttttcttaaactgtctggggttactgaggtcaaacaagatgactgcatctgttttacaggaaaaatcaaatccaaagtactaatcgtaacaaggactaggctagttctgatgtttactttcctacctacagctactctgtaatgaaacaaataatattaacaaccccagagtgaactaagtttacacatgccaaatatcacatcttattcattatctcacacaagcaatacaaaatgtaaactggtaatctgaagtaaaggctccaagtcttaagtatccaattttccaagataattagaaaaagaaaaaaatcaaatactcttaagcattatttttcatacttctaagactataagatctttgtataaataaaaattatacttaaacacatatacaatacaaactaatgaactgtattagaaatcctcaagcattttaaactcttaacacaaatatacatacatttctgtaagactgaaaaatatcgtgagcaaaaataatttgactgtatcatattaactcagtgtacagtactggatttaaaataacaagtgtagtaaaaacgaaaactgaggtcactttgtgtaagacaatgatccctcaaaggacattaaatacttgctttttataaatatttttgggttttggctttgtaataaatatgtaataaatatctgcagtacactgtttatgttgagagcttatctttctccatttgaaagtctttctccagagtcataatgtcttagaggtatcccagtgggcggggagttaggattttgca

SEQ ID NO: 342457 - DNA, 1000 bp, Homo Sapiens
tttttttttttttttttttttttgagacagagtcttgctctgcaccaggctgtaatgcagtggcgtgatcttggttcactgcaaactctgcctgccaggttcaagtgattctcctgcctcagcctcctgaggagctgggactacaggcgcgcaccaccacacccagctaatttttgtgtttttagtagagacagggtttcaccatgttggccaggatggtctcgatcccttgacctcatgatcctcccacctcagaatcccaaagtgctgggattacaggcatgagccactgcgcctggcctctttgaatttttttaaaaacatcctggtgctaaaaggcagcaagattcataaatgcaaacaaacatataaataaacaaccaggccctcttcccttttaaataatctgtgaaataaaaataatctatctgcataggaaacaattatcaaatcagcatctacaatgtggcccaataaaagaaagggttttcatatttgatcctgtttttggttcctcaaaattaaaaacttggctccactctgtgctgtataatgatagattttttttaagaagagagagagtgggaattctcttgctgtttccatgggtttcatcatctttttttccatgactcataatggcttcttgcaaacactcttgttcccttgatctcatggagcgaatgaatgctcttaagctagttttcatcaaccagtcagcattcctcctgctttccaactgtgcatcctcagctggacacaaacattttccagtctactcattcacaaaataaacttctgagtattcttcaaagggctcggtccaacttgcccggggatattcgtgtatattgatctcactgatgcactgtggaagtaacttatagttctggaattgggggaagcacttcctggacttgatccaaaggcagcctctgcgtggtctctgctgaaagaacctgcacattcaatgctctcagtttctccgaatcacttcctc

SEQ ID NO: 342458 - DNA, 1000 bp, Homo Sapiens
gttatttaaggatttgtttaatgttttaaaattcaaagcactttaaattattttaagacaaaagattaataaaaacaacattacctttcaaatacaactttataacagcacagtggaagaatggtaaacagtccctctttttttaaaaaaaaatcagtacttaaaaccaaaggaaggcttatatgtacagctaattcagaaagggaacaatgacacctaaagacatagataaatgcttcattttaatccaataaatgtcctacctactggatcttaataatgatgttttcaatatgccatttaaaataaactatccttgaaaataaagttttaaatcattcaatataatctatgaaatagcatctagttaactagattaccttaaatataccaaatattataatcagcaaaataaaaaccagtaaatcaatttgtatctgaaagcctgatgttctgatctactggattttaattttttttccctaagattaacaatataaacaaatcttttgggtactcaacatattatgacaagctcaggcatgttcagggtggtatggccatagacagtaccaacatattagaaggaaattacctatttataattattaactttcaaaaatatgactcaccaccgaacaccagtacaatattttagcaatcatcttatgtgacgtgacaagtggaaaacaaatttctcaacaatagtgggtcaccatattcctccatctaacagttacttttaaaaaaattaaactttggaggccatgacggcaggagtgagaggccaggagtttgagaccaatctgggcaacatagcaaaactctgtccctacaaaacaataatagtaattataaattagctgggcatggtggtacatgcctatagtcccagcaactcaagaggctaaggcaggaggatcgcttgagctcaagaggttgatgcaataacctatgatcatgccactgcactctagcctgggcaacagagcaataccct

SEQ ID NO: 342459 - DNA, 1000 bp, Homo Sapiens; identical to SEQ ID NO: 160256

SEQ ID NO: 342460 - DNA, 1000 bp, Homo Sapiens
ggagaaatgtaaatcattaaattacttttaaaaggattctttatattaatgataaacatcacctttaaaaaaattatctagtataacacatttctttgaaaaatatcatggccctctgtaacaagtctttcaatgtttcatgtaacctgtaaaattaattttaccaatgtttattaattatgaaaatgcatgatgaattattatacctgtagaagaaatgtcagtatttgatgtggagatcccaatgtgcttggctatccaccacaataagtgtcatattctagaccaagttaggcctttaccttacaagtttttgtgagaaaagtaaaactgctgttttatcaaggcttcatgttcctgttaagattccttcagagagttgatgcgtgcacagatcttcagggctgggcctagcttgatattcattgcactcatgagatggtcttctttcagcaagagaagggcctgtccatcaatctcctgtgctctgaattcatctgcgatatcctggcaaccaggcaaagaatggatgaaggcccagacatcatcaactgtccatatagatggctctgtttgtgcaactggtagcaagtcactgttctcaggcattttccgaattctcacatcccgaagctcacgttctctttcccgctcgctctgcctgcgcagacgagttgtcatagcagatggcacagaatcttcatgagaagccaagtcttcttctgcagatggataagtaattggaagctgcctaaggatatgttctctcgctgccccatcagggccacttggacgacggccacgatgcccaagactttgattatcaggcttacgattccaacgactaagtgcaaattttttagaacagctaacattgtaccttttggcacatgacatagtgcagaatcgttttgaccgcaaaaattcattagcatatcccattttcccacagaattcacacttgagcaactcactgtccatttcttctaatgtctcttca

SEQ ID NO: 342461 - DNA, 1000 bp, Homo Sapiens
aaagaaaaaggtgtttatttaggccatcaactaggatcataataaataacgtaatatactaatgtaataacagatcttctcatgcatttatcgtgtttataaatatagaagaaagctggcttacagggctgttgggacaaatttggaaaagtgtatttggcaattacacagtaaaagttaacagtgttgactatcagattctcttttctgtcagtttttagaatacatcccctatacatctgtgaataaatggtaatggtctcttagagtttctactttttgtgaacatgccagagttaagtaaattgtcaaaggatccaggttgacaatgtgttatttgtcaatatttctaatgaaaaacagatcttagaaaaatgaactcttctgcatttcattgtagaggctgatatattacaagccggaatcattcaaacaataaaaaaagtgcctcaatgaaataaaacccaaaagtagtttatcaatagtaactgtgatacttaatatacaaatgctgtagtattgcgtttgtaatttggtaagtaaatgaccaagtatctgaatgcaaaagtgatgaactttgatgaaagcttaattttgctagtaaatttcacacgaaggggtaaaataggataatctttaacataaagctttaggacaaataatttaaacatatcataaacactgaaaatgtgtttttaattgttatttacagttaatcagtgataccagtgtttagcttaatccagccaattgccagtcttgactccttctttcaacatctgttattaagatcttccttataaatacttagacaaattaatttagtgaaggagagcgatctgtggtccagagtaactcaatgtatggccatttggtttgcagacagcgtttaataggagtgtcatctgtctgtagcatgggatcttcaaaacccatcacaactgcagtcccttctacgtacatgaccttttcattataatttgactgcttcaatccattg

SEQ ID NO: 342462 - DNA, 1000 bp, Homo Sapiens
tttttttttttttttttttttttttttttttttttttttttttttttttttttttttttttttttttttttttttttttttttttttttttttttttttttttttttttttttttttttctggagcccttcattttatttgctcaatgaaaatacttcgtccttttttatcagcaatacatatagttccaacaagaactattcatcacaaactgccagcctggggatttcttcatgaaatattttgtatttgcttggtacatggttcaaggaaactcttgtgtttgtgccaatcagggaaataaactgaacaataaacgacactgaaatagagtattaggcaatatgtagctttgtttttgcttttttttttaaaaaaaaaccactgaatttttttccacccacaaacacatggaaagcgcagaaaccagttaatctatgtgatgtatttgcatacgtttacaaacaagacaaattaaaacagaaacatgttcagaatttaacctgattaaatattaagttcagtcctgagcttttgatatttaagacaatatagataaagcaatagcaaaaaattttaatttatttgatttgcatgctacagagatttagctaaactttgttcatttggctagcaatattctttttgtacctgtaacacttaagattctgatatacaaaattgtaataatatactgataattcaaacttgagaactaaatattacattctttttaccctgtgcgaataaattctaccttttaaaaatagtatttataatattaaaattcatatttgtccatatggttttgtgatcaagttattaaaatgttttgtcactgtgaatcatttgggttagtacaaatatgacaagattattaaaagctgcctataaatacataacactattgctgacttttaaagtgtagaaaaaggattatattaaaataagttcatctctcatgttagaaatgaggaaattttgtgaaatacaacaacca

SEQ ID NO: 342463 - DNA, 1000 bp, Homo Sapiens; identical to SEQ ID NO: 160257

SEQ ID NO: 342464 - DNA, 1000 bp, Homo Sapiens
tttttttgccaacttaaaatgaaaatgtttatataaattaacccatccagtttaaagtagatttgctatgcttcacttacttaaggaagaatatatacttcctatattaataaatcacatcaaataagtaggaagtttcaataacaagcctgtagatacattgaaacccctttttatattaaaagttaaaatgaaagacaaatccagattgaacatagtgattgcaaaatataatgcaattttcaacaattaaaattatgaaaatatacaaaattgatgggcaacacaactaggcatttgtacattttccattatgtggagaacactacaagtttctctaccttttatctacatcagataaatgatttaaaccaaatgtttgctttggagagtcttaacttaggatctcagtagtataaaaagcaataatttttcagtctgtaaacagtagtcgtgatttttctcctttccttttttaaatatcagtttaccacacaaaaacaaacaaaacaaaaaaacccatacaaatcaaaaacagcagcagcagcaatgggttatttgggaattctcttcaaataccaatggcatacgattgctgggagagggtgctttttactcatgtaagaatatatatatatatatatttttttaactgtacacaatttatagtacatgagggtttccaaaagaacagattgataagagatattggccatttctgcataatttcattctttttacaattatctcaaaatgtgaaagctggatctaattgaaatgctacatttagtaggaaaatcagcaaataacaaaggaagcataacctcaacataacattatttgtcattaaagccagtagaggtcccagatatctttaggcaagagactggttaggaagaccactagagtcacacactgtccctgaggaccaaggctagcccactgaacatacatatgctagattgatcatggtcagtcgatagactttttcaaagagcat

SEQ ID NO: 342465 - DNA, 1000 bp, Homo Sapiens
ttttttttttttttttttaaggagcaaaaggctttattgataaatatgcagatatgtctgtccacagggacctgctgtggaggccatgaccaggctgcagacctcccactgcctgggttacagccaggacatggccctgtgcagaccctgccacgacagcccagccgtccaccacccgcctcatctctgccaattgtgctgggggcagggagaagcagaggcccgcctcaggcttcccaagccctggggctcacgggtggttccctcccttccaagggagtggcactgtgcccaggggagagccaggggatgggggcagaggagggagacagcagctgcttcagaccctgagcagaaaaccagagtgagcacagctggcagcaccagatgacagatctgggctccaggggcctcctggttggcccttgtggctcgaacctgcttcgggagacaggcagggtgagggccctgttcgccttttctctgacaaggttgcaaggcccgtgtgtggctgcctgctccctgggtaccgggaactggtggcgcgtagtgccctgaaaggcagggtcccttcacggctcacccaccagccacaccgaggggagggcccctgaagaaaatgacagcactggaaggcagcagcagggtgggggcctagtgctccaggcggggcctcttcccaggggtccgtgggcccatcagtcctggggtggtgggggctggttgatgatgacctggatgacaaaatctttctggatcttggtctcctggagccgtgtgcggtctgtgagcagcttcccggagaagaaccaccgctgccacgatggctcgatgccctcctgggcgtgcagctgcctcttgagctgccccactgtgtcgggcaggctggcgctgagcctcacgtccttgcccgtggacaggcgcaccttcagcgggaactcacggcgcacgctgggtggaggctcggggggctccaggctctcctcctccgtgtgctcca

SEQ ID NO: 342466 - DNA, 1000 bp, Homo Sapiens
ttttttttttttttttttatttttttgagatggggtgtgggggctttactgtgggtcttgctttgtcacctaggctggagtacagtggctcggtctctgctcactgcaacctccacctcccaggttcaagcaattctcctgcctcagcctcccaagtagctgggatgacaggcatgctccaccatgcccagctaattttttttaccgttagtagagacaaggttttgccatgttggccaggctggtctcgaattcctgagctcaggtgatcggcccactttggcctcccaaagtgctgggattacaggtgtaagcaactgtacccagcgcatgttttattttaatttaatttaattaacttattttttgagatggagtttccctcttgttacctaggctggagtgcaatggcgcaatctcggctcactgcaacctctgcctcccgggtctaagtgattctcctgcctcagcctctccagtagctgggatcatagacatgtgccaccacgcccggccagttttgcattcttagtagagacagggtttctccatgttggtcaggctggtctcaaactcccgacctcaggcgatccacctgcctgggcctcccagagtgctgggattgtccttggaattctgagtggatacatgaagagttagtaagaaccagtgaaaaagcaatcacttatgatcctgggctttgaaaaatcactgtgattatcttatgcacttacaaatgagactaagacgcctgatgggaaagtgcagattgctggtgaggaagggcaatgaagaagagactaggaaccaaattcatcatcattatcacacaaaggcatttggaaatgtcaccttacacatggtgagcacatatgggtgccagcccgagacagcaggataagtttcacaaaacttgaccaggcaggttagaagcaaggcatggttcaggatggcagagggcagggagacagaagggagtaggatgggagagaagagccag

SEQ ID NO: 342467 - DNA, 1000 bp, Homo Sapiens; identical to SEQ ID NO: 160258

SEQ ID NO: 342468 - DNA, 1000 bp, Homo Sapiens; identical to SEQ ID NO: 160259

SEQ ID NO: 342469 - DNA, 1000 bp, Homo Sapiens
agtagagacggggtttcaccatagccaggatggtcttgatctcctgacctcgtgatccgcctgcctcggcctcccaaagtgctgggattacaggcgtgagccaccgcgcccggccctcctgctgtgaattttctgaaccatgtatgtgaattaatttgcacaggttttcccccattacttagatgtacaggatttctttcctgtgtgacttctcacatgaccttgaaaggctttgggacaactgaaagctttcccacatttttcgcatttactgggcttctgtccaatctgcgttcttacatttttggaagagcaaagcccgcctgaaggttttcccacactggctgcatttacaggtttctccccagtgtgctttctctcatgtttgtgtaaagatgaggaccaaccatacgttttcccacacgtttcacatttatagactttctctctagtttgtgatttgacatctgtggaggggcgaggcctcgcggaagactttcccacgctgcccccactcacaggtttctttttagcatgcgttctcgcgtgtttgtgtaaggatgagggccaaccgaatgctttcccgcattttccacacttatagggtttctccccgttgtgaattctcacgtgtcgttgaaaggatgttgcccagcagtaggctttcccacactgcttgcactcatacggtctccctccggcgtgcatgatcatatggactcgaaaggatttctgacacctgaaggctttcccacagtgcttgcactcatacggtctccctccggcgtgcatcatcacatgtgcgcgaaaggatttgggacaactgaagcctttcccacactgcccacattcgtagggtttctctccagtgtgagtccttacatgttcagtgagagagtgggaacgaagaaatgtcttcccgcaagattgacaggcatagggtttctctccactgtgagttttctcatgcgtctgtaggtaggaagggcgactgaaggct

SEQ ID NO: 342470 - DNA, 1000 bp, Homo Sapiens
ttttttttttttttaaattttttcatctcaaagagttctcagtccccaccccacacgaggtaccgtgaaggggcactaaagtgcattttgatgtagggggtagagcttaaaggtgctgtccaagctaagaatcaagatgatgctgtttaaaaaagaaaggcaattccttctacctccatctctggagtcagctgagggagggcagtgaactagactctccccagaggattgtcctaactcttaactttagagaaaagtgtgtaaggacctgcacatatagaatcatttatttgtccaaaatagcaaaaataggcctatttcacccttaagaatttgcaaatctgatcagtcatgatcataaaaatgtgaatggattccagatgcaatccatgtgggcatgctctgtggaactagctatgcatcttcagcttgaatgaacatgcggctgttcattttcatcaaaacatgtcttctaaactaccataaataaaatacacatggaacaattaaatctttttcttacaataattacttttacattaaaaagtcatcattatcttcagatatattgaaaattaggactctaaatcttattatttcccagccttagttaacaatcttgcacaggcccgataatccaaaatttggagctctgatctacacagattggcaggtttcacacagtttgacaggtaggcaactgtgagatatgcattttaaaatttagctttttctatcaaaacagtctgaaatcttttaaaatccctacagagactgtatttgtgcaatgccacagtcatgtggctagaaaggaaaaaacaaaatacagtctggaagattaaccaccgtccaagttttcttggtcttcagtttaaccaatgatgagcccaggaaatccaattaaatacagtgccttaaataagagaagagttggtcctagaataatttaagctactaaacagggactgtctcaaccacgggtgatttgatgcactcttca

SEQ ID NO: 342471 - DNA, 1000 bp, Homo Sapiens
ttttttttttttttttttttaagttcaatattacatattcagtgaatgaattcatccatgacaggtgagatacaaaataaattaaaaaatataaaattatttaattacattctcctgagcttgctcgactagacttgaacgcccactgtatataataaatcacttgacttttgtttttttaacatcaactcttctttcatttcgattgcaatacaaaaaggcatttctgttcccttattttcttcaaaaaaggataaacagttgtggcaccagaagtgaatagataagagacaggtgaactatgactgttaccttgttttttctttataatgatcaattacagaagtgttggcatgagaaggatgtgggacgttaggtagaactgcttgctgccggcttatactgaataaagaggatgctcttcatcagtcaccagtgatggagccaatgtgaaaagaaaacagaatggaagtttagaatatctcattgtgtacgctggctattttattttattttgcaatttagccctgcatcctacaactcttgataatggtcagaaatcaacagatgcctcctggcatggagcgtgctcgaagccccttgtttcccctgctctcatggctttctgctgtgactgcggatacacattcatctctaacccttccttctccctctcttccccctccctgcccagcaagtgtgaacatgccttaaatcccctgtgtctggcactgggtcagatcaaatgctttcttgatctgtggcccagaagtcacctttgagttaacacctcccaaagcattgcttgttttgctcagctaagaataaagcaggtatgattcaaggaaaggggaaaaactggagttggagagaattttagggctggattcttgagccttctgtggcggatattaagaaggtttaggtgtgcttgctttcaaagctttggaaagccgatgttctggacagtctcctcatggacaggctgtcccctcggccc

SEQ ID NO: 342472 - DNA, 1000 bp, Homo Sapiens
aaatagagacagggttctctgttgcccaggctggaatgcagtgaggtaatcacagctcactgcagcctcgacctcccaggcccaagcaatcctcccacctcagcctccccagcagctgggaccacagatgtgcaccatcacacccagctaatttttgtattttttgtagagatggggtttcaccacgttgcccaggctggtctcgaactcctcggctcaagctatctgcccacctcagcttccgaaagtgcagtgattacaagtgtgagctgccatggctggccaaggctgtcttttaaaaagctaaagatgtgttggttcaagaccagtctgagcaacatggcgagacctcatttctactaaaaagaaaaaaaaaatcagctggctgtggtggcccatgcctgtagtcatcccagccacttgaaaggctgaagtgggaggatcgcttgaacccagaaggttgaggctgcagtgagccttgattgtgccactgcactccggcctgggtgacagtgagaccccgtctcaaaaagcctcggaaggagtggcctagggagatgagcaagcattttgtttctagtttctgaatggccctgtgcattgagagaggtcttcggcctcccagcctctctggctgaaggtggcgattctgcatggagtctctccaccacttggtggcattgctcacagtgacttcctacttctaaacaccattgaattggagcaagtagatgatttgccacatttttcccagctagtttggaggctgaatatagaattttactggggcacaccagaatgtgtacgttggggagcagcgatccccgttttccttgataatctgccgacagcttccttagtattgaaatcacaaagtcagaaatgcacacacctctatgatgagagatccatacagaagagagcaacaaaaagaggccttttaagtttgccagacttcctgaccagtgggaagcaagagagtagataagtgtgcaacagg

SEQ ID NO: 342473 - DNA, 1000 bp, Homo Sapiens
gaggcagagtcttgctctgtagctcaggctggagtacagtggcatgctcgcagcttaccgcaacctttgcctcccgggttcaagtgattcttgtctcagcctcctgagtagctacatgtgcctgtcaccacacctggttaatttttgtatttttagtagagatagggttttgccatgttggccaggctggtctcaaactcctgacctcaaatgattgcccaccttggcctcctaaagtgctgggattataggcgtgagccactgggcccagccagaaattcatccttttgtcacctgctctgagtaaaccacactatggaaagctttctcttcactggctaaatcagtaaactgtgtccacttctaaaagccatccagagagaaagatgctgattgctttggaagcattaaaggtcagtttcagcaacttaacacttaacaggagccaagagaaataaggaaaaacatcactcccaaaacagctggcacacaccaagcataaccagaactatataaataaagataatacaaatggcaagattaccaaaaactgactttggaaaattccaagtgagaagttgccagaattgaggtatgtatcaaggaagcatgactttaattttccaactgcatcttcatccattttcctaaagcttcctttattaaaattcagttggtttgctaacttgtctgcaacttcaccatctgtaaaccaagaaaccttaacagcaaagacaatgtgaccaatcattctcaggagcttggcttactcaacctgccatgaaagaaaccatggcaggtactttagcttccttggggtttcccagaacatctatctcaggcctcatctcaggggtctacgtatcctcaaactgcactgattgtggcaaaactgatagtaaattcaggtcattccgtgggatcagaggcagtggctttgtatcagcccccaaagctcaggtatgtggaattctgggcaccatgttaaaaggagactgga

SEQ ID NO: 342474 - DNA, 1000 bp, Homo Sapiens; identical to SEQ ID NO: 246558

SEQ ID NO: 342475 - DNA, 1000 bp, Homo Sapiens
atagaaaatcttttattctttttaatttttaagggcaattgcttatacagtttccttttaggaatttattatctaggattacttctcttattttcaatgatacacaaaaaagaagaaaatgaattctttgaagaacagttcaatagtccaaattgtactgagttagagattatttcaaattcagtgctttgtctgaaaacattttcattagcatttgtagttaggactatggaaaaattggagtatatgctatcaaagagcaattatattttccaactgttaactagcattagaaagggcaacatctttaattactcattaaaactgtcttttgaaagagtgatcatctaaaatcagatactaaaacattatattgccagaatttaacctctcttcactagtttcttccagcaacaaggccttagtagtcagtctttgcacataatgatcaacattaccaagaaaggaacaatttacatccagcattacttattgacaagtttgaaatttgtgactatttgtctgctcactaacatgatcctgtaagtgatcttttaaattaaataatcagaaaccgggtccaaatttattcttataaaaacaaaaataatataacatggaaggtacacctttatttgaggctgttacagaaagggaggatacccagaactcaaacctctctccttttatttataaatatttgtatcacttattttttaataagtttaacaagaatacatatcatttcttttggggatgacagcaatactgacaaacagtccctgttatgactgccattttattattgctaaatcatccacaaaattgtgacctgattttagttaccagggacaaagccaaagcatggaattgaagtttcattctgattaaacacaaatagccagtgcataaaaacctttgaaatcggatctatatcccagtaattaaaaaacaaacaaacaaacaaaaaaagaaggaagagaaaggaaggaaaggaagg

SEQ ID NO: 342476 - DNA, 1000 bp, Homo Sapiens
tttaaaatcaattattttatttctaccatcaggtaatgaaaaggactaggatccatctataccatcagatgatttttggatgaagcaattctgaaccgggtaatagaactgcttgggaaagcccaactttttctggaaacaaaagattaacatttgtcccttcataatctcagtgaatacaatatacgataaattccaaggaattcaaatttaactagcattcattaggttgatgaaactaactctataaattacatttgatttagctgtacaaaaacattaagatgaacacaaacaagaatagtatatgcaagggtctactttttacttcacaatagaccacaaggaagtaatacttatactcctaaaacagaggcagttacaaatttgcagaaaccacaaactgaaataaacagacatatataaaacagagagaaatttggctaatattttaatatcccaatgaagaatctgaaaaacactctctatgaagaacatacggaatccactcttcaacagaaaagcctgcccattaatgacactccaagaagtgtcatgatatatgcgattcactttcaagtcttcagcaaactaaaaatagagttatgagacttaaacagataatagacagtgaaagcaaatatgacaaaacaaattattatatgataaacaacccgttaacaaaggaaggtagatggaaagtatgtggttattctttgcattttttcagcttttctctatgttgaaaactcttatgatacaaaatttggaaatgaacatacattctaagcttaaaagtataactgaaattagtctcttttccccttaaatattaaacatatttcagtaataattatattttatttgaggattttcaatgaactataaaaccaatcaatagagttgagatagacatagaattacctttgaatataacagaagctcctgaatatgaacaagaagggcttcttttgaagaaagaagagcccgcttcctgggc

SEQ ID NO: 342477 - DNA, 1000 bp, Homo Sapiens
tttttttttttttgcagaaaataacagctttattgctacagatgtgagagcatttacaaaatgccaaggaaaaccattccgttttgagtctctggagcctgaactctcaccatgtaccagaaaagaatgcccctctttcgaactttcaaacagttgggattatttttgtttcttatcatcccaattatttgctcaagtttgcctccattgggccccgttcagagtttcttgggctgcttgtactagtcacagctccacttccatctcttctcaggaagaggtgggcacaagacacatctgagccccttagtattgtgatggtggccaggaaatgatcaaagggtagcatttaggaaatcagcaaactaaagcctcaaatcaaaggtggacaaatgcattctcaactcaaacaggttgggtaatgctttcataagatacattatgtttttgtgtacacagcacacaaattttattatgtctacaaacagattcaggaaagacctccaggctatttccccaaatgattgacaaagtgcaaaacaaaacaaaaaagaggagagcacaaatgaatagcccacttagaagctgaatagaaagaatgggaagccatttcgtttcataaaatcttttaatttttggccaggcatggtggcttacgcctataatcccagcacttcgggaggccgaggcgggtggatcccctgaggtcaggagtttgagaccagcctgaccaacaaggtgaaacctcatctctactaaaaataaattagccgggcatggtggcaagtgactatagtcccagctacttgggaggctgacataggagaattgcttgaaccagggagatggaggttgcagtgaccactgtactccagcctgggcaacagagcaatattccatctcaaaaaaaaaaatcttttaatttttataattaacttttatcatgcagcccaacatgtcatcttttcataaaatcttagtagaggtgcactccagggat

SEQ ID NO: 342478 - DNA, 1000 bp, Homo Sapiens
acttgggttgcctttatttaacattctaaagaatgattattaaaagtcaaggaccatatttagatctttcctaacaaagaagaaataatgcttgttccataagtaagccaaaaattttctctggttaatcaggtaactcccaagctagtaagaacttcttctgggactctttatccacttttctacaggaaacagaactactgcaggcaagggtacctttatcttattgcataagtatgcaaatattgcctaaacaagatcagaaaactcactaaatgagtagaatggtgagatgagaacatccttagatacattaagagctaaacaggatgcaaatcagaaaacaatttcacttaaggtttgcttggcatcttttacattagcctatatagaaacacaaatatccaatgtgaacatcaagccaagagaacaaaaccaaggaagaaaagataatttgggaactagaaccaattcttgatactatatacaaatacgaaacacatataaatacatatataagatttttaaaaactgtgatgacacattttgggctcaaaataatgttctcacataacacatctcatttctcatccttaagcaaagtttggtatagaggatataagatttctttctgcatgtttacttttgtctctccctgtctttcctagccttaacaaacaaaattccataccatcctttaagaactcatcaatgacccaccccatcaatgacttaactcctcaacaattggaattaacctgtccttttctgttcccagcattttatatttgcattaccacctagctcaaagctgcaaaacactaaacttcttggaacagtattctaaaaaacctttaaaaaaaatgaagtcctcaccatcttttacagcaagagtttaaaaaagaagtcatagtcatctgaagtcaacacaagacttttttggaaaatactggagaatgtgccatgcagataataaaatggattggacgcagctgctggg

SEQ ID NO: 342479 - DNA, 1000 bp, Homo Sapiens
ctttttgacagagttttgctcttgttgcccaggccggagtgcaattgctatggcgtgatcttggctcaccgcaacctccgcctcctgggttcaagcaattctcctgcctccgagtagctgggattacaggcatgtgccaccacgcccagctaattttttgtatttttagtagagacgggatttctccatgttggtcaggctagtctcaaactcctgacttcaggtgatccacccacctcggcctcccaaagtgctgggattacaggcgtgagccactgcgcctggcccggttttacttttaacaagcgtgagagcatctgttgctgagctatgtgggcaacatgcatgtgaggtgcggccctgccctccaggacacgcagcttcatgagtagagaagaaatcttatccaagggcgagtagcaagaacacagcaaaccaacgcacacagagggcgatccagcagtcagactgggcagatggaaacagctgagggtcttcagtgtctcgcgatgggagaggcggcctagtctgagaaactgaggcaggagggactgcctggcttctggagggagaggaggagcctgtcccaggcccagccatgttggtgacagcaaactaccgaactactggagggagaggcccgggctgtcagggagcactgccggctgctgagaggacagggagccccgggccccccctgcagaggttcctgctcaggtcctccggagcctgggtggagcagagtagggtcgtgacctgtggggaccctgcagtgcccagatttagaattctgccaacctccaagctcaccatcagcctcctgcagccccacttgtttctggggcagctactggaccccgaccccatcgtccccaggcagggggtcgcagccgcaggtctgtgggggctggtgtctggcctccctccttctggctggctgagcaaaatatctgcagggcgcagagcaggtcacagggatgctaattagaaaggataaagc

SEQ ID NO: 342480 - DNA, 1000 bp, Homo Sapiens
ttttttttttttttttttaggctagaaagtttattggcaaatctaggtcaagctccataatttaaaattatttaaaacaaaatcaaaaacatctataaaaggtcagaacattcagtattttaagataaaattttttcaaaacaatatcatggttatgaaaacaacatttggcaggctatacatttttaaattatagaaaacattaaaaataaaatatctaacaaaatatgtcttgctgttgcttttggggaaaaggtggagacaaatattttttattttatttacatatatttattaaaagatttccatatggtattgcaaacagtcccatgtctcttgtattttgctataatatatgaattcacacaaaggagatgggatacataaaattacaaaggtggtagaaaagcaaaccagcccacatcctaatacacactaaaaagggcataattcagatatataagccatattagttttagaaaaagagcactgcccacccccaggtatacacacacacacacacacacacacttcactttattaaaccacaagaggaaacaaaatatatcataagtaactgatcattcactttcctatgttagtttttatgtttttcaatcataatgaaatatattaagaacagattttcttcacgattgatttttgtatctgatattcttttttgtacttctgttgtttcattaacataggtatacacccaaattctttaaaattacaactttgaaaattaattgtaaaaagctgttttccatgtatattacacagttcggcgttaaaaatggcattttggggaactggtaaattataacacacaggcttagaagaaaaagagtggtatcactgaatgtatattggaatttaacaaaacgttttactgtatttaccccatatatttttctttttttttttttctgagacagagtgttactctgtcacccaggctggagtgcaatggcatgatcttggctcaccgcagcct

SEQ ID NO: 342481 - DNA, 1000 bp, Homo Sapiens
ttttttttttttttttttttttttttttttttttttttttttttattaggagcgttctctttatttctctttggtttcttaacacaaaagacatgcattctataaataaaaggaactaagattttctgggaaaccataaattgggaggaattcccacagtcacacctctgtggtcaagaggatggtcttcagcccccatctggctgtaatctctgatgaaatccagaagagaaggcccgtgtgttatccaagaaggtgaaacactcaaggacagtgaatgccacagtcctctgctcagagctgggctaggccccaaggcccactgagtacaatgtctaccctatctccttgttacatcctttttacaatatccttgggtgatgcttcttttcatggggctattggaaaggctccaacaccaaagagccagaccagccatttacgaatagccattcaccatcggactgaggaacctactgggagagtgtgaatatgttggtgtttcctgacttgtgctcagagcccagatcaaaacactggcttgatcttactttgaaacatcgacctcaggtgcagcagtgtaaattctacaccaggaggtgggattggactcaggaagtccactacaagagcagcaggccatggtagaaaatgatctgccatacccagtggcaaaatctgggccagtatcctaaggacccactcagtagcccacagaccgattcttaataccttcacaatccaggcttgttggtgctacttcaaattcacaaaagaaaggggcttataataagacaagcactgatacactcctaacaggaaatgcacaccccacccaccttccgagtctacccctacaggcaaaccaggaaggagggagaaatgctggagccctaccacgagcccaggttaaacgacatccgatatcagattgttgagacgttaaaaataaaaatatcattttcaagtgcttgtagcagaggcctagctcctaagttgt

SEQ ID NO: 342482 - DNA, 1000 bp, Homo Sapiens
gagcctgttgcccaggctggagtgcagtggcgcgatcttggctcactgcaagctctgcctcctgggttcacgccattcccctgcttcagccttccgagcagctgggaccacaggcacccgccaccatgcctggctaattttttgtatatttagtagaggcagggtttcaccgtgttagccaggatagtctcgatctcctgacctagtgatctgcccacctcgggctcccaaagtgctgggactacaggcgtgagataccgtgctcagccatcaaacccatcttataaatcaacaggttgacacagcgtaagagggatggtgaagacttcctcacacatggacccatacatttattcattcaacaaaaacctactgggcacattttatgtacaaagcacagtgcacaagctgtgaacaaggcagagataatccttgctctatgggtaacacagacaattatgaagtgccatgactggggaaggctaggatgctgtggaaatatacagaagcagcaccagagatatcctctcagaggaaaagacctttgagttgaaaagtgagggttgaagaaacagttggttttggagaggagagggagtcacgtcctggtgtgtcttaagcaaagggaacaacatatatgatgttctcaaaagtggtacattgtagactggcatggctagatgattgattctgtaagaaagtctggagaagtgggcagggcatgttggacaggtccttgttaaagaatgtgatcttcggccgggcgcggtggctcacacctgtaatcccagcactttgggaggccgaggtcccaaaggcgcggactctggagaacctgctgaattgacagatagggtggtatgggcaggcaaaatcagaatgccacgaccacgaccccgaagttcttgtttcgggtttttggactcctgcttctcagagcctttgcccccactgctcaagcctttgtcaggctttcctctatccatatcatccctggccg

SEQ ID NO: 342483 - DNA, 1000 bp, Homo Sapiens
ggtagagatggggtcaccatgttgcctgggctggtcttgaactcctggcctcaagtgatctgcctgccttggcctcccaaagtgctgggattacaggcatgagccaccgcgcacggcccacatctttcctctaaccttgcaggatatgacagctgagcagcatctttacttattaaaagtatttatttccagaaagagaaaattaaaactaagcactacttggcccaaaccaaacccctctagagatccagaacacacagggggcgctctttgggaggggtgctgagtgttagctgaaccccggggccctagcctttggctcccttcctcccttttgcaatcccccaagtgtgccgatgtgtgtgggatgtcagacaacacctggtctccctggctggggactgcttggacttgtaccgggagggacttcaggttttcagctaggttgatcatcctggaagctgaggaacttgaggtctcacaatgaagctgaggagaaggtcaggggtgggagcgcgttttctacttggtgccgctcaaggccatctgacagcctgagaggagtttggacacatttcacctcccctgcttccagcggccggggtgggttgcttctctagctcactggtccgagagttctctcctccactggggaaagatgcacggggacactgccagaattctagcctctcagataatggctaagggactaaagggacacactggagcctcattccgaggaaaagagccagacagaaaagatctgaacatctttgaatgcttgatgcctttgccaaaaaggcaattggaccccagtcaacaatgcaagtataaacacatgtgcacggaccatcaggggatcagggcaagctgggccaggctggcgaggttagctcagggagaaccaagccccagacgactacccgtggccaccccctgcattcattctccaaggcccacggtgggaggaaagggttttgctgttccctgctcttttggc

SEQ ID NO: 342484 - DNA, 1000 bp, Homo Sapiens
ttttttttttttttttatttctcattgtttaggattttctttttattatcaaatctctgctatagaaacactgaagaaaatgggaaaaaaaatcactggagaggcagcataaaatggtggctgaaaacaagaactctggagccaatctcagctctactcccttactagttgtgccccttaggtaggatccttcaacatctctgcttcagcttagccatttgtaaaactggggtaacagtacctatctcagagtaaaggggactaaacaagttaacacttggaaagcatttaaaagaaagcccagcacataagtgttatatgtatttgtaaaactttttaaaaatctcaactgggttaacttttccatggatctttcaggtccttacccatatacatttttttagatgtgttacagtaagtatgtatatacaattctgtatcctttttattccttcatgttatgtatactgatgcagtgtccataattataatttatagtgattgcctaaaacaaattacaaactaattgcccaacaatgcagtgatgagtaacaatggacgctgacacactgggctaaggatcactttctgtccagcaacatcagtctcacactcctaggcaataacttttctaccgttagtcatctcattcattaattttctctaaggaggttaatcaacagtaaataccccattcaatactattatttttcttacattcagatttagcacttcatattctactcctgggcacccagaccctccccttataacaacaaaatctgtatttctacaattatgcacaaaatgttattgtagagttttccatccagtactccagcttgatgcaaaacagtgtatttccagtcaaaaacttttctctgcataaggtttttcccttagcaattcacaccaatctacaattggtgagagctcttgctaaaagatgcctcattccccacagtcatggtcctcaagtatgaattactggtagaccata

SEQ ID NO: 342485 - DNA, 1000 bp, Homo Sapiens
ttttttttttttttttttagatttcacagcatctttatttatagcacttaaaaccaggaaaacagtgcaaatatatctcataggtgaatggataaactactacatcaaatatgtatactactctcaaatataaacaactttcatctggttagatacatggtggtaaaaaaaaataataaaacaactattcatcaactcatataaaccttaggagtaatttgctgagtgacaaaaatgccaaaagcttacatactctctatcaataaaaattcatataacttatttatataaaatttataaaaaccatttacaaaaacaattttatttttatcatattcatgaaatgatgaaattatactgataggagaaaagtggttggcagagttaggtttggatggagtgtaagcataaaaaggtagcatgagggactttgtgttcattagttttatgtggttgcagtggttacacgaatctgtacatgtaatacaacttcttagagtacaaactaaaaaagaaaaaaacatgtaaaaattcgtcaaatccaaaataagattagtactttatagtatcctaccaatgttgtttttctggttttgataattatggttatataggatatttttactagaaattggttgaaggatactagcaaagcctctagactgcttttgcaatttcgagttcaaatttatttaagttgaaggtggttttataaactgatcatctctataatcttagttaagcaagtccaaatatgttgttaatatatttaacatattcagtttcttttctacttaagtttgcttaatgtacaattaagctcagagccaaagaaaggaaaagagctaatcataatatggggtggttgttctggagtattttctgacacaaataaattctctaattctcccacaccaattgggtgttctacaattcaattctgaacaactgggtgttctataattcaattctgacactaacttctccaagttagtgcaga

SEQ ID NO: 342486 - DNA, 1000 bp, Homo Sapiens
ttttttttttttttttttaaacaaatgttggtccctatctgggacctctgaagtcacttttaatggatttggggattttacagatttaaaaaggggtgcctactgtggcccatttatagacctgtggagcgaagagaaggagattagtcacactgggggccggagtagaagccgttttaaattagttgccccgctctgccttgagactgagactttctgactctcagtttcacccttgggttccagcacccagatgagaagagagagaaggtggaagaggaagagagggaggggatagagcagcggccaccacctctccctgagagggcgcagagtgggtggttccccccaggtgagcaaggtgggggccccgtgggtgtgctgggtaggggtggagtgtgctgggagcacgcgggaggactgcgcctctgctcctcggggtgtggcgcggcccactcaggagccccttccagtgtagactccaggagggtactctgagctaggaatgccttcctgagcgtggttggtgggggctctaaggccattcctccaggccctgagggggcagagagacacgtgagcactaacccaggagccgggactaggctgagcccactactcacagcctggggtaagccagcctcaagaccctccaggatggtctcagcctgcatccgactgcctctcctgcctgaccactgcgctccttcacaggcctctggccggcgagttctcaagatgtgcaaaggtttcctgcttccttacctttgcacacctttgcttattccttttgcccagaaagtctttcccagcacatttgactctcttgaattccagtctctcccgcatggctaggatcaagcccgttctcccatcgctcatcaaatgaactcagagcatagtactttgccctgtgttaaggtcttgtcttagctctggattatatgtccttgaagggtagggaccatgtgtttgtcaccacctgtccttatacacatca

SEQ ID NO: 342487 - DNA, 1000 bp, Homo Sapiens; identical to SEQ ID NO: 160262

SEQ ID NO: 342488 - DNA, 1000 bp, Homo Sapiens
tttttttttttttttttttttttttttttttttttttgagagaaggtctctttctgtcacccaggctgaagtgcagtggcacgatcttggctcactgtaacctgggcctcatgggctcaagcgatcctcccacctcaacctccatagtagctgggactacaggcacacaccaccatgctcagctaattttgttttgttttgttttgagatggagtctcgctgtgtcgcccaggctcaagtgcagtggcgtgatctcggctcactgcaagctctgcctcctgggttcacgccattctcctgcctcagcctccagagtagctgggactacaggcgcttgccaccatgcctggctaatttttttgtatttttagtagagacagggttttaccgtgttagccaggatagtcttgatctcctgaccttgtgatccgcctgcctcggcctcccaaagtgctgggattacaggcgtgagccactgcgcccggccgctaatttttaaattttgtggagacagggtttactgtgttggccaggctggtctcaaactcctgggctcaagcgatcctcccaccttggcctcctaaagttttgggattacaagagtgagccacggcgcccagcccccaaaactccctctttatgcagacctcccctctctcccttcccagaagctgggcttgctcttagctcaagccctaggggttcctacttacctgcaaaggcatggagggtggtgcccccgatgtggcaggctgccaccccagtgctggcagtggccacagtgcctgtggggggcagtgagcccaggattcgctttagcagatatgacttccctgttcctggacaggggcaaagttagacaggtctccctgttcctctatcccaccccaccactgtccccctacctcctctctgcccccactacctgcactcccagtgaagaagatgctctggcctttcaggacggccctcagcacagcagcctgttcctcagaaagct

SEQ ID NO: 342489 - DNA, 1000 bp, Homo Sapiens
ttttttttttttttttttaagggtgaaataacatctatactattttattgagcagttaaagcacttgctatttttctaaatatttacactattactgcttatgtttacaaattctaagtatcatttccctccaaaaagtagactttccagttcttggcactaattcttagtcaaataagcctgaaaatactggcaaccttttcagtcttgcattgctctaccacaggcataataagggctcaggacgagatttctgcattctaaagaaaagtaggcaataccttaaaaatttaaaaactaagtaattgatactcacaagcaggtaacatcaactaaaacttttttctttactaatttttccttttcttttacaagagaataatcattaatattatactacaaaagcatgtagtctccataattaaaaaattaaatgtcagatatacaagtaatggcattttctccaataattcataatttttacaatttctgctattttggaacaaacattaaaattcccacgatttaagtatcattaaatatgaactgaaacacttagcatctcaaagaattatcaagaatggtagaacttgtaattaactctataacttacatgggtgatatagttcccctttgttgttttatttcttaaatatacattctactaaggaatattttcatgtgaacagctctggtttgaaaaattaatttatactgtgaagagccttaaggttgtacaattttgttaaattatatgataaccttgaatggtaggatgcatttactcaacttagaatatggcgctattattattataaatggtggtttttaattcacattaagataggtggaatttaatccaattttgcaaaggctttgtgtttataaaaatcttaagatggaaaccttgctttgagaaccataaaactcaaaatctgtgtagtattttaagtatgaaccaattgaaattactgttgaaaaatgaagacaaaactgtatt

SEQ ID NO: 342490 - DNA, 1000 bp, Homo Sapiens
ttttttttttttttttggcattttaacaaagaagaaaatggctttattaaaagttttcaatttgtccaaatgacaaacacttaatgtgtatatggactgtatacatgtacagaatttattgttcccatttcatatacccttttcattagaagtccctaaagatcatattcaaacatttttcatatttctgagtatgttaaagatcactgtagatcattctgtgtatgttaaagatcactagagtcacacagtggaaatattatataaacatatatttggataaatggaatgtaatttcatgtaataaacagaaattacagtactaaccactatggatcatttttagtctcttacatgaatcctgatataaaattaatgatatcaaatcaaaaatgaaaaaaaaatttcatgtttttaaaatattatttaaaatatctttgaatagcgtagaaaataaatttcccaagaaactaaatcaagtttattaaagattatatttggaaaatgaaaacaaagagaatgtacaaaaacaatctccactctcatacacccacatccacccataactgcatttatgggtgcatgattcagggtggggcagagccactcaagctccgagagcctccagagacccagtgaagtcacttcctccactcaaggtgattttcgatccaaaacagcagacactactacatctttggagcatgtgaaaaggggttggtggggaaaactgcaggcctcccctagaggaaattcaagactgcctgtcctgcctctggccagcctagtgacctcagccagggctgcgcaggtgtgtttactcacatgcaaaatactacttatactgtccttgcacatgaaggagatagctaggcagggatgcccgctccacaagcaaagcctggtcactctccctctgtgtggtctgtcatccaaccaacaggtgtcaaattcattcgctttcttttaggtttttctgtttctttctttctctctttct

SEQ ID NO: 342491 - DNA, 1000 bp, Homo Sapiens
tgtttttttttttttttttttttctagaacttgcataattagtattatttattaagcacccagagaacagtcaagaccaaagtccctgcttgtccttggaaaaatgtcacctctatagcaggtgtcctaaccctgcagtccacccaccttaggaagtccttgaatagctctctgggggaaatctatcagctgcctgaagagctttgtgtgtatttgtacaccagcattttcctgaggaaggaggtgcctggcttcatcagtttctcaaagggtctaggacctcaaaagggatcagaatctagatatttggataccctattttttttttttttggcagaggtggggtctcgctatgttacccaggctgatctcgaactcctgagctcaaccatcctcctgcattggcctctcaaacagctgggattatagtcatgagccacagcgcccggccctgatacctttacgtcagcatttcccaacatactgtctcagggccacttacctgcaccagaactacctggaatatttaggaacagactcctggcccccaaccaaacctcctgagtcagtgtttcaggggaggggactgggatattttgttttgcaccgactccctaggtgattttgatgcttagccaaatgagaaccattgttcggagctaacatataacacagcaaacaactgtgtctgtgtcctctccttgggagagaactccagaagtaagttgctttgttgcatggggagggggagtgttggaaatcccactgggatgtgtcgtttcccccatatgtggcactaattgagctggaatatccagggagaggcagcagttctagggatgggagcaaggccagccagcctgccagagacacaggtgtggttttggtcggagaatgccatgactgagttaatccctccataccaggttccaccccagctccacaacatcctgtctgtctccccagacaaaccagcccagatcctcctgggccccagaaa

SEQ ID NO: 342492 - DNA, 1000 bp, Homo Sapiens
catgtgggccgttaatgcacttatattcccagcttgtaagctaacattatagtaaataaatacacagtccggtggggaagggttgggtggggaatcccggcagggtcaagcagtagtggaggttgcagcggcgacggcaggtggggagggaggaggagggagagggaggagggtgagggggctggggtggaggaagagctgtagttactggtatcccagcgccgaggctgaagctagtctctgtccatacagcgcgtatggcgaatagtagggtccggctgtggggagggacggcacggccaggccccccgctgtggataagtggctcttgccataggggtggtaccggcttaggcccaaagtgtgtggattccgcaaggacagcgacccggggctgccgggggcggcgggcggggggaggtgcagatggcaggaggcggcggcggcggcggcggcggcggcgctgcccaggcccgaggccccggggtaggcggccagaagtttctcggctcccggcagggccgtgtgggtccgtaggtggctgagcagctcctccgaggtggcgaagcgcttgtcgcacggcccactggctgccacccagttgcagctgtgcggcagcggttcgttctgcagcatgaagccgtaggtgtagagcgggtggccggggagcgcggcctgggcggcgctggacgagagcgcggcgggctgcagcgggtgcccggggtacaccagcgggtagccccccgccttcaggctgggcccggcagggtcgtgcgcgctgcaggtggagcagctggagccgccgaggtgcgaggcgccgtggtaacctcccaagcaataggggtcgcggcataatccctgcaggaaggagggcggggaggccccggtgagcgggctggagctggggggcttgcccggcggcaggcccaggcccccagacagctggcctcccacgaggccggacttgctaggatccaggccaggcacgaactgagacggg

SEQ ID NO: 342493 - DNA, 1000 bp, Homo Sapiens
ttttttttttttttttttttgttttttttgtcaaattctatgcaggatatcaaacagaaatttgaaaaattcttaaatgacatatacctattcattaacacccactgctctagatgacatccattagttattactgggatcagatgcttttaggacatctttaaaatattttgttattttaactgtagttctttatagcattacgaaagaaatatcactcacataaagcactaacaactctttttagtactgtgtctctcccatgcagtatggtgcttaatgttactggaaaatattgacaggtttagcattatttcaactaattctgggcaaatctaaatagaatagtataacatgaagaaatttataaatttgaaatgtgagtaaactgggacgggaatgagttgatgagtgaacccagttgaccactgggcatttgaatctcaatgttgcctacacagcattatgagtgtaataattttcattaggtaacaaaactgcttcctcacctttttatatagcttaaacaaaaaaaaagaaaaaagataaaaaaaaaccctgcttctatgtaaacaaaaaaaaagaaagccaactattagtgctaggaatgaaagacatccaatccaagtaagtgatggttcttaactataaaatggaaattgtataaaaattaaaatagaatgtagaactagtaggataacattgaaaaactgactacttatatttgttttttttattttgtgtgtgtttttggctgattatatttaataaaagctacttttagtatttgaactaagtgcacatgtgtgcattcacatacacaggacaagctcctcagctttgaacaatatgaactttggacaatatgacaactatagcatcactgggcaaaaaaaatagctgacttatttccaagtgtgtttcctgggactagcagtaggttctctcaaattaaaagtaaaggcaccaggctataaagtgccaattcttagcaccagag

SEQ ID NO: 342494 - DNA, 1000 bp, Homo Sapiens; identical to SEQ ID NO: 160263

SEQ ID NO: 342495 - DNA, 1000 bp, Homo Sapiens
tttttttttttttttttttccatgactggtgagtttcaatawtttattaaaatagcatatttaaccatggttaaccaagaatatgttaactttgtgccccccaacctgcccccgccccagatacgcagcaaaacacagtagtgatttcaaatatccttgatcatgaccaacaggaatatttcaaagtcaagtttgcaactcaaaagtagaccttggaaaaactctgaattaaaagagaaacataaagctctcacacagaattcttttatctgccctaaaatcaatgccggcgcaccaccacctgacaatactgctaggatttttctttatgcatagtataacgactcatttattaagtacccacttttataaataaaatcggcattttttgtcccgcttaatgttccttttcagcttcacaaagaaaccagtaaataaaactgtcaacgacagtcacaacatatgctctcacagcaagataaaaaaacttgaaaatacgcagagatgcatctacgctattttacataaaaagagagattcaaaaagtgcaaggcaaaatctgcagttttttgaggggagcttttaggcacatccatttcattaaagcaagcttcagaatgaaattccagtttgttcttcatgacacctgttaaagtctttctttaaacgacaacaaaaaaaagccaaaaatacatcccatcaagtgtacaatggtagtcttgtgtcctaaaagtgaggagttcagctgtggcgagtccgtcctttctttattctggcaggctttggtttggggatgtactgattatttgcctggtactcgagttctttacggaagtagtgaattgctttgtttaaaccttcctccagcgggaccacgggctcccaccccagcatcagctttgcttttttgatgtctggttttcttttctgtgggtcatcctgggcttcggagagaaactgaatttcacttccgctaccaacaaggtttttaattaactga

SEQ ID NO: 342496 - DNA, 1000 bp, Homo Sapiens
tttttttttttttttttgaaagggctcacaatgattgtactttattgatgtgttacaggaggtaaggactttctgcttaaaatatttaaaatttacatgtgcacacaaacaaacacaggttcccccacccatggggaagggcgagatgactctgaataaaggatggaggagaagaagagggtgtagacggagggcccttgacccctacaggggcagcaggataaggaatagagtggggcagaaggtgggttattaagaagcatcttgcttactgacatgaagccacgtgcccagcgagagcacagatgaggcctcattggcgtagaggaggcccttggagggcaggcacacggtgcccaactagccagccaaggccaacgtcccaggggtagggcggaagtggggtggcgtgcacagggcacccagcccaggcctctgctgcccccacctccctccccaccctctgagagaaaagacggtttgggcctcagccacggaccgacgccgttaccggcagcgtctccttaaactacagagatacaatgtgtatcaacagggtgatcgcttctgacccactgaggcagacagctagaggtgctgcatgggccagaaccaatcctacagtatctttggtttgtgggtttccttcccgacttgaatcctccctctgtccagcctctggggtgggcctcagggctgggaatgggctgctcaatggcccaaagcccagcctgacggcccttggaggctgggggtgctgcccttgccagccacaggcagcttactcactggggtgctgggacttgtaggagaggatctcggcagccagctgctgggggtccaggagctgtgggaagcgccccatcacagcctccaccaggtgcgggggaaacacaccacacagcttagtatacacgctggcctgctccttggccaggctgtctgccctgccccacgggctcctgccagcccctgggctctgcactgggggctcctgaag

SEQ ID NO: 342497 - DNA, 1000 bp, Homo Sapiens; identical to SEQ ID NO: 160264

SEQ ID NO: 342498 - DNA, 1000 bp, Homo Sapiens; identical to SEQ ID NO: 160265

SEQ ID NO: 342499 - DNA, 1000 bp, Homo Sapiens
ttttttttttttttttttagagaaatgtttttattaagcaacatagtttacaaatggaggtaatttcccactgcatagataccatgtgttttttaagttgaggttcttcatgtgtattttcccactttcattaatctcttctttttatcttacatactttttttcttagattttcccagccaataacttcttgttttaaatgtttcataaaaagtatttgggagtattcatatgaaaattatggttgttttcataattgtgtccttctttgtaggatccaaatctgggattaaaatgaattttctcagaaacttctctgtggtctatgaccactttctggttgtctctataattagtggggtcatcagggatcctaaattttgccatctgaatttctgaatcactcagttcagcatgggagattcttgcataacccaacctgatcagccctcgatacataatgtattcacaccatctgtcatgatcagtgctgtcgatatccttcacattgccatgttcagtgagctgtagataatctctggagccaggtgctgaagtgatatatcccagaaatatcacttgattagagctacttttcagtagttttgaaacagcaatagcctgcagtttcctgtcgaggtcatcttcgtggttcccaaagtgtgtcacgacaaaatccaccagcttgcccgaaatgttaacggtcaatgtgatggctggtgcgatctcgccctctggtgacggaagaaggtgatgctcagatttcacaattgggtatcttgacaaagccataatcccccaagtgtgataccttgtgcttggaccaaagtctgtatagaaacccaacttttcccctagccacatggttaagtcattgttccccatatagggcttagaagcatcactctccaaaattgttatgaaatctgcacctgtttcattgagcaggtgagctgatctttctagactagaccacccttcattgtcatatccaaacctg

SEQ ID NO: 342500 - DNA, 1000 bp, Homo Sapiens; identical to SEQ ID NO: 160266

SEQ ID NO: 342501 - DNA, 948 bp, Homo Sapiens; identical to SEQ ID NO: 160267

SEQ ID NO: 342502 - DNA, 1000 bp, Homo Sapiens; identical to SEQ ID NO: 160268

SEQ ID NO: 342503 - DNA, 1000 bp, Homo Sapiens
ttttttttttttttttttttgtatttttactagagacggggtttcaccgtgttagccaggatggccttgatctcctgacctcgtgatacacccgcctccgcctcccaaagtgctgggattacaggcgtaagccaccgcgcccagccagcataaaagtttttataagttctaactaaaatagtggagtcatataaggttgttcacattaaaagcacttcttatttaaggttcaatattcacttgctaactgaaaaacattgctaaattattccacagatgttcaggccattctgaaaaaacatcagaatagagtgaaaaaactcttgatgcaccaaagcaactttaacaagccatgatcttccttctcacatcctaaaatacctggccattaatatttgaagaggggaaagccacacgataaagcatgcctataatatgcatcatgcttagttctctagaagaaaataagaagatcaaattctaggaaagagggaaaagtaactctgtgagatttgtgggaggtgaggagggaattcaaagattgaaacagactataaaaatatgtgatcttttacatttgttgaagcaaaaaatccagaaaacaaacaacaaatgaacgaatacatgtttagaccagccgtcttacctgaagagtccttgtttaaaaagataagcactaatatgacccccttctaagtatcggatttcacaaccaggccaaatttcttgtaaacttcgaactcctgttcgtggaatataggcatcttctttggcttgaaccactataatgaggcttggatcaactgggactgagaaatttgctacatgagtacattcatccatgactcctttcataaatattaaagactctttccgaagactgtttctgctttgttctttactaagtaggtggtatgactgagggttgcgacttgtataaccacttttgttggttgaaagtgtttgattgaagcgcttcatcttagaggtatcttgcaat

SEQ ID NO: 342504 - DNA, 1000 bp, Homo Sapiens
tcagcagaactccaagtgctggtcagcagggatgttgaacttaagtttgtgggcctcgaagaggttgcacagctctttgatataacgctggtgcagctggttcacctcctcctccgagggatgcagcgtcttctgtacctcgatgggcttccccaccacagtggtgatgggccggcggtagggtattaaaccaaagctgtactggaagacaccacggccatgaaagagtgggagggagatgcccatgatcttctgcaaccgattctggatatagcgtaaccaggagccagaagagttgggaatctggtcaaataggtcattctccccgaaggagaagattggcaccaggggtgccccgtgtgtcagggcgagcctgacgaagccctttcggttccgcagtaacagcgtgaaggatccaggcctggcatccagggcctcctgggcaccccctacaatgatgcccagcaagtttccgccacccttcctgttcagaatgtgagcagcactctccttttctgatgtgaccaaccctgcagacatgatgtaatctctgaagaagggggcccggaaccacaaggtcagcatcatcagatgggggcggataccggggaagatcgaagagaagcctgtgctctcagtgcacaggttggcaaaggctccgactgccaggactccatgggggtggaagcccgcaatgtagttccgagaggggtccagctcagcagtcttgaccagcgagatggggaaatagtccttcatgtacttccatatagtccagcacctgatggcctggatgtgccggcccccctgccgtggcttgtctcggtccagataccaccaggccgcatacaggacagtgaggagccagaatcttgtaaacaggagggctatgaagcccacagtgcagatctcggccagtgccaagaaggagaagacaaactgtaggacagcaagtgtctgcagcctgcgctcccacggcataaacaagggcgcgaactct

SEQ ID NO: 342505 - DNA, 1000 bp, Homo Sapiens; identical to SEQ ID NO: 160269

SEQ ID NO: 342506 - DNA, 1000 bp, Homo Sapiens; identical to SEQ ID NO: 160270

SEQ ID NO: 342507 - DNA, 1000 bp, Homo Sapiens; identical to SEQ ID NO: 160271

SEQ ID NO: 342508 - DNA, 1000 bp, Homo Sapiens
tttttttttttttttttagtcacattggaagtaaatgaggattgtaatccacaaatatctgaagttttaattttaattaaaatatatataatgcatcttagctgattcttacattagaatcactatttttaataagcctcacattgaatacaaaatacataaatataaaacgcttgggggaaaatattacattttttgaaacaaaagggaaaacgtgtttgaagaaaatgtgttttacattgtaatgtccaacttgcacaaccatgtttcaacttggaactcatgagttatttgggccatgccctcaaaattctgtttagcctatttttgatttcctttcaataaaagacaagacaagaaagaaacaaaaaccaaaagccaccctactcaggaatctgggaatgccttgatgatggactcataggcaggtgggggcggtgttgaaaggcccactcgaagactgttactggaccagtagtcaggacggctcagactgtgggaagtgctgatggtgggagagatattggaagaagggagagtcaccagctgactctcagtttccacaggaagtggtggacattgcagaaagggatggaaagtagaagctctgaaacttgattttcttggaaaggaatttgcttgttccagggaagctcgtcgctggaaggtgagactggccaggctgaggttgcttcgacgttcacagccactgtggcggtaaaatccagttctgttgaggccgtgggtgtaagaagacctagatctcctgcttgaactccactgtgagatgggagcactggctcttcttcttcgagacagacaaatgaacacagcccaaataaatcctccaagtaccagcccgattgccatggatacagtgaaggacatgataaggtcctcccaaaagttttctggccatggactccctaaacttgttgtgttattagccataatatccacaagaaatagaagaaagagaagaaaaacagaaagaaaaacc

SEQ ID NO: 342509 - DNA, 1000 bp, Homo Sapiens
tttttttttttttttttggggtcatatttttgttcactgaaaggaccaaccagtttcatcaaacaagctttagagaaagagaaactgagtaattcatcttgtcagttacagttcacatatatgcacacacatacaaactggctcagcatcagtgaaacataactattcaaatacaaaagtataaaaaacctctttaaaaaaccaatagcagccaaaacagaacatttgtaaacaaaaccacaactatcagccctgtgcttaaacacagaatctgcattcttttgaaacattaagtatatgcaataaagagaatatagaccatctttttccttaatatacaatacccaatatctaaaacaatgtcaccaataatagacacaaatcggtgttatcataaggcatgttgaacagtctttttcacagtactcaggggcatcatgttgctgcagaggccacactttccagaagttttctcctcgctgtgatcctcgcacaccgggggcactcggaggactggaagcactgtttgtgaaagcaagccctgcacgctgaacatcttctacatgttgctgtctgaaatgggaagatgacagtcgtattctggcaaaattcacaaataaagccctttccttgacacagctgttagcaaacctacaggtcttcaacagcttcttgatatggaagagctgctcctgaatttccttcactctgtccagctccttggctttcgcatacaggctttggccgatgctcagcaaattgaaaatgggctggtgccatatgctgtcgagcagctgtttggagaaattgctgacgtagtacttcttgaagtcccacatcatcaggattcgggcagggatgcacgactctgcatatgagtggcagcagtcacagaaatacttccctaggtattcgcagtaccggagccgcttcacaaacttaggctctactggagttccacagccggcacagaaaaaattctgggctgccaccacaaggt

SEQ ID NO: 342510 - DNA, 1000 bp, Homo Sapiens
aagttgaaaatttcatataattttatttattaagaattccaatctaagtataaaggtacaaggtagtgagaaggaaatactacagttcggagaactgcttatttccaagtatatttaacttataaagttaataaatagttaaatgaaacaaagtttataggtgacctttagtaaatggggaaattaacaggactttcttcttcatcttcaaactcttcagaagcagcaacagggctagttaattcaactcccaattgttctgaaagtttttttaccttctcttctaagagaatattcttcttcacttcttccttgtaattatacttaagatcttcaatttcttcaaaaaatgaaggatcaaaattttccagttcttttttcagcttctttatttcctccttcaaatgctgcttttctagatctgacattttgagctgtgtctctagatcttttattttttcctttagttgatcagcatcaggtatggtgctttcagctccactttggtccttgttagcttctatctgatggattaattctgctttctctttatccagctgatgattagctaatctaagaacttgaagctcccgtttaaggccttgctctgtctcagcaccttcaggaacatgtttaagaatcttaatctgttgttcaaggtcttcattgtatttgttaactttttgttctctctctgttgcttcttttacaagctgtttaaggtcagtaatgctttgattttttttggcaatatcagtttccaattcttttaacttggtttcatacattcttgtaaccacaatggatttccagctcttactgtcagcaccttcaagctgtggacctctgctttctgcaaactgcaatctcttaccagtctcttctagttgaactgtcatcttctcatttaatatctctaaattattctttgctatccgtaatttctctgcagcatcagtttcttttttaagttctttacgaagcctttcattttcagcaa

SEQ ID NO: 342511 - DNA, 1000 bp, Homo Sapiens
tttttttttttttttttttttttccttttttctcccaaactttatttagaaatggaaggagttcaattttttcttgttctactttccctattcttatggaggtaaaaggaaagaaggaaggaaaaagcagctttcacttacaaagtttcgtgtaaaaatatctttttttcttaaataactccattcatacaaattgggatgggaagaaaatcctttcctcttgggaaagtaatacaagtcttaagttccattgtagggtgcgccttcagaaacctgctgcacttttctgatatagttcaccacttttctgtcttcacagctttggggaattttggccaggagaccctttacccgtccttgagaacggcggtccaggagaatcaggcagtctgtggcctcctgtagcagggcgctcttaacagactcaggtgtaaggtttggatcccttgctacatcacaaatcagtttcaagagggccttcagtaagaccacaagtctgcaggaaactctgggccaagtatgttgcatgagaagttttagggtttccaatatcttcagtctagcttcctcctcaggtccatcataaacctccagataaccaatgatgactctctccagcctctttaagtgccggacagttaggatccccaacctgttcacgaaagccggcaggtttcttgcgtaggtcctgcgtaaaagaaggcggtgctctggctccatgtgggtcaggatcagccgcaggacctcatcacaatgggtggtgggtcgagctccatctcctttccagtgcagggttttctccaggatggggaataaatccagcagacacaggagcacagcctgaatgaggtggtgctctggtgtgtacaggtggttggaaatggcatggtataggacctgggctctgttatactggagcaaatcagcagctggcacattaagcacaatgtgatggagacagtgtacacccaggattttgttctcagtctgatagtcatct

SEQ ID NO: 342512 - DNA, 1000 bp, Homo Sapiens
tttttttttttttttttttttttttgggtttcaatcttttcttttaggaagttttatttatttttattatttttattttcccaatgagccctctgcactcctaaggaaattttatttgatgaggaccaactggtgacataaaatagattccaagctgcaatgccccactgactccatctccctgaccagggaattccaggtgctaagcagctttgtttaaaaaccactggaccagatggtatccctggttcctgcgtatttcacaaggtccccagggctaggcatcttctacatgacacatatggctgcaaacacttagattctaattgtaccccaaaagatgttgttaaaaggctggctagcctgggttgggggacagacgggggctgggggctgtttcacggcataagctcaggtcaaggggccgtagctgcagtagagctgggataaggtcctgctcagagcaggccccagattcctctgtagacgcccacacttaatggtgctcagcagtgtctcttgttccttgggggtggcacaggcatcataggcggccaggaggctggcaggggtgctgtatcgatccaccagggctgctgccttctccccactcactccgcgcacctgcatcagctgccgggcaaacacttctcgcaccgactgggccttattcttgatggctcctgcgttgaagtcactgaaggtgaggagtgagcagagagggtttggagaggtcatggcccctgattcagggttcccaggggttccccaggggcggctgcgtagggtgtggccctggtagagtctctgcaggccccgagtcaagagggccaggtaggcggctgactccttaatgtctgctgtgcgcttcacaaaaaagccatcaatgacctgagtgttggtgacagcctgcagcagtgtgctctcaggaaggctgaggttgtggacggaaccatgctcttccaccaggtatacccggcgctccagaccacagcgcttc

SEQ ID NO: 342513 - DNA, 1000 bp, Homo Sapiens; identical to SEQ ID NO: 160275

SEQ ID NO: 342514 - DNA, 1000 bp, Homo Sapiens
ctttttttttattggaaaatcaaaatttttttattaatttactggatttcctatacctaacaatccttaaaacaactatcaacacctgcaacacaaaccacaggcaaaatgaaaaacagatgccccagacagcaccccaccacatggcacacacttaataaggaacaaaatcctacagggtgctgacataactcgctttaagcatgcaatgattcctgcagtgctccctggcaatcaacctctctgcaccctggggctggatacttcaaagtctttgttctcttaacaggtttgaagtcaacatggcaagttaaggacaagttagatgagatccccctagttcataacgtgagttcctcttgctctccaatgttcatccacaagtacagggtccaatcccctataagagatggcttaagcatcccaatggggaaacagcctgccagccacatgggcagattctatatatttccaagtcccgcagccacaagactgaaagccatagagaattgacagctcaagcctcacctgaacaatgtgttgaaaggggatctctcaggacagacactttgatttcataagttggcccattttggcccaaatataccaaatagagatgtcatgtaatgtcactgcaaatccagtacaagatactaagagtacccgagaacctggggttctctttcggccatccagaaggtgaggtcagccaggagggtgcccattggtctctgaccaactgatctgccagaggaaaagctgttcagtatccaagatgcatcaggtccaatcccaggggttcctatttctccttctgtgcctgctgtaacctcttggccacagcagtgatcagtgctgccccttttccactgccatcttctgacagcatgaatgtcacatcacatcgaggggctagttccttcacagtttcctgcaatattctagaaaagtgagggtgcagcttgtacagggtgccgtccacacccacagtgatcctcag

SEQ ID NO: 342515 - DNA, 1000 bp, Homo Sapiens
tttttttttttttttctagtcaacaattttattttaaagtttttcaaaatacaaaagttagcaaaaagctgaatatttacaattatgtcataggttactattaacagtgcagaggatagagtgtgtaagaaagactttgaagaggaaataatatacaaagtacaataaacagcaaggttacatgtcatcgttttgccaccgtacagaagtggaaagtgccgacctggagaggtcaccgttgtttcatttctctgtatccagaaaggaccgtctcttaaatccaccaggggaggaaacagcctcctgtggaaaatgctgtcttctcaggagcattgtatctgcacgtgccaatcacagttcctcctccgttcgcaggtactgggtacagtctgaaatctttttcagctgagcagcgtttaatctttctgaacacataggacatgtgctttcagtgtttagcatgatcttcaattctgagtatagagcagggaagtcacaatgtggacacaccgtccagtcatctttcaacatgtgtcgacctgttgcaatgcaatatgggatactgtttttacatccaggacagaggagttcacactctgggagaagaaatttgcagaatggacatggagtcgtggcctcttctatctcagatatatcgggtctcctgaccattccctcgatcttctttttgtatttggcatctattttgctgcggtattcaggcctcatcaacatagctgcgaagctgaaagcagagttcttcaggcctgccctgtgacactcaatcacagttgacgtcaggatgggtacaatgtgtgatggaaatttgctgatgttgttggccacccgaatgagcatgcgagcccctttcatgtgatctccatttttaacatgaatctttactagtatatagctgtgcagaatcatgaggttggtggccatctcggagggaattttgatcttctgggatttcagttctgcatacatactgaagagaaca

SEQ ID NO: 342516 - DNA, 1000 bp, Homo Sapiens; identical to SEQ ID NO: 160276

SEQ ID NO: 342517 - DNA, 1000 bp, Homo Sapiens; identical to SEQ ID NO: 160277

SEQ ID NO: 342518 - DNA, 1000 bp, Homo Sapiens
ggcattaaactctatttatttagtatttgaaacatggtgtacatgtatgtatttgtataaacatttgttacatctaaaatccacaacaggtaaacaatctgtgctttcttttgtgtacaagtttggggtttacatctggatattttggtgttgtggagactcagtctgtgaagctaatcagattgcctcatattaccataataactgtgacagaagtgatttgctccttaaaggggctgttccttgcccagaaaaggtgtcacacttttgaactaataaaccgggtgtcacggaatcaagagaaacacagctgacacgatggagaaggtatgtgcaggggactcctggagatccaagtcaatgcgtagcaggcaacacaagccatggggtgacgctgggaattgagctctcccttttcaaactgttggatgtgaatatcaagtctccccaaccccacctggaggggtttcatccagcaagagcttgccttctgctcagcacactcctgggagtaacctatgagtgtcacagctgcaactccgaggtgccaaccaagcccagggctctggcttcttctggggtcaggccgctcttcagggttcttcgcaaagatttccggttggcccgggatcgtttcctctccctcggcaccactcgctgactgggcacttgggtggctgacttgacgatgcggtccatgatctcatcagctgcatcatctgtgacattgggcgagtcatcagttcccatagtccaggaactagtggatcctcggcttgctcggctgcgtgtgcggacgcccagcgcgggggtggcgtcctccacggagggggacgaggttttcagcacagccttcatgttctcgtgctcagccgcgtcctccgcatagctcagaccctgcggctggcttgggggcgccggagaactgccggagaacttgccagaatcggtgatcatcttccctctggtcttatttctctctctgtggttggcccgtttc

SEQ ID NO: 342519 - DNA, 1000 bp, Homo Sapiens
tttttttttttttttttttgagacacagtcttgctctgtcacccgggctggaatacagtggtacaatcttggcctccacctcccaagttcaagcaattctcctgcctcagcctcccaagtagctaggattacaggcacccaccaccacgcccggttaacttttggttttaagacggtgtcttgctctgttgcccaggctagggtgcaatggtgccatcttggctcaccgcaacctccacctcatgggttcaagcaattctcctgcctcagcctcccgagtagctgggattacaagcgcaccccaccacacccggctaatttttgtatttttagtagagacggagtttcaccatgttggccaggctggtctggaactcctgacctcaagtgatccgcccgcctcggcctcccaaggtgctaggattacaggcgtgagccaccgctcccagccgcaccgtttttttcctccttaagagagcactgatgctcagctagagctgaccttagaaggtgagggggagaaaaggccactgcaacacactgcatttccttacagtggtctgtgccgattgacaaaaagaagaaggtgttccagtgtaacagatgagtgtcccagtaaaggttaacactgatcaggtaaaccgggggtgggggtaacaataacacattgattcagctcaagaccaggttccattttttcatttgccagagtgcccacggtgtcctgctggctgggaccttgcaggtcgtcctggtttggagtgggggataggaggtgaaggatgatggagggggctatgttgcaacgcttcacctgctggtcccagtggcaggtaatggctgctcttatcagcaggggtaaccaaatgccaagttgcatcaagatcctggtggtttccactgggccagcgcaggcaagggtggtgcgggaagaaggccacgttaggtacataggccatgtccaaattcaggttccatccagcaagctcctatttcttgg

SEQ ID NO: 342520 - DNA, 1000 bp, Homo Sapiens; identical to SEQ ID NO: 160278

SEQ ID NO: 342521 - DNA, 1000 bp, Homo Sapiens; identical to SEQ ID NO: 160279

SEQ ID NO: 342522 - DNA, 1000 bp, Homo Sapiens
ttaaaattatgcacagataaacttttatgcaaagtcaaatgtcaaaagacaggaaaacaaattgaattcgtatcacaaaggctcacatttttttaatatgtaaagaactcccaaatcaataggaaaagccccagtagtatcagtcttgacagatagtgacaaaaagctctaaaatctcaatggcttaaacaacacatgcctttctcaagagtgcttttcatccctcatgggtgagttggggctgttttccatgttgctttccttgcaggacttatgcccagaagcagcggtctcctgacccattcttgataactgtggcagagggaaagaggctctgcaggatcttgtgctgccaattaaatgcaggacttaaagtgatactgatcaattcctcttgcaaatcattggccagaacctgtgtcacggccctgcccaagccccaaaggaccagactgtgccgtattctatgtgcatggtttctccattgaaggtctagtcaaagaaagacgatggcagatttcattacattccacatgctggttattaaagaagtaaaaaattcctctctttccaaaattggtagtgaaaactttctgatcaacggagtgaatctggggatctgtgaggtagatgagtccttttccattaccggttacccaaccttgtaaatcgaccacaacatctctatgattagaaaactcataagaaaaatggccataggccaagccatattctgtggctttgtattctgttttcaccactttcgtgttatttgacaattttacaaattctcccagtatgtaaggctccacactgatacatccctttattgtcttgtcctctaaaatcagtagtattgtggatgggatgtagaatatctgggtgggaatgttttgttcatagagtctcttgttaaattctgtcacatagtgctgtgcggtcatctgccgctccacatcagtgaagtggtgccagagccccttctgctccttatagtctt

SEQ ID NO: 342523 - DNA, 1000 bp, Homo Sapiens
tactttctgacttcaagtcttgtttattcttgaataaaaacagcaattcatggtattttacacatttattcatgcaggacaaaaatttgtatacaattaaggctaaaattaaacaattttttatctaaaacatgcaactcagaggacatgctacttcaatttcccagtaagaaagaaaaggaaatcattttacccaaatgaaatgattttttaaatgattgatttggccttgtgttttcctgccagcgtttttacatttgaacaagagcaggaaatgttttcattcttaatctttcaacttcagtctgtagtattgaaatctgttcagcttgttgttttgaaatatttgttaacttctgctgttgcatcatgttttcataccgttctttgacaatcttttcacaagtcagtttagaccccattgcattacagatgtcttttctctctgagacagctaccaactcttctcgtagattgcagcttagggcataatttgctatatctttttgattgctgaactttccaagttttttgagtagtttcttgcagttttccacattctttttgtgcatcttatctaaaacagcaatggtttgttccattattccaatctgaatactaatcagagcctcatagtttggttcatttaggtacttttgacgatctcttgaaaaaaatagcatctgaatatcccaagccttctgatttagatcttccctttccatctccattttcttatgttcccactcaatctgaagtattcttttgtgtacatctttactttccatcatgctagcaactttcttttgtccttgagtccgaatcacagaattcaagtcttcaattatgttcttgttgatgagaattgcatcagaatactccagtactagctggaaattttccagttctacttgtccttgtttaagaagaatttggattgtcaaattcaactggaatctcactttctcttcctgtaataggatgagttcatggaacactc

SEQ ID NO: 342524 - DNA, 1000 bp, Homo Sapiens; identical to SEQ ID NO: 160280

SEQ ID NO: 342525 - DNA, 1000 bp, Homo Sapiens
tttttttttttttttcaaaaaataaacaaattaactttattacattgctacttcaacttcagtccttacattgatttgttttttaaaaaataccagtttgaaacacattactgaaagtgagtgtacacaataaatagaaaatagggatgcatagtgctggagacattcaaccaacttatcttcatctgttgcctactgttgtagacaaaatttgacacacaattagcattactgaaagagcagccaaactacctcggagaaagtggcaaactactggaaaagtagcttaaagctctggaccactcaccaaaaaaaaaaaaaaaaagaagaaaatacactgtttatctgggagctagcctcattatggcaatgaatttatctactagtcataagaacaatttttaaaatatcaaaagtcccagggaaccttcactaacagtttttgtttttgtttttggagacagagtctccctctgttgcccaggctggagtgcagcagggcgatcttggctaactgcaacctccgcctcccgggttcaagcgattcttgtgcctcagcctcccaagtaactgggattacaggtgtgtgccaccacgcccagctaatttttgtatttttagtagagatggggtttcgccatgttgaccaggctggtctagaactcctgacctcaactgatctgcccacctcagcttccccaagtgctgggattacaggtgtgagccactgtgcccagcccaaagtttttactttaaatatatgattactcaaatatcctaagccatacggcaggccctataacaataagttacaaatagtctgaatttaataacttaagtgtgatatggttaatataatacatactgtgtgaatatcttaactaacctctttcaggtaaggtgataattaaaaggtttaaatttacagtttcaacttctgctcagaagaatcatgccagtattctagcaatggtgatgacatcccattattgtaatgcag

SEQ ID NO: 342526 - DNA, 1000 bp, Homo Sapiens
tttttttttttttttttttttttttttttttttttttttttttttttttgccaaagaaaacagaagctctttatgccaatcacaaggacagacaggggaatgtgggggatggacaggagggagggcctgggcaggctgcctgccttttggcaccttgtgcccaggcgagttcccggacccatccaggagctcttagttcgttcagtcaattccttgacatttgatgtgcctggctcagaactgggtgctggggacatctaggtgcataaagccaggttggattctgacaggagagagtcaagccaaccggccaggacaggcctgctgctttattcacagatttagatgtcgttccatctgctctcgaagtttgaatttctggatctttcctgaaatggtgagggggtagtttgtgacaaacacgatgtacttcggaatcttgaagtgagagatcttccctttgcagaaagcttttatctcctccaccgtggtctcctccccgtccttcagccgaatgcaggcacaaatctcttcccccatccgatcgtccttcactcccaccacctgcacttcctgcaccttcgggtgtgtgtgaaagaagtcctcgagctctgcggggtagatgttctcaccaccccggatgatcatatccttagagcggcccacgatcttgcagaagccctgctcattcattgtggcgacatctcctgtccaataccacttgtcctgatccactgcttcctctgtcttctgaggctcaccccagtagcccagcatgacgcagtaccctcggatgcacagctccccgggcgtgttcagctttgccagcgtccctgcctccatgttcatgatccgcgcctccgtgtgaggcataattctgcccacgctttctgccttctgctccacagtgtcctcagggaagtgcgcgaatgtcacgggactgttctctgtggttccataagcaaccaccaggtccttcatatttatcttgttgatgatg

SEQ ID NO: 342527 - DNA, 1000 bp, Homo Sapiens
tttttttttttttttttttgtagtttcattctcctcacatccaaacagctacagcttccctccttttgtggggtccccaaaccaagtctcttttcaggagagcagacatgtgcctccacacagttctgaagttctgggggctccacattgtcagctgggttggggtctcccatgtgagggaggctgatggcactcgcaggtttttgcctcatctatgtacaaaggctcagaaaatttcttcggcatttgggaccctcgtgttctgtagctccaccagtcgctgcacagcctcaggcaagtcccactccccaaggcgacgattatctcgagtccgaatgttcactgttctcttactttgctctttctggccaaccacaaactgaaaattgtagtgggcaagctgggcccggcggattctccggctgagggtcagtccagagtctgcatccaggtcactgaccagtcctgcagcccgcaggctctgctgtgcctctttggcgtattcctcttgctcactccccacagggatgaccaccacctggaacggggacagccacagtggccatttccccccgcagctttctgccagcactcccaacagtctttccacagaaccgagcactgctcggtgaatgaggactggacgctccagggcacccgcctgccccttatactggaggtcaaatctcaggggcagttggaagtcaagctgaattgtcccacactgatgtggccggcccagggcatcgtggaggtgcacgtcaatcttaggtccatagaaggcaccatctccagagttgaggtcccagggttctccaaattccttcagggcctgtttaaggacctgttcggcctggtcccaaaggcaagggtcccccaggaagccagatggccgggtggacagtgccaggcggaaggagaagccaagaacggcatagacggaacggaggaaatcaagacagctttggatctctgcttccagctgatctgttgtacagaa

SEQ ID NO: 342528 - DNA, 1000 bp, Homo Sapiens
ttcaagtgaacatacagttttctttataagtatgtaaataaatttcatagcactacaaaaatacaagtcatctgagaagtttacagtggtcccagtactgtaggagagaattaaataaaataaaatagctgtagataattaaaagctaattagataaatcaagttacagtatcatccttcagattaaagtgctctgatataaccaatgccacagcaaacgaaatcctggaaagagattgcactgccaatgattttgtctcttaacctcaatgtaacaaggacatacataaaagagattcctgatttaataactgctatcatcttcacccccaaccacgctattagcctgtgatattcttcccctaggagagatgtcaagattagatgagattctatcatagccagggaaaaaaatgagaaataccagaaacattctaattccagtcttaagtgagtaacaacaaaattacctgaaaaatctcagctggtgcttttagctaagaaggaagcaagtgccctagttaaaaaaaaaaaaagtctataaatctagttttaaaaatacaaattcaaaaataagtatcatcttcttgctctgcacagttttataacaagggggtaaaatgctggtgagtctattcatgagggaaaatggaaaaaaagcaaccatttgaaggctgaggcacctgttttctactgacttttaacttttattaactacattaagcccttcactacaatttccccagtatcccacaaataatttgggtttccttttgggcagggagagaaagtgttcaaaggacagacatgcagatgcagttcaatccctttggggtccaatccatggtctcctgtcccctgtagagtgaaggggcttctttttttctttttagttttttttaagacagagtcttaaaaaaattgcccaggctctttttttaagagtcttaaaaaaactcttgcccaggctggagtgcagtggcacgatcttggctcgctg

SEQ ID NO: 342529 - DNA, 1000 bp, Homo Sapiens
gagatggagtcgcactccattgaccaggctggagtgcagtggtacaatctccactcactgcaacctcagcctcccgggttgaaatgattctcctgcctcagcctcccgagtagctgggattacaggcgtatgccaccacacccagctaatttttgtatttttagtagagacggggtttcaccatgttggtcaggctggtcttgaactcctgacctcatgatccacccacctcaacctcccaaagtgctgggattacaggcgtgagccaccacgcctagccaccaccgactttttttaattaacaaaagcacattggtgtacaaaaagatgaatctaatatcgaattactcaagttcaaatccaagctccatcacctgctagatacagtaaccctcagcaagacactcaaggttgagtgccttcaaattatatctcaaattacttatctgtaaaatggagataatagtacccactcacacaaatggaagaacaattataattaacttgttaaatgttagctattattcttactgccatgattaccagaatcatcatcaacatcatcatggtcttactaaaaatacattatgttcaggctccactcctggagactgaaattcattaagtctggggtatagtgtgatccagatgaagaagcagaggttcatattaagaacatgtccaagacagtaccaaagacaggattcaaagacagtccaaattgcctggtgggaaggcgtaatacttatgcccatacacaaatttagtatatcatttaaattactaattctgtggtcctgcaaaaagtgtacagttctctcccaaaatggacttgtaacatcataaactcatgatttctaaaggggtaattcaataaaataaaatgcagttctttgcaggtggtacacaccagctttcaaaaaattcctaaatatagcagttaacattgatacatcaaagttttgtgaaccttagcttagcaagtcaaatatgaagacat

SEQ ID NO: 342530 - DNA, 1000 bp, Homo Sapiens
cccttttaaaaattaaaactctttatttaaacctcttaatagcatcttatcaatttggtggcagcagcagaagcactaccaaagacagatattttgaaaagcatttacaaaaatacattgcacaaagtcctatcttgcatctttaaaaataaattaatattcaaaatatttccaccccaaatcccaaatcagttttatataggaaattttgatttatatatgtaacctgtaatatatgaaacatctgtacattttatctgccttaactgcatagttccaattctaaggagagtgaaaaaaatgctgcttgatgtatgaatagtttcatacatcagtgtatttgaggactgttgtgcaatatacagaaaaccagtcagcaccatcgttttgtctttttctgaaaacacaacatttacggtacactgaaaactgtcttaacccaacacaacttaaataattcttaaggtaaaacatctgtaacactttaagtgccttgtagatatctcatttataaagtctgctcagtaaaatagtctaaatattaaatagtaattataaccaaaaagagtctcacaagaatcacgtgagaatggtgacagctgtgataaaaggcagattccagccacagccagtaagaaatgctgctgaaggaaaaaggatcgtcctgaaatgtaacgggttcgtgaccctgacacaccagacggctcctcttatcaccaccagtgagagggaggctcagggcgtcttgcgctccctattcagcaaaactcaaaacaagccctgaaaacacccaagatgagatttttgggtttctgtttactgtgactcccaacaggaaaagccttgctgagaccagagaaccccatctgggtgtttgcttagatccaaaccaggccccttcaagtcagactgacttcagcctacaaggagagcgaaacgctcccatattcctccatggatattggtacagcgagtcctgactggaaaccttcctcagaag

SEQ ID NO: 342531 - DNA, 1000 bp, Homo Sapiens
gagacgggagtctcactcttgttgcccaggctggagtgcaatggagcgacctcggctcactgcaacctctgcctctcaggttcaagagattctcctgcctcagcctccctagtagctgggattacaggtacccaccaccatgtccagctaattttttgtatttttagtagagatggggtttcaccatattggccaggccggtctcgaattcctgacgtcaggtaatccacccacatcagcctcccaaatgctgggattacaggcgtgagccactacacccggctaccttttggcctttttgtttcatctcatttgactgtcttcttttttaattcctatgtttcttcaaatgaattaaccgtttcttttttgatcatttttatttttgcttccttgctgtacacacctctctttgaaatcattccttatggctcctcttaccatattccttcatcaagtgtaatattatgagatttctccatgattcacacatgacttccagctgatctttacttctctagcccttaattccccttcactaacccctcctgcacattctcagaataaatggataaagtgttgcttcatgtttaagtaaatgcgagacagtaatggaagcatcctctctatggatttacattgctatactgagaaatatggagactaggagtgctaatttcagtaatttcagttgacatcaattgcaataggcggctaaagactatatctctggcttttgaggtctccagattcttctctctagacacttgaagactgatttggtctacacttgtcatgatgagttcagacgccagaatctgggtaggagaactgtcatgaaacacggtgtccataatgtactgtttatataactccacaaccttctgctccaggtactcattcagcactgcattagaaataggattctgcatttgcaagctgcttttctctttgatgcttgttattctccaataggatgagtaccgctggataggttttt

SEQ ID NO: 342532 - DNA, 1000 bp, Homo Sapiens; identical to SEQ ID NO: 160283

SEQ ID NO: 342533 - DNA, 1000 bp, Homo Sapiens; identical to SEQ ID NO: 160284

SEQ ID NO: 342534 - DNA, 1000 bp, Homo Sapiens
tttttttttttttttttttttagggagaaaatctccagtgctattatatatttcaaacattacttgtttgcataataaccaaacactgagacagcaggcatcagagtgccatgaagtacaacacaactcccacttccatgcttgaagagctttgtgagagctgtgcctgttgaggcaggggacgtgtactgtggactccaggaatgacacaatgttagccggcagacacctcaaagttcctctgatcccaacagactgggaagtggggtgggtgagtggaaggagctttctcaagatcacacagcgaggaggtgacagaccaaggggccagaagttgggtcccctggatctgggccacctgttctctatacttcgtctcactgacttgcacatatttcgataggcagatgggtcttaggaagccagagggttgtcatgacagcaagggtaaggcatcatgggaggtttgggagaggtcattgaggaatgtcactagcagttcattgtcttttttcacaaccaggtactatcacatatttcaaacatcacagtggctggaagcaacagggcaggaacagacaggtgtcgtcacttaacctggtctttggggaccttgacatcaagaccgacaggtcaaatctttggtctcagggagaagagtgccagctcacccagaaggcagaacagctaacagccatgcccaggagaggcagcagtgggagtcatgaaggaggacggggtcctgtcccagcgtcccagcccagctacccaagtagaaggtggggcggcatcttctatggctgagtcttgggcagtgggtgctctgtcatattgtcaggtttcttcccccagctccacaatgtgaagactgaggtggtccctccaagccccactcagcaaggaggacagggctggtggatcctccagggtcagatggggaaataaaagtgtttcattcttgaaggggaagctgcacttctccacggcacgcctggtggtg

SEQ ID NO: 342535 - DNA, 1000 bp, Homo Sapiens; identical to SEQ ID NO: 160285

SEQ ID NO: 342536 - DNA, 1000 bp, Homo Sapiens
tttttttttttttttttttttttttttttttttttttttttttttttttttttttttgaagtacttcgtcaattgacaaatattcagtatttaatattgttgagtacttaaagtataccaggagctttcttctccattggctcatgtaggtggcacaactccgccacattgtatagagattgaaaaagagattcagacaaaagtcctccacaagttcacaccctcagttgatgtgggacgtagaactcgggacactctcctgaagagcacaagactactgccactacatcaagaaacttaaaaagaataggctgggtgtggtggctcacgcctgtaatcccaccactttgggaggctgaggcgggtggatcacctgaggtcaggagttcgaaaccagcctggccaacatggtgaaaccccgtctctactaaatattacaaaaattagctgggcatggtggcaggcgcctgtaatcccagctactcaggagtctgaggcaggagaatcgcttgaactcgggagctggagattgaagtgagccaagatcacgccattgtactccagcccaaggaggccatgctatggtgattttctggcatcatgttccactgcagggctctctgactgagtgtgagacttttccatttcttctgagtgtagtctacagataggtcctcatatgccacagtatcctggggcctgaccatccgaagtacagttgcccctgcttggtctcctgagttccccacttgaggaagggtaggaactggagaagtacattgagcgaagtccccactggggaggtggtgtgtccctgggtcataaggaggctccaggtgggctccaggggctgagcccccactgaggggtgaggtaggaggagattcctttgttgtacccagagctgttgtctcctcaaaatgcatttcctgtttctgtgctggggctgaaacctcctctgatccactgaggtgtctctggaaatcctccaccacagcca

SEQ ID NO: 342537 - DNA, 1000 bp, Homo Sapiens
ctaggaagggctgtgtactgtgtctaagggtgcctgaactgttccaaagggtaagaatcagacaggggccctctctgctaagagcatttcttgagaaggaaggtcctcaggaatgcagtgctgtcttccatcctgggatattcctaagagaggaggaggcagcaggaggaactccatagtcacaggtactggaaatgtgctgcttacactgtgaagatcaaaactgtgctcccagacagcatgccgtgctgtgaaattgtaaaacctttctgaagcttgaacctttttataactggatattctctgacataggtgttcaattctttcactgcaaagggcactgaatttactctgaaggtcagtaggaatcacttcatttagagaatttaggctggtacagttttgtacaaaatgctcatcacttttagccagggcttcaagaatcttggcagttaagctgaagaaacctttgggctcaatcatcttttccaccacattgcacttgatgccagctgtgctgtcgtactcatacacgacaccatattccaggtggacattgtccactgtcagactcacatgctccttcttcccatcaatgatggccatagtgttgaatttgtcaataacctcttctactttacagtcaaaagcatcccctgcttcatctccagggggcttggagtgagatttttgaaggtcttcttgagcactctcaatgctattataaacccattgtatggaatcttgcttcgttggccgcctgtacttcctgcaggctgtaacgtgtgcaatgacactggcatgtgtctctttgctgacattgattccattcaccttgataatgcactgtccagggtgaagaccagctgctgcagccacagttcctcttcctacagcatgcacaacagaagggccaaatccccggatctggaagccaagtccatcagctgaatctggaattttcactgtctctcttggctttgtgctcacaagaactctt

SEQ ID NO: 342538 - DNA, 1000 bp, Homo Sapiens
ttttttttttaatagaaaagaatttattgcaaatacagtgactttttatattacagtagtacattccaatcagccatatggccataatttgcatacatttcaaatataaaactatacttttttttttttttacatatagtacaatttccagtgtgatgacatttcaatgggaaaaagattgtgcatttgcaataaacaccatcattcctgagtccacagataaggtccccggagaaggggcttcccctcctttctcgctgggttgacgttcccagcgagtgaagccttttctggaatgtgtgtacgcaccctccaccaagagttctaataagctaagcttaaagcagaacagtgaaatggcaaaactgtacagagccctgactttacatttcactctgacagccagggtcggaagcaccacatggaaagtgctgtccataactgctcacttacctgctccttgctgacagctcccaggatctggctccagagagtggcaaaactgggaattttgccaagggaaattactcaggaccgctaataaaaacgccggcttctgcaacatgcatattcccccagcccccacctccatcttgcccagggcagaccattcattaactatctgcggggtgaacaaagaatcccaatcctcagatgtcccaggactcatggctcatgacccacggaatctaaggcagcacagtggcttaatttaaaagatgtgctttcgaatgaatcctagaaaataatctgtctttacacagagagggctgcgggggcaatcctactgacgagtttgttgagagcgcgaactttttcttccaagaggcggctttgtttctcggcgcctcgctgcttctcctcggtggcctgaagtgctctcaccaggtgggcgttctccacgtacagctccttcagcagcaggtcggacttcgtgttcttttcaaactgctccttcagcttatccactttctcttggaggagcatttccatattcttc

SEQ ID NO: 342539 - DNA, 1000 bp, Homo Sapiens; identical to SEQ ID NO: 160286

SEQ ID NO: 342540 - DNA, 1000 bp, Homo Sapiens
ctagcaaagtggtttattctttcaacttattgctggaagaagtcctttaaacaaaccagtgcagagaaaatgcctatcaaaagtatcagtttttcagctttcttcaccactgctttagatgtatcatttttataattttatctcttcatgtttttaaagagctgctacttcagatgacagtaactctttggtgtttatttttatttccaagattgtgatttttttaagaggctactttaaggctgtgaattgtctcactgtcttttcactctctctttttagttcttcaatatgggcatccaagcgctctagaatgtgatgagacctcagttcctcctcttccaaaaatctggtagctattgaaccaaggggagatacaggcaaggaacacgaagatataaactcttcttggtcattcatactctcagacatagtgtcagaaaaattggcttcatttgtatctagcgctgaaggcaaagaatgagttttacatagagagtaggaagtcaaagacctggtggagctgcaagggctgatttgaggactcagggggcttagcaccctagacatggggtttatactatccgacgcttgtcctcttggagaatgaagatctgttttgtagtgctcagtctttattccatcatgtctgtgctggccatgggttggcttgaactctgtattcttgaactcagttgttctgctgtgtgttggtttaaagatcctgtcattttgttttttgcacatctgagtagaaatctccagctgagatttggtattcatcaaatctttctgtagttgttgattttcagacactaatttatttaatgcctcaatataattctcctggaggtctgctagtgaaatctcttttgcctcatgtaaacccaattccaatttcatcaccatttcagaaagatgacgattttctaatttgagtgactccagctgatccaaaatctccttatgctctactgctttgtcttctgccttttgcatc

SEQ ID NO: 342541 - DNA, 1000 bp, Homo Sapiens
tttttttttttttttacacgtataaacattgtattttaataatactctttgtcacttcaatttaaatcattccattatgaaaatttcttaattgaagggagactatttcttcaaaactctaaattaaacagagctttatcaattaagtttacagcaatatagcctttagaaatacatatttcttcattttataataatacttcccctttaaaaatttgccatggtttgtcacagatttaaaatacaaggcacctaatgctataaaagaataatacagtaaatgtagtgtaagtgaaccagatattttctcaaatacttattctttttaaagtcccatgaaatttgcacaaacatgcttgttgcataaattaaacattttttgtgtggttaatttgcaatattctacaaaacccaaaaatataatccacacttattacaggtagcttattttagcattttacctgtcagaaatactggtctatgaacacttaagtgatttcttgaaaacattttcataatatattccagcatttaacatgtgaaaataaagtcccagaacattaggatttattccttgattagttcaaatgatttcaacagctgaattccttgagatgtgtaaggcaggttggtcctttggatggactgtagactgaaacttcctataactgtagtgatatgtacacagctacatagcaaagtgcttcattatgaaaatgaagaaaacaggtatgagaaaaatatattttagagtttcaaagaactcaaactgttatttttcagactaggcactgaaacattttttctacaaaaacttgccagagattgtctcttcgctgtatagttccattatcaagctgggctacagacaacagacagctaactagctccatcctcctgagaaacactgtgcatagaaatgagactctcacactgttcgctgtcttctggaactctctgaattcgatgttttctgcatataaaagcaaatattcttctg

SEQ ID NO: 342542 - DNA, 1000 bp, Homo Sapiens
tttttttttttttttttttcaagtttccaaacaagaatttattctttcttttttaatctttttttctaaaaaaaagtaccaggtacaattttttcctgtttttgatttgctttgttttttcaagtttcagcaaatgcttgttcccctcagcccagccccaggagttaggactgaggctgggtcagagtctggagtggggaatggggtagtttggaaccacatgactgagtttgaggggtgcccctcaccccagctgaggtaggtgggtcagagtctggccaggtgagaggaggcaccccagtgcttggccctgactctgccccctggacaccttcttcagtcaggaccccaaaacaaggagacacaggtaggaggagagggacaactggagtctggagccctaggtgaggggtggttaacccctgtgtgtgtgcatacatgcacactcacacacacataccacacaaagacaagcttgtgcacacacacatacgcataacttggctttcagagataggtcagagggtaggggaagtgaagggactggggaaggacaggggaagctgagtctttggctactgactcagtccctctggaatagcccctcttccctcagctgagggaaagcagttctcctcctgcccccaccgcataagcctcttcaactcctgaggttggagcaatatctgagagtgggaagcggggaggagtgatgccaattatcaggtgtgggaggttaccaaggcaatccaatttgaataaattataaattaaaaataaataaaataacaagtggcccctgcccaggacagggaggcaacgctggcataacttgcctgggaacttgagaaaatctcagggtagctccagttcctccctactacctaagctggcctgggaaacccaagggaggggacaggcacatggagtacccgaagtagggcagggtgtagtaagaatcagaagctttaaacacccaaataatccatttgggcgtgag

SEQ ID NO: 342543 - DNA, 1000 bp, Homo Sapiens
ttttttttttttttttttttttttttttttttttttttttttttttttttttttttttttttttttttttttttttttttttttttttttttttttttttttttaatacaaacatcccagcaacagcacatggcaggccattgctgagggcacaggtgctttattggagaggggatgtgggcaggggataaggaaggttcccccattccaggaggatgggaacagtcctggctgcccctgacagtggggatatgcaaggggctctggccaggccacagtccaaatgggaagacaccagtcagtcacaaaagtcgggagcgccacacaaacctggctataaggcccaggaaccatataggagcctgagacaggtcccctgcacattcatcattaaactatacaggatgaggctgtacatgagttaattacaaaagagtcatatttacaaaaatctgtacacacatttgaaaaactcacaaaattgtcatctatgtatcacaagttgctagaccaaaatattaaaaatgggataaaattatacatttttcttctcagttcttttcaaaaggattaatatttttaaagcacatatatgctactttccattagcaagacccatgaagggactgagcagcccagccttccttgagcccccagaggctttgagccatgaaatggcccagccaggggccagtgcccagggttggggcagagagccagcccacagtgcagaacagaatgctgaaacacaacaaaagtaggaagatgtctttggctaaaactttggcattaaataaaagaggcaaacaggatggaaacatgcagccctgccagccaggatggggcagagcaggggcacaggcaatcttgaaagctgactccaacaggggtgagaaccaggcctgggcatgtacctggatggtagaaagctgtgtttcaaccagtttggtgtgcccaggcagggagcgcgtgcaagaaaggaacagggaagggcaggtgg

SEQ ID NO: 342544 - DNA, 1000 bp, Homo Sapiens
ttttttttttttttttaatacatgctgagtttattgccatataagaaatcaagagtttcagaagaacacacaaaatatatacagtgaagaccttggcagggctgaggcaccagtgctgtgtacatcctctccccaaattctccagcagctaagaaggcacactatgagtgaaggcacagtaagagtcaaagctcccagttaactttctaggtatatagataacagtgaagactactctaaagactactctactaaaaaacagagctgtgagaaggatgaaggtgtctagattttctgtataagtagaactgtaataaatgtatgaggttctatttcaacaccattcccctttattaactttctatttgtatgcccttgaccaaagagtaatcttccaggctttggggcagaaggctgtcatggcatagagacggagtagggggacaccaccaaaacaagatcacattatcatgatcacaaaacatgtaccagtaaatccaatgaaagtatgctaacaaaaagtggacaggatgaaaggaggtttctaatctctaggggaaatatctaaataatgtgtagctcagagaaaaatgaaaaaggtcataataggccaggtgtggtggctcatgcttgtaaccccagcactttgggaggccgaggcaggtggatcacgaggtcaggagtttgagaccagcctggccaacatggtgaaaccccgtctctactaaaaacacaaaaattagctgggtgtgggggaaggtgggggggaacctgtaatcccagctactcgggacaccaaggcacgagaatcatttgaaccgggaggcagaggttgcagtgagccgagatcatgccactgcactccagcctgggtgacagagtgagactctgtctttaaaaaaaaaaaaaaaagaaaaaaaaagggttatatcagaaaggaactaaactacctagacccttcagtgccaatggaatagatacctccatactgtacaaaatg

SEQ ID NO: 342545 - DNA, 1000 bp, Homo Sapiens
tctgaaagatcttttgacagtaattgcacttatattccttttattaagtatgaactctccagtggtaagatgtgaatagatattaatggctttttcatggtctttatatttgtacattttttttcaagtataaatgctctcctgtgcaataaggtgtgagcattcattaaaagttttgccacactgttcacacttgtagaagttttcttcagtatgaactatcttacctataatgaagtgtgacaaccatttaaaggccttgtcacattctttacatttctaggatttctcaccagtatgattttttatgtttaaaagttttaggtgttgtcaaaagcactgtcacatctttcaagtttgtagagtttcttttcagtatgaattatcttttttttttttttctgagatggagtgccactcttgttgcccaggctggagtgcaatggcgcgatctcagctcacttcaacctctgcctcccgggttcaagcaattctcctgcctcagcctcccgagtagctgggattacaggcatgcaccactacgcatggctaattttgtatttttagtagagacaggatttcaccatgttggtcaggctggtctcgaactcccaacctcatgtaattcacccgtctcagcctcccaaagtgctgggattacaggtgtgagccaccgcacccagccagaattatcttatgtctggtaagaattgaggacttgttgaaggctttgccatattcttcacactcatagggttcctcttcagtatgaatgttcttatgtttagtaagaattcaggacgggttagaggctttgccacaatcttcacatttgtagggtttctctccagtatgaattactttgttcaataaggtttgaggactggttgaaagctttgccgtattcttcacagttgtagggtttctctccagtatgaattaccttatgtttagtaagagttgaagactggctaaaggctttatcacattctaggtattt

SEQ ID NO: 342546 - DNA, 1000 bp, Homo Sapiens
ttttttttttttttggaatatttacatattttattaaatctttacaatcagtaattataatcaaatacataattatatacaggattatatacattttgcccagacttttacatcacagtacatagtttcccttagaaatattgtatacatttatcaccaaacaataaaatccaacaacagtagtgttacagcacctgttagtacagacatctttttcataaattacatcataagaaaatatacggctgtaaattgggcttttaaaaatgtcttttataaaatctgaacatacaatatttcattcacagaatgttttttttttctatgttctgactgaagccttgtgcataaaacgaccggctggaatatttactaaattctacccccctctaaaattataagcagtatttgaattacttatgctgagctttcttcatgatgaatttggcatggggtttggtgagagaacaaatgttggctttactataaaaaaggttgtgtgatggtaatttaaattttaaaagcttcttgagagagtaattacattagtgaagttaaaatcagaaagtgtacaatttttctttttactaatactgtaaagaaaaagggagacgtataatgccaagagttaatttgttctgaaacaattatactctttttggaagcctattgcaatttaagaagaaaaaagaaaacttgcctaacaaaatatcccataccaaacatatctagtaaattacaattctttcacacttaaaactttatgggaaaagtattgcaaataagggcatatcatttcaatgaacttttatatgcagaaaaaaactagctattttatttttaagtaggtaaacaggttaagttttaaaacttgaaaatacctgaattaaatacttgctctaatatctcttaaaggatttcagctaaaatccttgattccagatttgtaaacattatataaatctttcttaaacaattttatggctgtggtgatcacttc

SEQ ID NO: 342547 - DNA, 1000 bp, Homo Sapiens
tttttttttttttttttttcggtcgtggatgaggcttttaatccggggtcagccaggtacagcattggggacatccccaggcccagggctggcgatgtgctgggaaggaacttaggtagagaggtgggaagtgaaagcatagggaggccatagccctccagaggggaattctaagacagacagttgaaggtgaggcctttgaaaaacaatgggaacatcacctcccaaagagggactgaggtggctggaggaaccagagccgcctctgcactctgcaccgagggtcgcgtgtggctgtcaggagagcagcgtaagcctgtggagcctctgctcgcttcctgctcagaaagccagaagagagctggggcaggccaccagggcaccagacactcaccaagcggccatcaggactgggatgagaggacagaggaaggacactctgtccccaaaccctcccgtgtcctgacggccctagaacttggaggtgtcaggacacaacacagactcaaggctcctggattgaaaatgtggagggcttgggccaggcgcggtggctcacacttgtagttccagcgttttgggaggcccacgtgggaagatcacttgagcccaggagttcaagaccagcctgagcaatatagtgagaccctgtctctaaaaacaacaaaaaaaagccaggtgtggtggcgtgcacctgtggtcccagctgttcaggaggctgaggcaggaggattgcttgaacccaggaggttgagggtgcagtgagctatgatcacaccactgcactccagtctgggtgacagagcaagaccctgtctcaaaaaagaaaaagaaaatgtggagggctctacgacaaggacagccattctggccccagagccctgcctcctgctctggaatgcagctgtcccttcccgtccagggtgtgagggctcgggacctgggtggatgtgctgtatctgggcctccaggccccagccccaccgtcactgggctgaac

SEQ ID NO: 342548 - DNA, 1000 bp, Homo Sapiens
tttttttttttttttggctctgaatgttctgtttattggggtgttgtcatgggtaggaggctcagcagagccattctgcctcctgcttcccagtactaccccgtccagcaactgcctctcgtataaataagtatcaagatggtcagtagaaaaggagagcatctcctcagccctggaagacagtgtgggagcttcagcttaaggaagaggtaggtgcctgtccgccagcccagcctcaagggccaggaagacctggctatgggtgctggaggggccgttagccacaccccagggttctacagtctttggtttggatcaggctgcaggccagggtcctggctggcagccccacccaccctgcgcctctgacacacacccagcgcttttccctgcaggggcccgggattggatggggccctcctgagtgcagcagctctgagttgcaaggggaggcccactttcccagcctctgaacctcctttctgccactgcagtttgctgggagaaaggagagagaagcctgggggtcaggcaggaggtgtaagtcctgaggccggatctggtgcacagaggagcgaggtactgtcacagtgctggcacagaagctgggatgtggctgtggtttgggtctgcaggaggtcagcagagtccgccgaggaacacggaggatcccacagggccacagcagggcaggataccgcccagcggtatcagccctcaggccgcatccagtcccatggggtcatgccctctgagcctcttgtcgctcagcactcaaatggctccctggtgaagacatggactgtcactctccccagatggtccagcagcgcctgcatctgttcaccaatgatgctgaccctctgaggcgccacagatgagcctgacccagtccctggcctcagccagctggcagcctggaggctgacagggaggcaggttagaagtgattcatgtgtccacaggcaccctgtcacaccataccctgtgacatgtgaac

SEQ ID NO: 342549 - DNA, 1000 bp, Homo Sapiens
ttttttttttttttttttttttttttttacgaaaccaggtttattaaaatttctctacaagtcagaaacggccatctcactgttcacatatatacacgtatgtacaggaagaacctagtgtttctagctttcccggcagaaggccctgccagcccagagtccttagtcggataatgtatcacagatacaacagtcgagcaaccacgagagcgttagtgcgacagaggcctctgtcctccctcttctcaaagtcccatgattctgtcaaggtaatattgccaataatcattcacatttcacgtggttttagacacgcaggttattcagacagacacagacaacaaaacaagcctcaaagccagaacaaaacaaaacaaaacaaaatcgaacataggtataaaaggtaaaatatatgtacaaagtacacagtacgtgaggtatacacggcattctcacaatgcatgttagtagtttgcctaggcatagcccttaaagatgactgcctgtttttgtgccatttctcaaaatacagtatattttgtttacccgtttaaccacctgatttcagcactgtccaagacagttactgatatttcatctgaatttgttttttaatgaaagttgcaatttctccattaagctccatcttttgtaggggagtgagtttccatctctggacatatctaacagaggctggattcccacctacaaaagaagctgaagaggggatttctgccttgggaggtggcagaaagaggaaagagattggaccggatgatttttaaagttccttccaactttgaagatttggggtttgctgtttcactccagaagccgattatacagacgtattcataaaccacacatttgaaatattaacaacccaccatgcaaaactgcagatgtacacacaatgccaaaggcggaccatatctgggaggggttaaagtataattctggaagttagtctgagaatcacaagactatccaaaattcactc

SEQ ID NO: 342550 - DNA, 1000 bp, Homo Sapiens; identical to SEQ ID NO: 160287

SEQ ID NO: 342551 - DNA, 1000 bp, Homo Sapiens
ttttttccataaaaatggattttattgccaaactttaagaaaggcgcttcataagcagaagacacagaatgccaccctcctcaaggaggcaagcacggaatgccaccttcctcaagcacgcaagctaggcaggccctgcacgttctcactcctctcccagaagccagcttcctgcctagggcccagcctgctaaaggatggaaattaatagcatttggtcacttgaggtggccccagagctacttgcctacccaccaggccccagggagagtggctgggcctcaacctgtgacctacatgcagggtctctgcacccacagactctgccctcagtccagctgctgcagttagctacttgacacaggagggaactgaggctccaattcctggcagtaggtggcttggctaacgccccagccagccatggctgctggtgggggaaggctgttcctaaggcaagatggcaggggatcacatgactgggcaactgatgtccttcttgctcttgtcctggggcagatggagggaaagccagactgtggcatgggggcccagtttgcacaaggaggctgatgggggctcccgaaccagtgcattgctgctcacctctgctccggccccacgcagcccagagaagacatctgcccctcctgatccttgactactacctcaagaacaaagtgacagtacaataacgataacgaaggcattgacctgtgcagcaggcctcagtggggttggggaacagggcagaaaggccagggcatgttgctgtgacccccccctttctctctttcagtaaacaaaagtgcacatgcagaaatctgggcaggtcctatcggaagctgctctcaccccagaggccccagggagagtggctggacctcgggagccagggcctctgcacctacaggctctgccctcagtccagctgctgcagcacgatggagactggatgtgcccctagagtcagggacaatgtgggggagaggctgggaga

SEQ ID NO: 342552 - DNA, 1000 bp, Homo Sapiens
tttttttttttttttttttttttttttttttttttttccgtttccatttttatttcacagtattttgacctgagaaatggtgattttaacatacccttttaggtgcccacattgatcttagttaacagtcttgtagttccctctttaggcttcaagataattgtgatttcatcgcaccccagatacttccaagtggagccaggcctcagactgttctcagtcaccgctctcccacagctgattgcagacattgcctgtgcttcctaccccagcagctgtctagtgcacttgaaccacaaaatgggccctcacttctttcctaacccagctccatcttggtaaactgtaacagacagacaggagtccccaagggcacaaaatagtttctttccagatgattttaaaggaaggggggaaaaggaagcatatgtgctaatggagcttctatggctgaaacaatttatctgcagatgcctagccactcactgatcaatttgttatgcgccgtgactgaaatctgtgattccatctgaaggcagtgagaagtggtgttaccatctgaagtgggtcagggctcttacctgactaagctggtactttagcccataagtgaaacaaaatggcactttttaggactacctcagattcggttgaatttctaacttcctgaaatactttctctcacagattctctgctggtctctaagacttaaaaggagagaaaataaaaatatcaaattaaagtgacaagttaactaagggagctgactactgggagaaaaataggaaagttgcgtgatcccaaaactggatttaaaaaaaaaaaaagttatttcagggacactcatgagtggccacagcacaaaatcctgcagtaggacttacctgggctcgacagtgtggtagcagcatcggcacaacctcaagtggaacccagaggggacaaattcccttgaaatttcattcaaaattttcccagggccagtttttaagagtacct

SEQ ID NO: 342553 - DNA, 1000 bp, Homo Sapiens; identical to SEQ ID NO: 160290

SEQ ID NO: 342554 - DNA, 1000 bp, Homo Sapiens; identical to SEQ ID NO: 160291

SEQ ID NO: 342555 - DNA, 1000 bp, Homo Sapiens
ttttttttttttttttttttttagcatcaattttctttatggtaaggcatattataagcaattattcaaaagatatactatactaattgtttaaacattttataatgataatttgtaacaacatatgtaatcaaggtagaactaagtttcttttcttttcctgacttcatgtatgaatttcagacccacctcagaccttcttatccaataaattcaagagtataattagaagtacattatttggaataaaactgaactagtgtttcttttcctatatttcctgtgaagtactattttagctgaataaatattattcccccttgtaatcttgttttttcactgagaagtgttttttttttcataaaaaaatatttcaaatgataattttatgatagtggatataggaaacaatccatacatgacgaataaatgataaggctgatggtattataaagacagctactcgggaggctgaggcaggagaatcgtttagttttgggaagggctattataatttaacctataaagtaaatttctcccaaagttagcttggcccacactcaggaacgaccaagggcagtttcgaggcaagatagatagttaggtcagatctctttcactgtcataatttcctcactgttatcatttttgcataggtggtttcaccactgtatttccatgttcaaaaatgagtatagtgaaatcaaaataaaaaccaacagtgtctttccacttttgaccttagaataagttattctaatggaaatcatcaagattgttaggtcagttaaataagcccattccaaaatctgaaatttattacaatccagcatgatgaatgaggtataaaaggaatctggtctcctagtaaaagatggattctcttactacactgcaaatacttaaagcaggactcatgatcctaattttcctacaagtgtgcctgaaaatgtatcatgaagaaattcttcaatgtgacataaagtcataaataataaat

SEQ ID NO: 342556 - DNA, 1000 bp, Homo Sapiens
gtttgtatatttacttgtttattgcccatgcctccccccagcaagaatgtaacctccaagaggacaagtgttgtgtctcgcttactcacatctgtggcctcagtgccttgcattgccacccccacgcaccccaccgcccccagagtgccgcaaagagagtgcaaaataaatatttgttaaatgaatgatgaagggaatggtggaggaggctgtctgggccctttatggaattacttcagctcagttatgtctatttcttttttttaatcctcctctctctgcccgtcagcttccattcattccccacctcccatctccagggaaggggtgaaaggatggagacagactgacgggttgcctggctgaggcttgttttagggtgtggagcaacccccagcccaactgaactgtctgggcttcggggagggaggaagaacccagtcagtcctagagcccacagaagtgagtggtggggttcagacaggcctggactgtccggcgatcacagacctcagagctgaggggttcctataagatcatgtggtccaatctcctcttcccaagagccaaggcgatgctgccttgccaagaccgtaagcctcagagggccaggctccaggaggggacctcgatcagggcccaggggaccccgggccgctcacttgcagacgctgacccactcggtgatgcggcactcttcgcagaccacgaaacagcaccagtggaagcggcagtggcagcgctcgctgcgcgtctggcgcaggatgttgtggccgcggccgcagcacatgctgccgcagccatccgagccggcgctgctcttgttgcacaggcggcccacggtgcccgccgagtccaggcgcggctcgcgctcgcagaagtcgggagacttttcgaagtagaccaggtcggcggggctggcccgtcggcgcggcccgggagcgcccggagccggcgagggtgcccccgctgggcccggctccagctggccgccgttgcg

SEQ ID NO: 342557 - DNA, 1000 bp, Homo Sapiens
ttttttttttttttttttgggaaatagaactctttatttaaatatcagtacagaacaataaattactaaaggaaacaatcattaatataaattttttcttattaaataatttaaaaattctctttcaggacacggaaagaatccccagaggtctgaagtctaacgtgattattttactgacaatatcatttgcaagaaagagatcatcattcaaagaagtacttgattttccaaacaaaaagagaagaaagaaaatgatatatcttgtttagtcagccagaactttaagtgcaggaattccatcaggtagcaccaagagaaaattgcataatatgttaggtataactgctggtaaaattgttggcaaaaggaatcaaggcagtgaatgagctattgggtccatgatgtcatcatgatctgctggaggccactggacatacaccgtaggtcgtgggcagctggccagacagaagggcgagtttgatcaagaccgtgctcacaggagccttttggtatcagctttaacctgtcactctaaaggactctcctcagatgccagggaggatgaagcaggggaggatgatgaggaggcagcaaaggatgagggtggtggctgtggccctgagttgggttgtgcctgaggacatggcgagtggtgctcctgcacttggctccagggtgctgtccatgcccatcaagaagtcctcaagccatcctatacagtctcccattgagaagtaatggaaggacatggccacaaccttgtcattctcccacttttctttcatctttctggctccaggatgaaccgttgtccacattctcttctctgagtcaaagaggaggaagatctgcccatcgaaactgaactgccaagatccactgctgtgtccttcagctttctgctcacaagacatcctggcctgcagggtgaggggttccttgggtgtgtaattctccagctgaatgtcacgcagttgctctgtaagtatgtccacca

SEQ ID NO: 342558 - DNA, 1000 bp, Homo Sapiens
ttttttttttttttttttttttttttttttttttttttttttttttggccacaaccatgatttattaggttttacagattctgcaggggactgggttccacaaacctccagacctgctcctctttcccaccctaccccaccttccgcagggagctgcatggttctacaaaatggtccactggactctgtaactgaaaagccacctggcaaggggcccactctgatgggtaccgaagggccttggagtgttctagccacagagctgtgtgcaggcccaacagagggcctggtggggctgagctagggcccccgatgggcagctttctaccttaggtccaagcttagaacctggctcttggccagtctgcggaaaaataactcacgtcctaagctacatctacaaaaattgcaaaggctgagtacagccagcatctcaggctgaacttgctgctgcacgaagcggcacggaggcaccccactgtctcgccacctcacctttcaggatgggccaaacaatgaatttcttattcttttaggagaggtctgattttgataaattatttctaatttaatatcacagtgcatatctctcctcttgtcaaaggtcttcgtgatcattttagtgagaagaaacaaagaaaagtgggacaaacaaagctgcccaggacctagtgctggcagccggctcatggtccacatgcggatctgcagtaggggtcagctgggggccctcaaccagcaccctgttcctaagcacgtccagatgtatcctcatatccatgtcccttttggcagcttcctggtcaacctgaacctacccttctgcacagcctcgggtggctgctgagggcaatgagtgagctggggccacgggtcagcaggcaggcagggaagggggcttcaggaggctcatctggttggtccgagccagagccatcacacacagcctcctcctcagctttatctctacagggacctctgcaactctgcagcggccacc

SEQ ID NO: 342559 - DNA, 1000 bp, Homo Sapiens
ttttttttttttttttttttttttttttttttgagacggagttttgctgttgttgcccaggccggagtgcaatggcacgatctcaactcaccgcaacctccgcctcctgggttcaagcaattctcctgcctcagcctcccaagtagctgagattataggcgcatgccaccacgcccggctaattttgtatttttagtagagatggggtttctccatgttggtcaggctggtctcaaactcccgacctccggtgatccgcccgcctcggcctcccaaagtgctgggattacaggtgtgagccaccgcgcccagccttgaggtggcatgttttcaaagaacatggtgcctcagttttggacacacaggaactcaaatacaatcattttcctgctgctaagtaatgcttggtggctgctctggttgcagatatgtgaagttaggtagcctttcctgttaacccatggttccaagcactctctcttaacaatcattcctactgtgaattttctacccggaaaagccaggggtgggcaataacaattaagatcatttggtttctaaaagttcttcctctctgggaaagcagaactatacagtgggtggcatcctgcagattctagtctacatttgggaaaggtgtacgcctcttgcactttcagaggaacaagtcaaaaagtaattgcttaaaaaaaaaaagtgctagcaattcacagcctattcctgcccgctgaacagaaattgtgatgccttgatttaccccctagcacctacatattcttgagcaagtcataaccctattgtgcctcagtttctggatctgcaaggagtgttgcctgcataaatgtttgtttaggaacttagtaaaatgacatactcctctctctgctctaagaaggccatgagccagctgcagctcatctcactcagcctgggcctgaccagagtcctttcctcttccaagagaaagcaaggaaaagcagcaagcaagcagacataccag

SEQ ID NO: 342560 - DNA, 1000 bp, Homo Sapiens; identical to SEQ ID NO: 160293

SEQ ID NO: 342561 - DNA, 1000 bp, Homo Sapiens
gtctttatttctacactctctcatcgccacacatggggagaaactcactgaccatgtggggctggtccctgcagaaaataagccaggttcaagttgtgtgctccagtggagaggaggcggaagctcctgctgtgcttggctcctgcctggggggctgaggtgaatgccctgcacactagattattttgttttttaaattttttttttttgagtcagactttcactcatgttgcccaggctggaatgaaatggtgcaatctcagctcaccgcaacctccgcctcctgggttcaagtgattctcctgcctcagccttccgaatagctgggattacaggcatgcaccaccatgcccagataatttttgtatttttagtagagacagggttttgctatgttggccagactggtcttgaactcctgacctcaggtgatctgccaaccttggcctcccaaagtgctgggattacagccgtgtgccactgcacccaaccgatttttttttttttaaggcttattctactaacatctcactgattcacataatacaaaattcaacaggtaacaacgcttccttacatttttatacaaaactctttaaacattattttagttaggtgaaaaaggtgttctaaaattaagtagattatcatcttgttacccccgccatggagacgtttttagtagtcaaggttatcatctttgcagaccacctgacaggcagtgtcgttcttggggacgaactgcaccccttcccacagcatggggaagtgggatcatgctattctcttccctccaccccacaagatcacacatgggccagcctaccccccatcacaaggcccccacccatccaaacacctgtcattctaagaacctcatgctggaacagtctgaccattaatagggccacgaaacagtcagtaagggaccctctgcactgggcttcctggtgtcatttcccaaccagctgaattaacgcatgctgatgtattagagtta

SEQ ID NO: 342562 - DNA, 1000 bp, Homo Sapiens
tgaggaacaatctggtcaggtgaagtttatttacagtaggttaagaaattaataaaaagtcagaaatcctaagtcagttggaaaacccaagctgtaatgtacccaaaccttctgagtttttcgctgagttgcttgcttctgattttcacccaaggcagttgtcacaaattattcagatcatcaggttgtctttattggccaggaacactgccagtgctgcagcaatcaccaccatcagcactgggagccatcgcccacattgccttctgggaggcagctgctggctctggttcagctcttctcgacagtgctgcagcttacgcaggcaggagagatactcgtcactgaggttgtctaattctgaatgcagttctctgcactccttttccttggcctggagctgcaaagtcttcttttgcagctggtctctgagatcccagtctttctccttccctgtaccctcaggctccacttcgttagggaaggactttggactccacacgggcaaagcctgatctttctttgttaagagtttctcctgttcttgaagctgtaaggattgattttgaagcaaaccctgcaactgctgtactctggtcaccagggtgagtttctctgcctctgacctttttagttgatcttgtaggtcctgggtatccaagctgcacaggtctctgtccccttgcaggcattcaatcttggcctgcagttgctggtgctcattttccaaaaatcgcagggcctggttcatctgtaagtccctgctatctgctccctgcagtttggactgaagcacgtggagttggctctccagctccctgtgctgggtcccaagggtcctccagtcctccttcagagcctcatactggctcctccactcttcacacttctgctctgccagggccagggatcgctgtgtgctctgtagttgctgctctgcattcattttctcctccagcactttctgcagtgactccttggccttctgctcatagctgtt

SEQ ID NO: 342563 - DNA, 1000 bp, Homo Sapiens; identical to SEQ ID NO: 160294

SEQ ID NO: 342564 - DNA, 1000 bp, Homo Sapiens
tttttttttttttttttggtccagagaagtttaatgatgactgaagctttgaccacattgaggaaactcaaggtttctaaaatagattctttgataactagttaggcctgagtgtccaaagaacttttgatattactgctatattagtagagtttatttgcggtatgaattctttgatgtctaataagagctgaacttactcggaaaggccttccacactcatcacattcatagggtttttcacctgtgtggattctctgatgctgaataagacctgtgcgcccactgaagtctttcccacattctttacatttatagggttttactcccgtgtgtactctatgatgtccaatgagatgtgagcgctgaatgaaggcttttccacactcatcacatttatagggcttctctcccgtgtgagttctcctgtgtttactaaggtctgagctatgactgaaacttttcccacattcatcacatttatatcgtcttctttccctctgttgccattctgatctgccctcattttcaataatatctttggacttaggatgctgaggagtatctttgttcagtctgtcatttatctccccaaggaattccttgtctttgggcatatcttccttctggaacaactcttcattcttagtcctagttttatcaccattcctttgtggtttcccagcttcctgctccagctgggtctttttgggatggagctggacagtcagtgattcatatggccttcccaagggggccaacttgtccatgagtatgtcccgtctttctgaattgcctgggacctgctttccaggttcatcaagctctctctccagatcctccagtaccgtcactgcctcctctccagtctctggatggtgtgcacgcacccatgcttgcaggtctttaggaagaatgctcaggaactgttctagcaccagcaggtctaaaatctgctccttggtgtggcattctggcctcagccactgacggcagagct

SEQ ID NO: 342565 - DNA, 1000 bp, Homo Sapiens; identical to SEQ ID NO: 160295

SEQ ID NO: 342566 - DNA, 1000 bp, Homo Sapiens
ttttttttttttttttcagaacattcacctttaattctgttacaggttccagtatttgcgctggccctagtcagctgtgggtaagagtcacccatgggcaagagtggggaggggactgctcccccatgaaccacatcctcagtgttggccaaataccagcgtgttgggtaggcttcctgtgtccaccaggcctggccatgtcctgcacagtatagcttggacctctgggcctgaaccagggtgagcatcaaggcccccatttctcctcaccacggggtcgcttgtcagctccaggagccagtctggccccactgagaacttttcagtcgagggcctgatgagtcttgggaatgcgcttctgcaagagggcccaggctttctccacctggcgttgggtgatatgcggctcccacaaggtgctgagcaccacgtggctctgttccacaagctgctgcccgctcatctggctctgcagccggctttgagccgcggcttcactgaggccatccctctccacaatgcgtcttacagcctcagtctctgggatgacagcagtccacacctcatggaccaggttctgccagccggcttcaagcaacacagcggcatcaatcacacacacacgctttccctcagccacagcccgatccatctcctctcgggccagctttgcgataattggccacataatgtccgtgagtatcttcagctgcttcttattcccaaacacccggctgcctaggaccttcctgttgatgatgccatctttatggagaatatctgttccaaaggcctccaccacaggctggtaggcagggccacctggggcataggcccgatgacccaggtggtcactgtcaatgacaaacgcccccaggcccttcagtcgctgagctattgagctcttcccagagccactgatgccagtcagcccaattacatagagacatgtggggagctctggcctttcatatggaggccgaagcaggttccccaacat

SEQ ID NO: 342567 - DNA, 1000 bp, Homo Sapiens; identical to SEQ ID NO: 160296

SEQ ID NO: 342568 - DNA, 1000 bp, Homo Sapiens; identical to SEQ ID NO: 160297

SEQ ID NO: 342569 - DNA, 1000 bp, Homo Sapiens
cccagaggaagctatagataaaaaataactctattgcaacccatctgtttctgttactggaaatttccacacacctctgcttttggaaatcacttagaaaacttgaggggaaataattccttttgctttcagtctggcagcaagaaggatcctgaaggaattctgtgggtccaggatccagtggggtaattctgtaaagtgcagtagtgcttgcttaaagccataggctccagaggtgagtccagatcagtgaaggggcaagtttcatggccaggtgttggctagtcttgttgcaggtttcagattaaagtgctgggtcatccaaaggcatttgaaaagtgcaaatggcaagctctgcaggccaccgaattcttgttcagagtccagaagcttctttagatgtcatatcaggtcaccctggctcccaagaccacaggttcagatagcactgttcacttccctctttgttgtggtgacaggtctttttgttgtgtcttttgaagaatacagcttttgacagagttgttttcttagggctatcactgtggctatgaaaatgaaagcaatgatgcaggaggggatgaaaatgtgaagcagccaagttggatgggtcctgggttccatctgactttgaaggtcaatgctggccaaagtaagttccctcacgtgagtattccagaacacacagctgaagtttctgccagggggtggctttaggcgcagaacactggtgacctggtagaggccttcaggggtcctggagtggctggtgttggcaggaacgctgacgtttggccaggatacttctgccagaggataacctgtagcctggcaggtgagctctacctcatctgtttctggaacctttaggatgtgagtgtttattttcctgtaggaagctttgactttcagagtcaggtacttgtagtcccaggcgaccccatagatgattatgcattggtactgtccttcgtccctcacttggacttgaggtatgtgg

SEQ ID NO: 342570 - DNA, 1000 bp, Homo Sapiens
ttttttttttttttttagtttgtaagaaaaggggtttaattagctcacaggctatataggaagcgtggcaacatctgcttctagggagtcctcagggaatttttactcatggcagaaggcaaagtgggagcaggcatcttcacgtggccaaagcaggagaaagagagagtggggaggtgctacacacttttaaactaccagatctcacgataactcactgtcatgagaccagcactgaggggacggtgccaaaccattcatgaaggcttcacacccatgatccagtcgcctcccagccggccccacctctaacattggggattacacttcaacgtgagatttggtggggacacagatccaaaccatatcaaaatccaattaaaaatttttttgtttgttttagacacagggtcttgctatattggccaagatggtctcatacccctaccctcaaattaacctctcacttcagcctcccaaaatgctgggattacaggtgtgagccacagcttccagccttaatataaatcttgactcagcattctttattctcactgtcagactgctcaatgcatcccttattgaagtttcttgaagtttcgaaaaacaggtatgttcagataattttcagcagaattcatcaaaaaatgttaacaactctttaaaatttttacacattttatttagcacaattgctaccatttaaaaatcaggtgttttggccaggcatggtggctcacgcctgtaatctcagctctttgggaggccgaggcagacagatcacctgaagtcaggagtttgagaccagcctggccaacattgtgaaaccccatctccactaaaaatacaaaaattagccaggcgtggtggtgtgcacccatagtcccagctacctgggaggctgaggtaggagaatggcttgaactcaggaggtgaagtctgcagtgagccaagatcacgccattgcactccagcctctgactcctgtgctcaacccatc

SEQ ID NO: 342571 - DNA, 1000 bp, Homo Sapiens
tttttttttttttttttttaacgtatttcatatatttaatatttgtatttgaatatattagactagaataaattttctgcatttgtatatattatatattttatagcactctgtcagttatataacacaaaagacattcataggtaaacattaaaatggcagtatacatattaataactgaacattaatgagacaataataatcaggtattcatttaatgggagagtctagtatttcctggtagtcctgccttcttaaattcctccagtaaagtttatagccagcaaggacaaaaacactaatcataatgattacccctccaaaaacatcatagatgctaggaaatatgtgcagcacgagaagctgcaagaccatagctaccacaatctccaaatgttgtactgtgctaaccaaagctggatggaatttgtccaaggcataataaactcctaagaatgctgcagtagaacagacacatatagcaatgagataactccaggtttctccatctaatgggatgatgggttcttgaagaataaacatagtagatattccccaaattgtcccagtccaaccaaaagtaaacagcgcagtccacatgctgatcttctccttgatggatctgtatactatcattgagagagcagtggtcagtccagccatcacagtcatggtgtacccaaaggcttctttccaggcatttaacaaagaattgtcttcatcaacaatgtttgggatcatgacaagacaaacacctaagatgctgcaaacaactgtagccatgtcaacataagccattttctcatctacgagtaaaaaagccaaaatggcactgaagactgtagttgtggctctccacatagtggtcccattgctgggaggaactattgaaaatgatgtataagcacaagtgatagaaatgacattgcatacaccataaaagaagagtcgtaatctgtatccactgggtccaaagggggcctcctgatagtaacacaca

SEQ ID NO: 342572 - DNA, 1000 bp, Homo Sapiens
ctccgagatgtgtttacttattcttctgtgtccccaaaacccctttccaaaataacatttaaatgattgttctgtgctgtgtgttcaaatggagataatcagatgccagtggctttacaatgtgggttgcattccattttcccaggcgcccaggtcctgggtctctaggccaccgcccgccgtggccgcccctctgctcaccagggaggccagacaggaaccctgcagctgccagagcaagcacgtcccacagccttgggaggcctcccaaaatgtgtccagattcccacaggcagagagagagggactgaaaggctgaagtgaagtgaccgtgcctgcccagcctgggactgagagcctgaagaccagctttccagactctgtcccagaacccccttggccctcagcaaatcccctcctcctggcctgaaacagactccaggcttcttgcagagacgtcttctgtggagaaccagaaagattgagtccaccctgactgtcccgggacagagctgctgagcagggtgctggagccacaaacaccggatctttcgaggcacatcagtgacagatctgggcacagctggaccagccaggacattgagccactgcagccccaaggctctaaatgcggtgcttcagctctagcttggccaccgtggcccggtgcacctcgtcagggccgtcggcaaagcgcagggctcgggcccaggtgaagaactgagccagtgggtagtcgctgctcaggcctgctgctccaaaggcctgaatcgcacgatcaatcactcgggaggccatggacggggcgaccattttaatcatggctatatccaaggctgcagccttgtttcctgccaggtccatgaggtgggcagctctcagcaccagcagccgtgcctgctcaatctccacgcgcgactgcgcgatgtccgccagcactgtgccctgctccaccaggggcttcccaaaagccaagcgggacttcacgcgggccttcatg

SEQ ID NO: 342573 - DNA, 1000 bp, Homo Sapiens; identical to SEQ ID NO: 160299

SEQ ID NO: 342574 - DNA, 1000 bp, Homo Sapiens
cagggtccatgtgcactttattcactcgtgtcgtcgcctctcgggtccatgcgtcggggcgagcgtctcagccgggcgggaccgcaaaggccccgggaccacccgactgaggacgccgcccaggcctcggcagggctggggcttttgtttttaataaataaaaacggaactctaaaaaatatatatataaaaactggggagaaattaagttttacaacaattggaactcaaaattccaaaatggaaaatgtacaaactcggtcccccagcagctctggccccgagaacggacagtcccgggcccggcgccttcccgctcgctcgtctcctgcaggtctgggatggggatggggtagagcttggtttttggtcagaagccaagaaaaaagatcggagaagaaaagaaggaatgacctcaacttgctctgcacggaggacggggacggctcagagataaatagcatttaggttaaaactatgtcattagcaaatttagttcttatatctttccctctatttatatctctatacacggtgggctgcgatgcaggatagattctggatttacagttacacgaagaaaaaaatactctcgcccctcccccaccctgcccccagaatgcctgcccagccctgctccctaccccagaggactttggtttgggggcccccaccccacccaccgagagcctgccaggccccgggcccactgtcctggagcccccaaactcctgagcagtcaccagctggggaccacgggccgagggagggagaggaggcggggacaggtcgggaagctctctcggggctgggaagagctgcaggccaggacgaggacaggagaaagggaaggagagaccggggcggctgggcaaggcccaggccagggcgcgcaggagccacagggaggcagcccggccccaaggaggcagcgtcgctcggctccaggacacagaaggcactttctcggagctgacccgcggccagcggagggcgaggc

SEQ ID NO: 342575 - DNA, 1000 bp, Homo Sapiens
ttttttgagattttaagtcattagagccaatttgtaaaatactcatttccaaggggaagtcaaatcaacaggtctctctgaactgtctttacccactacaattaggaagattgaaaattaataaaggagactgaaataaggccaaataagatccccgataaagacataagagagcaacaatttaaacccaaaagaataccacagaattttcaatgtaaattaaaacgaagctgttaccttgctggactcttccaactgagtgcctcgtttccaggcttcagagaatacggagctcacaatgctctgggaacggacgtgtcctgctggctgggtgtcagaaactccgctatcagactgattggagtggtttgactgagactctgggatgctggaagaactggatcccgatttaatgctggagctggataaggaagtccaatcataggctgactctgtcctcttcaaggcttcttggtagttcatatagagctgcttcccatactttgcaatgcggatcccattgacccactgatgcagtgtcctcacatcatcacaacaaaggtatttgatatattgagatttcttctggatttgtggatgcttcagcaccagacaatagtctgtaggtgctttgtatttgttccgatagtcctggccataataaacgttgacatgatccagctggagaaagcacaccagatcccgagagacctttgcttttcctttgggaacatagtagataccagatgctcgcaagagaaaataacgctttttccaggacttcttgccatcatccttcaaccaaaggactccttcaatttctggtacagttacagaacttccacaaaaacattcctccaagaggacttctttgtttctatctgccatctcagctgtttcttttttccccaaaagataattctgtgggtttttgaaaagtgcatatttttctatacgctccataaatataagcttgttttggctatctcttgtccaatta

SEQ ID NO: 342576 - DNA, 1000 bp, Homo Sapiens
tttttttttaaataaaatgctggtttccactgcatttattactaatataaaaaaagttaaaaagaaaaaaaaaaaaaaaacctcattctcagttctccaacagctctcacccctccctcttgccaatacaactcctgacccatttcctcagggccagttcaaaactgaacctgttcactgctgttttcacagaaaacaaccagtgccagggatgtaggggaagaggattggaagagggcaacagtactgtccagcttctacccaaagataggcaaggtggagattcacagaattcaaatgaatggactggtggcctcacaatgacatagtctaattaaaatgggctggaagggatctaggtaggataaagccattggaggctttataagacatgtcatgggtctgtgtcagactcagaataaccaacaggagaagaatggggagggccagggaggcagtctgatggaaagttcacaattctcccatgttgggaagtgggaaagtccagagggcaccaagcgcctcactcattttggcaggaaaacttattctagtgctgggaagtcacaaaaatgccacggacactgagaaaggctacaaggggatgcacagtttcacaaagcacggtgatcatagatagaccatagcggtggggatcatgctactgacagagaaactatgaaatccaaaggcagggagagtggccttttaggaagtaactctgcaccagtcacccaaacttgaccccaggttagacaacctggctgagtttcacaagcagctgacaacattgggggtagggaatgtcacataaaaaggacttaaaacaagcagctaaaagaagggaatggtaggaaaccgctccagggctctcaggaattgagggcaatactggggaacaggtggacagatgcacaagaaacagcaccaaagaggtttcctgttcagcagtcatttgatgacgggaaagaagatccaggaggcaactgaaaggaagcaa

SEQ ID NO: 342577 - DNA, 1000 bp, Homo Sapiens
tttttttttttttttttttgttacaggctcaaaaatcaagtttaatatcaaaagaagttacacataaaggtttttacatttccgaaaatctgatagttaaaatatcccgtctggtgttgattgtgatacacttaagtgaacccctgaaaacctttattttgaaattgaagtttttgctcagaaactgggcagaacttttcacattctgacagaagataaaacttaagtctaaaaaatattcggtaacttttttctcaaaaacattaagtactttagaatataaagcagaaactcttaccaagcatgtgtacccatcagccacacctcctgtctttgggggaatttggttacttggagctctgtgggtgctatatgaatcctagagacagcaaacttctgctgtacagctaacttacaagggcctgaacccggctgatggcagcaagcctgctacagtccagaagagtgcgacttcttatatttacatatgaacgcatctgtctttccaaggctaactttgtagcattccactggtaccaaggagccaaatggtgacattctgtctaagaatttgtggttactggcttcgaatgaagttgacgctgtcttgaatgcaccagttttttcttcaggattcaagcactttttaattccaggttcatctgtgtgactgtccttggaattgaaagggatgttgctctctttacaatctgtaaggcgcctgtggtgatcttcactaagcaacaatacaatggttccgccaacatgaagcactctttccatttcttgtagaatgcttttgatgtcttttcctaacttaaactttttcccaaatggaatgtcagaaataataatatcaacactttctgaaggcaatggcaattctataacagagattttaagtaattcaattttatcctcaaggcctgcagctttcagattgtcccaagtacctagtaactgtgagtcgctgacatcagcacctacataatacacatct

SEQ ID NO: 342578 - DNA, 1000 bp, Homo Sapiens
tttttttttttttttcaccaattacaaaaaggctttattatattttgccaaatgttaatcgctttcattatgtctccaaacattatttcaccactcatttttataacaagtgcagtgaagatatgcttatcgaatattgtacaatactgttgtgttctgtaacactctttcgggaacagcttagatgtaggtaacaagagatgcctgcgtatgaaagtgcttcataaactgtactgtataaatgtaaactactaccattttcaggtaaaatcagagaataaatgtctcttgttggaagtgtcctctcaggactcctctagtccaatctccccagtgagtggatgagggaaaaaactgacgccagaggcaggaggctctggatgggggagttagaggccaacgcaagtatagaatctgttgtcctagcacagggatctttctcctcccttgtgtaatttatctttaaaaacactgatagttttctggtgctgggagcaccatgccctttaaaacttatgaattaatggacgattacaacaaaaagaactttttacctagccctcaataaatagttgttggtgaaattagaaatttgaggttgaattgttaaagatcgtcttggtcactcctctctcgtgaagaaacccatcgactcagaatcacctcctgaactttaatccttttcatacattctggtgactccatttccttgtcagtcatagtagagggtttaatcaaatagcacagcataagttccttagagacattaacggaaactctgctcaaggcagccagggacttccaactgagaggcctgcggagagagccttcaaaatggtcatcaactagctcgataatgacagaataacttgcatggtaaaatggagggcctttccgatatagcagtaaatctgtcccgtacttgagtcccactttgggcacccagcccttgcttcgaaagtaatggtaggccatgtaggtggttctgaacgtgggctga

SEQ ID NO: 342579 - DNA, 1000 bp, Homo Sapiens
tttttttttttttttttttttttttttttttttttttttttttttttctgagtcaatctattttattgaccaaaagattcctgtggaaacaggaggtgagtgccctaagccctcactccttagcactctgcgtgctgatgtagtcctggagaagcgcctgcgcctccatccgccggctcatcttggtggccttgccctgaaaacggcctttcttccctgctcctttgccttccaggacctcagccaccctgggccccagggtctccacagacgcaggtggccctgccagtaagaagagtccaccacctttctcatcgcccacagttaagaacaggagggtctcctctgacccaatctcattggcaatgatattcatgaactctgaatcaccctccttcctgtgtaatatgaccacacctccccagtctggactgttcctgaggctatgggcaatgtgcacagccaggtctctgagcagattcaggttattcttctgcaggatcttggtggagttctggagctttttcactgcttccacatgatcctctgctccacacttaagcagagcagtcagtgctttttcagttccatgacttctctccatccacttcagcacccggttcccagacagaaatatcaggttggttctgttctttttccccttctcagtgcccagaatcttaatgacctgaaggtcactgagattgctcacatgggtcccacagcacatgttggaatcaacgccctcgatgttaacaacccgaatgggcccagcatgatcatcaggcaaaccccggccactcacctgctccacctcaggatcatccaggctcagttctcggacattcacaggcagccgatctctgattttttcattgacgctctgctcaatggcagctacttgctctgcagtcatagagggggtgtccagctcaatcgcactccgaaatctccctaactcccatgatgttgtcttcagcttaaatagatggtcagcaac

SEQ ID NO: 342580 - DNA, 1000 bp, Homo Sapiens
ctggtgatacttacatactttattcattcatatatacttggatgccttattcattcatatacactctcctgaatcatccaggtataatctgtgcttttcctctatgacaaggtatgttagagacctcaagagttaggcttcatagaggaattccttttccttccaagtagtagaataaaaagctcatctttccggagcagagtatccagtatagcattcagattcaaacccaaatgctccctaccatctttctgcatatcctttgaaaggttttggccaaagtaatccctcgttagccgaatgtcagccgtgaagaagccggaacagcgcggtcctgtaagcaccaaaggctggaaagcactgtgtaaatgagttttgcattccttcctgtcctatggagacttttttcattgttctgaggaataatccaaaagaccagagaggatgcccataaaccttctcttacaacatctgtcatctgaagcggccattgcgcaacaacccctcaagcctatttaacacttttttggaaaaagacaagacagctggaatccccaggctctgggcagcgatgacccctccgggtgcactcagcaccaggcgctcgggcctctaggtcatcatgttcaggaacttgctctcctcggcgaggctggtgagcatggagctcatgtccccgacagccatgttgctgatgcctgcggggatggagggcagggtcaaggagtttcggggggtggtgaggcgggaggagttctgggagaggctgtggaggaggctggggctcagagcacccgagaacaaactcgagtgatcgccatcatccatgatggcatcgaagtcaatctggggggcctccaggagctgggagtccacagtgctggacacctggttgacccctggtgagggcaagggctggggctggatgctgtcctgacaggcctgtggctgtggtggctgggaccgcatgacctggcagctcccgaggttctccaggcct

SEQ ID NO: 342581 - DNA, 1000 bp, Homo Sapiens
tttttttttttttttttttttttttttttcaccaaaccagatcacacacctttattatcctcaaaatgtaacaaacgggataagaaatccctccctccccccgcccctccccgcagtccagggaagcatttaaaaagccccgcagtcaggccaggagtccgccggtggggcccggggcgccgggcgcccctctatacggctgtagtcctcccgaacaaggggatggagaccggcagacgccaagctccgtgctccaggggctcgcggctgctgagctctgagtcggtccagctggggaagacccggcggccacggtcggcctgcaggcagagggctgggcagggcggcgcgggccgaggggcgctgggcaggtgcagcgccgaggtgtagccccggtccaggaagagcggcttgtagctgggaggcggctgctcctgcttctccgcgctgtcgcggcgactcaggaagggcgtgacgatcttgcggtagaggccgcgcgtgtccgtgagcacctcgctatagggcggcggcggctctgccatcagcaccgcctcttcgtaacacggtggtttggacatgtccgattccgcttggcgcgggtagctccagggccgtggcggcaccgacaggtgcgtaggcggcgggtgcgggagcgcgtggtggtgcgggtgtgggtgcgcgtgcgcgtgcggctgcgcgggcccgtggtgcagcagcgggtgcacgtgcacgtgcggatgcgagtgcgcgtgagccggcgcctccaggcggctacggtgtggtggtggctgcggcggcgccaggcccgggggactcccggccagactgccctcgagttcgaggggctccagctctagggcgcgcaggttctgctcgcgcagtcgctcctcctggcgccgtttgaggcggcggcgcaggaagctgcagaagcagcagagcaggacgatgagaccccagatgagccagaagccggcgaagcacgtgaggaacgtgtaggtgc

SEQ ID NO: 342582 - DNA, 1000 bp, Homo Sapiens
gcatcacaggtagcttattttattggattgctttgccaataacacttcttacactcaggagacttccctcaggcacgtgcctagaaggcctgagagggacaggtccccgccacaagttcaaactttcttcagtgtctttcatgtctttctcaccaaaagtgaagccaagacttctcctctcatccccacttcccaggggagatctgtccttaattacgaatagagtgaactcaaatagaatacctaacgaccaatcacttggtaagggaaaggctgaggtacgctaagacagacggttccacttatcctggaggccaaagacaggtctctggtgtacggtggcacactaatggaggcgaccagatcatggttggtcaggggctgtgcacctcaatgcagtgaaggtatgtgtcaccatgccctgtgagcataagaggcgagaggagggtctatcaagcaccagcccttggggagtggggaggtagccttgggggaaccgatgtgtgactgatgaaggtaggaaagaagggaaaaattgaaaatggagaagacaaggatgaaggaggggatgtgggcaaaggccactcaccaaagatgagctcctcctggtcctcttccatgtgaaacaccattggatcatgaaagttttcaggcagggtctaccacggcttcttgctgagggcacttgttcccatggccatgctctgctctgacctgcaattccagttactcaggaggctgaggcagagaattgcttgaacccagaaggcagaggtagcaggtggctgagttcgcaccattgtactccagcctgggcgacagagtaagactccatcaaaagcgaagccaagacttctcctctcatcccctcttcccaggggagatcagtctccggtgtacggtggcaggctaacggaggtgaccaggtcatcattggtcaggggctggcttcggacacgctctagcatcttcagacctcgagcgtgacacttggagtcct

SEQ ID NO: 342583 - DNA, 1000 bp, Homo Sapiens
acacagcagatgaatggacatttgcagctatcagactgtgctggtgctgatttgtgtagtaatttgaccatcttggtgtattttttcttcatatttcttaaatagaaaatgaaaaaaatcaaatggctgatatcataaaaacaactggtctctaaatttaagattgagacaagaatagaaatcaggagaaatgaggaatctttaatttcaactgactgaatgctcacaggactcaaaccagttggtgcattcaactgagaaaaagaacaaatgagaacatgcagaaaacactggaaataaattatctaaaattatgtctaaaaattgaagcataattaggaattccagaatgatttaagatctctacaactcctctctacttttttagtccattatcttttacagaaccaatgttcaaatacatttttaggaatgtatttagtaggatataagaggacttcttgtgctgaaaatgaagaaaaaaattgacccaacattagttttttaatcgcatctactgaatgattccctaagattagaaaaaattgccttagcaatcaacaaatgcaagccaagaaattaagcactaatctacagtaaaaggtgctacacaagagatatttattaatgttctgttgtatttacagttttaacatagcaaaccaagatgaattaccacttgggcagaaagcacatcattctacattataacccactggtttctgctaacacattgtaaaagcaagtagtacagtatgttagggatcatctcaaaagttccaagctacttctttctttgctcctaagtacctaatcctctccttactcccagactttggcctaatcaccaggagacaaaaggaaaataaggggggtgggggtgggggtgggggtgaagaacgctaattatagaaagagtgtcaagaattacattttagtaattaagcttcatttgtatcctagtgctttctgttttatacagtgacaacacctttagaat

SEQ ID NO: 342584 - DNA, 1000 bp, Homo Sapiens
gttgcttaatttattgttttttaataactaatccagataaaaagttgtggggcttcagggtgacctgggcccaaaggttctgaagggcagttcctggcagccccaggcttgctgtgggaaggggccgtgccgtcactttctcatcattccatggggtgtgtctgcctgggccaactctgcatggagaggccagggctggggacagtccgcactctgccaccctcctgccccttccacccaccccagctctatgtctgtgtctgaattgtggatcgtgcagccatggttattgtggaactgtggaacctgcagccatagttatttgactatatcttgaccgagggcttgcagtgcaaagccaggccagtgttgcgcattacttacaataaaagggatcatttatatcagaggggtcctgtggcagtgctttcagttgtggggggtggaggtaggtttttgcttagcaggggccaggtatggtgcctggcaacgagcctgggcctttcaagcagaagagaacttgactccaagtagaggggtcctggggtgatctggctgataccattgtcagtccagaggtgtctgcccctttcctccagttgcccctccaggagctccactggggtggtcccaacagggctgatttaccagggtggcactgctggccctcacaacctgaacgtcaccagtggctgagttcccggagctttcatgatatttggtagggtcttcctggcccagaggacttccttcagccccatctttgcagggcaggggtcaggtgtctccaagagccacctctccagtacccccttgtggtcatctgctactgttgcttaaccgaaccaagatgatccttgccatctgagacctctggtgcaggaagttggcctgccctgagaggctctgaggcgctcacttcacacttgggaggatccaggccggggcaccatctctgctgagtattcgctctgctccctcgaggagcagtgcctgcctc

SEQ ID NO: 342585 - DNA, 1000 bp, Homo Sapiens
tttttttttttttttttttttaaggagggatgtctgtttatttacagtgcaccctttgtgccaggcccttatgttcatgaccttacccaactctacaatcttgcaaggcggtttacatcatctccactttacagttcaagaaacaaaggctcagattcatagcccctgaatagtccctcatagtccctgagttcataagtagtggttatagtacaatctaagctatttaattccaaagccagtgatttttctggccttgagctataggtccaaaggctccaacagggccctccagactcaatggcagggtggtgtctgcacaagctggaagtgtccttgtgatgagcccatcaggagcggcccggattgagcatccccctccacatctgcagcacagagtcccggcgggtggtgtagggtaaatgtttgattcggaacaagtgtctggggacgatgttcccgctgggtgtatacagcttctccccctctttgcccaagagactgcgcagggccaggttgcccgacagaagcttctcatagaactccactccaccacaggcataggctgcagagagggaggccgtgcggcggtccagccaggactccacggcatgagtgagagaatcctgggagaaggcgtaggccacaaagcctgccactgctgccaccaagctgaaggcagcccgtaaattcatggggcctgcatggagccccagggtgtacttggcacccacgcccagtgcccaggtccctgccaggcaagctggggccagcagggcgtgcacggcagtggtactgctttccaggtacaccacttccctggccaaggcgaacttctgggcttcacgggacaaggtcagggaagctctcagccgggcgcctgctgggctccgccagtccactgtatgcccatgtatgaccacgggatggttagtgttgatcactaggtctcccaagaaactggcagggatgcccaccacagccccagcagggagtcttg

SEQ ID NO: 342586 - DNA, 1000 bp, Homo Sapiens; identical to SEQ ID NO: 160303

SEQ ID NO: 342587 - DNA, 1000 bp, Homo Sapiens; identical to SEQ ID NO: 160304

SEQ ID NO: 342588 - DNA, 1000 bp, Homo Sapiens
tttttttttttttttttcagtgtaaaaggtcacttttatttgcctgtctgaattggcttcacatcacacacaattacagaaccagccccaccggtttcgtcgcagtcctgaggcaggtgcgtgttggctgtgctgtggtcagcctggcgctgccctgagtccacttgtccctccacagaacgaatgactcgggttgatgttgccggatctcaggggtggctgtgactgacagaggaccttgttgcacctcgtggctgctttgttcacccgcagggcggcctgtgggcaccccggggttccccttcagtcccaaggagggtaaggatatgggtttcctaggagacagccaatgactgccctgcatctggagccagcctgtccatgggcagtgcacagatgacagccctccctcactgccctgtgtgctggctaccgcatgtcctgtgccagcctcagcctctttgatgtggccgtgttccatcctggcgctcagctggacaagtgctggctgagccacgtcccagccaggggcatgagatgggggccctggatgggaggctgccagaccccaactcatgggtcccttgaatctcccagcttggactcggccagggtggagctgtctgctttggatgtatcatctcatggctcatttgggaggccagccccaggctgctgtgcttggtgttggaggacaggccggagctgggggtcacagtgcgcctctgagcttgggaacctgcttcagcctggggttgctgtggagaatggcccagagctgagcagaaggggctccccctagccccagggacctgagcctccctcccatctaccgcagggcgagcacacaccctggaggagcccagatggccttgtgctgagtgtggcctcagctcccattgcctcacggggcctgtctgctaacaggtctgggttttgtgcacagaacggtgctgctaggtgggagatgaagtcagcacctgctggggcgagcacggct

SEQ ID NO: 342589 - DNA, 1000 bp, Homo Sapiens; identical to SEQ ID NO: 336906

SEQ ID NO: 342590 - DNA, 1000 bp, Homo Sapiens
tttttttttttttttttttttttttttttttttttttaggctaaaggccagaaacaaactttaattcccaagccggacccttaagtcacaaggaacgtcagatccggctcactccctgacagggtgaattggaaactggcccctacttggtctctaaccccttccactgggtctagtggggactctgacgccgaacaggggctgtagatcagtgagtgtgtatgtgtgtgtggaggggcagcaggggccgctttccacgtggttacataagcacgtgttggggttgggcaggtgttcctccggtctgagggtcctcgtatgtccaaagtctctgtgcataatcgcagacccagatgtgtttgcatttggtagaatcagggtgcttaaaaaggggtgactgagggctgcagttgcagaggtggctggggactgtgcctctgtgggggcggcgtgtctcagtgggaagatactctggggagccaggacgatgtcgtacgtgggtagctgtgtggacaagtggttgggggtgtgtggacatcggtggtcacaggctgggagagtggtgtagccaagagagggagcatgagttggggccatagacagcgacagtctctgggtggcatgaccccggagggggcatgctgttccctgtgccaggcaccagggacagggacactgagaagttcgatgaatggagagggcgtgtgagctgtgaacatgtgtggccgtttctgtggcttgtgaaggtgacagccagactcccacgtgtgggctgcagatccaggggagttggtgggttacctggctatgtgcttgtgattgcagatggactatatttatgtctgtggaaagctaacccagcagttgctttgtggcccttgtagttgtgtatgggtgtgcggttgtgcatcttagcagcatgagtcaagtgagcgtgtgggccgtgggacagactccggaaaacaactgcaggcgtgtaaatgtggctgcctgcagtgta

SEQ ID NO: 342591 - DNA, 1000 bp, Homo Sapiens
tgtttttttttttttttttttaacaacagagatttattgattaatttgcaatgttaggtacaacatagataacttcatcacatggttacaatccagtatttgagctttgtaagataagtaaacatttatttgagcacaacaaaagtctacacacagtattctgggattgtttaaaaaataagtgtattctattccatttgatagcacaaagaagcacatttcagcgtgaattgatggatatattttaaaactgggcatttagttaatgtgtcaaattaagcataataacctaaatttggactatctgaataagaaatgcctaatgagcactgggcaagtatcctaggatgggagtggggaaggaagtatggcttacaagggagctttctttgcatttcaaaatgtggatgatagagaaggtgaggccagcattcatggtatgggaacctgttcacatttaaaattactttgtgatctttaaaaatagagtaaaagtatagttatccagaagtccttaataaacacctctttgatcaagaaaataaaagtccgtgtaggtcatttagttggaaggaaagaagacttattagggagacattagatacctttatttttcaaaagagtaaatctctgttattaaaataactaaaatgtgtcaaagtcttcttttcccccaattcaaggctaatatctacgagtcagggaaagtctatgatcctaactgatcatgtcaaacacaagaccattaccctgcttctgtcattataaatgtcactggagaggcatgtctgctgtacaggtagcagcacatacgtgatgaaacaggccactgagctcaatgtcaatatgtgactttagacaacaatctcttcatattttaggaagcttgaagctaactcaatatattatttaagacaataatctctttataatttacaataaaataaagtgaaagtttgtatttcatattattcaagacacaagcagattttatctgaaa

SEQ ID NO: 342592 - DNA, 1000 bp, Homo Sapiens
ccttaggctcacaaaaatatacatgtcttaaaacggaaatctaaggcacacaaaatactaaaacaagtcaatgaattaccctattttacatattcaacaagcagaaatctacttgtacacgatggtctatcaatggacattttgttttttacaatcccttcatattcctttacttggattagtcaaaagctcaaaacagatactttgcaccagatattattttaataagttacaatgagtttttctttagagagcctgctggaactgtttgcttttgcaccaaaattgtaagtgttagcggttgtgggcttcctatggcatttccaagggagaagcaccattaggttttccatactcccaaggaatctgacactttgaatgttatagcacctctgcattttaacagaatcaagtatttcattgaaaattctccttgttcgaaacatgttgtttgggtaatcctttttgttttgcaataaaatgagtcaataaagtaataggaagaaaatgggaagactaaaataaacttaatgcctgttttcctgttacctagaacataggcaattatcagaaaagatgagttatcattttcccaaatctagtatgctaagataaacaaatgaattagctcttaatggacaaagccatgtttgtagtaccattcctcttgtttttgacttggggttggggaggcatgtgatgatagtagggaatttgttttcaaaatatttcaacaagatttttttttttttaattctgtatcagacttcagtacaaatatctgtctacttagtttttgtattttatcaccttgagacattagaagcatttgactcttctgaaacctatcctgttccctcatctccttttggaaacacctctcatggattatactgagaaaggtgggatgaaactaaattgaggttgttcaataagaagagaccactcttacctagttccaaagagaatgttaatcaatattggtgatatgcttcctaat

SEQ ID NO: 342593 - DNA, 1000 bp, Homo Sapiens; identical to SEQ ID NO: 160307

SEQ ID NO: 342594 - DNA, 1000 bp, Homo Sapiens
ttttttttttttttttttttttttttttatggaggaaagtaaattttatttcatgtttcctacttgtgttagaagagatttggaataccttgatttaaacatgcttaaacaacagtgttttaacattctgttttaaacaatgttttaaaatacctatttattatcttacagcaatatgagatataaagtagatgtaggaaaatagagctgatatgtgcatagttactaaaaaaaaccaacagatttacattttaacatagtattcataaaattaaacattcttaaaaggtcattttagtgcactttaaaaaatttttcttgtgctctttaaatattatttatggaataatttaattcattataaaaactgcttaaattttggcttaacttttttttaatccagtctttgaataatttgatttattttcaatagtttaagcatttctagacctcttaggaaaaatgctgatcaatacaatgaattttcattgtgaagcattgaagaggaacacaggagacaaagtttctatttattttatgaaataaatatatgatttctatgctatttttctatattcactttaaatacctcattgtttcatattatttttttcttctcacagttttatttatacagccaaaactataatctcaagttgcctatagacattttttaaagtattaaaatagattttgttcttgaacagttttctccttcataattatacacctggccgatcgatagtctctcttcttcatggtgctgcatagcaaatatccattatctcaagggggaaaaacacttcataggcaatcaccagttctcttgaagccatgaataggtgtattcataaaccagcagcatcactgcaccacctggtccaagtctcataatcttgggaagcaggcctttgtacaaagctaaaatcccttcttcctgatagactgttgccattgttttaaaacaggttctgtacttgatctctccaggaactggttg

SEQ ID NO: 342595 - DNA, 1000 bp, Homo Sapiens
ttttttttttttttcctttttttttttttttttttttttttttttttttttttttttttttttttttttttttttttttttttaggtataagggacttaatttatttttcttcatattgctgtatttaatatggaacaccgtacctttagcctactgtaccaacggtacaaaagatggtcttggccttgcccagctctttccctgctactttcactgttgagctatatcttaacctctacttccctcagccattgttggactctttcaccattctggatttgtaacagtttacctatgtgtgatcttaatagacattgggaagaaaggaagaatggtctgcttcagcacttctgtaatctttgactttctctctactgatcttgtactaaccttatgcattttctagagccgataaaaatatttaaattaatgaaggagagagcttctgttttaagaaagcatgtgttttctcaccttccacagcccccatttacaataataaagaaatatgaaagctataaacccacatgaaaaatatgagtgaggggctatcagcagacattttgagaaatttctggaaaatagaaattagacaaacaactaagtgttacccatgtagcaggaaggaaaaagtcatcagttttgatatgcccattaaaagagctggagctgaggaggaagctggtttccaggcagaattctggacttcgtggatgagcttcactgaaacatcagagtacagcaggaaaaggtaagcacaggatccaagaaacagagattacacacaggagagaggccaagcaaagctctgtgatgaaaggtatgaagtatgcccacggagcagccagctgagactggaacaagaggatgtagcactccatgcaggaaaattccatggaatctagcactttgggacatccaggtgggcgagtagctttagctcacgagtttgagaacagactgggcaacatggtgaaaccctgtctctacaaaaataca

SEQ ID NO: 342596 - DNA, 1000 bp, Homo Sapiens
ctttttttttttttttttttttttttttttttttttttttttttttttttttttttttttttttttttttttttttttttttttttttttttttttaacaggagaactttgacatttattaaaaccatcagcaacatatatgagaaaagacatatttgagtttagttaccaagaacatgtgtcacccgacaattaaaatatggatacccacagtctgctagattttgtaaataacaaaaaaacatgctccttgcctgagtttgtccttaaaaaggagtggcaacatgaaggaacccccctggaagatgggttactttaaaggttgtgttattaacaagtgatgtggtcccacacagctgtgggtcacaataactcattatagtacccacccagagagaccactggctcctttaacaccaagtcctaaaaagctatggcaaaacatttttaaaatgttacaacattcacaataaagaacagtagcaataaagcacagtagaaataaactgggggtactctcaaaagaaaagatattcctcactccagtcccattttctgggcaccaattcccttccaccccaacatgcttggatagcatcaacacttgagatatttcttaattcctacctggactgagattaggaaaactgacactactgggcttaaattgggcgaactgttattttaacctcttatatctgtagggtgggaggatggaaatacattcctaccgaggttcgttaattccttctgactaagccaaagagttcttcattaccatagaagataattcattctgagaataggacaatcgacctatttgtctggtcattatcttccacaattgacaaacacatacaaacaagtgcttagctctgtacaaagacagaccttacaggagagtgcacactaaagcactagtgtttaaattattttccataatgaaaaaaggacatttctcacattggagttatgtctgtacttctgtcacatgactcac

SEQ ID NO: 342597 - DNA, 1000 bp, Homo Sapiens
taggatgcacaacacaaagagtgaactttaatataaactatgaacactgtagctaataatgaatacaagttcatcagttgtaacaaagtgccatgctaatgcaacatgctaattagagggggaaatatgcaaagaagaggagggatatgggaatccctttgtgcctaatttttctgtaaacataaaactgctcttacaaataaagcctattaattaaaacaacaaaatacaaaacaacaactaaaaccaaaaacagccaacacccaatgggttgagctggagtaagaacaggctgcccagcacacttcctgggccactgagccctgggcgtgaaaagcaaaagggccagtgaggtttggctgggactcagctccccagcctctggctcaagcccgattacgaacacaaaggtcatctgattggatttcctgtcccctcagctcacttaaggaggcttttctgtccacagctttggttgcaaaaagcaatctggctaaagggatttgggacatccggctggtgaatgtaggggaggtttcacctttagatgaggcaccagaaacgatgtgctccctggtagcatcctgagctgcccctcttgactttaatgctaaccctgctgcttttcctcaaggctcagacatcccatttcgatgcttccagaagcacagcctgaacccagggacaggagctgccgccctcccactggagagacctcagaatggacacaattgattcccaagtacccttagagctcctggaagagggttcccttcccgtccccaagaccagcgatgcttcttggagccaggtggccccaaaaggatggcctttggagaaaaataggcccccttcacggcccatcagctccaggtcagagaagccactgggtttacactgcgtggggacaggagggttcttgatactggtccacatttagtgttcggtgtggaaagcggaataagtcctcagcttccatgggatactggaataatctagg

SEQ ID NO: 342598 - DNA, 1000 bp, Homo Sapiens
tttttttttttttttttgtatgaagccataagtttttaatgaaaaaaaatgtatgccacagtgtctatatattcatctgaagagtacaaagatggagttctgagaaaaaagggtttatcactatagaaaataaatctggttcttaaattatgttcaaagcaaacattaaaacagtaatgtctcatacactgaaataaagcaattagaggtaataaattataaatacagtagttcaaatattgttttaagcattagtttttctaaacaagttaaattcaaaacattttaaatctgttatattttttcaaagggatgtacaaatgaaagccttcatagaaatctaaaacgataccaccttgtgatcttcatatagaatatgctgaaccttgaccatttttgatttataacatactttggttaatacattatgttccatatgcctttatatttgggaggaatcagattgtgatttgtagcctttacatgcagtttacccaaaccttcttcacatccaggtcttgcttgattctctggagaaggttttgtcagactcataattaaaatgatgcaaactgtaaatgacttcttcagaactgaaaacttcttttttttttaaataaagtgcttttaaattcaaatatatgttgccctaaagaaaactgaaatatactttaaccctgaaatctccgtatcttgacacacacattttaacggaaaaaaaaaaaatcagttttaggccattcatgtccttcaagagagttcagattggatctaaattgggttttgcatcatcatcgtgctcatgtttatacatgaaggttaaaagaaaaagggcaacatccaaggatgaccaataggcagtatgcgacgtgacagctgaccaatagcggctctccacaaggccttctctgagttcaaaatcaatcctgtgatccaactccaatgcagaatcgaggaagccagaactgctatgtggaagggtctgtgtccctacggtggt

SEQ ID NO: 342599 - DNA, 1000 bp, Homo Sapiens
ttttttttttttttttatttttttttttttttatgttgtagaggcatatttattgacatgcaaagatgtttacagtatacagtggggggaagcaagttacaaacatttacagtatgatcttgttttagtttaactggcagaaaatctcaaagcatataactccatattttcacacatagaaactttcatatcagcttagaccagggattataattcccaccctgagtcttagagaactcagccatagcctaaatgtcctgggaatgctttctggtccataccaacttccaagaatcactatcttgtaggttgacacagcaacctcttctagctttcctgttttgtgttgttgaagctgcaattctgggtctaaatttctctaattaagtctattttgtagtgttagctggcacaaatgcagaaatgcccaggcttgcctactagtaaaagataaagccccttggcctttcatatgacacataggagaataaatcataaatggtaaaaaaaaaaaaaaaaaaattaaggtatgatttcgcaaggaggaaaaaagcaattaccttttaaattcagggtataaaatgatttcagctctttgggaaagaaaaaatacaaatggatagaaaaagatacaaaggacatctaacaagtttcccctgctgatgactccaaatctacatcttactcattgaacaaagttttaggctcctactattttcgacactgccagataaaatccatctatttacctcagaattttctcctgacctccagccagatgtagccaaatgtctaatggacacacgaatttggaggaagttaagaattgtaacacctggcatggacatgatccattgcaaaattaaaccattcaaaccagtctctgagctttgaaggcccccccacctcaaaatgtccttcaggaagactgtaaagcagtgtggtgagatgggttctggtgtcagacaaaacagctatgccaccttcctgctgtgggaat

SEQ ID NO: 342600 - DNA, 1000 bp, Homo Sapiens; identical to SEQ ID NO: 160308

SEQ ID NO: 342601 - DNA, 1000 bp, Homo Sapiens
taccaaattttaagagatcagggattttctggagggagtcctctcagacctcagcaaattgtcctattggtttgagccataaagttagctcatgctggtaccaagcaccgatagatttgtcaagggtcaggggcatctccacccagaatccattcatggtttccaaaatgtgaacccagaaaatccgagacaggtctcagttaatttagaaagtttattttgccaaggttgaggacacactgtgacacagactcaggaagtcctgatgacatgtggccaagatggttggggcataccttggttttatacattttagggagacataagacattaatcaatatatgtaagaagaacattggttcagtggggagggagcttccaggtcacagataggtgagacacaaacagttgcattcttttgagtttctgattagcctttccaaaggaggcaatcagatatgtatctatctcagtgagcagagagataactttgaatagagtgggaggtgggtttgccctaagaagtttccctaagcttgagttttccttagtgattctggggccccaagatattttcctgtcacagttgacatccccaacacagtgtttagggctcagaaaaagataccctaaaatagggtgctttggcatgctgagtgctttgaataaaggagactgaagggcctcagaaataagagaacaaaggtctatctctgacccactgctgcccacctcccttcccttccaaagcacagggagggattttctttgaagttctcttatttgattaagggaagtttctccagaaggaaggtaattgtcctggacaccccttcctggaatctacatcgatcagagaagattaactcatattgcaggacaggagaataattaaaagttgctcaagacagcacacctagatagactttttgcttattctttcaactatagttatgtgtccaataacaatgtttcggtcaactgcatatacaaccatggt

SEQ ID NO: 342602 - DNA, 1000 bp, Homo Sapiens
ttggcgagtagctaagtttattaggacttacacacagggcactcagcaagacagctcgagagatccagcctcccccaatgtctaaactgcttttcagttaattttctggctctttgtctactatatatgagcaacgagacttttacttggttggttctcagatactctccaggatgtttggattctcagagacacctggtcctcagctgggcaccatggaaatggctcattacccggccttcagggttcaagcaggggacatgcacccttaaataacctaaaggggacctgtcacactacaaccaccaccaccatcatcaagaagccactggctgactcagatacacccccgggaggacaagggagagtggatgctggtaagacagggtgagagaccatcaccagggaaggattccattcttggaaggacatccaaccggggggcgggtctttagtggagccgctgtttcttctcctgtatccaacagttctaactgtggctttctccattttcagctctttcttttcctggtcttctcattgcttgttcctacgtgcctccctctcttcctcccccaatatactctttagtctagagtaaactgcttctttccattccccacactctccagtcccctctcctcccttattccaggccccagcatttctgccttctccttggcgcacttgccatcttgagtaacccctcccctgctgtgctcagctacagatgccaaagttcctaacactgagttccataaactttacctcgccctctttattcccctaaaaaatgtctgcgttttgtcccggcctgtgtctggctcaccttccctggtggctgcactgctctggggtcattgggtatcggggaacctgccccgatggtcacgtaggttcttttctattttccctaagtgttggccggtttgagaaataaaggcacagagtacaaaagagagaaattttaaagctaggtgtccaggggagacatcacaca

SEQ ID NO: 342603 - DNA, 1000 bp, Homo Sapiens; identical to SEQ ID NO: 160309

SEQ ID NO: 342604 - DNA, 1000 bp, Homo Sapiens; identical to SEQ ID NO: 160310

SEQ ID NO: 342605 - DNA, 1000 bp, Homo Sapiens
gagatggagtttcactcttgttgcccaggctggagtacaatggcgcaatctctgctcactgcaacctctgcctcccgtgttcaagcaattctcctgcctcaggctcctgagtagctaggattacaggcatgcaccaccacgcctggctaattttgtatttttagtagagatagtgtttctccacgttggtcaggctggtctcgaactcctgaccccagatgatctgcccgcctcagcctcccaacttgctgggattacaggcgtgagccaccaccacacctggcccctcattttctgttttttaaaaactcaggctgcagcacacagaatagatagcaagtgcacaaggttggagacaaagaaaccagttaagagacagctttggtaatctgaaatgatggaggccaagattagaaggcagtacaacagaaattaagagtaaatcctctgaagtcatttgcctatattcaaatccctctttttccacttaccaggtatacaattttaagcaaagttgcttcctgctatggtttgaatgctacaaaaagcatgtgttgaaaacttatgctaactgttgcattggaaggtggagcctaatggagatgtttaggtcatgagggtgaagccctcatgaatggattaatgctcattataaaagagcttgaggttgcaacttccatctcttgctcactcttgccctctcttacccttctgccttctggcatgggatgacaaagcacaaaggccctcaccaaatgctagcatcatgcctttggatttcccaggttccagaactgtgagccaaataaatttttgttcatcacgttacccagtctgtggtattctgttatagcagcccaaacggacttaaatacatactctctctacaactcagctttctcttctagtagtccaaagataaaaatcttcacaggattcttgccaaagtacaaatgtaataatatatatacagcagttagcatgttgcctggcacagaat

SEQ ID NO: 342606 - DNA, 1000 bp, Homo Sapiens
tgaaaaatttataaaattgcagttttattacaaagataccgatctccttgctctctccccctccccctggggccataaaaagaaagctgggtgggggaaggagaggaaataaattcagagaatgccaaatactacattcagcaggaagctaatgctgggattccggcagtccagggaagggctggctcagggtgactctccccagttcagtcctccgtttgctggagacctgggtgagcctcagtccctttcaaactgtttcgctccgcgtgcagatttttggagcaattctttcctcctgacgcgataacagaccgcgaagcatccccggaggagaccaggagtccgattgctcccggaaagtgctcggcatcctctgcgcggctggctaataccgaggtttaggcgttagttggtccgctttgacccgaggaagagcatggagcagaagaccgccctgcgttatcccccggctgggccgcggggcacctgtgcgctcccgctgcgccttgggccgggatgtctttgtttcttccgtgcacagcactcggcagcccctgcgccctcagcctgcctccgcagcagctgggaaccgggcagcccagctggcccgccgcacggcgttaccagagctgccgcagccgcctggagccccagccgccatcctgagaattcgccgagcttccaggcgaatagcctggccaggccccatgctggagccagagggctgctgcgtccggcctgctctgccggctcgcctcggcctgaattccacgcagacccacgtcttcggccaaagaaccccttcttaacacggatattattcagaataaaaactttatttctttttgtttctcagaatgtgagcagcaaggaatgaagaactctcaaaacaaatctagtatttttcgcgtttacagattttttttttcagttttgccggatgttacaaacctaaatcactgttttcaaaagctggatcttctctggttttattgca

SEQ ID NO: 342607 - DNA, 784 bp, Homo Sapiens
ttttttttttttttttctttttattgctctttatttctgtgctgtctaaatgtcaggatcactaggaaagatgattctagcctcttcatcctcccatttccagatggaggcctccctagggtagggagctatgatgggaaataggagcctctcattgggtggaaatggtagtcactgtgaaaactgcttctctaaacacaggtctagcctgactctcagtaatcccccaccctacaaagtgaaaggcatggccccagggacttcttctttgtttgacttcttctgctctcatttgcttggcctggactcattttgtgggctatggggctgctgctgggtttgacagcccttgtcctgagtttgcggtgagttgggctcagactccatgttaaggggtgagacttcaggcttggtctccaaaccacagcacctggcctgaatgcagcatgggggttttggctggcagcagtgattgtgttttggtgggcagcattgactgccttttggctggcagcactggttctgttttggtgggcagcattgattgccttttgactggcagcactggttctgctgtggtgggcagcattgattgccttttgctgggcagcatttactgtgttttgtctggtcacacatcttctgaacacttggaggtactggtctggccacacacacaattcacaatttccatgcttgacttctcatgactgattccagtaggtattattgatcttcctcagcagcctagtgagtccatgactatcagaagccaaagccttct

SEQ ID NO: 342608 - DNA, 1000 bp, Homo Sapiens
ttttttttttccaaaacaatcgttgtatctttattgacttttttttttttttttttctgaatgcaatgactgttttttactcttaaggaaaataaacatcttttagaaacagctcgatacacacaatcttcagtgtgaagcaatatactaataagaacactagtcgtcttaacatttacagtcttcatatatattatatatatgtatatgtatacatatatatacactatataacgaggccagatataatacacacgtttaccattttacagtcatatgtacaggaagttgctagggcggccctgggctgggggctgcgtcaggcctatcgaagcgtggacagagctgaggacacggacggacaggcggacggactggcagggactggcccgggccggtggtggctgcgtggacaagtggcgtcgcggtagccccttacccggcaaaggcccggttggggctctgttgcgggcgcacgacgcacggcggcgacacacgggagaagcgagcatgttcccaacatatatacattctatgtaacatatatatagaggggtacacaggttttgtacacgaaatctagcgctgtccctgctcccgtgcagagtaggcgcggcggtccctggtggtgcacaacggtcgcgcgtccgccggagccggaggtgcgttctggccgcttcttgggttttgcgctcccaggctgggctccaggggtggggtggaggactggaaaggggacaaacagaggccaaagggtgtcccagtcccgcccacactcggggatcccgcaacccctaactgagcatagcccaggtctaccccggctttgcccgaaccgcacgagagatctggcaaaggctgggcgggaaggcccctggacgcgttccgcacggtttgttccaaaggctccggcctctccagtgccggcctagcccgctctcagaaaggcttcctttctcccccgcctagtccacggagctaggagccgccctccgcctct

SEQ ID NO: 342609 - DNA, 1000 bp, Homo Sapiens
agccacagttgccacagggaagcagccagcttgtgtttactttcaactcaaagtgttttctgttgtatatccatgtcatcacctcttatttatcaggaagtgacacaaagtaacaggcttcacaatgccatcaatgtcattttgacagcattcatgtcacaatacacaatcatgtactgtaattatacaaaatccaaagaataaaatgttactagttacactcgttaaaatgaaactgacaaccaaaagaataacaaaacaaaaagaaatctctgtcagaatccatagagacatttgacaatattacaaaaaaaagtagtcaaataattgtcccagcatgctgcagttcattgccataacttcataaattcccagctctttgggggaaagaaagtgcgttttcacagcctatatagttcttaaagaaatagctctcacatgtatgcaggtcaacagaacaaggaatgcaaagtctaggcaccacgattgctcagacagcaacagagttcaaagagtccaacttgacactcttctgaaccagatgtggtttcttgagaaagaacttggacagtaacattagtccaaaagggccaaggaagaaacaccaactgttaataaggaagaaaaccatcaagaactagaacagttaagacaattttttttctactctactttgaagctgaattatagcttgaatagtaaaagattacacagttgatctgtgggtagaacccctctcttccctgaccaacctccccaatccagatccggtaatgttggagtacagatagtgctggctcaatttctttgaagtagaatgaccatttcttcatgtgtggccatgcctccttttaataatgaggtataatctgatgctaacaatgcctgttccttcctgggttatggggctgatgaacggtgtaggcagaaaacaattcaactttctgataagaatcacacacacacaaaaattattgcactgaaaaacaaacacttaaaa

SEQ ID NO: 342610 - DNA, 1000 bp, Homo Sapiens; identical to SEQ ID NO: 342609

SEQ ID NO: 342611 - DNA, 1000 bp, Homo Sapiens
tttttttttttttttttttcacaagactagatggagaattaatgaagaagaaatagaaatgaggcttatttaaggtacaaaattcttgtatttgtaataacctagatttatagatataaaacaagtcttttaaagacttccctaaaatactcaatataaaacaggagttacttatcctagatcatccttagttaggtacacatgattctctgtgcaactagctggtggacatgaataaaagctgctgggcctataatgtactaaaacatttttctcccttcagcaagacaggtagggttgaaggctaaatgcatcagaggagtattttcttaggcattttggacaatctttttgcagtaggttccataggttttccccagcgaaagttgactcagaccagagtaactctgacacaagttgccaagagggaaaaaatacttcatttgctagattacccaaatgtgtagcttcatttaattaccaaggtaagaatcatccccaaccacttttcagctgagaacacttgccagagaatgtctctggatgggaatagatgtggtaccagctaggccactggactacccgagttcagctgccaggaaatcagagccacctcaaatattgggcatgctctgattcagcagtggcagtgccctataactttcagatgattatctccatgtgctatgttacccaaaataggcaaattatttacgaaaccatttttttctgtaaagcaaaataaatatatacaattcaagattcttttctcttctaaaaaggtacagatagtgtgagctgaacatcagtaggaaaattatttcagaatctggatgtataataaataaacattattgtatatcatgttttcaaagttctaagagaccgggaagccacaaaacatagagttagatgggtaaaaaatgattgtgaaaagtactgggaaatatgattgtatgaaatttgaaaaaaaaatttcacaatccctaaattgatctca

SEQ ID NO: 342612 - DNA, 1000 bp, Homo Sapiens; identical to SEQ ID NO: 160311

SEQ ID NO: 342613 - DNA, 1000 bp, Homo Sapiens; identical to SEQ ID NO: 160312

SEQ ID NO: 342614 - DNA, 1000 bp, Homo Sapiens
ttttttttgttttttaatcagtcttttaaaactaagctatccgaactacataacagttatgtatatatatatattttttaaacgctacaaagactttaaacagctgttgataaaaattttggtaccaatcatgaggttcttctctcatctacatatttaaaaggagaaattgaaataagaatgggtcaaatattgaccaatgaactcgataaacatcaactaatgtagccacatggcacaaaattaagagagtacaaaacaaaacctttcaaggtgggggtggggggcaaattaagaaaagtgaaacaaaaccataaacaaagcagcggggttcacgacgctaaagctattctaaagacttggtgacgagcgacagcggctggggctgggtcccggccagggagctgtgggaatgtaaccaagaagtcgacggctgtgcaattgatgaggagggggcggcaggctgcaaagcggctgggggcaggtccagggccccgttgggacagagggcggaggccttgtgggtggcctcagcgagcaggagggcgggtggcggaggcatcatggacaggtgggccagggggtcgggcttcagggacagcgacagaggctgggtctgctcagtctgtgacttggcgtctcggggaggggagcctagcaggttcggggaggggggaggcgaatctagtaagcttccatctgaagagggtgggctgaggcagctgccttcaccttgtatgtagcgaacgcactttttttttctcctgcaagggccgcaccagttattctgttgatcaaggccaaagcgcgctcggcatttcttaggagcgctgaggtctgtaatcggaggaagtgaaaggcaaggatttaggaaacattcgctgtgttcattggtctctcccggctgcttgtcccttttcctcttcttcttctttccatagttatcccgcgcggaccagccggggtacagttgcatatgaagctgtcgctccttccgggc

SEQ ID NO: 342615 - DNA, 1000 bp, Homo Sapiens; identical to SEQ ID NO: 160313

SEQ ID NO: 342616 - DNA, 1000 bp, Homo Sapiens
ttttttttttttttttttttttttttttttttttttttttttttttttttttttttttttttttttttttttaaaaataaaaaagaaattttattaccagataggatttggctgagtctcccagagtcaaatttgggggtgccccacccttggcattgtccttgataactttattccactcttacactcaattcctcagtaattctgtctgctgcctctaaaatctatctagaatccacggggtctgggcttagctggaatctccatcattgttcctgtggctcagtgcagccccccttcaccttctctggttttcaacctcccatggaggccacaagacacctgtgatcacctgaattagggcaagtccctcttctgcttagaagcttctatggctcccacctcactcagagcaaaagcgaagtcctctatatcacccacaaggtccttcgggaactactccttcagctccttgtctcctcccattctccccctccgtccctgctccaggcacaccagcatcgctgcatttcttagaacacatgggcacatttcagcctcagggcctttgcgcatgccattccctcatcctgaaatgcttttcttttggtcttcccaggacagaggtctcagctcacatcacaagtcactacctctgcagagaggtcttccctgaccaccatcaccatctctgtcgtttgtcactggaatcatctccattatttcatcaccgagttcttttctgtgttcccaagcagaacgtcaattccacgagggcacagattttttgtctgtttgttcacattgtggggtgtcgctgcataaatacatttcccctgcatcttttccgactgcacctttggctgcatttcctacaaattcctttatgtaaaaagaacaagtctgtaaaacttgggaagacagtcgtgggccgagggtgtcagtctgcagccggttctgataccagagtccgggcggctgtgggtgcaccggggctgcc

SEQ ID NO: 342617 - DNA, 1000 bp, Homo Sapiens; identical to SEQ ID NO: 160314

SEQ ID NO: 342618 - DNA, 1000 bp, Homo Sapiens; identical to SEQ ID NO: 246560

SEQ ID NO: 342619 - DNA, 1000 bp, Homo Sapiens; identical to SEQ ID NO: 246561

SEQ ID NO: 342620 - DNA, 1000 bp, Homo Sapiens
ttttgacagtagtctttctatgtatttattttacctgctaccaatcattgtactaccacaaagaatgaggaagtcccagggaccttgggaagaagaggtgtggtccctgagaaaagggttgagggggtgttggagtaaaaattttgtaccaaatggaagtttttcaaaaaggcacagacaacagttacctctccaaacaaatggatgtagcagtaaacctaagagtttctttaggctgtttactaacgtgaatagcaacatcttcctaggtattaggccaccccaagtgtagtttaaaaataaatagtactagaaacggaagtggaaacacatgcacagtttatcttttcactcttgtgaggtcagcagacatctgtaacgcactttccctacagcagctaacaaaggcaggatgatggtatctgttctgaacgtttgaaacaacatcaccacttatctttacagatttcctcaggttctcaatggagggcctgaaaaacatcactgtcaaggatgatgctgctacattttatgagctggagacgaacgagacctctcctgatgcctctccagtcacaggaataatggttttgaaaacgtcaatgctccatctgccttgtacgttgtaatctcctgtagtccatctgaggccaacgtgcacaggaccacagtagacaaagagtattcctgatgacaaatctgatatttcagtctacttcttcatgtgatatcccaagtattttttcccatccaccgtgctgctggatccatggcgagaagttctctttcaggtacttggtgccaaagcccaggaccctgttcatcgggtggttgtcaatagctgtgagcttggccgtgacgtctattacaagggcagccttaaagccctgagctttgacctctgattctcccctggggtccacacccattaggacctggtctgtgatggtcttgaaaacagagtaggacagcccatcctggaagtggcccatcaaagcct

SEQ ID NO: 342621 - DNA, 1000 bp, Homo Sapiens
aatgaattcaaaagcatccattctagagttagactgagcagccaaatgagctggtgtattttgagttgtatacagttgagacatgttacagtttggtattaaagtgcctgcctaaatgcagtagctcagagttttcctagattccaaatgaatatttattaaaatgaagacatattatagtggtttaaaattagacaactttaaaataggattaggaaccagagaccgagataatgagagctcctaaagacagatggaattaatcaattacaattttcctcttgattccatttcatccatataaacagaaatttctccacaaaaaaatctgtgaaatgaatgactgagagttgtgactcctagagtttttgccccttcacaaaataagactttttaaggctcacaaaaggtacctcaatgcttattgtgagatttcatttgctaggagagtttattcaagttcatctaaaattccctgagaaaaaaatgcactatttaaggtagattatgtctcaaggtgcaaaccctgatttgatagagaggcactagctaccagcttccaagtttccatcctttaaatcagtgaaagaaaggaaatccaggctcttcagtttagcttcagcactatcagtaaactccctggaggctttctgcagtggaagccggggtgggcccattggaatcccagagaccagagtcatgatggctttggtctgtgacactccaaaacctagtttgacaacaaagttgataaatctctggatacaaaactgatagttcagggctaaagagaagtccttttgttcaaaagcctccaacatctggtttgtcttttttcccaggtagttataggtactgcccactgctccagttgctcccatcaccagagcactcaacagttgctcatccaccccaaaaaggaaagcaaactgttgctggcgattctgatcaacacattgcccgaagtctaagagatctgtatcactgaatttcagccctt

SEQ ID NO: 342622 - DNA, 1000 bp, Homo Sapiens
tttttttttttttttttttttttcaagaccatatatcactttaataacagaacctccttggaccagttcacagaactgtcatttaaaaccaatgtcctagaccaactccaaccttcttgttttccagtgtacccaccccacacagggccagccacagccaggtgagaacaggaaggggagtggagagggagagtggagagggtcctgactcccataggcttcatctgggactggcccagccttgaccccatctgcccaggagcctctcagccatggagtcctctagggaggcacttagcccacctagagcacaggaaaaaggtgggacggggggcacctcccagtcaccctccctaaaagactcacacaggggcagggaggggagagggcagaagggcaggcttcctgctgcttctagcagtctcttcatctccagctcctacctctctcctccccctcatccctcagcaaccacagcatgcccaaccaagtcccagcctctcttctgtcattgagtctctagtgagaaagaggactctgaaatcagggcccaagaggagagacctgttggctgggtggctggccagtgggtagtgactgttcctcacacacagtagtaggaggtccatgcgttctgtgtcggaggctactgcctctcctccattagtggagctgctggaggccccaggaagcatgaggcagtggtgtgcagtgagactggaggaaacagcaggactcagaggagggagtcctgagcagtgtcatggatccagtccagaaactcagctaccttggcgtagacacctgggtgattgggctctgcgcacgcacgcccccagctgaccacccccactaggcgccatgtgtccccatctgggcacactagggggcccccgctatctccctggcatgcatcagcccttccgtccaggtagccagcgcaaagcatgcggggggtgagggctccgctgtacacgcaagagctgttgcagagctgagt

SEQ ID NO: 342623 - DNA, 1000 bp, Homo Sapiens; identical to SEQ ID NO: 160315

SEQ ID NO: 342624 - DNA, 1000 bp, Homo Sapiens
ttttttttttttttttttgatcttcttaagattttatttactaggtagcaacatgtgattatactcaagacacatcaggatgccagtctagaaggaaacttacgtgattgtgttccaggggcaaacagaattaacccagtgtccaaggtggaattgtatagatcaagaaccatttcctaaggctgtggtctcttcaaagagaaaacctgatcaaaccatttagcctcaattctgaacatgtgattttcccaaaatcagttacattcgaaaggatatcattttaaaaaaaaaaaatcctgatttgacaactctatgtctttgaatttagaagtgttgcttcacaatctcgaattagagctgtttttctcttgcttaaatgagtttgcagttgtctgtcttaacagctggtctttagagctgcccctatctattttttctgtgccccacgaccactaggctacttctctgataatatatataatgtctaaaagccaaccgctgtttagatctgaagatctgtgggaacccgcctaccaatgagattgttcgttagggacactacgtgatttggaggacaaacaggattattacaggttctgaccaaccctggctcaaaggacagccctcccaaagaatcagcagtgtttggaatgtcaagtgattgagaatctccttgtgaaggaggaagggttctgactgtgccctttctgaactggcccttgaggttacctttaggaggtgacccccggttttcatgttctgtagaggaaccccatgtagctctaagccaccgcggtttccaatcgcagttagctggcaaggagaaaactgtttggggtgactgcctcatgttgttctctccatctatagcaacacctggaatagaacggtgacctctagagtagtagttccttttgctgtctttgccttcagtttctcttttttccattaactggttaccattaagttcttttccaaatattttatgagtgtctttgtt

SEQ ID NO: 342625 - DNA, 1000 bp, Homo Sapiens
ttaggcttcaagaaaaggaatttatttagtctgaaataaagcaattttgccatttaaaattgaattactttgtagtttaatgattactattgagcaaacaaatctttacagtaatataagtcagcaaaagttttttaaaaggtttaaatccctccttccttacatctatttcattgcttttttaggtttgggaagtaaagcaccagaggaagcatgtgtaaatccttgtataatcgcaggctgtaagtctttagcatctcaggaagttactaacttcaaactaagtatataggtagagtttcttactaaatctagtgcttcttgaaccacaagtagaaagcatttaaaacatgaatgttgttttgtgttttttgaagtttgtaaatagaagacttgttgatgatccgatggcaaggtatttttctcttggtatgtattttagttatttcctcgtgatgcataagtgaaaagagtgaagtttctcagaatgagcaactgtcatccatctacctgctattttattattgctgattacaaaagcaaatcaagagatgagaacccagttgcctgcaagtaaatatttactgcattgagggtcggagcattttcccattaccggttatccatggatcaaatagtgtatctcagtggtaattctagagggccattaaaaccctgatggtgctggaagagatggcagtgctgcatgtcagaaataggtaaactgtaattaagaagttacagatgatttgattacgctcttgtgtatttggtcctgttataatgtgagcagattaaaatcatgtagtgcttaaagctatgtcattatgcaaacatttatggcaacttctgcaaattaatttgaactgtaaaagttccctaatgagacgatgtcctccataactgagaaggacactgcagccattgctgcttaattcctgcatttgaatggttgccgagcgcatggtgtgccctttctcaaagagcagagaggctgcag

SEQ ID NO: 342626 - DNA, 1000 bp, Homo Sapiens
ttttttttacaaataataacaaactctttattgtaaatactctttattgtaaatattctatcctaaattccatatagccaattaattcttacagaatcttttgttaatttttgtgtgtataaattttacagagataaagggtatgtttgttgcacacaacttacaaataataataaactctttattgtaaatattctttattgtaaatattctttatcctaaattccatatagacaattgattcttacagaatattttgttaatatttttttttttgccaaaccttgtatccaaagtcaactatcactgcgatttggccatgatttgacaaaattagactacaaataaaaatccctgataactgtacagctaggcactgaagaatgggtataggttcggcatgaatgctggttgaaatttttgtttacactagtgaggaagacaaaagtaaaacaatgaaaatgaatgtcagaactccttcttaaatgatttgagcagctgtcagctgaaacggatgacagtgttcaactactggaagaataatccctccattttttggtgctatacaccatgtattggctacaaacaagacatactttaaagtttaatttgcattactgacattttatccagcatgttctgaagtctagaaaatcaacaaacaataaatcaagccctgatgtgtagtcctctctaatctttgtgatacaaaaacactccccacagccagttaagcaaccaaagactaacatgatgtcattgagtggggaatcaggaagagatgcgcggtgtctcccctaggtctccataagagttactatgtagaaatagcctcaaaagcacagataatagtaacaggtagtaaaattaagtaatgaattttgagtataatttttttgttttaatgtaatttacttaattataaatttaaatcatttaattttttataatggctgtgtttaccaacttgtaaaaatcctgaaaatgtagcaaccagctc

SEQ ID NO: 342627 - DNA, 1000 bp, Homo Sapiens
tttttttttttttttatgctctcagaggacaagaattatgttttattcatttgggagtacataggcggtatttaaacaatggtgctatcttaaacaccaaatatcaactgcagttcactttttccgtgtggggactaatatcaagatttcatatgaattatagtataatccagaagtatgaaaaaatacatcatatttaacttataaagcattcatctgcatgttataagatattacagtaaatacaattaggtacttaccattttatctttactttaaaaacaatgccttttccaaaatataaaaaaaagacctatttttaaagaactatttaaagatggctttgaaaacaacacttttatttacaacaaatagatggtagtgcaacagcactcgtggatgtttacgataaataaaaatactagtattctggcatcctttgggtacaggcccttttatatttatagatgtctacaatgactcataaaagtaaaatcaataaaggctattaatttgtatttcaacctgaatttgagaaaccaatgaagattaatcatttatttgggatctagatccatatatctgaaaactgaagtataaagtttctcatttccatttaccttgtcaacaaacatatcccaaacatttcagcatctgtaaaaggtgatctatttagcatctgtaataagtgatttatagttatatatgctaaataaaggttgacacagctggatcctagaagctcagattttataaatttaaaatagattaagtatttatgccaaaaaacaagaactggatctaggattttattttaaattatggaagtctctggggaaaaaaaatagcaatggaatgacaatagatgtcagatatttctctgagaagtatatagtttctcaattttcgctaggtagtgcatcccaactgaattaaaactaaagcatatttacagtgcattttttctcactaaaatttcccaattctaaaatggtctggc

SEQ ID NO: 342628 - DNA, 1000 bp, Homo Sapiens
atatatatatacatgtatatttaattatttttttaaagccacaattgaaaaaattctttgccactgggtagaattaaatctgacaggaaaccctaggagtttttattagtaccattattgttttctttggctccatgtattatgtcggtaaaatgacaaaaaaaaaaaaaggaaaaaaattgtaaaagacaaatattttgtacaaaaatacaaagttttaaaagctctttaagtatatttcatattattactaatagttggcctatatatctgtatgtctgcatatttttcctacacttgggattttagaaatgtatggcactgtttacacagtatatgcttaagttcttcccataactcaacgaccaatgataacctttttctgattggagtgttccatactttggaagacataatttgtataatcgcacggttactgacggaggagaatctatgtgattcagtccatgtgcacaatgaaaatcagcatatcaccctggggaacattttagttcccaagtctttgggtaatgacggatggtaaaaaacactagctgtcaattttttttcagtaattggttttcagtgctttttttttttcaatctgatgagaaggtgatgcaattagaaaggagtgtcctttgcctttgagagctgaaaatttgctcatgtgatcccatcacagtccgttataatgcagatgacagtactgtctccctgtctttttcgcaaatgaagttattgacgtcttcacattggaaatcgttccactgcccagcataaatcaacccagcacagtcttctcctggcccatggccatgaccccagttatccggctgtccagctttccaatttttgtagtctggagatgtcccatccagccacttccattcattttcacgctctgagtctgtgaggccgatccagtggctctctctccctaccatctgtttttttatccattgctgttcctctctagtgtttatgaaaacaagatgtg

SEQ ID NO: 342629 - DNA, 1000 bp, Homo Sapiens
tttttttttttttttttttattttaaaatagaaacatacattaagctttaaaacaaccaactctcaaacaaaagaggaaagagcctttgatcccagagtccatgcggaatgaattccatacgtgtttgaaattcacataaggagcacttagaaaaccacctgaaatggaaatccaacagcccccttgcctgtgagggctcccacccctgcccgcgtgaggacatggccgaaccccggacactcgtgtgccgggagccaccacagctcaaggtgaccggcagcacccagctctgtgaccaagacagatgttcacacgtgggggcatcgtaagcgctaccagctccaaatctgacgtgatgggaacttgggagatgtctgagaaatgtccgaagggattttggcaacacagaaaacgcaatgtctaggaattcctccaaatgcttccaaaaatactcattgacaattcaagttgcacttggctggcggcagcccgggcggccttcagtccgtgtggggcgcccgcgtggccttctcctcgtaggactccccaaactcgttcactctgcgtttatccacaggataaagccaccgctggtacaggtagaccagaaacaccacgtcgtcccggaagcaggccagccggtgagacgtgggcatggtgatgatgaaggcaaagacgtcatcaatgaaggtgttgaaagccttgtaggtgaaggccttccagggcagatgtgccactgacttcaacttgtagttcacaaagagctggggcagcatgaagaggaaaccaaaggcatagaccccgttgacgaagctgttgattaaccaggagtaccagctcttatatttgatattcaggagtgaatagacagcacccccgacacagagagggtacagcaggtatgacaagtacttcatggcctgagtatcgtactcctcggttttcctctcagattcgctgtaagtgccaaactgaaattcgggcatcaggcctctccaa

SEQ ID NO: 342630 - DNA, 1000 bp, Homo Sapiens
ggctccaatgtgatggtaaaagcagcagtgtcttccagaaaaaaaaaagtcttgataaactcaaataagcataccttagcagcacacgaaacacctacaattcaatgtaactgcaggctcaataaagcacaatcctgattcccactatgaaaacaaaatcaatcaaggaaaaaccccaaaaccaaaaaaaagtctcctcaccctaaattgaggatttctattgaaccctggaggtaatatttgtaatcactttcctattatttattcttggtaacagaactataattaccattctttctttacactgctcacacacatacatacacaaaccctataaaaaaaaataaagtggagaggctatgagaaagagaattcaatgtcaataaagaacaagcatcacccaaaatgtcagccagttccaatattcacaccaccgtccgatgttccccacacacatagacagcactaggacgtatccgtcgctttgtgtgaccagggagctgcggcaaaaacttgaaggacttaggcatcatgtccaggcaagcatcatggaatttcttaatcctccagtagtagatcagcggattcaatgcagacttgaggtagcagagccacagtagccaggtgctaatctcaaaaaagttgtgctgatagtaaaagtgcttactgaatgttgccacaaggctgtaagtggtgaatggggcccagcagacaatgaagacagcaaagagaatcaaaatagtggtgaaggcacgtgttttaaagcccatgtcaatgctcatctggaaaggtctctgcagactcatgagacccagtttgctggcctggctgaggcatataccttcagggtagctatggatcctcaaggcattgtgccgaagggtgttgagtatgcccataaatgagtacagtattaccaggaagggtatgaagaaagaaatgagagaaatcaaaatcacataagcctggtagcctggattggttgtgtacccaaacacac

SEQ ID NO: 342631 - DNA, 1000 bp, Homo Sapiens
tttttttttttttttttaacttgggaccaccaagttgtaaagatgtatgtttttacctgacagttataccacaggtagactgtcaagttgggaagagtgaatcaataacttgtatttgttttaaaaattaaattaatccttgataagagttgctttttttttttaggagttagtccttgaccactagtttgatgccatctccattttgggtgacctgtttcaccagcaggcctgttactctccatgactaactgtgtaagtgcttaaaatggaataaattgcttttctacataaccccatgctgatgggttttatttagtataaaacatccatcaaacaccagtctctggcttctagaagagtccttcagatgacagttgttgtccatggtctttgactatcaagagcagaattaaatgtaatagtcccagagctgtagaaaagaactttactccttcccagggaaagtgaaagacataaaacactgaatcagaggtggcacagattagtctttgataaggtaacgtttctttgaagtctgtctgtagagaactacatggacttccaagagtgtcaaaggcagtgtggtagagagaatttaaggcaagatttaaatttggaaaaggtgcttgaaccttttctcagaggttttatttccccagtatgtttttcactggggcctttacttaggttagaaataataggctttgaaggcctctatcaccagatgcaataaccagataaaattcctgttttttcccaatcgcttagttttttgttgttgttgttttttaactgagtagatcattctgacccagaactactttcatgaggtaagatctttgggaaaatctgaatagcgttaaccattagattcaaatctcaaatggtttcttttcaagtctagttgttttagagtatagtgagaaataccttgacacaattttaagagtaaactatatgggtcagcatatccttgaacaaaaagtagactttgtaa

SEQ ID NO: 342632 - DNA, 1000 bp, Homo Sapiens
tttttttttttttttttttttttttccgtttacagcagatagtgcatttaatactttaaggggtatttagtattggataggtagctagacttacattagaggatttataaatatttattaatacttgctacaaccacaaaagttgacagctttcgcaggtttttaagtgataataacctgaagatagagactaaaataacatctacatttccttttaaataacgttaattcagaaagtttcaaagttatcctataatttgagacaaacaggagggattagatgaattaagttctgaagcgagaacatttactgtttctgtggacatttatgaataaaattccccatgttgtgatttgcccaggaacaatttgagtttctcctgtggtttgaatgtgtccccgaaagtttacgtggaaacttaactgccaatgcaacagtgttgtcaggtgagatctttagaaggtgattaagtcacgagagctctatcttcttgaatggattaatgtcattatcatgggattggattgttatctcaggagtggtgtctttataaaggatgagtttgcgctcctccccggcccccgccactctgtctctctctctctttttctctcactcccatgtacatgctcttttgccacgtgatcccttccaccatgttgtgatgccttccagcatattatgatgcttcgagaagaccctcaccagaggcagccccaccatcttggacttctcagcttttagatttatgaaacaaataaactattggttagaagttatccagtctgtgatactctgttataacaatgtaatatggactaagacaccctcctattaagtgaaacattgttctctcagcttacaaatttctaaagctctaaaaatccagagttctaaataaaactgagttaaacaacacctgaaagaataaaagaagtaactacagaattggctacataatggctacttttagcgtagatggatgtttgaagaatatat

SEQ ID NO: 342633 - DNA, 1000 bp, Homo Sapiens
ttttttttttttttttttttttttttttttaattatttttatttacacaactttttccatcatcatgatgcaaataagattataaatacacaaacactggagtacatgcaacacattccacaaaggaacaaaaatgtacagcactacagaatagagaacccaaatttttatatacaaagtgctttaaaaaaaaagaccttgtgacatattcaaaccatatttatttgaatactttccaataattaccatgggatacatcatttataaataatatttaatctcccctattttttcaagccagaatttgtgtttcaactaatcaagtgaacagccattccattatgtaatattaaaggcaagtcacatagcatcaaaatgaaaccggtgggcttcttgtcgtttttctctatcatctgctttcttttcctgccaatgtaaaatgccaattattgccaagatgaaaacacagacaccgatgagagctatagcagtaagcagaacaatattacttggtgtaagatacagtttggcactccaacttcgagggacattgtgagggtatggaatgacaattagctgggaatttggaatgattgcagtccactcttgttttcgtatagatttttctccagatggacggggaataccaacgtagagatggtcaagaaaatttgcgctccgacctaaaccaagcacgttgtatggtagttggagagctaaatgtgcggattggctgagttggccagctgatccatttttcagatacccatttgcatctacagttgtatacatgatataaggtccaggttgattcactccaaagggtgttatcttacgaggacagtcattagaacacagaccactaagaacaataactttaacaaaataagcatctgcttcaaagttattttttagtgtatgaatggcaaaatcattctttgtatatcctttacttagcactacaatgtccaagattccatcttcgtaaatgtcaaagaag

SEQ ID NO: 342634 - DNA, 1000 bp, Homo Sapiens
tttttttttttttttttaatcttcaatttggcttttattttaaaatacatttagcatagaactgtcataggacagaaaataataaaacacaaatggaacattttcaaataccttttaagctagacataaaaatcaacaggatagcataggcccaaattatgggaaacggtccctaaaattcaattcattaaacatacattttgaaagtaaagctcttttcacattttccaacgtaccaatattttcctacatgccttggtttccttttaactaataagtaaagggtaaatttagttgctttacttaaaattaccagcttcagttttggtaaaaattaccatgcccctaaattctcaatcagaattataaaaatatgagctcaaatagttatggtgcccaaaatagaaacatctgaagtgatagttctggataatcatacagatattgcactaaaatcagtaatttcatacctggtatttatttatatggaaagttaatctcttctttatgaaaaactttctacaaatacacttactattaacgtaagtacaaccacacttcaaaatataaaggtagacagaaaaaagaatagtttaatactatacgcaaattttccactgtgaaaataatagaaagttgaaaaaataataggatctaaaatactgatactaattttaggttttataatttaccttaaatagccaataaatgggtattaaaagttaacggtgctaaatccaatcctttccaaattatttagaaaaatgctttgtttacatatgaagtatgtgcattgtcccatctataaatttcaacgtttccattcactggaaatacctacctgcagtataaacaatcaagacaatgtacaaaaaatatgtcctgctcctataacttacaatgcacagaaaaatatctacaaaaagggaagtatttatccatttagctttctaataaattggtgagaaagtttagcccattccacatttctttctaaata

SEQ ID NO: 342635 - DNA, 1000 bp, Homo Sapiens
ttttttttttttttttttttttttttttttttttttttttttttttttttttttttttccgcaagatggcagctttaaatcacattgccaagggccctaggttccctctgttcaggcccacttagccacacacccaccctggccatatccagaacacttctaccaggtgggccctgccctgtggccactgatgtgggaacctgaggtcacatcagtctgtggactcctgggttaggtgacccttctgccttgaggtctgctggacacctgggcatgggatccagtagtcctgagctcactcttttggccatctccagctgctcctaggggacgtggctcaggcccgctcctggggcagggggttggcggtggcatgaggtgggttggggaggaggacgtgtctccacattgcagctggcttcctcctgggctgaacctccttgtgctttgagactgacaggaagagcagagttgcttcaggtagaggctcggcccaggcccttggggcaggataacagcagagaactcaggtgcctcctggcacagacaggaggacagatggcacaggtgagcatccacacactccattgccacagggggtatggcatggcccatgacccatcaaagcttccaggtcgggatacaggagagggcctcagaagagggggaccaagccctaggccccatacttcccagaaggagccccaggcctgcaggggcatctgaaaggatggagtcctggcccagctgggcctcaggagacagggagtccccctcaagagaggctgcggctgacaaggggctggagcccacaaggaggctgtggagcccgctcccagagcactccgagttcagacacacttccaccagctctcctaggctccccagcttctgtgtcaggtacaggtgggacagacatgtcttcagctaacgcccactccgctctatgagggtcttggtgtggctgccaccccctcgggggcccacaggggtggcggtg

SEQ ID NO: 342636 - DNA, 1000 bp, Homo Sapiens
gcccaaatttatttttattttgcacacataggaaacaggatcctatcaaaagagaacaaaaaagagaaacgagccaattgttgcagaggaaaagcatgcacagatctgcttcaagtttactctgaaccacggacgctccgggaattctacacaccaggagctgtctcactccaggaagtgggcacaacccaccatccacacaatggaaacaagaatggccaggaaatgtcaccgaagtgggacttccatatgcaggatcagcgttcacagtagcacaattctaaccaagttcaagggaaaacaaactctgtctcacacaaacatgggaatacaaaattgttgagccctagccatcactgtctcttaacataatttgctatcaaaaagacaaacgaaatttagtcacggacttttgggtgcctattcagctgcacccgattccaggggcagcttagtgtgctttttcattacaaaaaataaagacattaaaaatgcaaaacaaatgacctggaggaagaggagtgtttggacccacgcagttgtcttggttgtaaacagtgaacattgtgctttgttgtctcatttagatggaggcctgcagcatgggaggtaccacgctggcagtcagcagtcacaccagggtggtcagagacactggtggcagcatctgtgcttgcaactgcattcccagggtgtctgttttgttcccaagtgtctcccacagaattccccaggaggttctccgattaaatgtcctcagagtgaaaagcatggacaccaaatcactccgtatccacttccatgagatgtcttgatgctccagttcaatgagtaacaatttctcaagaggctctgattagttcattaaaaaataagcacccccacctcattccccgtgatacagcacatctagtaatctaggcgcctcagctaagctgcatagctcttagcacacaggacaggtcagcgttcacacatcaacactataactatgcggcgg

SEQ ID NO: 342637 - DNA, 1000 bp, Homo Sapiens
ttttttttttttttttttttttttttttaaaaaccaaaaggcagaaaatagactttattccaagacagatttgtaaaagatgtttttaaagggaaaggcaagtcacgctactaaatcaaacattgttcacaatttctggatcttcctcctccgcctggcactgcagctgagccttggcggatatgctcggggccctcggcgcagaggaacttggcctcgattctcttcctgaggggcttcttaacttttccaagccaggcagtgagcgtggtgggaggctggggctggtgcctgcggacagctccagatggaatcccaggccacggtgcttctagtgtccccccagcgagcttgcggtgtggcaggcggccaggaagggccatgagcagggtggcctgaatgaaaaccgagggccgaagccagcctgactccctcgcctaagctggggctcggtccgaggcacacgcatggccttggccagacacaaaccaagagactgccatgacagacagagcagaaacctcccgagcactgtgttcaagctaagctttcctaagacgggcttctcaggcgagacgtgacaccagacaccgtcgcatgttacttggagagaacagagacgtgcgggccacagcggcccaccaaaggctgccatccaagctgagttccgcaggcctcacctgcagctggagagggaccttgccctgatcctcctggtaggtacccgctaagggattcaggacagagcgtcacactgcacgcagggtcctccgccaccaccatccaagaaccccggggggctggccacgcgctggcctctgccaaggagtgccagtggttcccgggacggggccgcccaagcaggtgagggaggtttagatgaatgacttggccagggtcaccatgtggtccacgccacatgccacgtccacaggctccccaggcatcgtcaccctccatgggaaatactggtcctccaggcgaccgattcccaggcacc

SEQ ID NO: 342638 - DNA, 1000 bp, Homo Sapiens
tttttttttttttttttttctagaaaatcaaatattttattttcattaaaaaaaaaccttgaataataggaatcattttacacattaatggttgctctttaaaagttagaatctcaagagataccaaaagcacttaagagttaccaccacattttgcccaagtcctaaggaaagttctgaaacttagtggtggtgtgtttgtactcagcaagctccagacagtctgagttgctcattccatgaacagaagcttgaaaatgcccttacagttgagatataaacgagggaagaggtgaagctttcaggaagccagagagcccctgccggtcaggtttcctgaggaaggcaggggtgctctatgctcatcagtcattcaagcttctcaggaaatgtgcccatcatgggaacagcagctatcttccaagcttaaaaattatgaatcccaggaagttaaagcccaaccagccaaccaccttcacatccttctcatactagtagagtcattcaaaacagcaagtggtgcttctgaggcagcctcaggaaggtctttgggtggctattctagaggtgaacatactggaaaggtttttacctaaagcattttcagttgaaatgaaaaaagaaggaaagctccaaaagtcagtttcaaattctttcagtgctgctcccagagaagtccgtgtgcaaaggtgtgatgttctggtcataagcggcatactcagaggtgccggtactggccagcttgagctgctgggcagcatgggtcagctggaatgcagcatcagggtgggctgtctcaggcagcagtgtgcattccctttccagcatgtcagccacccctttcagcaggtccaggaaaccaaaggctagagcggcctttcgcaaacggttcagctccttatagaatgtctgtgttttttcaggtagtttccttgcatttcttaaaatcttctgtacatctgtctgcaggccgctgggtttgatccagacagtcacattc

SEQ ID NO: 342639 - DNA, 1000 bp, Homo Sapiens
ttttttttttttttttttggttccatcggtgattttaagaatttcatttaggctacagaggttcataggaggactcagagttccaggccctccaaggagactctggcctgtaactgatttaatcccagggcagtaaggtgagcagcatgtaaccccttgtcaaataaggcagtggaataagggttgacagaggccagcactcaggctgtgctgctcaatgacagtgaactcttccaggcacagatgatgagggtctgttgctctcagacttggaacatgagaacagcaactgtcccttgtccattaagaaaaaaaagccaaatttcttctctgggcaatatccaagcccaaggtgtaagaagaaagcttccttacactttcagcactcaaagagggattccaaaaatcgtaactacaaaacatgcagctaagcaggctctagcaagtccagaaacatctccacatggtcagaccacatgacaaatgttgcttttggtttgatcaaacctggagctggtcagttgcacagctaatccatggcatccatggtgtcttccaggcttctcttgatttttacaccaacctttagccaaacttcactgagggcctgaagagacttgattgggaaggccatggacatgccaatagacccaagacccatgctagggaacagtgatccaaagcagaaagccatctccctagggccacctaatgaaggccagcgaaacgcaggtgtgttctgcagccccaggccccaacagagaggcatccaaatgcctttcccagctcaggttgcacacagagaggacaatgaatggagtgaaaggaaggtaaggcagggaagaagtttccatcctggtttccaaagaaagctcctcaggtaggcagagggttgggtcaaatgcaaaacccaacgaatggatggtcagaaagcctgtggtgttaccagtttttaattctttgtggattcaaaactgaagtagaagggccttctgagtca

SEQ ID NO: 342640 - DNA, 1000 bp, Homo Sapiens; identical to SEQ ID NO: 160319

SEQ ID NO: 342641 - DNA, 1000 bp, Homo Sapiens
cttttgaatatttctttaatattacatttaaatattctctttaaatacagcattatcacaatgtaaagaacctaaaggggaaaaaattattttcagagaaccagacaagctttggattcacattgaaaatactacctgtgtacagtatgtgagaaaggaaattggaaaataataagggttgtggtaataagagtcatttatctaggcctagactgggactgaagctatctgcttctatgatcagaggcctagctttcctagcaaccatgagctagaattctgtccaactcaggtagcaccagaagtgagatggactaggttgtagagaaggcctttcgcttgacaagacagttaatgctaaatgttaatatttagcacttaaaagtttgggatcagtgtgagtcacaactgtagcgttaatgaaggggatggacttaaattaagaaactacaggttttcagaaacatatcttgtgggttggcaatgagcttaataattacagattcatattcctggtttgatcccaaaagctaatgtgttcctcatcgtgcagctggaatctacttcctagattaagccggagccttcctgcagagacagtgggcaaacctcaccctccccttccgacacaaactttgaaaaagattcttttctccataaagccaaattcccaattaagcttcagtcctgtgtttgagggtaccagtctaaggtaggggagtctagttcagttctgggtagcttcgagagctcaggtacttaaaagactctcaactgtgttttgtgaggctaggggatggggagagataaggatctgtgtacttaagttcccctccaaactaaaaccaagcaaaaactggaacaaataggaaaggcagaatgaactaaaaaatgttatgtgtattaaatacaaatcttttcaggctcagagtttagagacttcaggggtgaaatgctgctgcgacatacgtgatggtttctgtaagacaccagggcctta

SEQ ID NO: 342642 - DNA, 1000 bp, Homo Sapiens
ttttttttttttttttttttttttgtgttccaacaaaactttatttacaaaaacaggaagcaggcacgtttggccctcagactgtaatcttcccatcactactcttaatgatactcagatgacctggctgcctgagggggctgtggccctgtctgattctctgtgagatggaaaccactctagggtctcctggtgcgctgaggctgtacacaccggcagaacagggcactgcgtttggaagtttctgaccaagtggtgacagcagagggcaaaacgtgaaggctgtgctggataaggctgaaccttcctcataagcaacaccaactgctttattccaggtcagggccaactcttccgccatgatacatacatggtccctggcgggcactgtccttactgggcccctaggagtccctgcgttgtggcctgaccaccagcccctctctggtgatggcccagttgtagttcttccgggagtccaatgctgcttccacccgtgcctccaggttctctcgggtgatgaagtttttcacctcttcctgcagctgcagcacttcccgctccttgcgctgcgcccaggcctgcacctcttcggccttgcgggcctgctccaacgcctgccgctgctcctgctcccgctcctcctgccgcagcctcgctatccgcagctcgtgcagccgccggttctccgcctggttccaggccatcagctcgcggtgctcggcggcgtccttcagggccttgcgctccgccagaaccccggctcgggcctcgtgcaccttcctctgcacctcggacacgaactccatcctgagggcgcgcacggtctggcggtagtgctggtaacgctccatcagcacgaagaactccgcagggtccaccgcgggcggcatgttcactcgctcgatcttggatttggccagcgggtcgtggcgggtcttgcggccgcgcgctggcagcaccagaggggcccggggcctgcacggggtccccgcgccca

SEQ ID NO: 342643 - DNA, 1000 bp, Homo Sapiens
ttttttttttttttttttgtgactaacatgcagactgaataaactgcatgtttattccaggctcgtttagctggacgagcagtacagacagggctgaggctgactccatggccatgtgggcagaggtcaaacccatgatctctcttcctacagcttcctaatgtctgcgatgttggtcttttgaaggaggcccccacagagctgagcttgcttggttatctgggactgctgctcagtctgagtaggggagggtaatgaaccagtcaggcctcctcctggaggtgcccaacactggcctagtccccaaggctgacgaaacatggtctggcctgaccccaggacgtggggtgaggaggaacactgggcataatatagtagcggaaacaggcaagcctctatgggtcccttccccttagaattttagggtagggaacgaggaggctacagactaaattgcagaactatctgcacctgggcctctgagctcttcctccactcccagtggagccattctggggactgagttgcatgaggactagcagagggtggcagttcagtctggtccctgtcttcttccagccagctgtgttcttagctgccatacttctgagcttcctgggaacatgagaaagtctggcgactatgggggatggggatcattctgaaggaaataagggacctccatccctccttgccttgaagggggtggaaaggcagctcctctcctgaaggcttgttagcaggttatgggcccacaacaaaggggccagagtagggcgaaattcctccttcaggttttggggctgagaaggggtcttcatgggctgtgaggaggtaagcaggcctgagactgggtagagatgggagcggcatgaggggaaggtaagtcagttgccatgccacagccaaggggcctttattggatggtgagggcacataggagcaggcaggtggctgctagatggtgttgcacaccttctcagggtgcagtggtgcccgg

SEQ ID NO: 342644 - DNA, 1000 bp, Homo Sapiens
tttttttttttttttttttttttttttttttttttttttttttttttttttttttttttttttttttttttttttgtgacagaagcatttgtttgtttttatttatccaaatggggagaatgcaacatgtcagggcattacagacaaactgcagcagccagacaagagggtcagtctatggcagagtccaacatactcagtgcgaaggagccacagtgcgggtgctgcctggaggacttgtggcagcagggtccctttggatgaaggccaggtatctctgggcgaggcactgatgaccatccacatgtgcaggctgctgcttcagtcacgctgaaggtttaaagttcagagtcctacatgtaataattgcctcagaggggaagggcagtccatggtagtcacggtttccagtgtttttaaacataatacacaaagttattgccaaggattttgcactgcaaattatactatttacacttgcgtattcagaaaaacacagtaaatagatacatgatagatattttaaatagatttctaaaaaccaacttggtcttcagtagacccgagtgagctacagccaggagtcccatgccatgtgtgtaaccgtgcggtagggaaaggtttctatccacgactacgctcagcctcctcctgcctcccccacccttgggcctgacgaagggctaaggctgagcaggcctaccttagtccttagtgtgagggcttcaggtctagactggctgcacctcccaccttcccagacagagttctgcttggagccgctgagaagcaagtcctacaggctccactcctgcaggaccactacacggcgggtaaaccaggacacacaggcatggggctgcagggctaacggtatgatgaacctggccctaggccagccccttccccagcaccccctgccaaagtacccttgggaacaggcccatcagcctcactgttcctggaagtacgattgccctaatttatggttacctcagga

SEQ ID NO: 342645 - DNA, 1000 bp, Homo Sapiens
ttttttttttaaagtgctgagatttggaagaggaatatctttaaacatgctaaccattaccttatgatgaccataacaaggactcaaactcaagtttagaaaaaaaaaaatagaggttctatgaaaggaagattagtaacaaacattcaggtaaaaacaaatagcaccacaatgaattgcactaaggtgctaaaggaggtaccttattccctgcagagtgaacgctccttctgaaatgtattgcaacatataaatgcaattgtttaatggttaccatttggttcattcatctacagaaaattgcattccttctagttcattatattgaacaaacattcaaattactgaactatacataatgttacatagtttacattttatgaaaacaaagctcgaaggaatatttataaatgtcaccttgcataaagatgacaagtttaaaagggctccatatctcttaagacatttaatttacgttaatggtccaggagtgttttagatatagatatagatatagatatatttatatgcatatatatttcaacaagaagtgtaaaaatttttaaaaacaaatcacagcactcatagctgcttcacatacgcaggtcttagggtcattaatgtgtcaaactattacatttataatatgtatatttttaaaaagacaaaaaatggcacatcagaaaactcgctgaaattcttattagaggcccatttcactgtatcgtattactgatgtgtcgattcaatgtgtaattcccttttcttcactgaaagcatttgtcccttctatttggatccacttctagggtctctgtattttctttccttggttagacggcatccttttccacgtcagttaaagatcaggaaaacggcttgggtcttccttgtagtcatcaggtatagtaaagatggagccatcaaattcatcgtatcgaaactcctgaaaagtcacagtggctgtgattgtgggaaacacaggtatatctaattttac

SEQ ID NO: 342646 - DNA, 1000 bp, Homo Sapiens
ccttttttttttttttttttttttttttttttttttttggaggaatgagcaatttatttcaataaagagaaagcattaattttgctacagtgggaaaaaatgaactcaagagttgctacatttaactgtatccccatttatctctgcacgatgtctttatctcagtgtctcaattcacactaaaatattgaatgagaaatacaccacgttggctgattgcttgacatgtctgatttagggagacttctacaaccactcctctcttttttctcccagtaaatacttttgactttgacacctaccatattggaaatgacaggtgcccgagggcaagtgcatcaaagcagttaggattcgaatgcttgctaaggattatttttttaatggagcagttctattgaatcctgaaaatgcagaacccagtgaatctcctttattgtgaaacagaacaattcaaatgattgcaagccccagaacctaacagagaagcacttaaacatttagaacaaacatacctatttttcaaactttggcatttttgtgaagtacacttatcatctaaatacctctctcccgtcttctcttttacaacataccatttcaacctgtttgtttaaagaatgaaggccttaaggaaaagccttattcacatccccgtaaaagaaagaaataaatatttgtttctagaatcaatctaactgaacttgactaaatcttgatagaggctccaatcttactcacacataaggcgatggatgatcttttgttgtcaacaaattctcattaagatagctaaacagttaattataattattcaaatgtatttcttgagttcctactatgtgcaaagtatcgttccaaagtagacactcttccttagaaataaagtgggccactgaaatcataacttcaaaagtctagaacttttgatacacccaaaatatgagaggaaaagtttgctgctgctgttactgttgctgcttccaaaagtgcccagttt

SEQ ID NO: 342647 - DNA, 1000 bp, Homo Sapiens
ttttttttttttttttttttttttttttttttttttttttttttttttttttttttttttttttttttttttttttttttttttttttttttttattttctgaattatttattaacatttctcagatgttctaaagccctcccttgcctcctctctgccaaaccagggccctctgtcctacttcaaaagcccaagagctcacttaataaagcaagccccagtccccacctgggaagggcctggtcacatgggagggcaggtgagggtccctgagggacagcttgttgccctcactgttcctgagatgccccagcccaagaacgaaacaaaacttctcatcatttctcctcaggcctcagccgagctggcccctcttgtgctttctcaccctgttaggactgcggatcaggctgaagggctccccagggtgagcctttcctggtccgactcactggcatcaccatgaggaggcctggcggcagctctgccctgtgcacaccgtggtaacctggcaacaggaacatttgccaccctgcaagtctgaggagcaggtgagccactggagggggcgaagtcccagagccacctctggcttcacccagactcatcaaatgaaagacactgtctctgctagggccaagtccctgtcatgtctggctcctgttcccctccctggtccctctgccctgtggcaaggagcccaggtgcaggctcataggttgttccgctgaagtgcctcacacaggttctggttggtgtcgggctcctccgtcagcacctccacagcctcccactccccggatcggctcgacctcttgatggcatccaccacgctctgcatgtacagcccatcctcgaaggaggcggccatggagacaggggtgcggtcccaggtgcggcggtcgccctgcccctggaaggactggcgcaaggcctgcaccatgtagaccatgcccttcaggtacagcagcgggacatcctggggcccctgctcaggcag

SEQ ID NO: 342648 - DNA, 1000 bp, Homo Sapiens
tttttttttttttttttttcaggcctgtacaaaactttattatactctgaataacaagcatgtaacaaaattttgagcatgacaaggatgaaatatttcaaattctgtttcttacaaaagcattaagcacaatacacaaagactgttcataatattttacagtcagctaaaaataacaagacattctaggatttcaggagttttccttttctttcaactagagcattagctttatttccattagctttgctacaatgaaaattaacatatatggacatgcacatataagtgaaatggaaaatgaaggcatacaacaaacattccgattaatcaacaagtataaaatagtcttttagtacttccaaacttacattttctttgaatgtacaatgaaactttttgtctaaaatgtttttaatgttaattttgaccattcccaaagtaattaatactctttcttagcaccaccattaatctaattttagagtttgaaatgaattaagaaacactctaatcttattcagaggtgctattcacaacaccgaacaacaggcaatccactgccctttatcaaggctgagacactgtagtaaatgagtagttcaccaatactgtctatcccaggtgaatatcagccctgatcttacttccaatgatgagatacatgttttggcttatgtagtagcatgagctatgagataggaaacatgaaagtcacatggacatgaaattaaactcaaatctctactgcatggaggctgaatgtgaaatatttcacagtgactaaaactgactggctaacaggcaatggtggatttttatattcaactttgattaacataaatggactttacaagaaacccttgagatttaattaatgctgctaatccaagggctccaaatgactgaggagcctttaaaatcagtatatgtgatcttttatatttttttccataagaaaaaaaaaataaaaacaccgaggtacttaagtttcttttca

SEQ ID NO: 342649 - DNA, 1000 bp, Homo Sapiens
ttttttttttaccaaaactagctttaatttgtccaaaagccacacagagttgtgtagaaactgatcctgggagggaagctgagagagtccatgatgcgcagggccaaggtgcctctagaagttctccagcaagcccaggatgcgcttttgctcgttctcccggaactccgggctccggccgtccccgatgttctctgcatactccttgatgatatgcctgacaattttgatggagcttcctcgcatgtttaggatctggtgaaccctctggcgaatctgggggacattggcattgcagatctcggccatgatgtagcagatgtgctggagaacaaagagccccgcatccaggcgccggaggtagaactcctcctcggtgtcattgtcgatgatctctcctcgccggaccatgtcgtgtttttccccttcaatcttcttgtccgccacctgcattgcacccagatatttaaaatgcaactccattagtctgtcaaccttctcactgtcattttcagtgaatttattcagaagccgggtccgctgctgccctctcaggttccgcaggagggaagccaggatcgaacagacatgctcttcatgttccttctcagtggttcccactttcttgatcttcctgggagatttcataaagaggggaaagatggttcgtaagccaagaatgtcaacaaacttatggcagttgtctgtgccttcggggccaatcatggcatggtccagcactttcagggcactgctccgggagatcttcttttccctgagcatgagattcatcagctgaagaccctcgcccttcaggaagcgctcacgattggaactaagcattagacaggagcagagggaatcaaacagattctccatcatctcctgctcctcagccgtgctgggattgtgtcttttaaacacggataactgctgaagaagcacatcgattccatccagctccccaagcaattccctgttttcatcattgtcctggagc

SEQ ID NO: 342650 - DNA, 1000 bp, Homo Sapiens; identical to SEQ ID NO: 158775

SEQ ID NO: 342651 - DNA, 1000 bp, Homo Sapiens; identical to SEQ ID NO: 160323

SEQ ID NO: 342652 - DNA, 1000 bp, Homo Sapiens
tttttttttttttttccaatatttcacctttatttcagtctcaaaaaaagtgttatttgcaactttaatgtggccagaaccatatacatttgaaaggctgctaaattgaaaacaatagagcctgcattttggttgtaacaatccattctgtgtatttgcatgtgattatagatttgctaagttttagttcctcctttcctctggctgtaacttgaggcagtgaaggagaaagagaaggcaaaaaagggtcaatagaagaaggagcaactggacagaaagaaccttgaggaagtaggaaagaagacatgtgcagggggttgaatgcttatgtccttccaaaattcatatgttgaaatcctaaaccaccaagatgatggcattagaacatggggcctttgggcagtgattaggtcatgagggaagaggcttcataattggaattagtgccctcataaaagagactccagagagttggtagtccctttcaccatgtgtgggcacagcaagaagtcaccttctataatcagaaagcaggccctcaataggcatgaaatctgccttaatcttggagtttccagcctccagaactgtaagaaagaaatgtttgttatttataaaccacccaatttatgtgtagcttgtgatagtagcttgaatgaactaagctaacacggtaagaaccagaaatgaagatagagtgacggtgatgactgtcaagcacactcatgagaagcaaggcaaggccatggcctagctgatttggctggagaagatatgagccacttttacacttagatggcttattatttacatataaaaaagaagtaaaagccaaacgtgccaattccctggctccttgtcctacacaccaaaaaggatgacacggaaaccaaaggggccagacgactgtgacactgttgtggaatataccactggtgaggagtcagttctagaatccagctattcctcattatattcttcagctatatcctaaagggtg

SEQ ID NO: 342653 - DNA, 1000 bp, Homo Sapiens; identical to SEQ ID NO: 160324

SEQ ID NO: 342654 - DNA, 1000 bp, Homo Sapiens
tttttttttttttttttcatttttaagcatctgtttggcgaagcatctctacatacctacacttcagtccacacacaatgtacactgatcactcatttacaccccccccaaaaatacccaaagtactttaaaatataaacactcataaaaaggacaataaaaaataaaattaggaattactatcatataggtggaggtaacatctaacctgaatgtgaagtaaggttagtaaattgagcactaaattatctctgagattcctggcagcaaaggtgaaaagagagagttcctgttgctggagaaaacgaagcatcccattgattggccttgaaacatcaatccccagtactccgggccttggaaaaagagctgttttatatcttagtgagtagaaaaagcaaggcacagggccgggcgcggtggctgacgcctgtaatcccagcactttgggaggctgaggcgggcggatcacttgaggccaacagttcgagaccagcctggccaacatggtgaaacccggtctctactaaaaatacaaaaattagccaggcgtggtggctcatgcctgtaattccagctactagggaggctgaggcagcagaagtgattgagcctgggaggcaaaggttgcagtgagctgagatcgccctggggcagggcctcccgcatcaggcacacccagaggggcaggaagcaggcgggcccccaggtatgtggctgctgtcttcccctgggcaagctaccctggacttttcccaggtctctctccatattgttcaccccattactgaactgaaattttggcactacggttactcaaaacaaacatttgagaataaaaaagggtaggacagtttgtttgagctacacatcccacttagctctctagaaaaacctggtctctgttactttgctctggaaacagggcttacgttccaatgtacttcgaacactggaacaaggctcatgtttacctacaatgcactttgtaagtaaacaa

SEQ ID NO: 342655 - DNA, 972 bp, Homo Sapiens; identical to SEQ ID NO: 160325

SEQ ID NO: 342656 - DNA, 1000 bp, Homo Sapiens
atctagaaaataacattttaaaaaatgaaaatattttacaggaaataacatttgtacatactcataacagtctcaaagagaaaacgattcctctacccacagaacgcttctgaaatcacatgtgtgtaagcctttccctccacaccaaccagctctccaactccctctcagacaccaacgcgatgtcctacaatttaactcgattctgtcaccaattgcccggagctagtgcagaacccacagggtaaggggtcagtcccacaagaccaccccgacttcagatgccaagtgcagacggtgggccccggggaccccacgacccccttctcaggttccaatttttttttttgagatgggtctctctgtcgcccaggctaaagtacagtgcccagatctccgctcactgcaacctccgcctcccaggttcaagtgattctcctgccccaggctcccaagtagctgagattacaggcgcacgccaccacgcccaattaattttttgtatttttagtcgagatgggggttttgccatgttggccaggatggtcttgatctcttgaccgtgtgatccgcccgcctcggcctcccaaagtgctaggattacaggcgggagccaccgcacccggccaagttccataattttctaagcacacagaagtcgggaccatatgaaccggctgtgaaaaggcgttgaaatacatggatgaaccaccgacccgcaaggtacgggggaggacgcgaggcttccatgccctgtctgggcgcccccttcctaactgcccccccaccccgccttcaccaacccgaagcccgaggccctcatctcatgcagggttttgatggaggcctggttgcggaggaatgaccgattcaatcaccggccactgccccgcagcagctgaccgtgggaggcggggagtctcagaggcgggcggccggcccgggacagacccctgagacctccccgcctctgggaatcgcctcccgcgggcagcgctcg

SEQ ID NO: 342657 - DNA, 1000 bp, Homo Sapiens
ttttttttttttttttttttttttttttttggtacaagtttgtatttatttaatcttatgtaccctatgaggaaggtattggtatcatcctctgttttacaggtggggagactatagcatagcagcatttagataacttgcctaaagtcccacagctcacaaatggggaggaaagatttgaacttggtgccagagcatatgtttaaccctggcaataagtgtctaagcatgctggtctccccagtaagcagcaagctgcccaagatatcagacttcttttctttataaaactacttaaatgatgctgcttgcaatggcactcaaagttgctgaccaacccccaaaagaagaataatgctgacataaaaggctatgaattaaagaggtaccttgtgaagaacagagattttaaagtatcatcttacttattatttgtaacaaaaatggaaaacttacagtaatgacctgcattgagaatttgatatgaatcatcaacatagttatgttgatatgtatatactatgttgatgattcatgtcaaactcatattaactcatgatatcaacatatatattgattcgtatcaaaaacatgagttagatatgaaatgagacatagatttctaaaccattaaaactacaggtttcatactatggataatgctgcataattatagaagctatctatcacattcctaggggagaccatagcaatgatttcctgtgggaatgtggacgattcttattccccaaaaccttacatttgtttaaaatgtcactcttacagaaaaagatgcacctctgaatatcctttgatcttagcaaatcttttttttaaaagtatacatagatactggtcttttagaattgttcaatatgcagtattgctcaaaaacagcccctccataacaatttatttccagataagatttggtgcctttaaaggaaatcataagaaatggaccaaaggctagggaataagaaggccacccagcaacccc

SEQ ID NO: 342658 - DNA, 1000 bp, Homo Sapiens; identical to SEQ ID NO: 160326

SEQ ID NO: 342659 - DNA, 1000 bp, Homo Sapiens
ttttttttttttttttttaccatcaatgattatttattgaaatctgaccagttgtacagaagaaaaaaaatggcattatcatgcctctcttaatagtactgtggaaatgcctatttttccctttctaatcacagtttttcccacttgtatgcttcttcctctgatatcccatcccaacacccaacaggcaaatccacagacctggcaatatgccaggattttgggtcttacaaaatatttactgattgatttataaaatgtttggtgtacatgacatgttagttagaaacaacaaatccaagagctgaagcatgagagttaatacaataaagcaatttgggaggtaagcaatctcagtgtttttatactgataagaatatcttaattcacggttttcaaactagccttagttacctctaagtgtacatcacctcctctcctgtcctatcccatgccctccatctgtgtagtgtttatggcagttcttggctgccttgtatgatgactctgaactccccatggtcctacacaggctgcagtcacagccctggcatggagccaatgtttggatggtcgtgcgtgtaattctgagaaactggtaggaagcccagtgaggccgtgtgatgtggcggaaaggcagggaacaaaagcagaggcaaacctgaccaccgcagatccaggaagacatttctcatgaagcaccccaggccacccctctctaacctaggagagaacagaaaatgtaccttcatttttggaataattttctgaatgtttctcagcaaataaaaatgtgagaaatcacagacagcaatctggaatagctgaaatgaccatactttcaagactttcagtatttattcttgaggttggcaaatgtttttaaaaggctcttccttttgaagatcaaagccatgagacaacctatgttaattatacagaagggaagactatatgggggagcagcatttattaatggaattctaggaaagctagtttc

SEQ ID NO: 342660 - DNA, 1000 bp, Homo Sapiens
tttttttttttttttttgggactgcgccatcatgtttattagaaggttggattttggtgtgtgcgctagacagatacagaataaatacctgcgccttgagaacaggaagtccacgattcatacaaagtgctcactacaggaagttgctgtgtcaaaatccaggcaaggacccaactccgggcagcccctcctccctgctgacctcaacaagggctgtgctattgttttttattttattattttatttctctttattattattaatattattattatttgcttttgctgtggtcactatcattggcaaagttccttttcccctttcctggacataggggtcctgtctttaaaagattccactctgaggctgaaggtgccaaaagctgcttgagaagtggcctttgaactccgtctgggaagatggtgaggagaaggaagcaggagaaatcattcttggtttaaaaaaatttaaaaaaacaaaaacaaaagtcgcacaatctaaaggtcattccttactcgatcagtgatcaaactgcccaaaaggaaaacaagaggagaaacaagcccggggccctgggcgttcctcccgggtggggtaagaagggtgggacccccaagctttcagggaagccgaggttccttccagccacgggggtgtgaaggggaaggagtagaggaaaaaaggagaaacagagagagagctcagcgcctcgacacagacactttcccatctccagggccacctgccgtcctggcccaggccagctcccactgtcacctctgcgtccaggagattcataataaaaaaaaatcaaaaacaaagccaaaaccaaaacaaaatccaaaaggaaaagacctggggcaatggaatgaggaagaggggaggcgaggaaggtagaagggcaggtctctggatgcataactcccgagcccgggggctggggaggaagattccccagcgccccgccgcctgcgtggcgttagctcgtcacgtagtgtt

SEQ ID NO: 342661 - DNA, 1000 bp, Homo Sapiens
tttttttttttttctgatgtggaacttcaagtaacgtacactgcagcttcattttatttctcaaaaaattccctccgccgccccatcccatagactaggcctttaagaaagtccctcttacctcgatctggaaacgagctccgagggccttccccagcctcaactaaactttaccggggtccccctggccctggctcacctcgacaccgttaattcgctcgtctcctttaggaaacctttccagactgccccccggcgggaccgcagccatcccattacccgggagagcccagggcccagatgaaggcagagagcgagggcgcccagagcgagccgaccgactgccgccctcccccgcccgagtgaagtcaggcagtggctgcagacacggctgtattgggaagcggaggctcctacacagtaggagaggcacgtcccagacccaggaggcccgaggactctggacacagcgcgcgcggcccgcccggggcacagtctctgggggagccccgaggggcgagttaaggcagcttggctggaagggagcggggagtgggagtccgccagctccccctgaaatgctggctcactgaggagacgggcttctcacctcccactcttctgtcgaggacagggggaaagacagtcaataaataaacccgaggcgaaaaggggcctcgggagactctgcgagtcgggaaggctggaggtgcggggcgagggggcggtgaaacgtcctgaagagcgtccagctcgtggccgagaggactcgggcgctccccacgctggaggccgtggaccgctccctttaaaagttgaaacggccgccgttcgggacggcctggcgggaggagggcccgacgaggggaggcttcagggacaactggggcttctcgacgtccacccttttcagggcgcggccccggtagccctcgggccggcccaggtacaggaggtgcttcccgggacccccggagtacctggagggacctcccgaggg

SEQ ID NO: 342662 - DNA, 1000 bp, Homo Sapiens; identical to SEQ ID NO: 160327

SEQ ID NO: 342663 - DNA, 1000 bp, Homo Sapiens
ctcttcgtaaaggattcaaagcaggcacagtggtgtacacttaaagtcccagctactagggaggctgaggcaggaggattgcttgagcccaggagttcaaggccagcctgagcaacatagtgagactccatctctaaaaaaaaataaaaataaaaataaataaaaaatacaactaatggaaagggcaagaaaaaaaaaagaaaaaaattaaaagtgattcggagcagtattcctgcaagaagctcccggcgcatgtatatttacagaaaatatgtacatgcagcaggcccagaggccaccagagggcagagggcttctgtaacagttcaagcctctggctgacccagggactggctgcttcacacttgcccccatggctccgaagtggtaggagacaggttccctcacaccggaggcagattccagctccagctatgcccgcacacctgggtctgagccacagtctccacctctctcctccaacctctgcatcattaatactgctctggggtctgagaaaatacctgctttttcaggcagaggtcacacacagccacatgacacacacgccaaaccctgacagtgttgcccacgcaaccactcaaatcccgtggcacatacaccacagttcacttgactctgatatgacagcataatacacaccacggacacagtcacccctccacggacagtcacccctccacacacacacagtcagtcaacactcacacaggcacacatgcacacacacagtgacctgcatgcatggtgggagagactcaattggtggagccctcccgatgaacagaagggttggaggtaaaggtcaagcagtcagtgggatggggagcatcttccgcaagaaatgggggtgtttaaggaggcccccaagatgagctaaaatctcccatgtcaacagaaggagccaggcctagggaagggaggcaggcctgggtcagaccaggtgtccccgcccattgatgtagatgccattgcccgt

SEQ ID NO: 342664 - DNA, 1000 bp, Homo Sapiens
ttggatataaagtcattgctgtctttttatttttgaaatagtacaagacaaagatttttaacttaacatgaaaaattcactcttttattttggaaaaaaagttaacttttcatactaacaaacagaacaagatttaaggtaaatttcttaaacattatccagaaaaataacaagatttatagtatctacttctggtactaatatacacaaaaggccaaaaccatgcctattctgcaggtgtagcttcggtgctctcctgttcaggggcaggctcactgcccgcttcttttccttctttgcttcttttagattttttgtgtttgtgtctcctgtgactatctccttcttcactttcatggcgacgtctactattacttcgagaagacttatgtctggtttcctctttctccctgtgtcgtctttctctatgtcgttcttctttttctcgacttgctctgtgacgctcataacctctttctgcatattccctgtatctgtatcgttcttcatcgctgttgaaaacacttggtgtaggactgtgatcacgctccctctctctctctctggtgcgttctctttctctgtcccgatcacggtctcgctctctgtctctgtctctctctctatctcggtctttctctcttctggcataatagtcccactgcttgctggtgtccacaagactaggccacgaaggagcagaaccaggaagatggggaaaggcaacattgccatatggaaatgcacgtgcagaacgactatcataaccagaggaatgtccactttctattgttggtataagagatggaggtggagcgcctggtggaggaggaaaacccggtggtggaatcagaggtggagcagtgctgacagtcggaggaggtggaagaaatggaggaggtggaaggtgagtgggaggagctcctggagggaaaaacggaggtggtttgctaaaattgttgtctacttcagtagcagatctttcagaaaggacctgtat

SEQ ID NO: 342665 - DNA, 1000 bp, Homo Sapiens
aagtgtttgatcaataaatcaatttatttaaaagaatatgttacaattaattacactaagtgacattaccaaacaattttagagtggttagctctagaacaaggaatgaaagaaacaatgttagccattattgtgtctgtgtattttctcttcacatttcttaaatcacaaataaaaaatacaagatactgcagtgaaaatacaattagagtttctctgaaataaattaaatgtgcatggcctgggaaaaactgaagcccagctcactggcttaaaagggggtcatgatataaaattaatgtccaagtttagcaggcggccaagtgcccccaccccgtatcactcccctctttgattctattccttaccacagccctgaccttcccacataccctagattattgctgaggagtgagctgatgctgtcctggcagcaaagaggcctggcgtgatgtgctcaggtttaggggaacaggaagtcaagaggtggacctggaagatggggagctagagaagcatacccactatctctcttctccctccctctctctgagtgttctatcacatcatcctcccaaaggaagctactgtgacacaatgaagctggtgaagaaacagcagtatgctggggtcaacagatcaaacagcttctactgctgaatgaatctagccaaacagtatgatggcgagaagggagagcacagcagtccctcctggtctggaaaattcaggtcaactaggatgcagtccccttcaagaaaactacctcctaggagcccagcccagaagttggcaaattctgagataggagagagtttcatctcctgtcagtgccctattttgctgctccaagtgctgggtttggagctacaggaagggataacccaaagctactggcctgggtaactaaaggatgaaactaaatgggccaggcatgaggatgttggaatatttatctaattcccccctgagagctcagtccaggcctaggagctgccct

SEQ ID NO: 342666 - DNA, 1000 bp, Homo Sapiens
ttttttttttttttttttttcatttcaactttttattataacatgagctaaatttaagaaacaaccctagtcttctatttcccagagctgttcaaagtctaaatgacaatataactcattatgaaaatatactgaaaagtacaagagctgatgtaaaacggtaatcaaggttccaggcatcatgggattagggtaactgaagaataaacccagccaggctgcaacagcaggcaggatgtgctggcttgatgaggtgctaaggccatcgaatgctcagaggaagccggattcacggtgatcatctcaacctgagaaatcgttccttggggtgatttctgcccttttttttgttttgtaagaaagaggttccttcattcagtaacttagttttcccttaataaatatttcaaaaataaaaccaatcatcatcaaacaaacaggagccacttttgtaggtaaggtaaatcacaggataatgtattgggataactctgtttttttaaaataaaaaagccttacatggtcagggattgatggagtggggatgacaaatgcacatttcagactttcatcaccaatgaaaaaataaagcattttcatagacttaaaactgtcattagtgcattcggcttttggagaagggatgaaaatgtaaaatacttctacaacaataaaatgttaatagaaatcgtcatgtgctgaggtcattttagtgagctaccattgtttgtttaaatacaagaaaagtaatttcttggtccaaattagtgaaatctttaaaaagattgcctttaaagaacattatttgaggacaatgttttttcagacacattctgatgatattcaaattcacttcataacaatcacagattaacctttaattacacctttcttaaaaagctgtcagatttccatttcttcgggagacattttcaccagtgtgttgttcgattccacaggttaagctttcttcattattattaagaacttcatacatatt

SEQ ID NO: 342667 - DNA, 1000 bp, Homo Sapiens
ctgaaaaaaatttattgatggatctgagaattttttcacacatgaatcatttctccttccaatggttattgatactgatagaagttccccgctgagactccctggacccatggtttgtgcctgctgggcatcccactatgctgattcctactctaaaagacacttacagcagaaagcattcacccatgaccattatgaaggaaatattctgtccctcactcaccctctggaagctaatatggagcagcagtcactctatccagagccacatgttcacagttctctagcaagcaggtcacaccccgtgggtcccctattccccgtgacccttgttgatccatcctcttcctgctcagttgctcccctgctcacctggactgcgggaggcatgggtgcgcccactgaggccatgctgaggagctgggatggaatgcaggacagggagagaggggagactgagctgagagggagcactggatcctgggaggtgtggatgcactgattacagtccaaagacattggcagcaacaaaggacacacaatgactgaaaacattaacgttaccttctgggatctctcagtgccctgagcgatctgtgtgtctacctacagatgggcaaagcatttttgcaccctggccccattcccagttctcccctgagaactcagtcctccttgaagacttggtgatgcctgtcaattgagctcccatttagcggctcattgtgcccaggggctcacatctgcaagttaaaattgcttttatcaacatctgatacaatggttctcatttcacataaataatcacagacttgactaaaatgaatatattattctaggttaatttttttccattcaaatgtttatactccatctacccagaacaattacagcagaaaaaataggcacctccaaagtcttcccaagaatgatgactttctgaaatgacacactgtacaaactggacaaatgagacgactgactgtgacaggggccgggg

SEQ ID NO: 342668 - DNA, 1000 bp, Homo Sapiens; identical to SEQ ID NO: 160330

SEQ ID NO: 342669 - DNA, 1000 bp, Homo Sapiens
ttttttttttttttttgtaatttataaatacggtttattaccatggttacaaactttcagaacaggcctctgagacattggactgagactctgccgaacatcttttggcatcggtgtcctttttcttctgtcgcggaaggcagccccggactgcaaggcctccagcagattatccatcactcctgtctcatcaccctcagtcttcatttctaataaacgctttttcttttgttggcgttcgagtctttctcgctctgctaattctttagctattctgacacgtttttctttttcctctgcttctctttttttgatattctcctttattgcttgcatgaatgtggttctgaagttattcaggtcagtaagaaagtcttccacagacaccttcttcacatcaatggcatagtatcctattatactctggtataacttttccatgttttcgtgtaacttcgaaagtgtctcatattgttcttttgcactgataacaaatctggacatctttgtcacaaacttgtcatgcaagtcctcaggagggggaaaggtttccaattccttctcaagctgttgaagctgccttcccatctgcctcaaattcttttccagcgtttctacagagactttactagctttgtctaaaggttccaaatcatccacaaaattcagtatatcagggtacttctcttcacatatttctaccaggaaatgaagtagcgttgttttctgatctgctgattttgtgtcctttagtttacagagagagctaaggttaaatccgaaggtttgagcattccgggagccagcattcatgtagtttcccattagcaatacaagttccagcaacttgctaaagcttttgctcttctttatctcttcgcaggcagtactgacagccatgatgtcaggtttgatgttgttcacctgctcttcaaactgaagcttaaagagaatagcactgagccgtggccgtagtctcttcacattgctcatcacaacc

SEQ ID NO: 342670 - DNA, 1000 bp, Homo Sapiens; identical to SEQ ID NO: 246562

SEQ ID NO: 342671 - DNA, 1000 bp, Homo Sapiens
ttttttttttttttttttcaagtttcttcagagtttttaattattattattattttaataacaacctgaatcccagaacttccagatactgtccacactccctcccctgggcagaggagaggaggcacctcaagggaacaagatgggggtggggtgtctgccggggagcctccgactcccccaagccgtctactgctggggggtcccaggagggagggtgggggttggttccctcccagagggggctccctctgacgccccgtcctgaagccctccctcctccatcaaggctggggatgatgaggagatggggcaggggccgggggaccaggccattactgagccttgaactcccaccccggggacacggggacattaaagctgcataggaagagggggcaggcggctgacgcaaggccgggcagccccaaaggcacattgtaagggaagggaggctcagacggagggcccattgggcgcagggggcccaagccgtgggacccccgaggagggcagctgagccagctgctccgggctggccagggcgcgcagcagcccattctcctgctccagcgcagcgttccgctccgccagttcccggatctgctccttcagcacctccacctcctcccggaccgcaaacatgaggtgggacttcaccaagtccatggcttgctcgattttgttgtcaatgccaaccaggcttccggagccactatcatcgtcgctgtctaggtgaccactgatggccaacatggagtgggccaggctgaacttctgagctgctactgctccgaaggggtctggagatttgtgaaccaggctggcatcgtgggtgaagtagagggccggggagctggggcgagagtcaagtgggggcacctgccccatctcttctggagcacccaactccatccgcagccgcatgtctacagctttcctccgggacagtggaggggtcctggcccctgagcccccagcctccgcttccaccctcaga

SEQ ID NO: 342672 - DNA, 1000 bp, Homo Sapiens; identical to SEQ ID NO: 160332

SEQ ID NO: 342673 - DNA, 1000 bp, Homo Sapiens
tttttttttttttttttttatatgcacacatagtttatttttttaaaaagagaatgctcatgacatattatttgtaataaaaaaaaaataatattttccaaaacaggaaagttaaataaattatgcagtcattaaaattatgttttcaaattgtccttagtagcatttgagagtgttcttaatatgtttagtccaacccattagagcaagatacaaaaatatataaaaagctaatttcaaattattttattactatatttaaaaataaaagccataaatacatgcaggaaaagactgaaataaacactttaaaatagtaatattatttaatatttgatgggatgattaattttatactaaatattttggggaattttataaattttctatagtgagttttttaaataaaaatatatatatttaaatataacacttcaaacataccaaagcaagaaattgtctctggccatcagatattatcttttccacaagcttttcttatgctctcagctagatactgtttctctctcctgtgaattcctagccctttgccttctatggctgtaaaaacattctactttatgttttgttatccatgtacttattccctttagcctattgtcctctactaggttgaaaaattagggaaggtaagaattgtactttaaatgccataggagtgcctggaatagcacagtatcttgcataaagtaaatgtttatgaattccagccacatcatttggagtttacatttgcatattccatcctctgaattatttttttacattttaattttgacttcagcttttattcatgatacaatcaataaaattccttcaatataatctctttgttgtccaagggtcaaatataatgttttctacactggaaaattaccaaggctgatcattatgtgaaacagttctacaccatattacatccctgaagcaagcagaaactcaagtgcttcgtttgcagagttgttttaagatttagaat

SEQ ID NO: 342674 - DNA, 1000 bp, Homo Sapiens
ttttgtaagcagctccatttatttgagtaaatatcttgtaaataaatcattggtaaacaatacaaaattaaatacattttcaaaagcttgccagtatacgcaaaattcacaaacatagtttttttaaaaaataaaatatgttcagagcacccttgatataaaatgcctgacccccatccttggacaaggccacctgaagacatcttatggtaggtgggtttctgtgggagtcagcgggggcctcctggagggaagggtttctactctcacctattacccatcccacattccatctgaattttgatccttctccaaagagctggtaactgagagggctagagcacgccaccaggcctagctccaagcacggggatcagggtgcacaattagggccaggagcacccagagtcctcaacacaagccattgagagaagccagaaatgcaatctccacacttccaaaccagcaactcagctcctagagcaactgtcttgagagaatgtgaggctttctcaccttgacacttaacactcggtttactcccactggtctgatactacccaggcacagaagctaccagaacctatttctaaggaagaagacactcgatctgctaactttcttttgatctgctttcctggagagagaataaacacagtactcggtggaaagcagacaattcactgctacacagtgcttcctttttccaatgcaaaataccactgagatagtgtggatatttctctagaaatcaagttagttcttcaaattaagggttcatacaactttaaaagactacaaaatgagacaataagcacatgacctggcaaagcatcccaaccaatgaaataatagaaattccataaattaagcccttgaccaacttaacatttctgtggtgtagtgcattaaaataacggatacactgaattctttcactttggtgcataaagtgaacgttgaagtcagcagcactcagtgaagaatgcctagtggcctc

SEQ ID NO: 342675 - DNA, 1000 bp, Homo Sapiens
ttttttttttttttttttttttttttttttttttttttttttttccaatcacctttctggttttaatggtactttttggccacggaggtccattaggtagagaccattaggtaaagagactcaagagtgtggagtggagtgtggggggttgtgggaggaggtggaaatagttgcaaaaatatctctctgtacacaaaacttagatgtcatagtggattttcccagaacatagcattcacattattgaaaacagcaagattcacttttcctaaaacacaaagccaagaacataaaaataaatatggacattctagagtcctgaaggcctagagaacacatccatagtctggactttagagcagcttagaggcagaagttctgagtcactgaggtccaaggtggagtccagaggaggctgggccccttgagatgaagtccacacagcaggcggaggcttttcaagtctttcagattcacagcagcaacttcaggaggctcaggccaggtttggaggatggaaaagggaagagaaccattgaagaaacagagattgtgttctcttactcctaggctaaataaggaagggttaggtggggcgcggtggctcacgcctgtaatcccagcactttgggaggccgaggtgggtggatcacctgaggtcgggagtttgagaccagcctgaccaacatggagaaaccctgtctctactaaaaatacaaaattagccgggcatggtggcgggcgcctgtaatcccagctactagggaggctgaggcaggagaatcgcttgaacccgggaggcggaggttgaggtgagctgagatcgcgccattgcactctagcctgggcaccaagagcgaaactccgtctcaaaaaaataaataaataaataaaaataaaaataaaaataacgaagcgttactccagaccattcccaggatgcctcatgcacattaggggtgccaccatccagttctggtggttggtaggaacgggaatg

SEQ ID NO: 342676 - DNA, 1000 bp, Homo Sapiens
tttttttttttttttttttaattcaaatgatcatattagtttattaaaagaaaaaatatccaaaataagctataaaataatctatttaaacatctgctgtttttcagtgattgttttgttaatgtggaagcaacattttctatgattaatctgctgttacctgttttgactgagctactacaaaaagaaaaatcactgaattgctatgggtttctgaaatatccaaaaaattaacctgaagcagggggaaaaatgacatcacaccattagcaggtattgtgtgaaacttctaaaaatgaaactgacatttatctgacttattaggaataaatactctctaatgaactctctaatgatcctctcaccctttctggaaagtgagaggcacgctgggctgtatgttctcccccatgattctgattaacaggatgctctattattataacctccctccctggttgtatccatgtcttattaatttttttttttttagagatgggggtctcgctgtgttggccagtctggtctcaaactccttgcctcaagtgatcttcccaatgtgctgggattacaggcatgagccaccatgcccagcctatgtcttaaatgcactgtatttccttgtactccagatccctattagtgaaatgcctattaaaacatttcgtaaggccagcatggcagtgtgcatcagtagtcccatctatttgggaggatggcttgaggccaggagttagagagagtagtgtgttataatcatgcctgtgaataaccactgcattccagcctaggcaatataacaagaccccatctttaaaaacaaacaaacaaacaaacgaacgaacaaacagaagtcttgtagtgcttccagcaaatcagcagaaaggaaaaaagagctctagagtaagaacagttgattctttttttaacaattagtgatgggggagtattcagatggccagctaaagagagaagttctagaactcagctagaccagtat

SEQ ID NO: 342677 - DNA, 1000 bp, Homo Sapiens
gagagggagtctcactctgttgcccaggctggagtgcagtggcgcaatccacctcctgggtttacgccattcttctgcctcagcctcccgagtagctgggactacaggcgcctgccaccacgcctggctaattttttgtatttttagtagagacggggtttcaccatgttagccaggatggtcctgatctcctgaccttgtgatctacccgcctcagcctcccaaagtgctaggattacaggcgtgagccaccccgcccggccatgtttttcatcttaattcttctattgattaaaatgtgttctgtaaactagaatatgatatcgaagtatgaagttcaagtttcttctttcagtttcagctgatagcaaataattaattataccagaatgaaaaggcagaactgctccaaatgcacaaaacttagctagcactaaaagaaatactgaattttccccaatagtatataatattttattggaacaaaaatatttagatgagtttcacagctatatattatcatataggtacctgctgagaaggataagatggataaactgacatttaacaatattttactatacatctaattaatctaagtaattctggggaaaagaaaaatatataaaagcatccctttttatataattccatattttttccagacaacatagaatcaagatacaactgtagatcattataattctaaacttaatattagaacttcaaacatgaaaattccagttatacctaggtatttgtcaaatgataatcaaatgtttgtcttatagtggttttatatttgtgagataatactccattgcttcattgctttatactgccatgggtccttctgtttgatgttctacattagctcagatatcctagtaaactcagttttgttttctttttcatctagttagcctttgggttatcacttctcgatacataatagagatgtagataagcaataaaaagatgacaaagaaatcatctagaa

SEQ ID NO: 342678 - DNA, 1000 bp, Homo Sapiens
tttgggcttagagttcttttgacttttggagcaaccgttgccttctttgcctttgggtgtgtgtgatgtgtgtctggggacacgagaagcagcactcagccctcacggtgggcacagaacatttcttcatggctttcagtgtctggcagaaactggctgacagtttgtccttagtgcaaagtaaatcggcacttttcttgcaggcctgctggttgcattttttgaattctggaggtctgggtttgtgatcacatagacattggtcttggtcttcagttttattgccctctgagggcacacattggacagtcctcttctgaaagccacctccacaggaagtggaacacaggtcccagttcccagtggcccagtgacagcacaggtgctcattgcaagacatggtggatgtgggtctttttgtccaatcacagaggcctcctggacagaacactcctctctcctgaactccacctccacaggacctggagcactggctccaaggctccacctgccacgcctcacagggctccgggttacagctcatgctcaatgggggaggaatgccggccaggaactggcagtgaaatggcctcaggttccggtggtcccggctgtccacgcactgaatctcgcgtatcttgaagcccccactgcagtttctggagcacttgctccagtttcccactttccagccagcacagggacggaggtggcatctttttgcagggtcaggtctctggatggccgcacagtcagaatccatctgggtgctgcactccacccttctccagtaggcccccaggccacatgtggtggagcactcgctccagtttccgacgatccagtgtgcagagccgtggccgtttgtgagctgcttgtaattggaggcatttagcaaaaagccctcagtaatcagacttgttgcatcctcctcagtcaggactggttcagaactttttgtttggttcatgttgtttggaagtttcaggtggttacggtt

SEQ ID NO: 342679 - DNA, 1000 bp, Homo Sapiens
tttcagaaacatatctgctttattccgtgaaagtaaatgtaacatgctgcacatacatttttccaatcaaattgcatagttgagacaaattcatttgtgctttgtagcagaactcacagtaggtgttcatatctaaaaactttgatttggaaatgccaagtcctgggcaagctcacctttgtttggagtgttagttaatgatatgcaccgccattccccttcccatggttttgctaaccgtgtacctcagcctgtaccgtaggggagcatgagctttgaattaacacaacggaaatgggaacaaatctagctgaacgtctccttcttggagagaagcggggaaaggctctcagtcttgttgaggtatccagccctcaatgaatagcggctgtgtatactgagttttgttggtttgaggattgtgtctgtagaggttaaaaaaaagaaagaaagaaaagaaggcacagttgtttctcaagtcgccattttcaattcaaccaacaaaactaaattcttccattttcaagcttcaggagggcggctccaaggcagcggggctctcttccagccccgggtccgcagaggaacttattgcttctgggaagggccccgggtaggtctgtgctgcgcactggatccctttttgcaggccagtctcttcgtggaattctccctgggtgctgaaagctgggcaagatctagtccgggcattgtcggggtgtcccactctctcactcacggtgctcaggggaaattctctctgcctccgcctctgcagtccatcctccttgtattttatggagtaccaggccagaaaaataaaaataaacccaacgaatttgaggccggcagccaaaccaaaatacacaaaacgaaacgacgtcacgttgtactcccagcaagaaccctgcacaccacattcctgttgccagagcatgcaggtggtgtcaatgactgctccaaagtagattggagtaggaatgtatgcaagtgttcgcaa

SEQ ID NO: 342680 - DNA, 1000 bp, Homo Sapiens; identical to SEQ ID NO: 160336

SEQ ID NO: 342681 - DNA, 1000 bp, Homo Sapiens; identical to SEQ ID NO: 160337

SEQ ID NO: 342682 - DNA, 1000 bp, Homo Sapiens
ctttttttttttttttttgataaactctagtatttattaaattataaattttgtaatcaaaaagaaaaatgcagaccaaaaaaacctcaaactataagactagacagcaaagcctatgggaacaccatgaagtgtgttacaaacattctgaaacataagttactggctgttttcatttccatttcaataactttactataaaatagttgttattcatctattttgaaatcccaaattcacatctattcatacattaaattatgtttcctgttcataatatcaaacatctcacaggtgccaaattttagtaatggtcttatgccaatccatgcagaaaaataagacacaatgcaggagtcagatgaggaccattaatgcacagataatacaaacacactggccaaaagaactacagaagtttttaaaaagtataaagtaaacagacctcaagaaaactgggttattactaaacagctctcaactattaacacccaagttccttacattaaataaatttctcaacagagacatgttagacattttaattatgagtctatccttcccataccccttcccaccccaactcccaaaatgcactactagggatgagtataatgttatgtgggcagaaatttacaggtaaccctttcaaccttgagcatggagctgaagacatttttatttaaacttcagttactgtgcactgtccatcaggccttctagatctgacactgacactcactgttccaccccctgctactgatcgatcagttcccgatcgatctgatcgatcgggtactgtctggtttgcattagaaaccaaaagtctctgttgggtcaaggagtgctgtgcaacaactgcagatacatcctcactatcactactggcatctgattcagtttcttcaatggaggtgtctggtgctggtaccctgcctgaagatggtgattcatgatcttcttctccttctcccctatgactcctttcagctgtgttgtc

SEQ ID NO: 342683 - DNA, 1000 bp, Homo Sapiens; identical to SEQ ID NO: 160338

SEQ ID NO: 342684 - DNA, 1000 bp, Homo Sapiens
ttttttttttttttttttttttttttttttttttttttttagacaagtttgcagtttattgagtaatggctggcttcacagatgttatcactgggggcggttgatagggggaacaggaaaatgctctcagaggttcccactgaagccctttcatctgccctgccccacccaccactgaagccagaggtcatgggagttgggatctaactacactctgtgaacttaccaccacccattccatccccaagcccatattttatttggactagccactgatgcccgggcccttcctcttccagggggtgggagggtggaggtggggacaggaccaaccctcaagaaagaaaagaggttaaggtgggggttttgctgaatgtctaagaaatgtcagtggaacaggctgggcacagtggctcatgcttgtaatcccagtgctttgggaggccaaggcaggtggatcacctgaggtcaggagttcgagactagcctggccaacatggtgaaacccccatctctgctaaaaatacaaaactagcaagatgtggtagcacacacctgtaatttccactactcgggagactgaggcaagagaatcacttgaacccaggaggcagaggttgcagtgagccaagatcgcaccatcgcactccagcctgggcaaaatagtgaaactccattaaaaaaaaaaaaaaaagtcaatggaacacaaaattccctgtcttaacattgtacattcggggcctagctgcccttgaggatgtcctagttacaccctctctgatacctgtggagtttaagcaccattcctaccgctgtgtcccttgggagggggtgcagtggaagctcttaaaggggaatgcttgctctgcctctgtggctttttgtttgggaaagggagttgggattggaggatttagatttgaggtcatgatgtcagagcacaccaggaactcccaaggctgtgcctgaagatgcccacgctgtcaagtagggtggtggg

SEQ ID NO: 342685 - DNA, 1000 bp, Homo Sapiens
tttttttttttttttttgtatagactaataagccaagagctttattgatgcagcaggcactttacaatgagcccaagagtgtccaccttctctgggaagacaggatgtctgtacaaactcttgggtttttttccacttcaaaaacacaagctctcccgtttaccacagcccttggatctgcacctgcccaaaccatccctcccccagtgcacacaggtgcatctgaccaacaccagccgccacgctggtagaccgtcaaaatgtcagttctgcagtactcggagacaaaggcatagactatcagatcctaaacaggatttaggaaacagacgattttcccctccaccttgaaaataaaatacatttcagcagatacatgtcctgaaatagtttacttgggagttcctaggaagatggtccattgtcaatcccttcttcaccagcctgggcatccagaattcttctcaaggtaacatgagtctttttattttttttaaacagtctttcttgctgtaagaactcttataatggagcctagtcctcctactgctaaggccttttcgtgccactggagtaacactgcgctgctattttctgtgggcttctcaaagcctttataaatgtacttcattaacaagtcaacgccgtttctgtccagtgactgcacagcctgctcaatctcactgctcttgaagtttgtgagcactttcagcaccacgccctgggctcgctccttcacagcttgattcttggtgttgacgggagagttccgcaaggctgcatggaatgcccgaagcatgtccccttgccgcaggagcccgtccacctcgctcgggtccgggcctggctccgccgccgccgccgccgcctcctcctgctcgtccacaaatttgttctcgtcaaattcgtcgatgtccacccggcggaagcgcgaggacagcgtgttccgggccatggcgggagctcggcgcccgctcagccggctccgctcgcggcccga

SEQ ID NO: 342686 - DNA, 1000 bp, Homo Sapiens
ggagacggagtctcactcttgtcacccaggctggagtgcagtgacacgatctcggctcactgcaatctccgcctcctgggctcaagcgattctcctgcctcagcctcctgagtagctaggattacaggctcctgccaccacaccccacacattttttgtatttttagtagagaacgggaattcgccatgttggccaggctggtcttgaactcctgatctcaggtgatccgcccgcctcggcctccctaagtgttgggactacaggcgtgagccaccatgcctggccccaaccagaacacttctgagcgtggaagaggatgctgttaattactcaagaccaaaaggcataaaaggagacatatgtccacccaagtgataaggcagtttgggaaactacatttcccagtatgccctgccccttgaaagttaaaaatcttaactggcacagagcaccctgggacacctgtggttagcaccatttaagaagtaaaaggtatagggttgggttctgacgtgaaggctttccccttccatgggacacttaaccagacacaggacacaacacctgaggtgaaatttcaatgggtattaagtctggggtagagcttctctctccccaaatctagcttccaaagatgtggagctggtggagctgtccattggtccactgccctgtttctcctgggtgctgcctctgcctcctcatatcaccagcgtccccattgccactagtctgtagggggattccgggctaggtgctcttcccactcgacttcaaccaacttatatagctccatggtggcctgggcatcttccacagaggaatgtccgctcttcccaacctggatatcccggtttagcagcttcttggtgagatgcttcagagacatggtggcattctccgggcagtcagccttccggttgaggggggggatatgggaggtgtcacgggtgagggatttggggtgaaagtactgaagggctttgaagtcgttgtgga

SEQ ID NO: 342687 - DNA, 1000 bp, Homo Sapiens
ttcaagagaattaaatcgtttattgattacacatgataatggatacacaagcttcattcccatctataattttatctggtaccattattcaatttagatatattgcataggatgtgccaacaatcacttttataaccattccatgattttgcttgggtaatcccttttaatggtgaacttcaggtcacaacagtaactatcagttcaactacaccaaggtttccgaagacaatggcttctccacccaagcaggttgtatataaattccaaatagaacctggcatcaccctgaaggaattctaacttcacactgttggggaaatttaccaagatggcttaagagtagactaactttacacagcacattaaaaaaaagacatttattcagcgtcacgatcagactgttacatttagcaatcaacagcatggggtgcaaaaaaaaaaatctacattaaaaccctttgttggaatgctttacactttccacagaacagaaactaaaataacctgttatacaattagtcacaaatacagtcctcgagttttttgcccatacacatgagtatttgtctaaaacatgtcttctttgtagcagctaggccctgccaccactgtgcttggctgagttcacaaatctgttgtaacctgtagcttccctgtcacttctctggctctcctctcctgctaagctttgtttcctaattaaaatcttctgccactgccatagctactgctgctgctggaaccgccatagccaccttggtttcgtggttttgcaaagtattggcctccaccgccataggggccagagcttctgcctccaaaatttcctcccttcatgggtccaaaatttgaagactgattgttgtaattcccaaaatcattgtagcttccaccacctccaaaattgcttccactaccaccgccaaagccgcctccgcctccgttgttatagctgtcatagctgccactcccgccatagccactgccctggtttcca

SEQ ID NO: 342688 - DNA, 999 bp, Homo Sapiens
ttttttttttttttttcagcaggtcatctttaatgcagaggaggagatgggatgtcactcgctgtctggaggcacgtgggtggtgtgcgggccctcactggccagcctctgggtggccccgcctatcccagtatgaacgtagccaactcaagccctctactgtgtctcctcgaggctgatactcacagcccacgaagcctttgtagccttcatcttccagcagttgaaacagataggggaaattcagctctccggggctgctgggctcccctcggcctgggacctgtgccacctgcacatgcccaacaatgggcaggaactcccggatgtttcctgtcaggttcccatccatgatctgccagtggaatatgtccatttgtaattggaggttgggtcttcctaccttctgtaagatggctgccgcctgctggggcgtgtccaggaagtactgggggtcagtgatgcgggtgttgatgggctccagcagtcccacgaggtcctcctgagccaaaaccccagctgcatgcctcaggttctccagaaaaacggcctccatctcagccttgactgctattcgatcagctccctggggtactcggccagccatcaggtggatcctgggacagcccagggctttggcataccgcacggcctgctccagtccctctcggaaggccgcctgtctcccggggacggcccccagccccatttcccccttctcttggtctcctgcagagtgtccgagccgggggctgaggaagggcggccggaaaaggagcaggacccgcgcctggagaaggtagggaggccgagctccagggcctgagagccggacgcgaagcaagagagagctggctgcccgagggcccggttgcaatgatgggacgcgcactttaatactgagtctttcctctgattataaaaatgctatctgttcgttaagcaacatttgaaagctgtatgaccaaataaagaagcacttttataccgccaaaaaaa

SEQ ID NO: 342689 - DNA, 399 bp, Homo Sapiens
ttttttttttttttctcagttatgttaactttattaataggctgcagtctcaaaaatctttcttttcatcatcagatgtttgcggaagttttggccttctagtgtgaacctggacctttactccatctataatatgattttcctgttgtagtgcattccgaagtccttcttctgaagaaaactgaacccaacccaaacctctgtgaaagccagtctccttgtcaaaaggtaaaatgcaccttctgacatggccgaactgtgcaaagtgttctttcagctgactcgacgccgcagtccaaggaattcttctcacaaaagcaaccggctgattgatacttctacgcagcgccgcagcacctcgcgctgctgaggccgccatcttcagactaaagcaccttc

SEQ ID NO: 342690 - DNA, 1000 bp, Homo Sapiens
gtattccaaactccaaaatcaaaaacacttccagtcccaagtatttcagataaggaatattcaacctgtatgaatgttcctagggaaaaaaagacagccaaaatataagaccatgtataagaactaacttcagtagacagaaagaaaaaagtaccaggggaagaaagagaccgcattttaaaacaactatacaaatttgagctgtaagaaacactgacattttctataagcatgctagagcaaatgggagaaattcataagacgttttctagaaaataaaactaatataaaaaaacttatcaagatttgtcaaggaaaaagaagaaacgttaaatataatggcaagaaaacattcctaccaattttatttatccaggcatgtcttaaatatggctgtttgttacatacagtgattctgcagacatgttgacatgacagtgaaatacataaatatgtaatgagaaaaggcttaactgtggataaaacaaagtcattacaattaaagactcgagtttttggcatttccagttgtagtcagggcactgaggtcaaatttaactacaaattttgcattgtctacattgaacacatgattcttaaaagcctcatgttttatttcagaacaggcctcaggaagttgcagactgtgcaggaggttgtttagggcacaagtcatttctcccaatattaacttataggcagtctccaaaacaggaatattcttcaagctgagcattgcttgataaacagcatgggctacagcaacaacctctttttctttatgataacgcaagaatagtagtttagatgatggtataaacagtttttctacaaatgatgatggcagtttcgtatttatctgttcaacaatcagcgtgagtaaattcaagactgagatgatataattggtaccacaagtctggcaattctccagttggtctaatccatatgtaatgaccatgtcacaatgtatagtcatgctaggatccaagctgccgag

SEQ ID NO: 342691 - DNA, 1000 bp, Homo Sapiens
aatttaaaggctttttattaggaaccaggggaatgagctgcttatccctctataacagtctagagcaggtcatcaggcccaggatggagagaggttatcaaaggtgctgtggtgtgctttgctgcacgtgcttagggcctggaaggaaaggtggtggcaacagaggttggcaggaactggtgttagtcaaaacaccaaaatcctgggggagagcccctctaccttccttctaactccacttgaggtgggagcattccaggagacagagaatgtgaccaggatgcagcagtgtcatctgaacccctggcttcgttcagtgctacttcacttgccagccctccactcttcttgccttttagtgattaggtatttgaagaactcatacacagaccatgcgatggctgtggaggggatctggtaaattactctggcctgcacccctcggaaataggcggtcaccccacctacttgatataccgtcctgaaggcactagccatgcctgtgatatgtcctgtaatgtgtgagttcaaagccaaggactcctgggtgttgagcagtgttttgcaaacgtccagtggggttgtggctgcggcagctacagctcctgcgcaagctccagagaggacgtgggagcttgggttgtaccgtctctgggggttaaagtgctcctgcaggaattcataggtcatgaagtgaatggcttggaaaggaacgttcatggtcagctgggtggtgtagctgcggtaaaaggccccggccccttcattttgccacactgcccgtacacagtctgtcacccggtggtatggtgagttgtacatctgcatcctctgcttgaccacttccgcagggttcatggctgcatcatgaagtaatgttgccacacacccggccgcacctgcaaacaagaaaacaactgccacatgtaaggccaagagagctgaccaactcactgaggtcccccagtgaaggggagtggctgtgctacactacagcggg

SEQ ID NO: 342692 - DNA, 1000 bp, Homo Sapiens
ttttttttttttttttttttttttttttttttttttttttttttttttttttttttttttttttttttttttttttttttttttattgcaaaactgaggtttaaaggacaaatacattatccatttaaaaacagatatctaagacaaaataactcaaacattctgaggtctgatacttgcttatgcacactgacatccacaactgctaccggtgcggaagcaacgccaggcctggttctgtatagtcacagccgagctgaacaccttagctccgacacctggatgtgttctagagaatgacaggctgagactgtagtttggtttaactactggctttgttgcaataatcctcgaataccacacagtggcagcttttggcatcataaaaatgggacataactgaagggaaggcttcacacatcacaaagaccgggttggttaatgactaaatctcactacatgaatacgcaatcttaaattactgtgcttatcagccatttctcgcattcatgtgtaggaaaaaccatggagacgtgtccctggagggcaggttgtaaactgcaacagttactaggaagtcagtcctttacatgctcgtaacatgggcgagctcttgagatgggatctgggtggcaggagaggttgcttttcagaggaaagctgcctgggacccagcatggtggagcagctttgaagctgagtcccctctgggtgcatactgggttccaggggatgatccttggcttgagggcaggctgcttgatggaaggggacgctccacaataagaaagaacaaaggctttggtttgtcctcatcctccagtctgtcccacacacctgccatctctgggttttggtggccccagtgagtggctgtggaaaaggaggagggccaggtgggtgctggcagctgtcctgcaccactgctggggtcgggtggagttgctggtggagttctgtgatagcagaattggcatctcctttctgcggaagcaccagt

SEQ ID NO: 342693 - DNA, 1000 bp, Homo Sapiens
tttttttttttttttttcactttaaaatctacatctttaatatatcaagtagcaagggacaatattttatttgtgatgactaaataatatttacaatgattttatgggcacatatatttacacttgtacattaaagtatttttgaaaaggaaagtcatatatatgattaaaataatgtatcaaaacataatagagaaccaaatacatcttgggccataattttaccacttctaaattcttatttttaaaaaataataaagataatttaactcactaccatttactaaaatgtcctagtcaacttgttgtggcatagtaaaactaagctgccaccatggtaacttacactcagggattttaaaaggcaacaaatatttaaaaaacttaaaagacaaccttttcttttgaaattttatttttttagaacacaaaagaagaaaacaaagagtttcatttttctgcttgctgaaagtacttgggtaaacttagctttaagatgggtcttctttcaaagattttaaatatatttttgaaagggtattggataaactttgaaaagcagatttgatcaacttcattttgcttggttttgaagtgatttatcttagatttccttttgaaatatttcttccaaattttctaaccatgcttggatttattttacagatgtttcttttatgttccattgttggtttgttttcttgtaagtgcttctcacttgaattatcttgtcgaacacgtttggcaaatccagaatttacgtctgcagttaacgaactgtttgatgtagaacttgttaatttccgtttccttttggcagcagtagtcattgccatgtaggatggcaccatgcttggtacaggcatagaatgcttagttgagaatgaagaaggatcaagccgttgtaaaatgtctttgttatcatttggtagtgattcttgttcgggtaatttacacttcgagctcttgatgtcttcacatatagtaaatgtagagtcca

SEQ ID NO: 342694 - DNA, 1000 bp, Homo Sapiens
tccaggtctccgaaatggcaggacctctgccagactgtgcctgggaggagtttgggatggttacagagtaagttcagaactctcagtgtatagtaaggtgtgaggaccacttgaaggctttgccacattcttcacacttctagggtttctccccagtatgaattatctcatgtctactaaggcttgagggtgaaataaaggctttgccacatttatcacactcgtatggtttctctccagaatggattttcttatgtgaagaaagggttgcagaatggttaaaagctttgccacattctctacatctataaggtttctctccagtatgaagtatcttatgtgtagtaaggtgtgtggataggtgaaaagctttgccacattcttcacatttgtagggtttctctctagtatgaattttcttatgtttaataagggttgaggactggttaaaagctttgccacattcttcacatttgtagggtttctctccagtatgaattttcttatgtttagtaagggaagaggactggttaaaagctttgccacattcttcacatttgtagggtttctctccagtatgaattttcttatgtttagtaagggatgaggactggttaaaagctttgccacattcttcacacttgtagggtttctttccagtatgaatgatctcatgtttactaagggttgaggatgcaacaaaggctttgccacattcttcacatttgtagggtttctctccagtatgacttctcttatgtgaactaagggtagaggagtacttaaaggctttgccacattcttcacatttgtagggcttctctccagtatgaactctcttatgtctagttaggactgaggaccaaatgaaggctttgccacattcttcacatttgtaatgtttctttcccatatgaatgaactcatgtctactaagggttgaggatgcaataaaggctttgccacatttattacacttgtatggtttctctccagtatg

SEQ ID NO: 342695 - DNA, 1000 bp, Homo Sapiens
ttttttttttttttttttttttttttttttttttttttttttttttttttttttttttttttttttctggttagtgggggaagggtgagagctcagcactcactgctttattatcacagtaggtgacaaaggccgcagggagagggggaaaggtccagagctgtggagaaagaaggggctccctgtctccagggtttgtttaaggttttctccatggcctagggcccagccacttccctcactggcctcaaagccctggagttgagccctctaggcagtcaagggcaggcaggagatgggccagagaggggaggatgtgttctttaggtacagaatccctgaccacggggtccagtgcctgtgggccaaccaccaggaagctgtgcatgcccacagcccgaggcccctggtaatcgcagaggtaattatccccaacatgggctgccactactggttccatatgagcaagccgcaaggcctcctggaaaatgcgggggtccggcttgggccagccagcagcctcggaggtcagcacaaagtcgaagtgttcacgcaggccaaggccccccaggatgccctctagccgtcggtcaaagttggagatcactgccagtctcagaccccgtgtgcggcactccctcagggtgtcctcagccccatccaacacctgccaggtgcaggggtggctgaagtctttataaagctgttcagcgatgggggctacagcctgagcatcctggacacccgccaggtggaaggtctgcaggaccacatccagccaccactggcgggaggttaggccgtggctcaggccgtagttggggaagctgtggctctgagccctgtatgcctgcctgaagccttgttccagggctgagggctccacctccagcccatgggcccgggccttggtggcataggcctcccctaaggggtggcggagcctgagcagcgtgtccttcacatcccacgtcagcagtcgtatctgcagccggtgtgc

SEQ ID NO: 342696 - DNA, 1000 bp, Homo Sapiens; identical to SEQ ID NO: 160342

SEQ ID NO: 342697 - DNA, 1000 bp, Homo Sapiens
ttttttttttttttttttaaattcaaaaatgcctagggtttattggaatagtcaggtttatcagaaatcatccaatataagcatcggacatggggaaaacgacaaaaccaaaactggaactaattaacaccttgaaaatagaaatacattcctgtgggaggagaattctatgcctttgtcactagattagaactggggcaaagaatctgaacaacttgtgtaggcctaaggtgtcttgtgagatccaaatccttattaaaatataggcagcattctagctgcctatttaggtacaaagaaaatcaggttaaaagtagcagagaacattattccatttttttttctccgtaacctagagcaggggttagaaaactttttctgtaaagggccacacaggacatattttaggctttgcagaccagccagtctctgttgcaactattcacctctgtcatcctaatgcaaaagcagccacacacaatatacaaacatatggccacagctgtgttccaatgaaaccttatttacagatacaggtggtgggcaaatttggcccacaggcagtagtttgctgacccctgacctagggtaaagttcaaccaaaatctgttaagcacgagatatacaattctgccattgttaagctctgtgtttaaacagtcctctcaattgctccagggttggtttctgcctttgaaaaattgagtaggatgagatgactatcaccagcatctcttctaaatgtcagctttgatgatgccaagaaaaaagcattgctggcttcattgatcagttactccttcattgatgagatgacagttcttgtggtcagtctggttgataagtagcttgccaaattgataagaatttctaactagcaagtagcctgtttgttagagacaatcataggttttcaagacaatatgaagctgaagaattttggctgaagtagcagctgaaacaggtctgtggttttaggaggcttgacttgagcagtgat

SEQ ID NO: 342698 - DNA, 1000 bp, Homo Sapiens
ttttttttttttttttcgggagccttgctttattctgcctcgggtcggaggctgggggagcgagacctccagtgcccgtgcggctgggggagagggtggaggggccacttagatgtaggagtcatcaccaccgggcgcatcgtagggacccccacccctccccgcgccctcgccctcatcgccgctgccggagtcactggcgccatccacgtccagggtgggcgcgttgagaacgaccacgtctgcctccgtcccgatgtcctcgccaaaccagacagccttgtacccgccctctggccgccgctccttggtcaggatggacctcaccgccgtggggcttccgccagctcgggccgctgcggggggctcaggggcaccgcctggggaggcagggccggggggtgcgggctctgcgggcatcggtgcctccgcgggcttggggtcgtgcgtggggctggggacgggcgcccagttggccttgtggtcagggaggaacgcctggttgtcaaagccttggggctggggctccggagctttgccagagcagcacttgagccgggggccatagtgcttgtggacaaggacggcgaggccaaggagagccagcagcagcagcgcacccagcaccccgcccagggccgccatatccaccaccgagaagcgcttgtcctccgaggggccgccacctgtggaggggggctcctgttcggaaacttgtatctcaatgactgtggttgcggtgccagaggtcaccgtgttgtgggcctcaacctctgcgtagaaggctcccgcctgtgccagtgtggtggtggtcagcacaacctctccctccatccggaagtgtgagtggttggtaattcgatatgtgatggccgagttgaggtccgagaactccgggtcctgagcctggatcctcagaggctgagaaggggcagctgcatccttgaccacaacgcccgctccagcgccacgcgccacggtgccacgatacaggctctgg

SEQ ID NO: 342699 - DNA, 1000 bp, Homo Sapiens
tttttttttataaaactgttgcatcaagagaaaggttgtgttttattttctgaaatgagcacaaagtacacctttcacaataacactgaaagcaggtgcaaagactgacagtgacctttgactaaaggtagctttgtaaaaagaaaaataccaaataaatcagtgccctttctgattgttgtaaaactggaggtggggaggggctgtttgttacataaaagttggtccaaacttacaaaaaaagcacaaatgtgcatagttcagaagatctgcaagagggccataaaaggcttatgcccctaaaattagcatccacttaaaactgcaagaatacaaaataaaattgttaactagaatttgtgaagatgtacaatcgatctagtttttagaacagcatgaatttaagcaaaggttttttttgtcttttttaaactattgtatgcaagacccttctccacataaaaataaagctgttgttgaattattattattcaagtctcttggattgctgccttaaattgcagctagaaaagtctttccagataaaaatgatgtgcctgaggaaaaacagatactcagtatggtaaccctctgcctctgcctctgccagttgatgtgctaatatgtcccctgtatccttgtgaatatccaggtccttgggcaggagaagtccaggtctgtccatgcatgaggctggggccactcggattttcctgtaagttaccaccatagttatagttgtgcatctttgctggcaaaggatgagtactctctggccccgtggaagggtcactgctgtttgccaggactgcaataggaccatggctatattcaaatctatggtccttgtctccactaaacaacatgggaccagcattgaggtaaatgtctccatatccagctactgaactgggaaatgactcagaaaaggcagaaggctgaggtggaccaccagaatgagatgaagcagtactgtagttatccaaagactgaatatctg

SEQ ID NO: 342700 - DNA, 1000 bp, Homo Sapiens; identical to SEQ ID NO: 160344

SEQ ID NO: 342701 - DNA, 1000 bp, Homo Sapiens
tttttttttttttttttttttttttttttttttttttttttttttgaagcaaaaatattccatgttttaatattctgtcacgtacagattttttaaaaatgtaactgaatatttaggtaagtctttaagagaaattaaaacccatgaaataaaaataccacaaagacaatgtcaacagaatctgaaagttgtttaaagaaacaatccttaactagaatatttaacttttggtttacatattagtagtagtattaactataaatgctgtaacatcttgccataaccaaacataaaccaaatgactgagggaaacataaatcaaatggctgttattcatttttggctgttattcatttttgaataccagttaatattactgctttcaaagttgttcaggagttctgattttgacagactattttcaaataaaactgcatggaccaaatagaaatgttttttaaatattgttttaactctatcgtcttttcaaatctcttacttctttcggttacagttctttgcttgaccttccctttttaaagatctctatgttaaagaagcagcttaggtattctgaattccatcccagttggtttaagtgagtataaagaggcttatcctggggattctcactgtctttctaaattgaaaaattagttactctacattaaacaaagtagaattatagtcttttcaaaggcctgtgccagataacacaaaaagtttgcttacataaaaagtttgcaaaagcactgaagctttgctagttatttgttgtgattcagccaaaccaattctcttgtcacattttagggctaacccttgagaaaggtctatccagttgtgagggctctgtctgactaggatcttacagaaaacaggaatagctgttgagcaagaaaggtaatacatgaaaagagacagctcaagactgcagttacatactatatcctgttgccctatgatgattattactaagagagtttttacttttgcagaa

SEQ ID NO: 342702 - DNA, 1000 bp, Homo Sapiens
atttactgaggcttttgcagccgtattcgcctccccagaggaagcaattttccctccatgaaaaattcacagctttacaccacgggcagtcccagttccctggcctgcgatatactggaggtcttctctgctgatggagttcggagtctctcctgtctcttgggggctcttgagggtctattccctgggcctccacatctgaccacaggctagcatcagaggccccccagttgaaaggcatctgagttggaacccgttctgtgacctttgctggtgaagggggtatattgggtatggctgagaaggcggacaaagggcatgggtatgagtatgtgaatgaggtagggagctggacaggaagaggctccagtgagactgtggacccaagcccagagaagacagacatggctgtttgtactgacctgagatctttctccctctgccccgcaaaggtgtaatttgcctgctacaatagctccgaggggctgcctgaagcctcctcccagcccctgcaagacctctgcgggggcaggccctgcctctgcatacctctcctctccttttcctccagcagcaccagcagcagccaccgcctccttttcctgctcacctgctccttctgtccaatcccctccggcagtggccaggcctggaaacactgtagcctggccctgtccctggggaggtgccagctcggcatggaagagcttccatctcagcatgtcccgctctctctgcacctccgcaaggctggtctcggttagctgcaactggaaggtcgcctcattgcattccatctcctgctgttccttgagttccgtcaggtttgaggccaagaccagcgcagctgatctgtgcagtttggcaaagccttgcagccactgcaccctgcggttttgtaactgcccctgcctgtgggcaaagcgcacacccaaggccaggctgccccaggtgcaggcctctttgacctcgctgggcacctcgctgtcctccaggatgg

SEQ ID NO: 342703 - DNA, 1000 bp, Homo Sapiens
ttttttttttttttatacatgcttcggttctattttgcatttctgcactcaatgaggtttttgcagccagattcccttcccacagtcgaagcaagtatccctccgtgaaaaattcacagcgttacaccaagggcagtcccagtcccctggcctgcgatatactggaggtctttgctgatgaggttcggagtatctcctgtctcttgggtgctcctgatggtctattctgtggggccccccatcagaccacaggctagtatcaaaggcctcccagtcggaaggcagctgaggcggaactggtgctgtgactgttgcttgtggaggggatatagtgggtatgtctgagaaggaggaaaaagggcttgagtatgagtatgagtatgaggcagggagctggacaggaagaggttctgatgaggctctggaccaggggttcgtggttccagagaaataagatgtggctgtttcgaccgaccggagatctccctccttctgcccccaataggtgtacttttcctgatcagcatctccaaggagctgcaggaggattctctccagcttctctgtggtctccatggaggcagccctggcctccacgtgggggaactgggtctccatgggggcagccccagcctccacagggggagccatggcctccacaggggcagccacaacctccacatccctctgctcttcttctgctccttttcctccagcagcaccagcagcagccaccgccgcctcttcttcctcctcagctgctccttctgtgcaaacccctccggcagtggccaggcctggccaccctgccccctgctcccactcatggggagacaccagctccttgtctctctctttctgcacctccacgaggctggtctgggccattcttagccgggaggccgcctccttgcgttccgtctcctgctgctccctgagcttcttcaggtctgatgccaaggcctgtgcggctgatttgtgcagtttggcgaagccgtgc

SEQ ID NO: 342704 - DNA, 1000 bp, Homo Sapiens
ttttttttttttttttgtttacatcatattttattttattacagtcaataaatatacttttatatatgaaatcattatagaatacatattttaaggcactaagtctcaaaagtgaaggcacctgttatactttgctctctaatttgacacattaaaacatgagaggtaaatctgccaatttattttgagtttgcaagcttacaatttaatagaataaatcaggtagcttcagaaatcaactaagaaaattaacaggctagagtctgaactaataatcttgacatggtttgattatcacttggtttattctgattactcatttaccttttcatttatgaatctaaactgacaattccacctttagaggtataatagagctattaaccgatgagacacatctactcattctctgtaactctggacatcgcatcttgctttaaaatgcaaatcagtcatgtcttgagcctcttactgagcagtgaatgtgtatccgtgcacattccatttctctttctgctgggattttctttggagtcagtggtgctgtccctaagcagttctatgtgggcttctttcagcatctttgttttgcatggagtattctcagaggtcacactttcggttttggttcccatagcttcttctaaaactgttagaatcctatcaagttggtccaccatgaactttgcatcttcttcagtgaagcacataggtggttttattttaagtacatttctatgaggtccatcggcactgagaagcactcgtttttctttcatcttgtagatgatgtgctgagcttcagctgtggcaggggtccttttcagatggtccttcactaaatcaattccaataaaaaggccaatgcccctaatatctcctatcaaagtgtgtttagccttctgttttttcagtaactcagtgagataattccctactctcttggcatttccttgaaggtcttcattttcaattatatccaggacagccaaaccaacag

SEQ ID NO: 342705 - DNA, 1000 bp, Homo Sapiens
tacgttaataagctttaatctaatacttcagtataagcgctgaaagtgaatatccttttgcttttataaaaacatcactacaataaactatcacttatatccaaaacacacaacaatttcttaatattagtatacaaatttttcttagtatttcgtaggtagttttattttttcttaatttgagtcaggatccaaacaagacccacacattccttttggtcgacatgtctcgtctcatttaatttatatgtcttctatttttctttttctctttttttgggggtgatacatgtgacaaattcatacactcatataatttgtaaagatcaaatcagcgtagttgggatatctgtcaccttaaatattcgtcttttctttatgttgaaaatattctaattacttttcttcatttttcttttcttctctctccctttcttcctccctctcttctttttatttcatttttttcccatttatttgttatagaagccaggtgatttgccctatagaactttttctcagtttatgttttgctggttgcaatcccataatgttatttaaacaaattccttttctccatgcattttctataaaacaagtattcagttagaaagacttgaatggattcagttttaacacttggggcatggataatttgtaggtggtattgtacacttccatcaggagacctctaatatttggctgctggtttttgtcaattatttaaccagtaggtgtatcatgaaatatccatacaaatttgtggcttcctatttcttttattccttcttcatttattgcaagaattattctcatataaactaattagtaactcaaagacacagttcctacaagaaaagcaaccttatttcctttgagaagggaatggtatttagagaataaaacctctctgcaaggagtgcttattgctaaggggttggtaattatttcagtgaacagacgtaggaaatatttatctttttttaaaggcagagtttat

SEQ ID NO: 342706 - DNA, 1000 bp, Homo Sapiens
tttttttttttttttttttcttgcaactgcaattttattttcttttgtgaaaataaacaactgggagtttaaattgctccaaaaaccataaaaacaaaaagaaatacacacagaagaagcatgtgaggtgatggggaagggaacagggtctctagaactttggcagattgtgctggcacggacccaggtgacaggagccagaccatggggctggtcccgcctgccactctgggattgtgaagggatgatcgccactggcaaggacggggaggaacacagacttcttcgctgaggaagtggcaggcaccttgagtccctttaaatgcgggggttgggaggaaaccatttcagaggaccgctttctccactgaaagctggggctggcgagttcgggcccactgagggaggggacgctggtggcagcaaatcaggccaagatgtcttctcacatggtgatggcctcacactgggcagaggacagaggacgaagaagaacccacggtattgagcagacgatgaaaacttgggctgggtaacaggaaatgtcacaatggcagagctgcagatggagtcggggaagctggggcaggcggcaggggcgagaagagacaggagacagaaagtgcaagagaggtaagagagagaagtgccctctgcccaggtccatccaccacagcacctacaggacgaatagcacgctacttttcagttctctttcttataaagatttttttttgttgttttgttttgttttttaaaaaagccttaagatcagctactggttacatctacaaactgtaaagtgctgttgttaccagccactttacagaacagtccagagtggtcaaatattgaccaataaagtctcctttttctttttcttctgaatcattactactcaatgagtcatgtgacagcctgcaggggtcggggggagcttagtgggcagacttggtgaccagggaaagaggctgggcctgtagcaccgggagggcctggt

SEQ ID NO: 342707 - DNA, 1000 bp, Homo Sapiens
cctgaaatgtaaattgtttttaatatatttaagagcacacagaagtcttgatttataaaaaaataaatatataacatgacaaatttactgatgatcctggagctctgaggtcaaactctttaaatgatcagtgaaaacataaaacatccatgatctgttaacacacacaggagcatattccagttgtaaaaaacaaattccttgaaggctcagaacgaacaaaaatcagtctttatggcagaaagcacatccaaagctaggcaatgaagttcagcctgggccacgtgaacctttcaccagccagcctataacctatggagccaggacaggaaagcatgatccttcagctcatgacgccacccaggcttccagacaactgcagaatgaaagagtccctcagaggctccccagcccctgctgccatcataaagcacgggagggattgttttgtccttagcggctctgtcctaaatttgagagcaggagactgagaaggttatgctcattaaatattgtcattgtaacacggaatggaaatcatgatccttgcccatgggcactgagctgaaagaaagaggaacctcacatgaggctttcctagagaccaggatgttgggtgagtgggcgtgcacttctcaagtgggcaaggaagaactgcttttctccagctgacatgctctcaggggtgaagaagtttagcttaaaatacctgatggcgctgcataaactggggatttgggaactgagtttttagctctgtgacacacaacataaaaaacaaaaatccagtctcattagctaaattcggattaaaatctgaaatgtttttatggagttgccaacaggctggaatgtacctgatacagtttaatctgcttttatttctttggctgtcttccaaaccactttcttcctgtaattcttaagttggctagttctccttcctcagaaaaattacccctaagaatcttcctaatagtgagggtgtacttccgaatag

SEQ ID NO: 342708 - DNA, 1000 bp, Homo Sapiens
ttttttttttttttttgtattgagaattatttattgccaaaacatataacaaaaaaaactttttagtattaaaaaaaaatccaaataccccatcatcttaacaggaagggattttcatttatttgcttttctcttccaaacttgcatctgcagacacttacttaacaataactaagtgccaggcactttttaaagttgctttacatatattaacttagaaaattctcacagtaatcctatgaggtaggcaatgttaacatgcccattttacagatgttgaaactgaagcccatgagtttaaataactttcccaaggctgcagtgctatacgtggcagtgccagggttcaaactgggttagtttgtctccaatatctgtgcttttaatcactatgctaacatgtctcttatttgtgaaagatgaattcagagtattattgcagttgtaacatatgtgttctacttttagggggcaacattttctcatgaaactaaattgttcattgcttttttaaataactacatattttaccatcaagttgatacacatcattttacttactttagttacgtaatgctggactttgaaaactgtttttagtgtctgtatatgaaaatattgcaataagcaaattttgcattgcatatagcttctcttccttcttttggattttatttcctaatgctaacatttcccaaaatggttaaactggcttaagtatatatatcacattactgatatataatgctccatactgctttttaaatttcatcattatatcttaccaacaatgaaagaaatgctcagatcttcctaaatcaatacatgtctacatgccagtcattcctccccaacacacccatatttaactgatataaaatggtgaaggatgatttataatgtgggatagttaaaccaacaaaaattaaaattttcaaatgggcacaatgttttgttcctccagcaacagaaaatgtggagataatcctattatttgtca

SEQ ID NO: 342709 - DNA, 1000 bp, Homo Sapiens
tttttttttttttttttttttttttttttttttttttttttttttttttttttttttttttttttttttttttttttttttttttttttttttttttttttgtgaaatgagtcctttattttctctacttttggaagtttttccaggggtgggggaagaatggtgttggggatcgcggttgagagatgcccagcaactctctagaggtgcgggtgaggcgtgtgcacttccttctcctggctggggctggtgctatgttttgaagaagctcctgtggctgacattcatctagtctaggatgtcgccacattccaggttgtccagttcgctctgcatgtggtcgatgtactgattgatctccttcacgcgcttgcggttcctcatgatctcatccttgtgaatcctgtctattaaacgtgtacaccaagagttgattctggtcaccagctcatcttctcgattgtcaatcttcaggaggtggatgtcgtgcgatgccccgacagcattaacaatcgtatctttatcgacaaaaagcgcgcgcaggtcgttaggcaggtcctcgtccaggtcgccctcgacaatcttctccagggtgctgatagagatctccaggagcttctcgtggtggtgattctccaggtcccggcactgagccatcaggctttggacattttcgataaacagtcctaccatgtcaacaatgttcctttcaaacatgtttatagtctcctccagctgctccaccagctgcatctccagcgtcatgagcgcatcgaacaactcactgatgtcagcactgcattctaggatcatcttctcaatgttgggcagttccaactcctctcgaatggcacttaaactcgacaagtgcttctcctcgaatttggcaatcttgcgtttgccctgctcctggttttcctggatggcctcacggacacattcactgaaggtgtcaagctctgttttccgcttctcctgctgtttcaggccatactcaaaa

SEQ ID NO: 342710 - DNA, 1000 bp, Homo Sapiens
ttttttttttctttgtggctaagctggtttattgaacttcttgggggaaatgtaacagtgacactattccacaacaaaattacttagatttcatgaggaaacatgtatttgcaatatactttcaataatgcattgttattaatagcgaactacattagattctggggtagtttcctttggtgttctcaaattaagacttttccaaaacatgtctgatattttaattatttattttcaattaaaggtcatagttaaaataaattctacagattttttaaatgtgtgatttgttctttaaaaattagtaattagttgttagatagctatcattttggaagtgattttgcaacagtgaaatgttttataaatattttaagatattgaaagctttaaccccattcaactggtatgttttttaaaaataaaaacatatatataaaaaattaaaacaaattgttacaaatgagatacaaatattttaaaactaataaatattacagttaaaaaataagtcctttcacagaactgtaaaggatattacttaattccttacaaaaagaaataaagttactctttttaaaaccataataatagtaataaaaaaccataaatgtgcttggaaagtctataaactttcttcccccactttagaaaatattttgaaaagcgataaacagattcccttctttaaaaaaatgttgttacacccatcatagttactacagctgtcattgttttattacaaaaatagttataaatcaaggttaatttcgatacaagtaaaacaatttttaaattccagcatgattaagaaaacatgatctccctaaatgcaaataaagccaatttgagctctaatacttaaaatggaataatcacttcctataattattattttcagttagttcatttaatagaattactttgtctttatagttaaattatccaggtaggaccaccatgatgattaaacaaaaatcttaaactagattagattaca

SEQ ID NO: 342711 - DNA, 692 bp, Homo Sapiens
tttttttttttttttttaagtgtctcacgcttcatttaatctgaagaatattacaggctctccgtcttcagatataaattatttataacgttacagaacaagcagcgaattcaaccacttaagaactaaggaagtctacatggtgttaattgctggccacagtcctcccgatctggttttttaaaaaagtcccccgggcccccatttcagtagacgtgcaccatgccgtagaggaacgtccagaacaggacgtaggtgaagaggcccccgatgaggcctcctgtaaagagaggtctccgtgatttgaaatatttgttccacctccttcccgccttgagaatgaggagcagggagagcaggacggaggcgagcaggtagaagatgaagccgtagaggccggtgaggccgaggatgccggccgtggcccccgacagcgctgacaccgaggtccggcaataatccaggacggcggcgttgccccgcacggccgcctcgctgatgaacggcggcccttcccgcttggccaccaccgcggccatcgcaccagcccgggctcggcctctcgctttctcgcggaacaacgcggagctggaacacggcgccggacacactacttagcgttccctcagacgggcagtggaagaaatgcccgcggcgccatcttgctcggaagactgccgggaggtctcggg

SEQ ID NO: 342712 - DNA, 1000 bp, Homo Sapiens
ttttttttttttttttgttcattaaaattttatggagtctaattgtcagaaaaatctccattgtatgacccaatagcacatatatgtatgtaactgaaactctcaatattttgctgacatcgataatggtaagttaataaatatatctcagctatccaaaacaatacagtggctcaagttaatccagtcttcaaaaataattttctcttttccattccaatcattttgttctcccacggacattaataaactaggaggtctttgtggttgcctttgtggccaggtcagggtaaatgtggtttcagacagactcgaactctctttgccagtctgagtatctctgagccagattctttgcggagggcttggtgtgagttagcacatccagaaagtcggcagtggttactatatccaactggatcctgggtaagtcgctgctttctgactggtgattttcaagtgcatcaaagatcttcctcacgggccgcatggctgcttccctgcagacgagcttaatatctgagcctgagtagccctcagtctcctggctcagcacactgtactccagctctgtgtgcagctccaaggccctgctcttgctcacaggaggcagccagtggtagatcatggcctgcctggcctcccggctggggagatcgaccagaatcctcttctccaggcggcgtaacatggcacagtccagctcccacggcaggttagaagctgctaagacaaatacgagatcttctgagcgtgccagcccatccatctgcaccagtaactctgtcttcatccgcaggcttccttcatgttctcccccagaagctgtgcctctctgactcatcaccgactccagctcgtccaggaagatcgtggatggggcgtggtagcgggcaagctcaaataacacccgaacgagtttttctgaatcccctctccatttgctgacaatggtggatgcagaaatgttaaagaaggttgttttacattcagtggccac

SEQ ID NO: 342713 - DNA, 1000 bp, Homo Sapiens
tttttttttttttttttttttttttttttgttttggcaaaaataatttaatattccatctgggcagcgctctgaggtctgcttgtccctccctggcccctgtgccctacctgacccacccagggaccaccaccctgtccctacccaggcctcggggtgggggagtcagaggcccccagaccctgtgtcccattcctagtgaagctgaagccaccataacgtcagcctcttcccagagccccagctctgcccctggcttccctcgcgatcctcccctggctcccctcgcgatcctcccttggcttccctcgcgatcctcccctggcttccctcgcgatcctcccctggcttccctcgcgatcctcccctggcttccctcgcgatcctcccctggcttccctcgcaatcctcccctgtcctgagccgggcatcccagagcctcccgcagagtcccaccccaagcctggaaacttccacgctacagccctgcgccaggccccgaggagcagtcaggggactcagggagtcacagcacaacggcagctcctcggtcccagacggaggagggggacagcaaccgtgcgcccagcaagacacaagcgatgacaccgatttacacacacccggtttagacgccaaagctctgcgggggaggagcggccctcaagagtcctccgggagctccgggtgagggtggggccctaggagggggccccgcgcagctgctccaggccgtccgcgtactggaaggcccgcccggtctcgtgctcatacatgtccagagccacctcgcagctctcacgcaccacgcgctctgggtcgtccgcgtgagcctgcagcgcggccaggcaggcgggccgggcaatggcgcccagggcctccgcgcactcgtgccgcaccatggggttctcggtgcatcgggccagggcggccgccagctggggcaccgccgcctcgtgctgcagctgtcccaggacgtagccgacctcgtggcggaagag

SEQ ID NO: 342714 - DNA, 1000 bp, Homo Sapiens
gtttttttttttttttttttatgggagtagtatttttattattccaattgcacagaggaaaaaaaaagttatgcatagaaggttcagtaacagctggcaaattgtataccatttgaacccaagcagtttaaatatctttgttttttttactagtgcatcatatagctttctggatgagtctgaggtttttatcaactatgataaggactggaaataggtgaaaagatatgaagggagagttattaagatcaattttcatattttgagtttgaatttcctatcgtatgtccaggtggaagtaactggttaaataattggaaagagagagaaaagggaattaaagaaattattgctataaagatactggttgataccataggaccacagacgcttgctcagtgggagagtaaaaaataaaagcaagacagtggcaaggatgaaagcagtacagaccactttccctcttgaaaataaataaacacatgcaagcattgaaccttcaaacaacacaaaccccataaactcaagtatgtagtctctatttccgattatgccttttgtaactttttgttctacggtgagaaagattatttgcctggcctctcaaaaccattgccttattgtgaagaactgttctcccaaaactctagctccaaagagccctgggtttttctagaaaattagcattgctgaggttcccatatttgctaaaattggaactttaggcattcaccttttaaaattattgtatgttttaacaggaaagtgatactgtcaaaattagaagcaaaatggtttgtttcttctaaacttttctccttctcctgcagcctggccccctcccactatcttcttgctgcaaaccaactttgccagctgtagtagggagagaatcccagatggcaatagcctgagtgagaaaaaaatgtcactacgtgacatatactctagcagtttcactcagagggaaacagtaataccatttcactgctggtattct

SEQ ID NO: 342715 - DNA, 1000 bp, Homo Sapiens
ttttttttttttttttttttgagacagggtctcaatctgttgtccaggctggagggcagtgtcatgaccatggctcacagcagcctcaacttccctgggctcaggtgattcccccggctcaggtgattcccctcacctcagcctccagagtagctgggactacaggtgcatgccaccacgcccagttaatttttgcatttttttgtggtgacgggatttcaccatgttgcccaggctggtctctaactcctgagctcaagcgatccacctgccttggcttcccaaagctttgggattaccggcgggagcccctgtgcctgggctccttctgctttctaatacatgttagaccaagagtcttggaagtatccactataatatgcttacatttttttttatcaggtcttgttgatgaatctttatgaattcagttgttgtcacttggtgaaaaaatctaaatacattcagcaatactgccaataattttaaaagaacaattatgcaagtaatccctattattattattattattatcattaatattattttgagacagagtttcactcttgttgcccaggctggagtgcagtggtgcgatcttggctctgcctcccgagttcaagcaattctcctgctgtagcctcctgagtagctgggattacaggcatgcgccaccacgcctggctaattttgtatttttagtagagacagggtttctccatgttggttaggctggtctcgaactcaggtgatccactcccctcggcctcccaaagtgctgggattacaggcgtgagccaccacacccagcctaataatcctttttaatatataaagaaaagaactcagggattagaaaatattatagactctctttttctctttgagtcatgctggtttcattccagggaagattagcaagatttaaaaaccattgtcagccccaaagcctagtgagtatcctatttttacataaaggaagcttgggtcttacataaag

SEQ ID NO: 342716 - DNA, 1000 bp, Homo Sapiens
tttttttttttttttttttacttgcaggattaggctttaatgaatttgaatacaaggcacaggtttccaggtgtatgtaaatacatctccattttacgttctttaatcgcttaatccttttggaccgggataagagaatatttgaaatttcttattaaagcaataacttccttaatagggctttagtctttttgctttttttttttttttaagagctgatcatctgaattcctagtacttgcaagtaaatttttttttttttccttttctgtccacctaccattaggtggttcctagatcctggcaaattgtctatggttaaatgatgcttttaatttctgtgtcaacacagaccctcttcgttggtgtctccaaattagtattgtcttcctctagtgtgtcattacagtcccttttggcttttgtttcttcctcatggaataaatgtgggtgctcaattcgtcccctacgtacaaaatgctggatccgggattccagtccttggcatttaggacggtccatgaggggcttatatgtgcgcatcttcactccttctacaaaggcactggtctgctttatgacagagggcttaacatttccccattctgtcattccatccatctttggtcctattccacagggtactggaacagtgtccagtccttgtagcatactatacaacatgtgagttttgacagcatgattagcccacagttgttgtaggtgggtaatattgaactcctgagcctcctggtcatagatccacttgacattttcaaacttacagtcatataagactagaggaaattctacagccatactatattgaggcttttggggatttttctctatattcagcagctcatcaataatctctggcttctccattccttggccaatcagaaagaggatagccatcatacatcggacttgatgataaaggaatgcctggccagtcacttcaaactgacataactggaaaggttcttgccatctcccc

SEQ ID NO: 342717 - DNA, 1000 bp, Homo Sapiens
gcggccgcagcccccacccgagggcccccgcacctcgggccctacttgtagaatcagtacaaaataggtgctacctaaacgttccttctacctgaattcgctaagtcggttattgtgctgcttagttatgggggcgggagggggcccatggctttccacggcggcggggtgtagggggaagcaggagaccctgacgggcccacagccctccagctttctccttaggtaggtagacaggagtatggggtggggtgaggtgggggcgcctgtgtgtgcgtgtgcatgcggcacaggtgggcaggccccagcttgggagctgtgcaggcaccacacctggttgtgtagggtgtttggatgtgggcactgctgtgcagagcggtgggtcatccttgtgggggcagccacgcttgctgctgggggtgaggctggccacaccataggctacagctggcaccttcttctccagccatggctctgcccctggctggacatggcagatgtgtgttggccagaggatcagagaagtggccacctgtgtgggggcccaggagccctggatctgtccccctcagctggagtcaaaaggcctaactcaaaggtagagcccagttgtgcccagcagggactggttgaggtggggaggagtgtagggggcatgtgaacctagggacctggtctctctgcatctgccgttcttccctggcccacccaagccggttggacccctgtcctgcaaacacacctcccagcaggtggctgcgctcctggcggactcagcaattggcctggcacatagtaggtgctcaatgaacggtcagtgaatgattaatgcctgaaggaggggtcttgggggcaaccaccccacccccgcccatggaaccattacagccgccgggctctgccgtgggggtcggggaggggtggggagaaagtctgcgcggccggccccgcgcagcgtccctgatctaggggcctatggggtgggtagggcgaggggata

SEQ ID NO: 342718 - DNA, 1000 bp, Homo Sapiens
gtctaacacttccttttattattgctttgtgtttcccagaagaatggaggcccagggagggaaggtaatgagtcttccttgctgagaaatccatgcccagcacccagatggcctaggcggggccatggactctggactgctatcctgcacccagagcttcccaggtgctcctcggaactcaggtgggtgctggaatggaccttagggggcgtcgaacatctgagtggctgtgacttggggcaagcctctctgactcatgggcccctaggaggcgacaggggtgtagaattagcccagtggagggacagcagaggactgtgtcaaagcccctggggatccccaccacagcagcctccttggctgggagggtgggttgcagggtggcaggaagccacgcttctccaaggcgtcctgatgcacccaagtccttgtgtccctcaggtgctgccatgactgaagctaaaaaaggcgcagggggtcctaggtatgggtgcctcatgtccccggggagagagcctgcctgatccacctcaggatatgggcggggggctggatggtctgagcctcctcttttcctgaaatgcaggcagctgccaggcacaaatccccagtccctggagttggggccaaaatttaagagcaagataaagcaaagggcgtggtgtcaagggctcggtccccagggtgcaccgggagggaaggttccatggcaggacagtctgtgtggcgactccgggggtgacagctccaggtggaggtccggcaggcagaactggaggtggggagcaggggaactccgggatggggaagcaggagcccccagggacgggacactcagggagcagtggccgtccccagcagcagcaaggtccctgccagcagaggaagcaacgcggggaccacggacggccccgggtgcgcggcgtcggtggtgccggcggggggcgccaggtcgcaggcggtgtagggctccaggcaggcggcgaaggccatgacgtgc

SEQ ID NO: 342719 - DNA, 1000 bp, Homo Sapiens
ctccaaattcctggtttaataaggacttgtttattttgaggaaaaaaggtcccaaacatcaggctgttcacaaaaatcccacagtatcaactttagaaaacaaatcttaagactataacactaattatttttctagaggatgcatttgacatgccaactctcattcacaaaaataattgttacatttgtgttgaactgccccacacagcacactaatgtgagggtgtaacacacatacttctaactcaaagctgctttcaagagctactcaactaaatgagattgcctttgcagttagggaagcaactactgaacttatgtatgaatgaaaagaactgtactccctgcataacaagagattattttggagacagttgataaaaaccatacatcctttttattgttaagtcataaagaggtatcaaaattaaaagcaaaaattacagggtaagacttaacaaaactactaggagcgtcaaaggaagtgaaaatgggactaggcgcggggcaatatgaattaatgaacatgggaaggacaaggatggggagaacagtgagcatgtgctgaagatactaggggagaggatctggtgaaaaatttgatcttagacaagcgcctaggtaaagaaataatgggataagatttctaaaccccactatgtgcttaagagtcatcctccattggcgctgtctctgtcatcctctccttcctcagcctctttttcatcatccttgatcaactccagctggtcatccccccgatcttcattatcatcatcatccagtaggtccccctcctcagcagagtcatctgcacccccctcagactccatcttcacattagtctcatctttcttcacggagctgctgctctgctcctcttctgacttatcattcttcatctctactgcttgtttgctctgttccttttccattttttccaggttttccaggagagaatccactttttgttttatctgggtcagctccttcttaatgg

SEQ ID NO: 342720 - DNA, 1000 bp, Homo Sapiens; identical to SEQ ID NO: 160346

SEQ ID NO: 342721 - DNA, 1000 bp, Homo Sapiens; identical to SEQ ID NO: 160347

SEQ ID NO: 342722 - DNA, 1000 bp, Homo Sapiens
ttttttttttttttttttttttttttttgagttatgaagagtgctctttatttgaaacctccacaacacagacgccaatcttgtctcgcattgaatcattagctgtgcacatcaacacattccaagcacaaattaagaaatgcaaacagaacaaaaaaatatatatatatataattttttcccctatccaaaggtttcaagtctcaatgcagcaaatccttctgaacacagaatctgaggagcacactgttcaaacagttgggacagacaggtccctgcaaaggctactgcctttttaaaacacatggggtggggatcatggacggcatggaaaggggagagaaggtgaggaaacaggcggcggggagagaatgagaagaggaacaggtatgcgctggggaagatggggcagctgggacacacacggtgagttggtggatttcatttattggtttttgacaatttctttctggttctttttttaactcccccctccccaggtccaacaatggtaaaaaaaaccccacggagttgggcagggccttattaggccagcccaaagccttcagagcactcctggatagccaacagtagcatgtggcggagcttctcaaagctctcataggcaggcagatccagctgattaaaacatgtgtgagctgaaggcaggcgatctgtggacctgtcatctcgatggatctgaaacttctgaatgccattcatgccttcgagggcagcaaagccttgcaggggtaccttggaagtacccgtgacaaactggaggaacttggcacggtcagcttgatcgaaagaacgcaatgctctccagaaccactggatctgaatagagttggactggtacttgtggtattcagtgttggatttcagatcatcgatgtcaatggtgggcagtcctgatataagcagctctaactcctgctcagtgaagatggaaatgaggcgctttggaatgatctcatagaagccttctaagaaagcc

SEQ ID NO: 342723 - DNA, 1000 bp, Homo Sapiens
ttttttttttttttttttttaaggtaagcaattattttatttccttggcctgatggcattgacttcattatacaagaacttgcagctgacagaactgacacacacatttcccccaagagaaagaacccttttcattagcagagatgaattgaaatgtcatgtctgagtgcaattcctgctccccactcccaccccacaaaatcccaaaagtgaaaataaatcaataaaatccccatgatttactaaaagtcatccctccaaacctttctaactagcagctgcagtggatgataaccaaggagggaagcagctggccatcatgtagcattcctgtgcatgtgagcctgaagggacagcagcatgggagcaagaatcctgaatgagagtagtatataattaccttacttcatacttgccccctccctacataagacacctctgtcctgatacatggaaaatactagaggagatgctaagagtggttttagtctacaattggaaatgcctgagacttattaaattccaaggaaggggtgagataaggggcaccaaagagaaagagcaggttagacagggatgctcaacactcttgtcaattccagtttaatgctatttaataacaaaaccatcttcttaatcacaaccaccttcatgcctaacccctattttccaaaggtaagagatccctgtctaaatttctgggttgttgtctactgccacccctggggtggtactgtgatgtctgagtgagattgcaaccgggatgggagaaaagaagtgtgagacagggaagatcaggggccacaatgcatcaattacagtgggtctcttttggtccccaggtatggtccactaccacaagtcccctttccctacctgtcttgtgcaaatgtcaaaaatagaatctctgcccaaagagaagggagcacagggagttgctgctggactgccatcatctctggccccaacttgtccacctcctgacccatctatgaaactg

SEQ ID NO: 342724 - DNA, 1000 bp, Homo Sapiens; identical to SEQ ID NO: 160348

SEQ ID NO: 342725 - DNA, 1000 bp, Homo Sapiens
accatatcaaataataatttattgagtgaaaaagttttctattcattccatcatacaatagattgtgctaaggatcattttggaagaatgtgcagcattcagaagttgtatctcatcatgcagtcactcagcagcattttatctaaaagtacgtgcacagactcagacaattacaaactatttcagccatgatctatggtgattttccacacattgtacagtgaaagctcttcagcttggaacaacttgtcaaggcagactgcatgcacatatatattagttatttgcttgaaaagacaagttagaatatgaaaatatataagcagcattcatgtaatacagaattcctgagaatagtgtgtgctataaatctttgagaaataatttgtattcatataaaaaccatgatataaaacatttctctcaactaaaacagagtgatctaaaactaacacactgcaaggggctgtcagtatttactgtcaacagtgatgaaggcataactagattctattgcactgttttgcaaaataaacatttcagacaattttttctttttctgtttttcacatctgtttcaaaagtatcagagaaggcattttataaatcaatgtattacaatttttaaattaaaatatttttctcttttcatatttttctttctagttgatcaatatggttttaaaccctaacgggactatataaaaaggaaaggaaatacttcttaaggatagagctatcattattctttatactactgtcagacaaatgttgctgttctgtggccctaatttggaaaagatgttggttgatgttattattaggtagagagagtatttatactcaggcaggtgtatacatgtacctaacaaaaaaaaaaaatgcagatgctataaaaatggaggagtgtaaaaaactcccttgtacttagtggaattagttgctacgattgctacaaataaggagggggggggagcatgagaacctctctggaatctga

SEQ ID NO: 342726 - DNA, 1000 bp, Homo Sapiens; identical to SEQ ID NO: 160349

SEQ ID NO: 342727 - DNA, 1000 bp, Homo Sapiens
tttttttttttttttttttttttgctttgatcttagcatgttgtgcattttttattggctgttgaatataaaaagccacagcctcatctggtttttctgctatattctcatattgtaaatcacataatgccttccaatctaaagtaaaatgcctaagtccaaaatatcacttcaaaatggatttatcattatagttgatagaaagatttccagggtgtaagaaaacaattcaacagtttgattaatatgccacagactgctaaaaatatattcatgcattttagacaataaatttcaggatatagacatacactcatgctatttgagatccttttttcctaccattgcaagaggctgctttagctaatgcaacagctggctaggttattgcttcaacaatataattcataatgcaaaagcagctcttttccaaacattttagagcaactcaagttgtttacatctcctgtaggtgattttcctataactttgtgccaattggtgtcatactatttggtaaaaatctacattaaatcaagacaactgcacttggttaaatttctgtcatacagagaattatagaaaaattacagctgatttgaacttatcatcattaagtatatacagggttttagaaaatgaatgcaaactacaaaaatggagttgtataattaaacattaaatagtccaagtaataaaagtcatagattaattgtctctcagttctagtcagatcctttaaatactgtctcacgacttgagcattggttctttcatcggaagagtgcctatccttaaagttgggaaatttcagctcctttggagcaccgatcatctgtaaaaagtaattggcatcttcttccaaagtctcaaatttccctacaaaatcatagttgatcaaacacggatagcagagtttgctgaccttttcccagtgaatgtccattcctactggacggtgggaatccagcaagtagtggataaactctttgaacttgac

SEQ ID NO: 342728 - DNA, 1000 bp, Homo Sapiens
ttttttttttttttttttttttttttttttttttttttttttttttttttttttttttttttttttttttttttttttttttttttttttttttttccttgagaaacaagcatttgtgtttattaaccaaggagagggaagtcaaagcaatgcagactcctaaccagtccctcctatagtctgcccacctaggccagctgccaaggactaggaagagcagtggataggcccctccccactgccccgaccccagggtgagttctgctgggtaaggaagaggaagtcagcaaaggacagaggccaaggaaggaaggaggaaacagagccgctggggagacaggattgaggagatcccttggcccctcactcacagtggggagggcaaagcaccgcaaatgcagccccacaagaggaactaagcaggagtacactcatgtcaaaaaccttgtattgggggaggggaggagggggttctcaggtgtccaaagccaagaacaaaacccttcgagagtcagtccttgcccaacaatgctggtccagcctctaagcctttgcctccataccaagttcacaacagggtggagcctctgacacggccgtctagagaatggatgcaagagaggtccagggaccacttgcctctgtaagatccgtcctgtggcgaattccaggcccagtggcgcctagccttcagctgctgggctctcccgagcctgccttagcccatacaaccacttgatcacgcgggcattgcgctccaccaccgacacgccatagggaacgcgctcccgggcccgctcctcaacagtcaccgagctgcggcgggagcagcccccttcagagctgcccggcccagcactgggccctgccagggacacgatatccgagctggcccgtgccaggtgggccacacccaaccctctcgcctcctccgggtccaggccgcagaagttaaaaaagcgctcgagatcagcggctgccctagaaaagcgctcgctca

SEQ ID NO: 342729 - DNA, 1000 bp, Homo Sapiens; identical to SEQ ID NO: 335527

SEQ ID NO: 342730 - DNA, 1000 bp, Homo Sapiens; identical to SEQ ID NO: 160350

SEQ ID NO: 342731 - DNA, 1000 bp, Homo Sapiens
tttttttttttttttttttaggaagcaaaaatctttatttttaaaaaattcacatttattaaaaacagcaatttctagccaaataatataaagcattttaaattatttgaaagtatatacactctttgtataagtgaacacttaaaactgtacagatttaaacaaataatcatttagcaaacaagttgggtcactattacctactcagcactttgtaaggtgtttgagtgtttcagaaataaaagatcaaaagacaagaaccaatgtcattaaatatttttataagaacacactccgctctgtaaatcaaattaaatcagtcacgtacttactgtacaataatcatgccctcatttctttggaaaggctattaaaaatcaaatgtacatataatacacaaaactggatattttacagtttatttcattaaacatgtatttaaaaaacagttaagtaaatacaatcttcctaattcattcatttcatggcaaagaatgaatatgggccctcttaccttctaccttctcaaaatagagagtaataagctcaatcaagcaacgtccatcaccaatttaaactgagtgaaaaggaagtgacctgttacaaatgacaacaatcagggtatgcaccctgcagaagtgctgcctcagtacgtctaatgagttacaggcacccactgcaccaaaaggtcccctggtcccattccagaacccctgacaatgtccacctctagactagtgtttgaaaaactcagaattctttttgaactaagaagctggctgccttaacatcagcggcaaaaccaatccaatcaggaagtaggaatttgttggaaaattcatagatatgcataatttatgatccctgatatggtgtggtagttttcagatgtggatagtgtttgtcatccttaggtttgctggtaaaatgtattctgctgtagctgggctagagatccacacagctggtccacagcacagcacagccagctgaatgaata

SEQ ID NO: 342732 - DNA, 1000 bp, Homo Sapiens
ttttttttttttttttttttttggggaaaaatgtttaatatcaccatactcagaatacatttttttgaatatgcaattatttagtatacactacaaaatcctcaattttagaaagtttccaactgtctaaatatcagaagaatgcaatattttggtacaaagatgaaccatttcctatattatagcaaaattaaaatctacccgtattctaatattgagaaatgagataaaacacaatattataaagtctacttagagaagatcaagtgacctcaaagaccttactattttcatattctaagacacatgatttatcctattttagtaacctggttcatacgttaaacaaaggataatgtgaacagcagagaggatttgttggcagaaaatctatgttcaatctagaactatctagatcacagacatttctattccttttgcaagttggcacacagtaaatgcccgaatgaataaataaattgcattaacaaggatgtcttcatgtgtaaatcagagataataccacctaccacacagaatgtaagggaaaagagaacaaataagtaccaaagtgctttatacgattctgagttattttaaaaatctgtgttaataggtttgttactttacacaaaatatcaaatttcaaatgaactccagtgctggatttcgatgtagtattttatttatagctatgttttccttttaacaaagataccattaacacatttgttcagtgttcattttaaagggtaaaaatgttgtcttatagctcattcaataaaacaccataattcaggtcaaatgccaatgtccttgtacctcctttgctaagtcaatataaggaggaatctgttttgtttcaagacaaaagcatttgattataaaaaggtctacagtttatagttcttactgaattccaattcaacagcatttaccaaaggactttacagctatttcttttgtagcatttatcatattgtattataaatattacttg

SEQ ID NO: 342733 - DNA, 1000 bp, Homo Sapiens
ttttttttttttttttttcatttttgcaacaggcttttattacttttttttaaaacccatataagaaagacatttaaaaagaaaatatcctggaaacaaacacttacacactgagcaacacaaccaaagaaggcactaccagcagttactcccacctctgggagggaacgggtactcgatactatacttttttcagaggtttagacctcagcataggccttgggtctaactgtgctttagtaaagtctgaattgtccaataattttctcatttcataaacacccttatctctttatatatagctatatgcctttatgtgtatatatacatgactttttttttccttctcaaaaataaaatagccatccccatagagggaggttctcagcagcattcacagcggttgcagcaggagccatgccttctattaatgttagagacatgcaggacgaaggaaaatgactctccacctgctccctttaatatacagcagggagagagtttctaaagggagggaagtgataaggctgagcatgagatggctaaccagggtttttgtggtttaaaaaaatcttagagttgcgagcttgtgttgcctttgaagctctggagactatgcacagttcatacgacgaggggtcagcattccttctgggatcaggggcagtatggactcagcctgggtcagagagggaacttctgaagctacacgaacaagcttgggcttgaaccgacccaagagggacttgggaaggcagaggatagcaaagaaatggtttctcagaggctgggttggaaaaccagccctgctttgaaaattacaagtccttctccctctgcactggagtgtctctgcagtcctggctacttgttggaattttttgactaatttattttaggattcagcctaaacaagaagccagtgcaaatgtaagtcaggaatttgatcctccctgtcaatgtggtctggtatcactgattggagtcaaaactcaggcac

SEQ ID NO: 342734 - DNA, 1000 bp, Homo Sapiens
tttttttttttttttagattttaaaaatttaatgtattattacattcatttccagtagaatacattcacggcactatcacatctactattcttttgaactggccattccttctatttacatagcttttcacctctcagaggttggcaatttaagagttgttattaaaataataatttacctagatgctgattttttcccaagtaaggattaaatatccaaaacaaaatgtataactacacttgttgatactttatattctactttcctattttaacattatgaaaacctggaattttacaatgtaatcttagaatctgcaagtattaaaagtacatttagagtaaaactgaatttcaagatgctctatttcataataatcaaggtacattattttccatatacttatgtagctcgaattttattatgtatctaaatgtcctctgtcagttttaatttggtttaaattcttgataccaataagccttcatcaattcctaagaaaatcactgctcattagtaaaataaagttttatctgacagttatcttttatttaagttaaataaatgttaagtatctaaaattttaattaacaatatttggtaaattaaatttattcttatcattccttcttttaattttgtctatatatatttttagtaatagcttctagttccttttacagggagaatcgtcctctgcattatatagtacagactgttgtaattagttatgtaactttcactaattaggtaaattcacctttcacaatttctttttccttatctataaaataaggaaagctaatttcatatattatccttaaggtctcttgtagctctagcatacattagtaaagatgcaaattatacaaattttgatattcataaactataatagctattaaatcaatttcaaaatagcctttcaaaatgtgactttctatgttgcaaaattgtgaactactatgttttgctttctctagaatcttactgattcag

SEQ ID NO: 342735 - DNA, 1000 bp, Homo Sapiens; identical to SEQ ID NO: 160353

SEQ ID NO: 342736 - DNA, 1000 bp, Homo Sapiens
tttttttttttttttttttttttttttttttttttttttttttttttttttttttatccattatgatttattctctacaatacttcgttaaagtgttcaatgatttgcactcagaagttatatagccaagaggcaaccaagtgtaatacaaagaattggtctgaagtctttgcactgaaggccatatagtctcttgcttcagggaagtaagaacgaaatgaacaaaaagaacacatagctccctaggctccagaatctcaatagaaaataacgtcaacagttagtgaaattgtagatgtcaacacatcatggaaaacagatcttgtgcaaaatattaacacccaggacttcttttgtatagatgatttttattataaacaataaaatatatgtaatgtctcaactacaaacctttcatgttgaaagggtctctaacatgagttgttttattattatgaagcaaaaaagttttaagaatctcacagtggaaataatccaacaccgacagactctagtgatcaaagacattctcttttaatgtaaaacaaggacaattcataattacagagagaatgtcctagctgtgggtattatgagacaagccaactttccagaccaaaaggcactcacagctagggatgaaacgaactccgaaccaagccagagaaattgggctggtccttgaaaacagtggttacctactgtccagctcgagcagcccaaggacaaaggaaacactcagcagaaaacattcccttttctttaaacctaccacgcacaccgcaggtactggccgccctcatcactgctttggtcaagcgtgcagagaaggcagttcagttccagttcggagctatcctctccctatgcaaagctgccacatggatgatccagacttggtatttttcctgagagccacctgctacacactttcatgaggcgaccgtgaccgtacacttctagaccgcttcctgactaggccccgttcaggacggatact

SEQ ID NO: 342737 - DNA, 1000 bp, Homo Sapiens; identical to SEQ ID NO: 160355

SEQ ID NO: 342738 - DNA, 1000 bp, Homo Sapiens
ttttttttttttttttttttttttttttttttttttttttttcacagcagaaatgtttattagtaacgcctactgcatacaaaaattatagcagaaattgtattaaaaatgtcaaatacgttcatagtatctctgtattctccctcaaattcccatctactcctcagcttgttgaacctcaacagtaagaaggctcccagtcaaaaaagatgtcctcagacccaggcccagaagtgccttcttaggaaaagtgaataaatgatggcagcagcaatggcagcagtagctgtaacccccaaacaggaatgggaagacaggtggccccattttcagtctttcgaggttgagtgagcagctgatgtgggcacgcttccctcacaaacatgggtcctactgctaagattccagacatcagcctgcagccaatcatggctgtacagcctttgacctccacagacgactcaatgccacctccagtgatctcaagttttccttgatagcatcgagttgtaccattgggatagggaagagaaggagcactgaaacaggtccccaaagccacacaggttggacaatggagggttgttgacacagtggaagctgtggtctcactgaactcccaaaactgagacaggctgtctttgtcattacagaaggaatcctcacagtagttactgtaggaggtcacgatcaggccgggaggtgaagagtgctggacaattgttatggcctcctccccttccgggatgcagcccttcgtggccaaaatggctgtctcagtccctgctttaattattagtatggtttcctggcaaagtgcccctttgtcacaagtctccacttcctctgtggtccagttaaacatattggctggatctgcttccacagtcatggacagacccttttgacaatacagctctaggcccgaggtcaggagggaggctcctaggaccaggaggatcagcaaatgctggatacgaggggttcccatggcttcttc

SEQ ID NO: 342739 - DNA, 1000 bp, Homo Sapiens; identical to SEQ ID NO: 160357

SEQ ID NO: 342740 - DNA, 1000 bp, Homo Sapiens; identical to SEQ ID NO: 160359

SEQ ID NO: 342741 - DNA, 1000 bp, Homo Sapiens; identical to SEQ ID NO: 160360

SEQ ID NO: 342742 - DNA, 1000 bp, Homo Sapiens
ttttttttttttaatcagacaaagatgatttattttcatacctaaagcactttataatattctctggaaaatctaaaatcattctgttatcctaacatttttatactatcatcattttagaaaataaaaggcctgcgttatatactagaaaaatttcttcattatatgcaaaatatttatctcctctagtaaaggagattaaagaacaactgcaagaggaaggaaggtcctgaaagtgtttcatttggtatctacctaccccaaccccaagacataaagacagataaaggcactaagatgctagtatgtggctagtcctttcaataacccagtcagtccatacagataacccatgggatatattcaagccactctttgagccatcgatggtcattatttggttagttcacccaaggtaaggccataccagctgttaaaatgatgtagagattaatcaacagggctgccacttgcgaatcccctccaaggatgctgtgcaaagggtctcattggtcctgatgagtaatcttgtgactgtacatattcctgggtgcatgtccacaaatactgaggtatagcctgcatgccactaaaaataacaaaggtttcagggctggagacattgtcaaccacactgtcatgaccatctatagctccaggactcagtggtgggggaacaatatttaacggatgtccctggcagaagaagcctgtgagtacttcagcctcaaacacatagatcagcttatctgcagcagagattttcttggccttctctgccaggtttttgaggttcttggtgaagtatatgccagctccgtattttggatcgcaaggtgtcgagtacattctttgaaagccaactctgcataccacattgcagaactggtatgggacttgctgaaacagcctatggctcacaggttgcctgtgcagtttttcttccatcattttcttctttctttgaaaggcagccataaggacctcattgtctatcttc

SEQ ID NO: 342743 - DNA, 1000 bp, Homo Sapiens
tttttttttttttttttttatgaaacaaaacctcagcgaacgtttatttctcatcatatggaactggtagcaaagccaaagatttctgcacttgaacactggataccactccctacccacccagtgaacatttacagtcatcacatgccctctagaacccagatccccatgccggggcctcttctctcctgcacaccttcttgcagggagggctttcaggccggaagggggtgccggttgcttctccgcgcctgcacgggtatttaatgtggcacactggccaggctcctctcctgccccgcccagcagcagcacggcccttgcctttcttcagtgccctccaaactggtcagagaggaggcacagactgctagaagaagggcaagagaagtcgtaattcacagtcatttgctacagaaagtgcctggaatcggtccttggctgcttctgcctggaagcaacccacttaagccccaggagaggggacagatgagatactgggatgggggtgggagtcctcagaaggcacccaggagacactggctgcagaaatggggtccctgatcttgcaagaaaatccgcttgctgttggcaggttggcctgagaatcccaggggcagcttcagacattgtggggactcagacccaccctctcagtctgcagctgtggcagtcagaggtttggcaatgtagccatggtcacctggccatggcccaggggcagggtccaaacaagaaccctggtgcctcccgcccctcctgctgagccatggtgccacctaagccatctagaaaggctcaactttttgggagacatctgcggcagggccactggaggcaggagagtggggtgctggcctctgcgaggcaggtgcagctctgggagaacagaattctccctctcctcctcctctcacacactgtggctccaggttggaacctcaagcataaaggaccaaaataaagaggatttataatctaatactccctcctcttcaga

SEQ ID NO: 342744 - DNA, 1000 bp, Homo Sapiens
tttttttttttttttttaaagggatatcatattagagagcatttaattcttacaaggagaatcacaggaaaattcctggaggatttcacatttatttaagtgccaaaggatcaatagtatatgacagatgaatagtttccccaaattagataacaaaaatgattataacagaaaatggcgtccactgacctcatattatgcatttattattcctttaagtacatcacacataatgtgtcaattaattcgtagagcaatcttaaggagatattatttgttccattttacaggtaaggtaaattgaagttaaataacttacccaaggacacgccttgtgtagaagataggtaaacaatatgaacaagactatggaagttcttaaatgtttttacaagaatgtttggtttttcttcagcaatgaaaactcatggaagagttaatttcaagggttctggggctgggaaatacgaatgtattaaaaaggaatggagaaagacacaggctccagctgaaggtattacaatagtaagtggaattgatgatggagatctaaactaagggcaaatagaagaaaaccttatactgacagaactgatcgggcttccctgttgtgggaggagcagtaaggaccagaaaaagagtctatgtaaagtcatactatttaagaaggtggtcatgtatcctttcaaaaaaagttcccataaaaatctgcttttaagttttgcaatctttaacgtatacatcgttttaattaccagtatttggaaccacttagctgtaagccagtacttattatatgatcaaaaatgttgatgtctttataatttgcactccagaagctatttatgtgaaccttcttctttttcttttgtattatctgctctcttgctttccttgatcattgcatggaatttatctcgtttatccctcctaaactcctactcatttacttcctgaaagtatttgaagtatttattgtcctgtcaattcttttataatc

SEQ ID NO: 342745 - DNA, 1000 bp, Homo Sapiens
tttttttttttttttttttttttttttttttctgctcggtgccattttatttaatgcaaacactagacagtttacaagtcacacctggacacaagcacgtgaacagatgtacagggaattctggaattttgagatcagtccccatttcttcctcagggccctggcactgaaccccagcccctgtcccagagcctcccctctgggtcccaccccagaagccacgcacacctccttccgcccagctttatctttccttgagctgtgacttcacccagcatgtgctcagagttgttacaaattttctctgccaaattaagctgatagagattggccactttcaaccagtcctttcagtccactgtgtctcccctctcgcttgggacaggcccatgctggccagtgcaaccttcagatagacacatggtgaccagagcccgccaggcttctgcaggtggcagtgtcgagcaagtgtaagatgtctgtgggaaggagaagctcctgaaatgaacgttctgcaaacagaaggctgaggggtcttccaggcatgtccagtcactaggagctgccaccggtgggcttgagtgccaggctctaggctttgtgcagaaagcacccggggcggggggcggtaagggagagcaaaatgggtctctctcaactgcagtcagtgctcctgggaacacggtctcacagacagcacatattctacgtcacagctctagggtttcaaggacttagccatccgacaggcctcaccataaaggtaaagtggacaacccctgaggtcacgctgtccaggtggcgacaggccacgcatgccaaaatcctccatagccacctccggcccagcaccagccagagggtggggccatcggttctcgacatacttggtatcagggagggacaagcctgacaaagttcacaatctggccaatgagtgtgggaggccctggaaacaggccaatcctgcaagccaccccacccttactaacttcctgaa

SEQ ID NO: 342746 - DNA, 1000 bp, Homo Sapiens; identical to SEQ ID NO: 160361

SEQ ID NO: 342747 - DNA, 1000 bp, Homo Sapiens
gggggaggcaggccatttattgaagaactgcttgcagacatggacacacacagccatggtaaccagacgccaccctggggccagggagcacccagaaacagccctgggctgccagcccaggcctggacatttgcccaccacgggtggagggcctctcttggcatcaaccatccacgacctcctacggcaccatctctcctgccaagttgcccatgggggtctccaggaagaaaaccagccttgggggattccaaggcccagggagggtgggaagctgcccacgccctcaggctgtgcccagtctcatgctcaccatttctttctatggccaaagggaagtcgctggacgagggaggtccctctgctgggatgagcagcacagcacggctggggccccaggtcacagaaatgggtgcagggatcctgggacctgggctggatgggcacccgctttgggatttcctctgcttcagcctgtgtatggtccagggaacagtgtaggaaggggcgtggcatggggtggggctgccatgtccggggcttctgcgtagcccagcaaagatgctacaggaggaacaggaggagagggctgggaggggtctgggggaggaggaggagatggggctgcagtgaaggccttgctcattgcagggggtgtgggaggccaggcagggtcacctctggccctgcagaaagagggacggaagtaggcgggctcaggcctgcgcctccagggcacacacgtgcacactgggcaggcagaaccaagagggtggcagctccttgctggtgctgtcctcgtggaaccggatgtggaggaagaagtctcccgtgtagaggaagaggagggccccgaggcaggccgactggccggacggctgcaccgcgtcgaggtagaaggtgctggagcccacgaaggagacggtgtcgtgcaggtcgtagttgtgcacgccgttctggtggtcctggaaggggaccacagtgagggcgaagggcccta

SEQ ID NO: 342748 - DNA, 1000 bp, Homo Sapiens; identical to SEQ ID NO: 160363

SEQ ID NO: 342749 - DNA, 1000 bp, Homo Sapiens
ttttttttttttttttttttagttctcaaggtttttactaggagctgatcatctaggcacattctgcctagcctgtaccaaaattccagaaagaagaaagaaagaaagagagagagagaggaaggaaggaaggaaggaaggaaggaaggaaggaaggaaggaaggaaggaaggaaggaagggaggaaggaaaagaaagaaagacaaagaaagaggcaagcaagcaggagctcgacataaagcacactcttcatatactttaggcaaggtgagccattcttatcagtgaatggcaggaatccatccaagaaccaagttcccccagatgccagccaagggccaactttgcaagcagacctttctagggatagcagtctcaggcctgcatgttaatttttttctgaacaccatcttttccataatcctttaactatttattatgtctttcttcagtcttttattcctcagttaatacataatcaattcccactgtgtctttctctagtcttttgtttcagttaatacataatcaattattgatatgaaagtttccagactttttgtccattttagtcaccctcatgtgggactctggcatgattgtctcttaaaacatgaagtcaaaaatataaaataatactccaggcataatcagaccataaacaggatactttttaaaaaaattaatgtagtataatcgtttatgcattttttaaagctgcgttagtaacagatgatgtgttgaattggcaaacaaaacttgaattctaccacattatatttattataatcccattaatggcattttgtttaagcacagtgcccctatctaccaagatgattctgaattataattccatcatgtgtttcaggttgactatttcttccagctttctgtcatgtgcaaactattgatgactctacagccagactgctaaatccaactcctggttctactacttactagcaatggggtgtcaggcaagtcagcttaaaacctc

SEQ ID NO: 342750 - DNA, 1000 bp, Homo Sapiens
tttttttttttttttttggttttcaatgttttatttcacaaattgttcagatttgttcataaaagatatgttacaggaacattttagaaatcaaaccagttctactgaaacaattgcaacaacgtggcccctgttcatgcaaagcacaaaaaacatttacaataaaactttgtacacaggaagtagcaaaatacatcatttttcatagaaaaaagcacacacataaactgcgggctgagtgagcctacagacaatatgagaaaccagcacacgctttggaatacggtagggcaaaactcctaaggaagccgaaaatgttcatcctgtgggcaggagagccaggaacgccgttggcttggtacaagatctttttaaacacagggtaagtgttggtagcacgaggggcctctattccacacacaggagaggtggtgctagggacagggcttatcatttatagtcttgtttccattttctgaagacaaatattccagtttcaaaatgtttgtggggatgataaagacagccaggtccatggccgggcgcagtggctcatgcctgtaatcccagcacttcgggaggccaaggtgggtggatcacctgaggtaaggagttcgagaccagcctggccaacataatgaaaccccatctctactaaaaatacaaaaattagccgggcatggtagctcacgcctgtagtcccaggtacttgggaggctgatgcatgagaattgcttgaacccgggaggcggcagttgcaatgagcagagatcacgccactgcactctaccttgggcaacagagtgaaacttggtctcgggaaaaaaaaaaaaaaaaagacagccaggtcctgctctgggcaaggactttctatcctgctaggaaggcccagtgaaggaggcattaaggaacccggggactttatttttaaatgatggggtcaactcacactggaagtttcaagtctcccttgagtgggatgctttggaagcgagcccac

SEQ ID NO: 342751 - DNA, 1000 bp, Homo Sapiens
tttttttttttttttttttttttttggcgttcacgcagatcgtcttttattagcggtctgtaaagcacctcccagggtcccccgaccccagattggaggaagccttgagaggtcagtagcaccagggacatggcagggcccgagggcgcgatgtgcagccgatggtgagggactgggcgccctcgcctgcccccggggttgtcagcactgggaaggcttgggggtagcagccacctccttcccccaacccaacagactagttcaaatttgggtaaataaataaaataaataagattcctcaagctggcctaccctggagaggagccgtggttgcagccggccactcgggaggcccgagggccagcgggggttagttggggcgtcctctcctctcgggtgatggggagccctgggggatggcagcataggggctgggatggccttggcagaggcgtctccccacattctgactcctggtccccttgaaaccctgttggtgtccctccccacaagccctcctgccctcagtgggtgggaggcggtgccccctcccctcctccagcgcaagggtgtgcaggaagggggcagagtagggggaagaggtcccctctctccaccccctcagtccccgagagatggggcctcttccctttcggggtcatcgtcagtcctggggttgtccgggcaagaggaccctggctcccaaccccagccatcagccccagagccctgtctccacgggggtgggggtggggagggggagggtcccggcccccggcctcagtcctgggcctggcaggccgggggcggccgggagcggggccagaagaggcggcaggccccacggcagatgaggaagaaccagtagagctgaggggccaggagcagcgcagcgcccaggttgacgtgggcagggatggccaggggcacggccagcaggggcaggccggcatggcgcccgtaggcccagtacaggtagggaaagagcagcacccggcag

SEQ ID NO: 342752 - DNA, 1000 bp, Homo Sapiens
ttttttttttttttttttaacaatgatgtcagaaagatgatgtaatcacatgtcacacggcctctggaaaactccacaatacaattttaagataatgagaattcaaaaggcaaataacatgttagtattattatgaaaatagctttgactttgtggacacccctgaaaagggacctcccagaagcctacagagtacacttgaagaactgttgctctggaccatcaccctaacccttctttatgactcacatttgttgattttctttctcctttttattaagaaagtataagccaggcgcggtggctcacgcctataatctcatcacttcgggaggccaagtcgggtggatcaagaggtcaagagattgagaccatcctggccaacatgttgaaacctcgtttctactaagaatacaaaaattagtgggcgcctgtaatcccagctgctcgggaggctgaggcagaagaatcacttgaacccaggagacggaggttgcagtgagccaagatcgtgtcactgcactccagcctggtgacagagcgagactcgatctcaaaaaaataaaaaagaagaaagaaagtataaatgcttgtctcccagtgggtcctgtcccctgggaaaaaccagggaacttcttaggcttagtgcctcattttcctgactcctgtttctgggggtcccctaagcatcctccctcagcgccttgcccatctccctcttgaccttcccttaaggtacctcaacagcccttaccctgggccagcctgcttaccctgcttcaagcctgctggaccatctatctgcttcctcctcccctcacttgaggactttctcatcttgggagaggctaagtaatttttctctgccttccctccctccctccctagtccctgacatcttctcacaggacttagggcaggaaatcatgctttctgggtagacccctttagaagaaacgctttacccatctcccaacacatcagccaacctggaataagc

SEQ ID NO: 342753 - DNA, 1000 bp, Homo Sapiens; identical to SEQ ID NO: 160365

SEQ ID NO: 342754 - DNA, 1000 bp, Homo Sapiens
ttttttttttacaactatctacacaaacacccacacatacacacacacacacacacacactcacactcactctctctctctcttttggagtaaaacagaaataatctattgttcctgagtttgattgtgggaaaatcacttaagataggtcatgtttataacaccagtttcagggacaggtaaatccagtaatttaatttttatatatcttacattaaaatgaacacacaaatacatttctccctcaatctccatgtcagacaaatggaagtgaagtacttggcctagaaaagaataacctgcaagtgccctaataatgttggtattcctagtattaataagttagatttgtttttttgctatttatagtgatgtgtctttttttttttttttcccgagacagtgtctggctctgtcacccaggctggactgcagtggcacagtctcagctcactgcaacctctgcctcctgggttaaagccaacctcccacctcagcctcctggggagctgggactacaggaacacaccaccataaacaggcaaatttttgtatttttttgtaccgacagggtttcaccatgttgcccaggctggtctcgaactcccaggatcaagtgatgctcccaccttggcctcccaaagtgcttggattacaggtgtgagccaccatgcctggccatgatgtatccctttgaagtgtttcttctaaacattcagcctatcaaacaccagttgctgtagacatttgtgtccaagggaaaaataatccatgtcacatcttggtgagatgaaatattccatggtatcagtcctattaaagccagggctggccaggtaaactcttggcattcttcgtgccgcaattcctaaactcaatagaagaatcttgttaagggacatttcgttcatcctgagacgttgctttggcataactcagaggtagattcagcccaacaactggccctacaatgctcagccatgatgtgatatagttgaca

SEQ ID NO: 342755 - DNA, 1000 bp, Homo Sapiens; identical to SEQ ID NO: 160367

SEQ ID NO: 342756 - DNA, 1000 bp, Homo Sapiens
gagacagggtctcactctgtcgcccagggtgctggagtgcagtggcgtgatcttggctcactgcagccccgacctccctcatcctcccatctcagcctcaagtagctggactacaggcgggtgccaccatgcccagctaatttttgtattttttgtagaaatggggttttgccatgttgcccaggctggccttgaactcctgagcttaagtgatccactcgcctcgatttcctaaagtgctagggttacaggggtgagccaccatgcccagcccagacttccttctcatccaggaaattccaaaatgtctttacatacatattcttatattgtgtaataaaagattctgaagtccattactggctagaataataactagaaattgcttaatattactatacattgcatttgaacttaatctccacagtaacaattaggtagtattacttggatttcatggatgaagaaaaccaagatacaaaaagttcacacagccagtaagcagatgagcctgacttcatagtcatacatagcctgaattgagtcccagcaggagcacatgggcatggacatctaccagatttgggaactggcgtagccaagcaagaaataggagacggaatcaggagttaggattccatgcttaggaccatcccagatggatggctgcctccctctgggagctgcactcttctgaggttgcaggcatccagggccagggtgcttctgtgaggtgtgccagcacgtgccactctgctggatacaagctatcatgttctgagggctgcttccctcagcataagaaggggcttctattgggatgtgtaggcttcattgtagggtccacttgagtcttttttttttagagacagtctcgctctgtcagccaggctggagtgcaatggcgcgatcccagctcactgcaacctccacctcctgggttcaggcaattcttgtgcctcagcttcccaagaagctgggattacaggcacatgctaac

SEQ ID NO: 342757 - DNA, 972 bp, Homo Sapiens
tttttttttttttttttttttttttttttctgccagtagcccctgtttaaactcttgaaccccagtcacagttttccagaagtccatcaggatagaattttcactaatcgccaaatgcccaaagcttagttctttcttagaaggaaaagaagaggtcaaatggacaggagagagcggagattggttgttctcaggggctccttccctttgcctgcttctttcatttgggacgccagaccttgacctggaagtgaggtcactattgggcagtggagtgtgagaaaggactttggcctgggggctgcaagttacagattaacacggggaggggtgaggagggacccagagggaggaaaggtggccagaggaagggacagctgacctggcacaatctgggcttgaagggggcacaacaagagcgtctgtgagctggtgctgtctggagggatcttggctcctctccggctatctgaccttcctgaagacctgctcgcacactgcatcccttgcagtcagttccagatacagcatctctccctccagccagtgtctccagccccggttggggacctcccctttctgcacacacaccaggtgctcctcctcccaggttactatggtctggcattttcgtccgtccacgctcctgaggtcctcctcaaactccactcccacatcaaactgcacagtgtagtttcggaaggtgctgagcgtcctcaccgtcatgtggttgccctggtgttcgatctccttgtccggcttcagcagcagcgcgatcttccgcacagccaagctgatgtttagggcttgcaggtagtcctccatgttcttctgcgagacaaagcggtagtagccagtgaggttgggaggcattgtgtggatgaaggtttcaggagaatgcaggagacagggtgaggaaggagggggtgttgtctggcaggtgaggctgagagattccagccagctccgaat

SEQ ID NO: 342758 - DNA, 1000 bp, Homo Sapiens; identical to SEQ ID NO: 160369

SEQ ID NO: 342759 - DNA, 1000 bp, Homo Sapiens; identical to SEQ ID NO: 339192

SEQ ID NO: 342760 - DNA, 1000 bp, Homo Sapiens
ttatttatgactcacattgtctgtagaggatggaccctgaggaaggctgggactgaaggccatgaggtctgtcttgggtgggccctccccagagcacaccctctgccgcctctgctgggagaatgaccagctccccaccgcgctggagcacaccagagtgggctttaccaaactacatgcgccctcagaggacggcgctgagcaccgcaacgccgtgtacagcagcagggtaagcaccaacagactggacaccgcgcagatggcgatgatcaggtacacgttgacatccaccagctcggtctctgggcctgcaatgcccaacgatgcccgcgacgacgcctttggtgcctggccgctttccaccagcgacaccagcacggtggctgtggctgtcagcgagggctccccgtggtccttcacaagcaccagaaggcggtggcgcggtgcgtccgtctcatctagggctcgtgtcgtgctgatctcaccagtgtacagccccacgcggaacgggatgctcgcaccggccgccaccggttgcaactcatacgaaagccacgcgttgtagcctgagtcagcgtcaactgcacgtaccttcgccaccacatggcccgcgcccacagaccgcggcacaagctctctcactgcgccaccagtgccacccacccgaggcgccagcagtgccggcgcgttgtcgttctcgtccagcacgaacacctgcagcgtcacgttgctgcccagaggcggcacgcccgcatcgcgcgcgctcacctggaactgcaacagctccagctcctcgtggtccaacggctgcagcgcgtacaccttgccgctctccgcgtgcactgacacgtagctcgacagcgcgcgctcgcccacccgcagctccaccagcgagtaggacaccagcgcgttcttctgcgcgtccgcgtcccccgccgacacagtgaagatgtggcagcccggcgggttgttctccttcacgaacaccgtatactcgggc

SEQ ID NO: 342761 - DNA, 1000 bp, Homo Sapiens
cataccaccattttcatttattagcaataacagaggaaataccaatagcaccaattcaaaatgaatccacatgacgtgttttatccttacagctgtaataactagtaactaacatggattggaaagcacttcgcaaatgtaaaaagtgctgtacagatacattataattatcatcattaataaattagcccgattctcctagttcaaaaggcacgtaaggtcagatacatgggcttcagtggggcaaaatgatcacaacctacaatgtagcaatggttcacatgtgttggtaacaagttttaccccatgcaatcctgcagagctgaagttacacacccttcaaaatatgggagaatgaagctaaaagtagacaagacagtttttttttaaatttaatgctttttttaaataacagactcctacctcttttatattaatgcctaaatagataatataattaatcaaacttctaaattgtacattataacaaaattaaaatgtcttatttaaggtgacagcaaattttgttactttctatgagctgatatttcagataccattagaatttcaaagcattctgcaacttcaaagaggtcagattggtaaaatttgtgcttgcacaccctcatggaatattgtcagtattcattccaaaattgttactagaacaaaacagctttatccattcccttgccagcagaagtcttggcacgagatggctcttggctggaccataaataaaattccttgaatcaccagtatcttgatttaagaaagaaattttactgtgtctttcatacacaaaagctgattaacaatggttaaaaaaacactactccactttttcacaggtgtacaaaaggaaatataatggaattacattcaacaataaagcttaaagttcactctaggtaatagttgcattaacattcacatacacaagcacagagtaagtatatttcaggagtcttagcatagcatacagcatacatatgggaga

SEQ ID NO: 342762 - DNA, 1000 bp, Homo Sapiens
tcacatacacttcctgataggtggaatctgtagaaaactcacctgtccggggtgatttgaccctggctcctgtctttccccttcctcctctttattcagacctagaggaagactggggctgaaggccatgaggtccgtcttaggtgggccctcctcagagcacaccctctgccgcctctgctgcgagtatgaccagctccccaccgcgcgggagcacaccagcgtgggcttccccggcgcgcacgcgccctcagtgggcgttgccgaccaccacagcgccgtatacagcagcagcgtgagtaccaggaggctggacaccacgcagatggcgatgatcaggtacacgttgacatccaccagcgcagcctctgggctcgcggcgcccgccaaagtccgggaagaggcctttggcgcctgtccgctctccaccaacgacaccagcacggtggccgtggccgtcagcgccggctcaccgtgatccttcaccagtactagaagtcggtggcgcggcgagtctgcctcgtccagggcacgcgttgtgcttatctcgcccgtgtacagccccacgcggaacgggatgcgcgagccgcccgccgccggctgcaattcatatgaaagccacgcgttgtagcctgagtccgcatccactgcgcgcaccttcgccaccacgtggcccgcacccaccgaccgcggtactagcttgttaactgcgcctcccgcgctgccagcctgagtcgccagcagtgccggcgcgttgtcgttctcgtccagcacgaacacctgcagcgtcacgttgctgctcagaggcggcacgcccgcatcgcgcgcgctcacctggaactgtagcagctccagctcctcgtggtccaacggctgcagcgcgtacaccttgccgctctccgcgtgcaccgacacgtagctcgacagcgcgcggtcgcccaaccgccgctccaccagcgagtaggacaccagcgcgttctcctgcgcgtccgcgtcccgc

SEQ ID NO: 342763 - DNA, 1000 bp, Homo Sapiens; identical to SEQ ID NO: 160370

SEQ ID NO: 342764 - DNA, 1000 bp, Homo Sapiens; identical to SEQ ID NO: 160371

SEQ ID NO: 342765 - DNA, 1000 bp, Homo Sapiens
tcaatttttaaaaagatttaattatgtctaatgttcagcatattgtctgccacaacataattaataaataataagtcgttttagttttgttttttgttgtcgttgtcattgttgttttttaatgatggaggtaaaccaaggagggtaggggttttaaaacctcttagttttcccttctctctggagcccagcagtggcttcatgagaccaagtgtctactttgcggatccagtctcctggtagtacggatgggctttcccccgagaacggaactgcactgataacgtgaaatcgtaccatttctcaacaagtgaaggtggtctctttacattctcaaagccttgagtcataactatctgttttcaaaagttgacattatcagatcagttattgagtagataaaaggactgactttcagagatcacaatcacagatttatgttttggtagaagtggtctgagaatactggtaaaaatatacagatgttagagtataacagaatgaataatcagtacgtcaataaacattctgagaatctgcaatttactggttgactgcactctccttgacaaaggtctttttttttttaagtggcagtatgacttgtcatttatttcaatgaaaatttaaatgtttcttacaaatcctctgaaaagtaaaactgatatttttacaaacagaagtatatgcaaacagtcacaatatgcattaggacactgacgctatttcttacatgccaagtagttcctccattctggagaacacctcttatctgaaagatttttttttctttctactataaatttgaatctaagttatttttaaagagtcaaaaacagagcagaacatttttgaactgataaacaagaatataggctggactcagtggtgcacgcctgtaatcccagcactttgggaagccgaggcaggtggatcacgaggtcaggagttccagaccaacttgaccaagatggtgaaaccttgcctctactaaaaatac

SEQ ID NO: 342766 - DNA, 1000 bp, Homo Sapiens
aaacaataacatttttattttgaaaggataattcttaaaagacagttttatacagaataagttaatgaatttttcaatgtgtgattaaaatataaaactggccagggggaggggaatgtaagcagtaggggatggcctggataatctacctctaagatcccttctaacgctgaaattctatgatggaaatgttgctgaatatataaagctacggagtggtggctcattcagcatcctagacagtcacctttcaggaaaagcagactacggtgttttcatgggagtgttgaaagtcattaaaaaatgaattgatatatatttattgggtaccttctatgttgaagacactgtgctaggtacttcagaagattcaagggcaagattccttttcttaggaagttttcaacgttgtgtttccccaaatttttgagatgttgttatgaaatctgcccctgaagatgtatcctaagaaatctcttaaagttataaagtatgtttttaggtaattctgagacttttttcctgctctaggcaagggacatccagataataggccaacatgttattaataagaataataatccctgatgtattataagcaaggcatatagaaatatccacttttcaaaataatttacacaatttattcaagataccaagaaagagtgtctgtaagtaattctgcatggacatgaagaatgttagtagtagcacatactggtagaatcccttatgctgaactagtaaaaaaaaaaaaaaacaactaaacattgagtttttatttaagacagtgtttcccaaaatgtcttctacagatcctgcggattatgaattggcagtgtgtggcaagtcctagtcttttttcctggatgtgcagtctcagagcggcagtttcttcagttcctcattctccatcttcctaagccttttccctaggctgctagttctgggtatcctgccttcccttctccttaaatacgtctctctaactgaactgtgt

SEQ ID NO: 342767 - DNA, 1000 bp, Homo Sapiens
ttttttttttttttttttcaagtctcaagttttttattttcagaacagagtctggttttatttttaaaaagagaaggaaaaaagtgataaatgctagtgaggtgccacttccctccttcttccaggctctaaccgccagctagctctctttcacaaaacccacggatgcagaatcaggacatgttaaaatggaacagtctttagagagggtctagtctttttaaaataagtaaggatttggggactaacagagaggaagcccctgacttgctgaattgttaggagcaggcggttctcgagattctgagcccaggatccttttctgtgaaccatgcacgtgctggcactggcctcaggagacagtgccctgccttggctgtcaggtccacggagaaatctcaggtttgccccttcactagggatgccctagaaagcaagggcaaaggaagctttaggggtcatcgtgactggggcaggggaagtgagtgcaaggactcaagaaaaacacagcagaggaagggactgaccctctgagcacacagtggttgacccacatgtgtaaaagagggtgactggggctgaactgggggcctgatatctgccagaattggccaagttgccatcagcttcttgacatatccagggaagtggcagctcattggaacttatcacagcctcccaccaaaaacctaacaaacagtacagagattttacagtcagggaggcccagcaggagatggccatccaaacaatagaaggggggcagatcagggggccagccagcggctggccatggctcagacacaatgtcctttcacagtcactgagattaggtagcagagaaacacagcaaagctggagagaggacatgggaacagcgagcagctgttggtacccacccagggcccaggccccagaaccttgagtacaatcaaagggagaggagaggagtcagtgggggcaggggaagaaggcagaaaaaaataccaattaagtgtga

SEQ ID NO: 342768 - DNA, 1000 bp, Homo Sapiens; identical to SEQ ID NO: 160372

SEQ ID NO: 342769 - DNA, 1000 bp, Homo Sapiens
gcaatgccaaaagggtaaaaatctgtatttcacagttgtatagaataaaggctttagttaaaatatttcaaagtgtagtacacatttattttcatttgttattttctttcatagcagattacagagaaagaaagaaacctctggtttcatgttctccctggaaatattagcattgatacccattttatcctccaacttatgggggaagggaaagtaaaagtgagggagggaagagccagaacctttgggtgagggcaactttgggtcagactgccaggctacagagttaagggaagctggccccagaacagtcctgtggcgattctgttctacttcctgcattccagcagacttgacactgggctcccagacgatccaggacacaatgcctcactgttatgcacacgtatcagctgctctggtaggcttgacaagggtttgctttaaatgaagggtttgctaatttgggaccctccctccatatagttggcctgtgccccccagagcagacattccttgtcctgcatacctgacacagcttgtgagttccctgcatgtacaccagcattacaaatgatcctgtaaaggtgagactttcaactaggcacaagctagaagacgaggccagagcagctttcatagtaattagcagtgtgggaactgagggtccagtcaacacagcagaggacttcaggtgatgaggggccgtccccaggtggagtgcagggcctaacctagccttaacctccaaaggcacctggggtggggagaacagcttcctcccctacaacaggaaagaacaaaagggtctttacctactcttaatctaatcccctaattcccccttggggttgggaaccgtgcgtggatagacctagtcaggtagactggctttgagaaattgcttagggtgttgaacttaaatttgtgacttttattcactattggggctgggtagatgccttgtatatttagaagagatcactgtttaagtttggga

SEQ ID NO: 342770 - DNA, 1000 bp, Homo Sapiens
tttttttttttttttttttttttttgttagaaactgattttaataagtcacatgatacaaaagaatgagaacattcaaagaatgagtaaaatactgctttgtcccaaaggacaagcagaaaatgttaaggcacaacggatgctcagaaaacgtaagaagctgaagggaaaacacatcatctgtgtactcagacacacacactccaacccatcacacgaacacaccctcgcccgcccatcagagaagaattcgcctggaatcagctgggggcggtggctcacgcctataatcccagcactttgggaggttgaggcgggcagatcatgaggtcaggagttcacgaccagcctgaccaacatggtgaaaccctatctctactaaaaatacaaaaatcagcggggcctggtggcatgcacctgtaatcccagctactcaggaggctgaggcaggagaatcgcttgagacagaggttgcagtgagccgagatgcgccactgcactcctgcctgggcaacagagcaagactccgtctcaaaaaaaataaaaaaataaaaaaaataaaatcacctggaatcaaagcagcagggacagcctgcgctggagccgccagaacaggcaggcgggcagctccgcaagaccgagcaactccaggacgggagacgagaactggcagctgacatgaccctgtgaccaggacattccaaaagactgggggcccttcccaggcctcttctttccgcctattattttaacaaagtccatgctgccagaaggcaagcctacctcgaaacacctggcacattcacaagctaccaaagggaggagggtgaacaggctctgatacttggagtagaggcccaagcttcctctcccacggttttccaccgggaacgaagacaaagccaagccctgtgcagccacaggaagtcccaggaagcacctgtgagacccgcacacccacctcggagggtcccagggctgggaaagccctcctctcaggg

SEQ ID NO: 342771 - DNA, 1000 bp, Homo Sapiens
gatttttctcccctttattaaaaaaagattatacaatttgggctcatattaaaaaattcaaacagtagaacagtgtgtacgtagaaggcattccccactcccactccaggagtttgggtatcattctagaagtgttctgtcaatacataagcatttttcattcaaacacacacacacacacacgggatcccatattctataatttttgtgttttaaaaaaccaccatatttcatagatatctttccacttaagcacattcggagctccatcatttttttttttttttgagacagagttttgctcttgttgcccaggctggagtgcaatggcgctatctcacctcactgcaacctctgcctcccgggttcaagcaattctcctgcctcggcctcccaagtagctgggattacaggcatgcaccaccatgcccagctaattttgtattcttagtagagacagggtttctccatattggtcaggcttggtctcaaactcccgatctcaggtgatctgcccgcctcagcctcccaaagtgctgggattacaggcaagagccaccgcgcccagcacggtcttttcaaagaccagataatttatttaaccaactgtctaaagatggacattgtgattgatcacactattttatatgtaacattgaatggagtgggtgagtcctaggaaacattctctcctaaaagtttacatttttcattgactagaagtgaccaaaatagattctactgatgagaaaagacttttgaaagcagtatggtcaggttggcaggtgaatggcctcaagagcttaggatttcattgctactaaaagaacaagactattcagttgtgaaacaatgatttagtcaaatactgatgctgtctcagatgagtaactgcaaatcacttcaaaaggtagaagggtagcttaaatgtgaaaaaggttactgccacttcatgtagggaagataacaagcatttgcaaatagcaaaatagaaagaaat

SEQ ID NO: 342772 - DNA, 1000 bp, Homo Sapiens
ttattccttctgaagggtctcctctacctccttgctattaagctgggcattctcttctcttttcaacatctcttcaaagatctcattatgcatgtaaaagaagatgtacccagtgcaacgcctatcctcctgcatctgggcctcctggatacctaacacccgcatatcatcgtaagtgaaccagatctgtttctcaaagtcataggcatcacagatataatggcctgactttagagtcttcccaagatggctgacaacactaatgagccggtaggtatgatctcccttatcatcatttctttttgtttccttggctttagattttatcttatctaaaatgtctttgtttcttggattcttattggaacccagtgcaagtagggaattcctgttagacttctgtagatttaattttgtaggtcttaggaggttctttgtgtgcccctgggtgcctggctttggaaagctttgaggcagtgcctgctgaggggcttgttcacagattctcataccgtcacactgctgagtctgttcagacactttttggaatctttctggaattctgatatttttatcttcatacaaatctttagtaggattgataatcctatcaaaagctacaaacttactggttttcacatatttctttcgttttggattttcgggcactgtttgaaagtcaacttttgagagaggtgtgcctgggctgctggcaggtttacctccagctttgtggaactgacaaagtgaggtatcttccagatacgtcattaagtgagctaacggttctttttcaatgaatgctcgatctcctgagtatacagattctagctcatttggtttagaattttttccaaggtacttttgctgctgtcttctgcttgcccctttaaagactgtctggccttttttttgttcagactccttatctgatccaatgtgtggagccaggatatctttggattcctttgttgcaggccatgatacactgatgtttcca

SEQ ID NO: 342773 - DNA, 1000 bp, Homo Sapiens
ttttttttttttttttttttttgcctgggctgccgggcgctgcgcgtgcccgctttccgctttattggcagagtccaggcgcgcccggaggccgtggcgctcgcgcgggactttcgagcctcgggcccggcctggcatgcacgcccctggccctcccgggctcttctctggcccggggctcacagtagctccgaggccccgaggcccggcggggcggcgggggcgaggtcggggtacaccaggaagccggagaaggtgatgtacttgccgtggttgctgtaggcgccgtagccgtcgtggtcgtggctgagcagccagacggcgtcgccgcgccgcagggccagcatcacgctctggctctgcatctcgcggcgccgcgacgcgccgtcgtcgtaaatcatggcctgcacctcgtcgcggttcttcatcagcttaaccgacagcgtcttacgcggcagcttgcccagcgtgaaggagaagaagtaggcgccgggcagacggcagcggaacacgccggccgccgcgtcgaagtcgccgccaatgttgacgaactcggtgtcgaaggcgagtggttggtgccgcggcccggggccagcgtccgagcccaccaagctgcgcgtgcgcgccgccgagaaggccgagcgcggctcggggggcgcgggcggcccgcgcgcaggcgcgtcagcgtcggcgtcggcgtagactaggtagccgctgaaggtggcgccgggcgcgcctagcgcgtagtgcggggcgccatgcagccgcagccacactgtgtcgccgtagtcgagctgcagcatggcgctctggctggctgcgcgccgcgcgcctggccgccgctgctcgtcgaaggccagcgcctgcacctcgtcgcggtttcgcaccagcatcaccgacaggctcttgtgcggggccttgccagccgtgaaggagaagaagtaggcgccgggcacgcggcagcgaaactggccggtggccacatcgaagtcgcccccga

SEQ ID NO: 342774 - DNA, 1000 bp, Homo Sapiens
ttttttttttttttttttgccaagaggagacagcattctttaatcatgctggacggcagggcgtggcggggtcaggcaggggcaggatcaggcagggtggtttatagcacaggtcttcctggcacttggtcagaccctgtttccgtcatctggccatggagccacggctcctcggctgtgagcaccagagatcaccccccggggcacctcagccccagagtctgcatgagcaccaatgggcggaggccgcctccctctggggagaagggcaggccacctgggtttggaaggctaggggaacaccaggccaccccaccctggaagaagaaacggaaggcctgaggtccctcctttgctctagctccccagacctgctgagggctctaaagcctggggcttccgtggcccttctcctgcaggtgtttgtaaaggcagcaccaggccggaggagggctctgagacgaggagctgcccacccgggccttagcaccttgataaagcctggagagtcggggcactgggccggtgagaggggcatgaggggcagagagcacctggggacagacatcagtgtctgagggcagctggaggccctggggaaacggaagttcagatgactttggtggaagggactgagcaaggccctggcagagccctgggaggaggcaggaaggggatcccagtgaggagggcaggtcttctcgcaggatgccgtatcagctgtggggagagctatgggtgtgggttccattcttcgggggccacttcaccccccaaatgcccccacactcctgggtcctctcctcacagaacccttgacctggccaaggccccctggggtttgctgtaacgatgagcactgggcaggtggatgaggaacgggaaggagatacctgcccctgccaccgggaccccgtcccaccagccttggggagcagtgggtaatggaggaccagcagcacctgaacacccagaacacaggcccccatgagctctgggt

SEQ ID NO: 342775 - DNA, 1000 bp, Homo Sapiens
tttttttttttttttgcttaagattttattcgtttaataccaaaacagctcctcttttctcatgtcagttctctaatccccattaccatcccaccagatatttgaaaacgaaattcatctctaggcttcaaaccaattaaaggaaattcagttttaaaagctactcaaaataggctttgtaataaaagaaacatttaaaagataagtaagcaatgtccaaaaaatgaatgcattcgtggattacgatcagaagaaaattttaatcacagtgatttgtggttcatgactgtctgcaataacttctccatttccagtttatctagcaaatcttgtagtctttaaagggcccatatgttcacttttcccggattagttacttctgttggctcttttttatgctttataacttggaattctatctttggctgttatctgtaagcaggtgactacctcaaaccacctttgctgtctcctttttttctaatactcattgttcttggtctcctgtacacatgtcctgactcagaaggagagcaataagtgcacaaagtatggcaggaagatgaagacaatgaaagcaagatagggttgaaagacaggaaaagcaagatagggttgaaagacaggaaaagcaagccttgcctttgcacacaactgctagatcattgcaactttcatctgtggtaatggcagtatccagctctgaaatacacagggtctctacactttcttatgaataaatcctccaattctcaggctggctttcaaagctcttacaaatatggtccattgattctccttctgggtctctgttctcacttcgtccccatcattacctctgtctcaagtgcgctttcccccaacttgtgccactccaagtgtcacccatcatgtaaggcccaatgagcagagaggatttccctatcccttctctgtcacatcctaatttggaagtaaacatttcctcttctttcacagcattttgcccttatttccagcc

SEQ ID NO: 342776 - DNA, 1000 bp, Homo Sapiens
tcgacttaaatctaaattttattttattttattttatggccatgctccctctaataaatctaaattttaaataaataagtccaagtattgttgtgtttatgtgtataaacctgcgcacacacacaaaagtgtacacaccctgctggtttctattacaagaatgttaagtttggtttgacattcaacagtcaattagtataagtcatcacatccaaagaataaaggagaaaaataaaattatttcaaaaggtgcagagtaagtatttgagagaaatttaaccttatttgtaattaaaaaaatctttttaacagcttgagaatatatgttaatgagtacattaaaaatcctataacaaccatcaaacttcatggtgaatattgacaactctccacatgccacacccaccacccctgagattgaggatgagacaagaatacccactatcactacttatagtcagcattctgctggaggtcctagccactgcaatttgtataccaattttatatcttgcaaccttgccaaacttattagctctagtagtttttttgtgtgtggattccttaggattttccatagacaagattatgtcatgtgcagatatagttttacttctttctttatgatctggatcacttttatttctttatcttgtccaattgctcagccactgcagtttggcaagagctaaataaggcataaagattaagaaaggaagaaataaaactgtcattcacagaggacatgattatacaaaaataatctgcaaattattacaatttaaatgaatgtcacaaagcctctcactggataacaaggtcaacatagttttgtagcaacagaatctgtatatactagccataaacaaatataaaacgtctaagaataaatctattgaaggatgtgcaagaacactttactgaaaaccacaaaaatagttctgagaaacatacaaaagacttaaagtgaagagatataccatgttaatgaataggaaga

SEQ ID NO: 342777 - DNA, 1000 bp, Homo Sapiens
tttttttttttttttctttttttttttttttttttttttttttttttttttttttttttagttcttgcttttaaataacctcttccttatgctattcagtcatggagttaaattccacacaagaattgtatgtatataatttcaagtggttgttctgatttaaatgacaaaatatacatatattggatgtaagtgatccaaaggaaaaaatatatacatatatatacattttaatataaaggtgagtgataagaattctcatcatcagcttctgggctgtccatttggagtcagctcataccattgtgaaaagcccttaatcagatcttcttttgataagtcaatcagtacttttcctaactcctttcttctgtgtgagccaagtggcctactatttttcactgcaacatctagtgacctcttctttacttcttccatgggaacaaaaaattcaaatgtctcatcaaacaggggttccaaggtcttccgcttcactgaagtcttcttacgacatgcccacttcctttctggcaacaagtagacacggacgtagggatcagctccactgctggtacatggtgttaggtttctgcagccattgattagcacgctgaggcagcgccgcagacacacatagcgcactgtgagctgaatctcacccagctgccgtcgcctgaggtccccacctcaaccagagtccagcatctattttatagtcagtacgcagctagagccataaacagcctgtttggctctctctcccttgtcctgtgttctttctaccacaccatgctgcctcttaggaagatattttgtgaaaaaacaacttgcacagaaatgtaagttcatatctacttttccatccagcgaggtatttttcatacaggcgattttagaaaagattaagcagagaggtgcatactcaatgttgaggctgatatctgccaggtcaaagcaagaagaggccaaggagttgagcgaggacatgctgggagccagc

SEQ ID NO: 342778 - DNA, 1000 bp, Homo Sapiens
agggtttaaaaaggggcttgtttaattaattaaatacaaggatgaggccaggcagggcgggggaggggcgccacccacggaaagcacacgcctctcggagccgcctcccctgcaaacggctggaaccaggtcccagtgatcagcgactcctgggagagtggaggggtgggcgcaggtctctccaagcccctggacactctgaggtcaggcagacccaggtccagtctcaggccccctcctcactctctggaggggggcaggggtgtcttcagggtttgcccacggctggaaggggcccaggctccccgtgggtcctcactacacccctggatggcagaagcatcctggcggtcagggtgggctgcacgagggccctacaggcctgcgggggctgggctgggcgcggggctgggcgcagggctcccggccaggctgcagggcagcgagtcgctgggggaggtactgcgggcaccagggcgccggagcaggtccgggtggaagccggggtggcggcgggcgtgcttggccaggtggtcactgcgggtgaagcgcttggagcacagagggcaggagaagcgcttctcgcccgtgtgcgtccggtggtggcgggccagctcgtcggagcgggcgaacttcttgtcgcagccctgccagtcacaagcaaaagggcgttcccctgtgtgcgtccgcaggtgcgactttaggtgcgaggacttgtagtaggctttggcgcagtccgggaagggacagcggtggctcttggcggcggcggagggcgcggcgccgggggcgcggcccgaggacggggacgaggcggctgaggaggaggaggcgggcgaggcgccccccggggcggctccgggtccgccgcgcaggtcggccaggatgctggcggccagcaggtggggcgccgcggcggcgccggggcccgggccagaagcggcggggggcggcgggggtggccccggggtcccgggtgaggcggcctcgcggcgcgccg

SEQ ID NO: 342779 - DNA, 1000 bp, Homo Sapiens; identical to SEQ ID NO: 160373

SEQ ID NO: 342780 - DNA, 1000 bp, Homo Sapiens; identical to SEQ ID NO: 160374

SEQ ID NO: 342781 - DNA, 1000 bp, Homo Sapiens
ttttttttttttttttttttttttttagaagggctaaggaaaaatatatttgctggttacatataatggtaatagaagctagtaattaaatataattctcattagaattacaatatagcctttgaatattctattaaataaatgaattcaatttaagtttcattctcaaattaattttatcacatttgattggcccagtccattacacaaaaagacatactgactaaatacaacataatttctataacctgaggggactcgcacatcattacctgattgcttgctgacttggctgttgattggtttcatgactttgaagcttccctcctatgacaattcttcctcccctaaggacttcctcattgctgtttcttcatcttgccctaagagttctctctcttccataaacttcctttcctgggatgaccttctgtcatatgttgttctttgtaggtagcctccatctaaaagcagctcccgtgtctgtgacatgctctgctccaggaattcagaggcctccagtgactctgtcattgctccaggaccaccaggctcatcctcgggttctggagactgatgtgtgtcttccccatgctcatacatacacagcctcttttcaaccacctcacggatcaacatgtcaagcactgttcttcccaccatgctatattccatggttttttcaacttcattcattagccatggaagaaatcctatctcaatatctctttcaatgggatcataaaagtagccactatccctgaggctgccaaaaacagacgggagaaggtcagccaggtaacgctgtgcaaatgctcgggcggcgattttttgtgatgtctcgttgtgcttgtgcattatttcccactgctgtttcttacgccgttctttttcttctcggtgtcgcctctcttgctcttcaagtcgttgaacttcagcacgttcactattccgtagttcttcatactcacgctgactggcccgcaggttagccagctct

SEQ ID NO: 342782 - DNA, 1000 bp, Homo Sapiens; identical to SEQ ID NO: 160375

SEQ ID NO: 342783 - DNA, 1000 bp, Homo Sapiens
atgaaaaaaagttgtgaaaatttatttaggctgattttagtgtaacattgttttttataaaataattttataaaagagtccatcaagatattatatagaaaatgcacactaaggtaatatatatacacttcataaaaatagaatacatcttggcaattgcttagagtctattaccaccatgtacagtgtattgacgtgtaatatttatgttaatttgaacacatgagatttttaaaaaaccaaacctgtcccactggtatctttaaaaattgctttcattgacaggaaaataaacaaaattctggaacgtaaaagttatgaagctaactggatgaaagtttatattaaaatttttaaagttccatgccatgtacaactgacgtgagggcaaagcagtcttttttattattattatcataagtggttcagctgatctcacaaaatcactgaaaataatatccttgttctgaatgttcaatcaagataagcaccatttgggatcaaacaagccttatagtagctgtactatattttataaaatgagtggtgtttttcttcttaaaaatgaaaataggcaagtcctattataatgtatcaatacttacaaaaatctccgtaagttattttataagctttgatcaaaatacttagtaactaattttatgattctaaaaatagtcaaatgctcaaaaactctatttgattctgaattagttgttcttgtttttcgttgtttggtttggctttcaggaaaatgatcttaggtactacactactgtaaaccatcactgatatgtcctgttagatgttcagaataatctttgggaagtaactgctccagtgtaataaataaaataataagggacttttctagaccatacttcaagatatgaccatggtgggatcatgaaaatacctcagaagtaccaaggaaggcacacaaaacagagtgtagcaccattttcaagctgccaagattgcaactgttcaagagacagta

SEQ ID NO: 342784 - DNA, 1000 bp, Homo Sapiens
taaccttttatcataaaaattatttattagctgcttaaatgggagactatcccactcccaccagcccatttccccttttgatgctcagtgagccaggaatttgttcaaatagagaccacaccaccctctggccctgccttgatccgttagtgttacctgattcaattgagggaagtaggatggacaggtggtcccagatgggtgtcctgtccagtttgcagttattccctgtttgttgaaaataccaccaccaataccaaccaacacagttcctacagtctcaatcaatgaacagccaagaccaactcccgtgccctctctccaacccagtgctgcagataggagagagatttaagtctttgtcactgaagctaattttgagagcgatgaatgggagtaggaaggcatttaatggatcatggaaaccccacccttcccatgcccaaccttaagtctcttgtacccgattgtccaggggactggaggtgggtcgctgccatgaggagagagatcagggaggccagtcctttgtgacccttttctctcgtcaccgtctcaccatacccaggttccctcccctagcagtcaaagatcacagccaagtccaaggcttttgcacacgttcatcctgttggctctgttcctgacccaggaaacactaagcaaaagctgtgtgcagagaccccagcctcagccctagccagctgggaaaaggtgatcccacaaggtggtccttgcaatcataactggccccagccccatatccctccgagtgtccagcggcccatcatgactccagccggggtgaggcggcaggacggaggtagctgtctgacatgatgatgtcgctggtgagttgctgctccaggaactcagaggtctcctcagctatctggcctgggattcgaaagtcaacagcaggtggctcctgcttggggctgggtaggggtcgggaaacccaggactcagaaggacagccagtcccctgaaggaactgcag

SEQ ID NO: 342785 - DNA, 1000 bp, Homo Sapiens; identical to SEQ ID NO: 160376

SEQ ID NO: 342786 - DNA, 1000 bp, Homo Sapiens
acgagtgatgtgactccttggataactaggattgatcaccaaaataattgacattaatagccaaaaagtaattaataaaaacactcagctcacataaattaataaaaatgtatacttagtacatataaaatcaaaagttaactgggcttagtagaggagcagaagcagagatgtttgcatttgctttgtttttaacatttctaaccatccatcagttattccatggaaaggcaggatggcatgattattgagtatgggctcaagaagtcagaccgtacatgtttgaattccagctccactgtttactgagttacctggggaaagttacctaatttccctatgtgttagctttctcatctataaaatgagaacaataataatacttactatctcagggttgtcgcaagtattaaatagaacttacaaaaagcactttgaccgtgcccactgaattgtaagcactcggtgttacctactattgttatcccgtaagttatcatgagcctgaggattttcaacacatgctttatagatttttttctctctattaattcttgtttaggatgatcttgaaagcaatgactgtttaaaattatgagaagccaaagatgcccctgcaagccaccttcttggtatcttggccaactttaaataaatcttggcaagtaaaggtatcaatagcaaagtatcaatagcaaatacactaaaaaaaaacaaaacaacaacaaaaaaaaaacaaaaaaacgcttaaggtaacaagtattctcctaagcctcagaaattgagtattaaaaataaaagctaggtgacagagatgaacttaagaaagaaaaagctgagaaataagcactgaatctatatacacttggaatgttttaaagaaagtgtgtacctgctcatcaaatttgtatggggaggaaatgaaataagtgaaagcagtctagaattttactttagataaaatcatacaattccatgtattatttttgcctttgattgc

SEQ ID NO: 342787 - DNA, 1000 bp, Homo Sapiens; identical to SEQ ID NO: 160377

SEQ ID NO: 342788 - DNA, 1000 bp, Homo Sapiens
ttttttttttttttttcttttttaaatctcatgaatattttatagattatttgcatagaacatgtttctaaacagattcaatgtaacatatactgaaaaactgcattctgcagaaaaattctaccccaatggctccaaagaaatcgtgtttcccgacgggacggtggaacatctcaaggatggacaggaagagaccttatttccatgtgtttctcctctcaggaacggcgacaaaaccattgtgctcagcaacgggcagaaagaaatccacacagcccggttcaagaggagggagtacccggatggcaccgtcaagactgtgtattgcagcggctgtcaggaaaccaagtatgcctccgggagggttaagatcaaagatgaagctggaaatgtcgtcctggacgagaagcagatgagccctcaacacgcagcatcacatgggaaatgccaattgcagatttttgctgtagtcccagctactcaggaggctgaggcaggagaatgacttgaacctatgaggcggaagttgcagtgagccgagatggcgccactgcactccagcctggcgacagagcaagactcggtgggaggctgtgtggtatttgtagaattctttcaagacacctgagcaaataaacatgggatgtaatgtagtttaatcaccacttgaacatattgtgctttgtcagagctgttatatttatacatatggccacatcttcagtcccaatgtcatagttaacatgctggtggcacaggtagggacttgaactattgctttctctaggacaggatccttggtttttaaaaatccatgtcactttttcttgatttgattttttaccacttaggaatgttgcttattcattagtttctggagctcttggattattcttttgacatttaatccattcctggaagctccgagagttgcttcattgaaaggaaaaacaagaacaaagttgcctgcttggggatctggagctttgccacggtctga

SEQ ID NO: 342789 - DNA, 1000 bp, Homo Sapiens; identical to SEQ ID NO: 160378

SEQ ID NO: 342790 - DNA, 1000 bp, Homo Sapiens
tttttttttttttttttttttttttttttttttttttttttttttttttttttttttttttttttttttttttttttttttttttttagcattttatgacttttattttacatgtcgccaacgtttgtacaacatacagtggctacatctaaaactttgagcatttttttatggcgcaaagagacagaaaggttaatgacacacttaactgttacagtgactttgggtagggccctaaagacagcacacgctccagagggcgggctgagtgttgttcacacttgggtcctgaatcgctgttgtaaggtacagagacacactttaactggggaatggggtccccacacagtgatcgccccacgggagggtgacagaatatgccaggaattgtcttggacatgggccccagtcaccacaatcagatggcttatttgaaacaaacaaacaaaaaaaacccttgattacgacacaccaaagctgttccaatttgtaaaaaactgtagttattacattgcaatgaaatctctttaccaaatcttgggccagtgttttacctggatagtgcttacattataaatattggtttttgcccttagtgctaacataagaaaaatcagttccttgtatactcaataacagagcttggaccagccaatgctgtctattcactcatggctataatgcagccgacagaattgttcaccatggaatgttttataaacctgttcatattccagagagacaaagactcaaaactacaagtgcaaagttgggtagagagagctgccagaaacactagctcattaggcatagaggccacagcaaatcaaattgttccacaaactcattcttcacacaaacatttaaaacactatgcagccaggtgtggtgactcacacctgtaatcccagcactttgggaggccaaggtggtcggatcacagggtcaggagttcaagaccagcctggccaacatggtgaaaccccatctctactaaaaa

SEQ ID NO: 342791 - DNA, 1000 bp, Homo Sapiens
tttgttttcacatgtagtttatttatttaaaaaaatagagacaggggtcttgctatgttgaccaggctagatatgaactcttgggctcaagcgatcctcctgcctcagcctcccgagtagctgggactacaggcgcacgccactgtgcccggctagtttacttctttcagaacatttgttatcagcaaatttaaacatttcaacaaatatttcagtttccatttggaaacaaaattcttgtttgaaaagctgactggaaacctgtgagaatgggagttccaccctcctgtggggatggaggttgaaacagcaccagaggcttcaagaccagtctcctctcatttcggggcagtaagatacatttagcttacttaaacagactgtgctggcagagcaagtcagtggcagagctgaagttcagcattgtcctgtggaactcctggatttttctcttaatttgcttcatggcaggagtgttacatttagtcttgaaggtcatttgtttcagcatcttgtctgtcaggtaatgtaaccagagcacattactataagggtgatattcaccccagcggttgttattctccttcttcatgagcctgtagatgtcaaactggtagtcaccgtcaccggtaaacaggtcctcatccatggaaacgtcacagaaaaccacaatcccatcccgttccaagcgcgacagggtgtagtcaatgatgctcacttgcaacccacagctggggatagtgctgctcttcccattgagggtgtagtggagttttttgaggctggttttctttaagagcacgttcccccagtgtaagtctcggtgctcaaagcgcagtgatgcctctgccactgcgagggaggctgtgagctggtgtagaatgctctttgcagtagccaaggaagacaacttggttcgcatttgctctaagtcaatccctccaaactcaaattccagcacaatgaagagctggtcgtctttaaaaaaatcaggccggtc

SEQ ID NO: 342792 - DNA, 1000 bp, Homo Sapiens
ttttttttttttgtatttgagtattgttttattaaccaaaacacaaaaccaaaatgaaaactggcttagaatataaaattctcatttttcaaagtgaaagtttgaagatactagctaaagttgataacttaaatagtggtaaaagtaaataacttagaattatggcagcaatcacaagaagaaacagaaaacagggggactagggattcggtggtagacttttactttaaaatagagctatgcagcagattctccatgacttggcttacatgcagtatgtcctatggaagtaaaattttcaaatacctccatcaccttcagtaactcatattaataaagtaaaagccaggtatataaaacaagaacccagtatataaacatatacatcaattggatccccaggtaaaccaaaaggagtttttaaaaatatccccaccataccttttaagacaacttttccgctaccctacagtaggaagtaaccacattcaaattagttaagctataaaaaagtaaaaggggccacaagctttattaaaagtaaatgcaacagtaatatgtacagatggcacatggtgccaattttatttgtaaatatagtactccaactcaagtttacaagttacacctttgccacagccttggctaaatcttgaactagtgcagaattcagctgtggtagagtgctgatcttagcatgcttcgatgtggcatacttgttcttgacagtcatgtgctttgtaagtccttgatttaccatgactacattcttagccaggtgctgcataactggaagaagagattcttcagtatatgacaggtaatgttgtagagttggtgtccattcaccattatccagaattttcagtgctaagcaaaaagctcctgctgcaatttgagaaggaggaaagtgcaccatgtcatagtccaacatagttagttccatcaggtatttggccaaagtatgttgctcgacatcaacctctccaatcttagatgc

SEQ ID NO: 342793 - DNA, 1000 bp, Homo Sapiens
tttttttttttttttttttttttttttttttttttgagcggttttcttaagtgtctttaatactccactcagggcagcccctccctctactgagaggctcttggctctggccccaagagcagctggaaggccctggcctgacttcaccacttgatgtccaggctgtgtgtgccacgctcctggctctggtacgtggtatgcagcacctctcgggccttgggggagttgatcccctccagccactcctggtacagctcctgcacgtgtgcactggactccggacgccgcacagggatgtcagcgtaaatgccttccatctgccgcagcagggccttatccgcatgtccgtctggagtctgggcttggcctctgccatttaagcatcctccagcacaggcgaggacctccacaaagtggaatgggaacttgcccttcttaagcttcaggatcatgttctggatgtttcgaaagccataggctgcagcaaagcgtaacaccacctctccgttcttctcaagggtgacctcttggaagtctttgtttctcagggctcggtaagtgacctcctccacatcctcgttgaacagctccttggccgcatgtctgaagatgtgtgccaggtgcccgtctgagctggctccatcatgacgcgtcactttgtcctccttcaagtctccaaacagagtgtcgacggcagcatctctcactgagaggtcaccttgctccattatttgagcaatttcacctccgccgcccaggctggagtccagtggtgcaatcttgtctcgctgtaacctctgcctcccgggttcaagtgattctcttgccgcagcctcccgagtagctgtgatcacaggtgtgcaccaccacgcctggctaatttctgatgttaacacgcagtcagcgccccgggagccatgcaaagcagggggaaggctttcctgaagagcctccagcttcttgtcataacaaggggccacaatgacgtggaaaatcttct

SEQ ID NO: 342794 - DNA, 1000 bp, Homo Sapiens; identical to SEQ ID NO: 337094

SEQ ID NO: 342795 - DNA, 1000 bp, Homo Sapiens
ttttttttttttttttttttaccacatgattcattcaacactagtaattttatttcaaaatataaatatttcacattaataaagaagttacatcagtaggttgtcaaagcaagttagctaagaaacagcatttgtgtgagaacagagggtatttattgtattcgaatattcttttttacttttgaattgcctctttcacctgagaacccagggatgatacattttcaaagagttatgtaagcaattacaactctatatcaaatcttagttcaaaatcaaattgtactggaaatacacttcagttacctaaataagtggcactgcaaagggcaaagaagggttttctttgggatggctacaatgagagttacatctgctgggtctctgcaataaaaaataaatgatatttgataataagccaaaattatcaggatttgcttccatacttttcactgtaaaataaaaagctagcaaaaagctagtaagaaaccagatgtctagtaaagaactctggacttggagtcagaagttctgcaactaaattctggctccatcattttgtggtataaacttaggggaatatcaccaaaaacttttcagagcctccagagcccccccatctgtacaataaggataatattgtctgtctcacagggctgttacaaaaggtgtctgaaaactataaagtgccatacaaaagcattattaaaatgtaatatcaatatatcaccactgtatttgcacattagttgatccttgaaaaacctgcaaaattaaacacaatactgattttacacaccacaggtggaaaagaatctctataccttaagtatagctctaaacagcaaatatacttgctttctggacttcaagatttattacacactacatggtaccacagtaatagatctgccattcagtatttccattagggatgtcttctcaaagagttgtaaacttgatcaagggccatgtttctcaaaggaccctgtagtccttt

SEQ ID NO: 342796 - DNA, 1000 bp, Homo Sapiens
ttttttttttttttttttcagagctgtcaagagaactttattcattggaaactgggccagagacccctcacgaagctgcaagcccctgggccctgggcccttctgtatttggaccctagtgaaatgtgcacagtctgccctctccatgccagggagagacagagaggaatgccatttttctgtgtgatgtgggagtgacaggggaaagagcagaaatccggttatccctcctgagactcccagtgagctggggtgccacagggcacgtggccccaaagtcaggtgcagatgcatcccccatcccaggggtaaactcctgagactggcttttggatcaggttgggagggagcctcatcagacgatcacaggcagaggtggctctgagggcacccgagagatactaaccccaacgcctaccagggcacaggggctctggctgaacacaaaggtttaagatcatccgaaggcccctgagttgccaaaacacccaaatgacactgatgtgttgtggccgcaaaagctggggaggaaatgtgaaggaggcaggaaaaggacctatagatctccaacagaaaaaccagaagcagacaggggtaaccccagaggcatctgggtgggccctgggcaggctggaggagagcccacagcaaatagtctcagggcccttgcatagtgacatactcaccaccctcagcatcgaagggacccactgggtaaagagaagccatgttatcctgcccccacccagatcatagtcttccaactcaatgtcctggatgtatggcaggatggccacaggggtaggaggggattcagaccaggacccggagatgaggtgttaatgctgtcctagcgtgagtgcctgcgtggagcatggaggggtgggcaggcagggaaggaggcttcagaggtagacattgagggtctgcaggatgccccggcggcagagcgggcaattgcggtggtagacggggtggcgcatcaggatttcagtgcagg

SEQ ID NO: 342797 - DNA, 1000 bp, Homo Sapiens
tttttttttttttttttgtggttccagatcaggaagttttattgctgacatgcaggaagagtccccatgtagtacaaaaatatgtctttatacaaacttttttgtgactttttccgtttctttacaataggacttctctcagtgtgtgacacccagtgagggctgacccatcctcctctcctttgcttcaccaggaatgtcatcagacacatggcttgaccttggaagggcccagtctgtctgacagggctttgcagacccggcggctattgctttgaaaaggaggagaaagaccacgcacgggcagcagcctggagggacccggtgggctgctgagagggggctccgctgcgacgggccctggcccagcttcaggccctcacaggaggacagtcaagggctgggagccctaggccggactgcatttccgctcccgcaggagactttctatgaaataaatatagaaaagagggcatcccccagccccacagcacaagaccctggccctcagcgctggacagctgagacagacgcaggctcgctgctcagggggagtaagtgctgggctccagtaggctcccacaggcccactgaggcagaggcatgagtcgcccaagtgctggatggggcatggggagaaaggggcgtgggcagccctgctactgctggcaagaggtggccccattttttccagatggggaaactgaggcacaaggaggtttgggaacttgcccaaggtcactcacagtgagtcagctttttagggggaggagagcggctcacactctgggaaacacagtcacctccccactggggagcagggccaggcaggaggggcctcagggcccatgactgcctggaggggacactcagcctctctgaggacatatggggggtaggcctctggggaagggtctttgcttggcatcaggcagggccaagtccagtaagggcaaggggagggggcattctggtgagaacagcatttctggcaagacgg

SEQ ID NO: 342798 - DNA, 1000 bp, Homo Sapiens; identical to SEQ ID NO: 160379

SEQ ID NO: 342799 - DNA, 1000 bp, Homo Sapiens
ttttacagtatttttactgtaccttctctatgtttccatatgtttcgatatacaaataccactgttactattgcctacagtattcagtaacatgctgtatatgtctgtagcctaggagcaacagtctataccatacacattaggtgtgtagtaggctatgccatctaggattttgtaaatacactctatgatgttggcacaaaaaaaaattgactagcaatgcatttcccagaaaatatccccatattaagtgatgcataactatataatcatgggggatatggcttcaacataaaattttcagttcggtccataataccaccaattccttgctactataatgtgaaaaaattctcacctctgagtcacacatggaaacaaatcaatgtgaagagactttaatggcaaagtgcactggagagttaaaatggttacatgggtaatttaagaaaaaatttagtgggaaaaagggaaagggctgaactgccaaaataattttcttatccagttttacatttgctttctccatgtgctacaattatagacacctgatagttcctagccttagacataacttgcagcatcagccactctgctgcactttagatcacattagtcagggctagagcccagccccatttacacggcatctgatgaatggttagctgtggcagttctaccataatgccattttgctccaaagaaatccagttaagtggctgtccatggcccagtagtttcacctctgttgcccccagaatagctttgggatggccaaggaacagctgtcctgatgtgggccatttaagaaaaatggcatagactaatttttctttaggcttggatgtgtaccacacatctggggtgacagtgtcattctgggatcgccaggtatgggtttcataaatagcttctccattgacttttagccaggaccccatttgcctcagtcgctcctcaaaaactacagaaatggtgccatctagtgtgggcccaatat

SEQ ID NO: 342800 - DNA, 1000 bp, Homo Sapiens
tttttttttttctgcttacaaagtttatttttaaagtaatttaaaacacagtgtaaccatacattaaaaatattgtggcaatttagattaggaataaacatgaggttatttacatgttggcatatgtatgtgtgtatatatacacaaagtgcagataaatacagaacactacaaaataaacaaaaaattcaatgataatttatggacaatcacttttatatttattacttaatttgtcatgttaatgactgcaaagaagctcctagtactgaaatataatatcttaacatccgacttttatataaactacagtacctcaaattttaacagtatataaatagggttctgaattaaaaacccaggtgtcttccctgccaaattccctatttgttaaggtttcagctcagaaatcaagaaggactctgaaaatcccaacctttgatatgtggtggtatattggattttaagcatcaatcatgtgcagacagtgttcttagaccagttcctgtggggatcgttctctgcaaaaaggaggcagttgagggtacacgggcagatataaagcctcaaaaatgctgccatatagagattaaaagtgtgcattttatatatatatatgtatatgctgccatatagagattaaaggtgtgcatttttatataaaatgcatctttatataaaatgcacatttttaatttataagactgagtaaattcaaggcaaaattgagttgttgtcaactctggatgcaaaaacaccatgggaaacactcatgaaagatggcagatggtccaaaggggagaaaggggttatcctactgaggaggttttgacaccttcagcccctgcctcctccaacacttaagtttcccaaatagccgtgtacacaggcatcttgaatggtggagaatatttatgatggcagtaaatgaaaatggtctctggtttttgggactcttcagtaagcacacagactccatttctccatagagcaccaagaa

SEQ ID NO: 342801 - DNA, 1000 bp, Homo Sapiens; identical to SEQ ID NO: 160381

SEQ ID NO: 342802 - DNA, 1000 bp, Homo Sapiens; identical to SEQ ID NO: 160382

SEQ ID NO: 342803 - DNA, 1000 bp, Homo Sapiens; identical to SEQ ID NO: 160384

SEQ ID NO: 342804 - DNA, 1000 bp, Homo Sapiens; identical to SEQ ID NO: 160385

SEQ ID NO: 342805 - DNA, 1000 bp, Homo Sapiens
ttttttttttttttttttttgggttgctacagggaatcagtattttttttttttaatcagatggtgtgtgtggtggctcacatctgtaatcccagcattttgggaggccgaggcaggaggatcacttgaggccagaagtttgaggctgcagtgagttatgatcatgccactgcactccagcctgggcaacagagtgagaccctgtctctaaaaaatttaaaaaaaaatcaaagcatgaacaaaactttaacaagagaataaagagggttgttaggtggagacgtggccagcactccacctccactttgaagttcagaggcagagcatctctccctcccacacttggagggagggcccgtgggctgtctctagccctcacctcacagctggtcttcttgctctccctgctcagcttctgctctggcctcggccctcagcaccctgaggttcctgacctctcctgccctggggactctcttgggcagggttggcaaccggggagtgtgccagaaggctctccggcgcttgcaaaaccacgaaaagcgtccaggggtctggaacctcactgtcttgacctgtttccgggccctggctcctggagctgttcctgtggtcccttgggcagctgagacttcagcttcctggatacctggggcccctgccctctgattatgtgcagcctctgccctctggccagcccgggcctgtgccctctgattatctgcaccctggacagctggggccctttccctctggtcatgtacggcctcttccctttgattatctgtaacctctgacccctggtcagctggggcctccgccctctgattatctgcagcctcttccctgtggttatctgtgccctgtgacctctggtcagctggggcctctgccctctgattatctgcagcctcttccctctggttatctgcagcctctgccccctcctcagctggggcccctgccctctgattatctgcagcctcttccctctgattat

SEQ ID NO: 342806 - DNA, 1000 bp, Homo Sapiens
tttttttttttttttttttttagaatccttcaggtcgtaagccactttattccagtcccttgaacatcacaggctggttttatttgggacagaacaggttttatttccaaaggtccctgaacacagcaatgacaatgaacagcccagcagaggagtgacataaaccttgaggcatgcagtcctctgggtgctgtggagtcccttggccaaacttgagtgcactggattcgacatacaaagaccttcctgggaaggagaaggagaaaaacaacctccgagaaaatacagacagggtcagtggcaggccaggacagggactatttctatacattctggaagtgtcggcattcatcagcctgcatgtggctcacttttctttctggaatagccggagacctctactcctcactccagctctaggttccaaggaacagagtgggtctggctcagcgagatgtcatgactaagggcagagcccaggcaggtttctcaaaacattaactgattccacctaccaaaggagaatcaaaggaaggaactaggacttcgattcagagcagggaaaagtgggatgcagctcctgagcactgccaatagggcatgctaggtctcctcacccagtctgccttctgtgtcttaggttaattcgctattttccaaacacagattttaacacttggccatggaggaatttggcaagttttggtacagaaccactgtgaggaactgacccctggaggaagactaggattatttttacagagtctaggtctcaaaatttcaccctatggatttggttctttttggtctaccatacaaatttggatttctgctgccaattacagcagactcaagtcatatataaaaacctggaggttagcatgtctagtcacatttttctcctggtcatgatgtctctctttctgtggttcctcttctttggcaagtggcttggcagcaaatatacccactagggacctctctgccttctcttagtggc

SEQ ID NO: 342807 - DNA, 1000 bp, Homo Sapiens
tttttttttttttttgttgggaaaattgtttttattttaaaatggaaatggaaatataatatacaggaaaagcttgtgctttccttttttttttttacttcgcataaacaataataatgcaatccaggtcaaagcacgaggcagaaactcgagaaaagaacagttattaaaggtacatggtcttcttttcaaatatccatgaaaacatttaacgacgggatggctagtacctatagaaagctccaaagcaataatctggcctttaagtttcgacgggactattttgaatcttagatttatcagtcactcctttcccattctacttgttctaagaattaagtatataattaaaataaaaaggccacatcctgactttaaatctccactctcctaaaaacctgtttgaggaaacaaaaatggggaagaagatcagaacaaaaatattgttaacactggccgtcctcatgcaggtgggctactaccaacgctggttgttactccaggaaaatcgaggtgaacattattacatttatatcaacaaacccataatcaacaggttaaaaaatcctacattacaaagaatctgatcacttatcagttggtggtctggaatagtttgcctagctccctctgggctgctacagctcagattcacaagtagaaattacatttacacaacttaagtttgcaaatagctctccataaatagttaaaccaggcctaaccatccagtagttttaaagtattagaggcaattaaatagtgatttattctagctataagtaaaggtttaaaaagaggagagatgatttcagagaaggaatagcagtgatttggtttataaacagcatatttattgtgctctaattcaggtgcagaagcttcgccaatttagcattgcacaagtgttggttttttataaatgctataaaattgtttcctgtcaacattttcttatactgaaaacacaacacaatttataataccttgaaaaatatat

SEQ ID NO: 342808 - DNA, 1000 bp, Homo Sapiens
gtaaaatctatagcgaaatatgactgaggtgtcactagattagactgctgttaatttttatgtatcagtgtgaaaacaaatggatgaagagaaccacctaatatgaatatttacgtgaaactagaagtgccctaggatctttgaataattttaaattgcatttagctaaggaagacttatttgaggacaatactttgtatgaattactttatcaaaactcaagaatgggccaggcactgtggctcacacctgtaatcccagcaacttagggaggcagagaagggcagatcacgaggccaggagttcgagaccagcctggccaacatggtgaaaccccatctctactaaaaatacaaaaactagctgggcatggtggtgcacacctgtagtcccagctactcagaaggctgaggcaggagaatcacttgaacctggaggtgaaggttgcagtgagcccagagcacaccactgcattccagcctgggcaacagaccaagactctgtctcaaaaaaagaaacccaaaaactcaagaataataacatttacatttctgaacataaaatagttttttaaaaagtatgccacttattcaatttacaaattattacttacaacagagtttaacataagcatgatgacatatttttacttagcttgagagttaagtattattacttaaaaccaggaaacatgcctttatttttggaaggagatggtttaaagttctttatttctatttcatgagtttttcccagttccagttcatttatccaagttgtttttacattaccatcaatgtcatcaattttactttcttcaatatgcagaattccattcaactttgtatctatgcaatcctcagctttcacttctctggctgaatctacttcttttatagttctaatttcaaaaaggtctttagctaaaatgcaatctgaattgttagccaatctatttcctctatcagtttcagctaggtcatttttttcttcatctgta

SEQ ID NO: 342809 - DNA, 1000 bp, Homo Sapiens
gagacagggtctcactctgttgcctacactggagtgcagtggcgttatctcagctcactgcaacctccgcctcccaggttcaagcaattcttgtgcctcagcctccgagtagctgggattacaggtgtgtgccaccatgcccaactaatttttgtatttttagtagagatgggttttcgccatgttggccaggctggtctcgaattcctggcctcaagtgatccaccctcctcagcctcccaaagtgctgggattacaggcatgaaccactatgcccagttgtgtgggctgcttattcttatttcatactggaccttgcagattatatggccagtcctgagggtcttgagtcttcgtgcgtgggccatccaccaggtacacatccatctagcatcacccgtcatcctcatcttctgctgggtgccttgccatgtggcaaagtcaaaggcctgtggttgaagtgatcatgggatgtggcgctcaggagtggtgtccagctgggagcttcaggaatgcccaaatcctgcttcctgtgaagtcccccagcgagatacaggcacaaagacacagacgcacaggaaaccaacgtgccacttggttctgggagcctctcagaaaaaaccacagtaggcctggggccttttgaggtctctgggtgacgagtccctcttgggattagaccatggtgactgctgatcctgagcaagtcacacaaagcttcacaaccgttccagatgataaaacatggcactggggccggatgccggtgggaagtccctccttccgctctggttttgtggttgcttgctgtgtgctgtttccacgagaggacaaaggggaactcacccccaaaggtcccaaagtaggtgagaaaggtgcaactggatgtcactctcggtcctgcctcaagtgagtcacacagttctgaccggctgtgcggaggacaccgtttctctttctttctttctattcttagagacgaggtcccgctctgctgctc

SEQ ID NO: 342810 - DNA, 1000 bp, Homo Sapiens
tttttttttttttttttttttttttttttttttaggtcacacaacttttattgctgaagaccatcgctgggggctgctgcagacaggaatgtggcctccttcccagtcttgctaacattccccagtgtacccagccccatcagcccctgcccagcctctccagcttgctcttctggggcagtctttcccttgagcggccatggcctgcctgagctgggctaggctgggctgatctgcttggatcctgcctctgagaagcacagcaccacaaaagactctgacgggcccaaggaaggtgaggggagcaggactggcagaggaataggtgccccagaaaaaaggctggggaaggcccaggcttttagctggcgagtccaggcacgttgatgatttgcaggaacagggccaacttagatccttcagcagggctgcctggaaggcatgggaccatgttagctttctctccatagcagtttttatgtcattgctatgtttctgaaacaactgagaaactgaaaggtggagaaagctgagaagaaatcccaaagtcccaggacagctcctgggaatgagagaggcagtccacctggacctccctggggcccctgggagcctacgcgggaacagcatctgtttcttaacgccttcgtcagagccctgggatgcagaaacagtttgtggacctcgtcgtgtcggatttgcttgccagcccaaacaaggatttgcttccctgagtatctcctaggggctccagatgctgtagtgacttgggggatgcccatcctggggactttgtccagtctcttcatccagttccttgaggccagaaatattctgtaggactctaaaatacgacatttcccatgaatcccctgggggtcttgggctgattgatgccagctctcaaggcttctggactttttggagaatctttaaaaatacccgtattttcatttcttaaatataaaaataaaataaaataaaacccgccccagcagct

SEQ ID NO: 342811 - DNA, 1000 bp, Homo Sapiens
ttttttttttttttttttcatgataatttttcagttgtttattggaaactatagattttttttaaactcactaattattttgccatacaagagcaaaattcaagtaatacaaatatttaacattttggtataaaattaacaatatggaaaaaagatgcaaaccaaccaaaaggtaaaaaaattttaacaataacactgtgtataaccatcttctattcaagtgaccatccaagctgatagtttattttccctttgttgacattttttaaaaagatagccctacactggagcaccaaaaagttttttccttcttttttaaaaggttggaacccttttatttacagatactcttctcagtactttaagtaagtgtgatgaaggaatcatctagcaacttccttcttagaaaaaaaggaagtgccttcatatttccttgaaatttaaacttgttccattctattctaagcaaaaattaaaaggacacagttcagaagagctctttcagcaaataaataattgtttcacaaaagcactgctgtaaacaagatcactttgatggccagagacacttatgttttcaaccaatggcaaccttaaacacttccaagtatagatacacagggtatatatgggcaaaaggcaatacatcattaatcaatcaactaataaaaattaattataagcttgttgcttggtcaaatatgcttttgttctctatgtttttttaattggtcagaaaacttaaactgtaatgatctaaaaccctgtatctactctgaaagtaactacaacctagaatgtttgacactgtagttttgacattagttaaaaattctaaattatctaagcaatgtaaacaagcctcaaatttcaaaatagaaaaaaattaaaatttctgtaaacattaaaaagctacctgctaaaaattgtaagtatcatcattcagttgtgtatactgagaaatcttttttcgttttgttttgcgtgtttccgacatcac

SEQ ID NO: 342812 - DNA, 1000 bp, Homo Sapiens
ttaaattaacaaaagttaactggaaatggctttccatctttattgacactccctgtctttgcacttaaattgtacatgccatttaaggagcccaacaagctttgggaacagtctctaacgcatccctatttgcagctgggcgaaggcccgcctgagcaggttaagtcccaggcggcaatggtgagccaagcgtggaacagcccaaactaaagtcggggtctctgtgcggcggcacgggccacttcggcacttcagtgtttaaacttctgcatgcagtgtaaagacagacagctggccacagtgctgccctgcagtaaagaccagccaccgtgaccggctctcccctgcctccctcctcccagcccacagtcagacggagcctctgtggcaagctcaggcccagtccagggccctcagagtgtagatacaggtggaggcctttccaagtcttccagttgtccagttagagtggcagaaaagtcagtggccatgttcaccgtgtgcctcactccctgcagcctggctggatgcagtaaggcatggtggcctcaacagcgagggaaggcctttatgttggggcctatgtggaaactctagccccgtgcttccattacatacaaaccgaatatattaaagctttagagtttttacaactatctatctttcccctgacatctccccagccaccttagaggtgggaaaggaaaggatataagaaaaccccactaaatgtggagtacatttcatcaaagtctgtgtgagccagcttgcccccagtcaccacgacgttgactgcatctcccgccttcaggtgcacgatgaggtggaatgcccccgggcccccgcaggtatgcaaagctcctggagggcggtggtattccaggaactctctcctgtacccagcggtatgcagctgggccacgctggcgttggagaccgacagcactgcttccacgtaggcgtctctctcgggggtgagggtggccgtgatcaggtagcg

SEQ ID NO: 342813 - DNA, 1000 bp, Homo Sapiens
ttttttttttttttttttttttagaatgaaaaattttatcatcactcctgttcaccccgcagagtctgcggagtgctaaagggcacaccaataaggatccgagggagggggtctacatctgctttttcagcccccaaagccatatattggggtggcccaatataaagctactcattagtttggttcctgagcagacctgctaataaacctcaaaaacacaaaagtctacttcactagccagaaatgaaagcaggatctagatctgagtgggaagggcagagggcagcatgggttgactctagttggaattgtgccagtcttctctggaggccgactcactcgtggagtggggaaaggggtggccaggccccagtctagaaaccccaggcctatgggaagtgatgccaggggaagggaagcagataagctggtggctagttcccaggaaggcaccaacctccaaaatcacctaggcaaggacagatgcccaggggtgccatctgtgaaaggggggaaaaggcaagagagcccagaaagaaacttggatgctatagggggttccagaaaggtgctccttgctacccccatttgggggctctgacatgggaaagactccgagtcacccagggaggagctgggcatgctgggcaggaaccaccctgctagcctctcccaaaagcaggggtctcaggccaaatgcccctcctgttcccttccactgtcaaccctctccagggaggcccaggctagccaacaggccactgggtaaaggccctgctgccctctggggtggtccagccctgcctcagatatcccggcggggctgggcagaagagagtgttgctggagtgtgctgggcccaggttttcaagggctgggaatgatttttttagagaaagggaaaaggcggtgtcaggaaccgaatgggacgacctccacaaagcaggctgggcaaagtcccatgatggcaggtcgctaggaagaggttccaggggcggca

SEQ ID NO: 342814 - DNA, 1000 bp, Homo Sapiens; identical to SEQ ID NO: 160386

SEQ ID NO: 342815 - DNA, 1000 bp, Homo Sapiens
ggtgttgatagaaaaaataaaagtcagttcctgagaggtgaagaagaatagagcgcctcaatgcagtcactgtcaccttggatgctaaccattccagagggcatctgatgatcaattcaacatcctgctgtttctcttggcaccccaatcaggatcctggagtggctaccacaagactcacctatatcagaggacactgggttaatgtaaaaagctgaaggatactgattagggtagaagtcttacatgtttggaccaaatccaatgtggacaaagtagctgagcagcaggaagttgaggggtccacagctgagcctggtgtactccccagagcattctccagatggctcgaattaccacaatcatgcttcaattaaaactgtcataaaacttgggataggggtttggaagaacagggcattgaaagtgcagagaaaatgtagagtgtatagaggtgactgaagagggtgatagaaagaagtgtccttccaccaaaacatccatttcttttggttggaaggcaaggactggaaaagaggggtgggggcagcaaatgctgtccctttctttcctcataaatctggagcctagcctacttggacagtttgctgatgactctgatgagggcaccattttcatctttcagcctctggttgtcggatttcagttctgttaacaccttcatttcttcctccatttctgacattttgcgctccaaggctcgcctctcccgtttctccatctccagcactgatgatcggtcagaggtcttttcttgtttctgctgggccaccttctcaagcttggactttatatctgctagctctagctgggcttcctgaagttttgttttcagtttttggttttcagtcagagcactctcatagagttttttataatctctgttgctgtcttcttctacacggctggtcagggtggctaggcgggcctcccgggcctcccgacgggctcttgctgaagcccggtcaccgtaagaatc

SEQ ID NO: 342816 - DNA, 1000 bp, Homo Sapiens; identical to SEQ ID NO: 336952

SEQ ID NO: 342817 - DNA, 1000 bp, Homo Sapiens
tttttttttttttttttttttttttttttttttttttttttttttttttttttttttttttttttttttttttttttttttttttttgccggtggttgtaaacagagttttattgatggggagggggctgggggaggcaaactccagagagggcagaggacccagccagccacgtggcatgcatggtcagctggaggtcagaggggggaggtcacaaggggacgggtggcatgggactctctcaccaccctggggccgtatttacagaggggccccacccaccttcgccgccccccaggcccccaagccctttagacagctgctgccgatgtgacttccgggcaggccctcctcgtgtctcctgcctgaaaccccggcattgtccccgcttccctctgcagagtggggggggttcaaactcctaaccggcacctcggagacccccgggccttctggaagccccagcgtcggctcagccaacgcccaggccgctggggccaccacgatcgtcgctcgtggacacacaccctgcacgcgtggcccacttgacacacacgcccacagcagccttcgctggcacgcacacacacgcccacctccccggccccttgcacacgaacacggcacgcacacgcacgcacacccacacacgccaggggcctgggttggggagggacctttccaggggtgggggagggcttaggtctgcagctgtggccccccattccccaccggcgtccaagcctcccctgcctgccgccaccccgagaacggagttgtgcaattggttagaaaaccgcaaaagaaaccaaaactgcaaaaaaaaccaaaacctacgcgcataaggtcaacctcaaatccatagcaaagtcctcccgcccacccacccccaaaccgtctcagcgtcctgcggccccgggtagggggagggcgagctggttgtgcttccttgtggcggagggggccccccactccgcgggtgggtcgcgggggggacttg

SEQ ID NO: 342818 - DNA, 791 bp, Homo Sapiens; identical to SEQ ID NO: 160387

SEQ ID NO: 342819 - DNA, 1000 bp, Homo Sapiens
agtagagaccaactttattgtcttggggcccctgcctaagttcttggactcgggggctatctccaaggacttgctgtctgtcaatctcaagaccaccttgggtctcccacacctctgtcctttcctttgtaccccaaaagagggaccccagctgattgccacttgtccatgagcttgggaggtaagaggagccttaaccaagaggcttgtccactccttgcttctgagaaggcccccgaaatccctctacctggagtggaggaagcgtctaggctgtgtgaagagtccgtgggtcctcagcttcccagtcctttcttggatatggggaagtcctggggtgtgacttggactcctcttgctgctgtagagcctctcctgggtctcctgcctggagccgccttggctccacagccttgcctcagactgagcagccagagctggcagcatctgtgcagaagcagggggcccagtgggaggatcagcgccagccacgccaggcccaggaggatccagatggctgccaggctccgatacactgagatataatgcttgctggggtctgtgccaacaacatagtccccaaagccaatggtgctgagagtgatgaaagcaaagtagaagccctcgctgaagctccagccctccacatggctgaagaccatgggtgggaagatgagaatgaccagcgtccccagggtcaggaacagagccaggcccaggacttgcagtacctgggagcgcctgggacggtcctcccatctttcaatggcggccagatgggcacgcagccctgtgcccaggtggttgaggaagatcacgttaagcgggatgcccaacagggcatagaagacacagaagacctgacctgcctctgtgctgggtgccaggttcccatatcctatggtagtgacaactgtgcctgcaaagaagaaactgctgccaaagtcccagttgctggggttggtagagttgcctttggggttcacacctttcacccagg

SEQ ID NO: 342820 - DNA, 941 bp, Homo Sapiens
gagatggatggatttttattgtcctactttgatgagcactggggggatatggttatcatcctgcttttgttctaccaaaaggggtgaagaacatctgcattttacactttatttaacattaataaaatgataaacacagttacaggcaaacgacaattcagtacacttagttagataatagtttaaaatttacatattcacaagcttgtacatccttcaccaccatggaatattttagtctatgtagtcaaagtcttctggaattccaaaagttctatcaattttattttcttcaaacccaaattttcttttggcccaagattttattgcgaatatgttatcagtccatctgttagcagcttctttggctactttatttgcttggcgtatttcttccacaacttgcggatcacagtctttgtatttttctacttctgcctttagctgttccctttggtctcgaagtgaagaaagctcttttgctagcctggttcgctcttccgtttcacatcggccaattttagctttctcaatgcttttctgtaggcttgcatgcttttgacttccctcagacaactgagattccagaacctccaacttatgtttccttgcatgaagagctttacttggaaaagcccaataataattagaagttccgatcctctcacagtcaaccataccatcatcaactaagctttgaaggacttcttttactgacatagcagtaatgcctttctctttgggagcaatcttctccaagtcttttaattgaaatacatcttttgtttcagaaaatatttccatcatgcgagttctcttttcttctgcactcagtccttttttctttgacatggcgcgggcgcaggggcttccgctggccgggcccgcgcttggggagaggggcgggacaggccaggacgcgtttgattttggcgccgact

SEQ ID NO: 342821 - DNA, 1000 bp, Homo Sapiens
tttttttttttttttttttttttttttttttttttttttttttttttttttttttttttttttttttttttttttttttttttttttttttttttttttttttttgggtggagcgggtactttatgaataccacagggacaaaggaaggctgctcttctcacacactgctgaatctccggatctccgcaaggtcatagccagtcacagcaaaggagttgcctgaggaatcacaaaatcgagcaccacacagctgggtgtcggcgacacactcaccatgacagtgttccacctcaatgtagccactctctgggtttctgctcagcttccagatatgcacaaaggtgtcctcacctgcagagagtagcttgcccacctcagaagccaggtccagggcgcagatggcccgggcatgggcattgatctggacatgtagatttcctgtagtggcctcatatagatgcacttgtccgttcccatagcctgctgctatgatcccctgccacagctgcacagaggggcacggaactccaaatcctggaatgcgggtcaataatgtgaattctggccctgaccgccagacacacagcaagcctgagtcatctgccgtcaccatgtcagccacacaatcctgtccctgggcaggctcggtggcaatgtctgtgattggcatctggtgcccagccagctcctcgctcagtacaatgttgggaccctttgctgggatgtcaaacaccagcacccggcctgaccacgttcccacacagatgaagtggccactggcagcaattccccgggcaaacacagcctgtactggggaggcatctccagagtccagtgcatgccagtagaccatggtgtagccattggactcgtacatctgtattcctcgatgtgaggtgagtaccagcagcactcggaaggggaggacacaccagtggacctgagtgataagtgggggactcactccagcaccctccttagcgtggagctggcgctggg

SEQ ID NO: 342822 - DNA, 1000 bp, Homo Sapiens
ttttttttttttttttttttataattggaaacagacgctggctgcctatctttatttctattgtaaagtttccatatttgcttcaattaatttacatataattactgtacatgagagataatgttatgacaagaatagtttctgcaacattaagtatgggtcaaaaaaagaagaaatgggccaggcgcggtggctcatccctttgggaggctgaggcaggtgtatcacaaggtcaggagttcgagaccagcctgaccaatatggtgaaaacccatctctactaaaaaaaacacaaaacttagccaggcatggtggtgcacgcctgtaatcccagatactcaggaggctgaggcaggagaatcgcttgaacccgggaggtggaggttgcagtgagccgagatcacgccactgcattccagcctgggcaacagagcaagactccatctcccaaaaaacaaagaaatgactttagacaaatggcttgaatgaaattacaaagaggagtgcatcaaaaaataccagcagtaaaatctcttgaagaattaaaatgacaggctaaaaataaataataaatgttctttttagaaaatactaagttgctgctggcactctatattcttcttctttgttttaatggatgacttgtatgtacatcttctggcttgtcctctggaggctttggcacagatgaaatacctctttaagtttatgccgaattaaattcgccgttgtattcaatgagtcatcgtgcatatccactttagagatgtctggtaacagaggtccaatcataatctcattaccagttgggtttgtttgaagaaaagttccaagtttacgatcatcttctcttcttcttttgcgctcctgcagttgtgttgtcctaggcataaatctgtcaactgcctctgaagacgtaatagccttttgtgcaccagggcaggccactgagtttttcaaagagtttatctgtgttttccgcaaagagtcattgtggtta

SEQ ID NO: 342823 - DNA, 1000 bp, Homo Sapiens; identical to SEQ ID NO: 160389

SEQ ID NO: 342824 - DNA, 1000 bp, Homo Sapiens
ttttttttttttttttttttttttttttttttttttttttttttttttttttttttttttttttttttttttaccgtcctcacactttattgttagctgttctttaagtttctcacacattattggcaattatgtaaaaatcaagaacctctataaaacaacctggctttccaggtggaattccgcatacagccaaaactggattccagtgtggccagacaacgcccatgtcccaatttaagagtcgctgtcctcaccaccatccggagtggcctctctgtcagtgtgtgatgtggccagggcagtgtccacctgaacttcctcctcatcggactgaacaacgggggactccccaccctcactgatgtcccgggtggccgagtcggtgcaggtggaggaagaagaaggtggcttggctcttaattctgagggatttggaacctggagggtaatctcattctgacaggtactggattcaggccctaaggcgggggacagcacagtgttctcttctcctccagagttcaggaagacgtccagggcctcctggtccgatatgtccatcaggtccatctgctccagcatgtccacgttcacttccatggatgacatgctgcctatgggctctcgccgctctgcaatctgcaggtagccagtggacaggtactgctccatgtcctgctggaaggcttcctcaaaaaacttctgccgctccttcagcttcatttgctgggtgtgctccatttccaggaccttctgggcgtgctctgcatctagttcagctttgaaggtttcaagttccttcctcttatttttcttgtaattctccagttgctgggactgcatatgtttgcatctttctaattcacactgcccacataagtcttccagatgcagcaggttgttctctacctcctcaaaactcgcctctaaatgagtcagatttgctgtcatggattctaagtctgcgattaaagctgggagctgctggagctgctct

SEQ ID NO: 342825 - DNA, 1000 bp, Homo Sapiens
tttttttttttttttctttttttttttttttttttttttttttttttttttttttttttttttttttttttttttttcaccaaactaacatttatttagctttgttccctcccatccaagactgctgatctctaaacaagcatcaaaacccgaagctcattaacatcagagtgagcttcaataaggtgaacactacaatgatgtacaattacatcctaataattcaatgcccaagagccctgtagaactattgcaaggcccaggattatcacagtatgcaaatgcactaggaaaatcattacctatttagtcccctttattttggtgggtttaacatgagaagaataatccatgctacaagacgagatttcattttacagctgtagtaaccaagtgcataaaagcttgaatctgtcccaatagcttctaaaaaatttttcccatagtgtcagaggcaaaaataatgaaatcttgcaaatgtacagttaataggaccctagtggacactaacttcaaaaatgcatggtctataagatattataaggcttgattctagtttctgcactgttcctgttaataacaatgtctaattaaaacatctgtaaaatactgatagttttaattttacataaaatttccaaaacaactgttacacagtataataggtatctgcaatgaataggttattaatggaaatattaatttaaattaaaatctggttctaaatttaaattagtcatctctggctaatgaagagaaaaagaagtcacccgtgctgggaatacagtagaaaatttagttttcaacatctgttaaagcaaattcactgtaccacttgggctaaagaacaattcactttgttgctttctgtcttctccatttggcacatctgatggatttcacagttgaactcaatattagaactacagcctaatgcaccttttaatacattactttataatttaaaaaccaccattcaactttcttcacagtctgaaat

SEQ ID NO: 342826 - DNA, 1000 bp, Homo Sapiens
ttttttttttttttttttttggagtcaaaactctttattgtcctgcccagggagcccttcccaaaggaatccacagagcaggggggcgaggcgggcggcacagggccttggtgacaacgtgaagggggagctggagttaggtgggggacagccccttcagctccctgatggcactggctgtgctggcaggccacccaggggagccatcaccagcatgaggtccacacctggggctggggctgagcgctgtctacactgctctgtctacacggttactctggcacttgtcaggtccactcacctctctggcctcaaactgcagggggagatgggtccaatgctgggaggcactgggaggccgtggaacagtgaagagcggactgcacgggctggaggatgccagatgggcacacatgtcccccagggcagctgccggcaggagtctgacaaagggacccagccagcccctctggaccattctagaggccagtggtgaaggtcctgaagcaacttggcttatagagacacgttaagtgtacccggtgcaccccatgctgggaccagctctggtcccagggccaccttgacaggtgagcccaaatgtcctcctctccccatactgggcactgggctgaggcaggaccccagcaggtggtggcgggagcagctctacagagggaagccaaagcctttcaacagaagaacaaaggggcttccagggccggagtcacaggcctggggaggaggggacagggtgcttctgagaggcagggagacaacaaacccccacttcatgctggtcctcagtccttccatcctgccagccccgacccccggtccacaacagcaggcccaaccctgccttttggggtgaggagaaaaaaatctggaaccaaaagggatggcggctgtttcctcgggaccctggtgggtgtggggccaccgagcagccatcaccggaggttaaagaccaggctgacggtgaggatgatgcccagga

SEQ ID NO: 342827 - DNA, 1000 bp, Homo Sapiens
tttttttttttttttttttggagatttcccttttatacatattgcaacaagttctccataaaacattcatctgaaataaattaaaaagtccttttgtcactgcctccaaacataaaaaggagcctgtgccctagccccagcccgggccacccatggccctgattgtccatggaagaaagttaaggattgaggggcccacagcctgagatgagagggccagatccttcctctgaagtctccaacaagaaaggcgaggtgacggcatgagcctgggagatggcagccaactccttgagaaattcagggaaaatgactgcacagtagacagcattcttgactcgaagagcctcaccttggcgttcaggggccccgccccgggtgagtagaactggagttgaagccccaggggagcccccacttaggccaagtcctgctccgtctcgcccaggctgaaggaccaattgtgccgcctgccgggccctggttggactgtgtgcatgccgcaggagtaactcccccaaggatggcctccggctcttcactaggggatcagaacggcgtggggcaggtcctgctgcagggccctcagcccagtccaacttgccacgggcaatgaggtacttcttggctttggacagcagtgctgggaagtcctcctgggaagccgcaaagttctcaatcttattcttcacagagcccagcacctgcagcagggacttgacactgggctggaagaccatgttggtgttgagcaggaaagagcggagcaggggctgggggtgacaggccagctgggccaccagccccgtcagcaggaagttgacatagacggagttctgcagcatgttctcgagtttggcaaagagcacagccatgaaggggccagtgaagggctggcttggcagctggttgagagtccgcaaagggctgctgaggaaggggccagggggctcagggggacaggtgaagctctcgtaggcctcctcctcctcaaggggca

SEQ ID NO: 342828 - DNA, 1000 bp, Homo Sapiens; identical to SEQ ID NO: 160390

SEQ ID NO: 342829 - DNA, 1000 bp, Homo Sapiens
ttttttttttttttttttttttttttttttttttttttttttttttttttttttcctcctgaatgtttatttacacctccgctcactgagcggtgctggaccgcggcccccgcgtgggctcctcgagcccctccccaggaggcatgtccacgtgcctctccagccccctgtttgccaccgaggcggagctgggcgggtgggctgtgttcggctgggagagacggccctcggaggaaggtctatctttctgaggtgttgccagccgaaatctgggcgctctgtggccgagagggcagctggccattgctgctgagggatggcggcctgtgcacgtggggcctgggctgctgggacttgcgctttgaggtccctgagctgtcttttcggaggatgcctggcagccttgtgtccatccgtcccttgtaaatgtggccatccaggcccaagatgtccacctcatcatgcttcatggcaatctggatctcttcagtaggatacaggccccggggaaggtgctgcgggcggctgcggtggtaggggtaggtgagggtgtggctgcccccgcagcgccggggcacagttgagtaggtgtaatcagccatatctgtcacccgtttgtagcagggggagcccaggcactgggcgtgcagcagctcgcggattatctggctgctggccttggtggagcccccgaagtggatctgcaccttctcaatgttcatcagcatcttggagtgcatggagcgcaggcgccccacgctctgctccatctgcgccaggtcaccccgagggaaggcgctgcccagcttgaggttgcggctatgctgccggacctgctccagttcaaacaccgtgtaggggcggatggaatggtgcccaggtaggcctggacccgcgggggtcacggggatggcatgtccagtcacaggtgtctccaagggccggtcacatgagaggcagtggaaatgtgccaggagctgcctccgcatggcagccgcct

SEQ ID NO: 342830 - DNA, 1000 bp, Homo Sapiens
ttttttttttttttttgctttctgtgagcttatgaggccattctgcacattatcaaaatgaaatcattatgcagtaaccttatatatataaatccaattttttcctttgtagaagaaaaccaaaataattttacaaactacatttaacttagaatataaagaactgactagtgtaaaattttgaaaatctaccactttattttgaaggaaagtacacatccttcaaaaccccgctaacaattcctagttcagttttctattatacaaatcaaaaagttaaattccttgtggcactaaccaaaacttaaaaattaacagaagactgaattaattaaaaaaaaagcatactaactaatcaaaacaatccactgtgcaatgaatatttgaacaatgaaaaaaacctaccaagcatcctaatcaattatatagttcttgcttccatattttaattctggactttcaggatggtaaattattaaacaggtcgatttcatggactgtctaaaccttgtagtatttcaaaatattaccctttctaaaccaaatctgtggtcctaatcaactttttttccaagaaaaagaaacgatatgtgtttaaaatacattccgtagcagtagaaacatcttagtgtctcaaaatactatttacaaagaaccctgctgatcctgtgcatttcgctgaggtgctacttgcacccagacttcatcatctgaaaaagaacttgaacttcctgactcagagtccagctcactgaatccatctaagtcccattcagtactagactcactccgtgcatcatcttcctcagtaataaaactctgaccaggttcaaggcaggaaggataaacacgagcacaaaggcaaataaagccagagtcaaactgcaaaaggcctaacatggtacctatattaatccactgatcttccctagtatcatactcatacactgtcactcggttctttttccattgtggggttgtagaagtgatgagaagcaac

SEQ ID NO: 342831 - DNA, 1000 bp, Homo Sapiens
ccttttttttttttttttttttttttttttttttttttttttttttttttttttttttttttttttttttttttttttaagaatcataaagtttactgtttcttttccatcatttggcacatatccaaggcacattagaaaattagaaatcataaattactttgtagaaaaataatccctcccttccttctgtacatacacaagtatttccaagaacatggacaaaaccatttccctatcacaaggtcatttgaaaacggactcaggacaaacccatatacgtgtagctctaggccaataacataaaaataacagtataatctatagaaatttataaaaaggaataaatggcaataaattctaaccgaaagtaactctgacctggtttgtgctgttaagttttgaatttgaatcaaaagactaagaaaagatgtgccaaatctactctctaatccagtaaccatcccgtcaggtgtgagtgtgacagacattcaagggaggttctcaacaaaaagggatgtttctagaaatactgctacaggtgcacgtgtagtaaccgaatatctgtacctacttgttagaaggaaaatgataaccaccctttcccatgtgcatgatgtggaacaggtctgatgcatcctttcactaaaatgaatatcaaaatgggattgaggcatcttttggttcgagtgttgctttgcaaagaaacattgtccagctgctgctttcttccttcagatatgacatttcagcctggcctctacagtaccatgaaacctaaattacttacttctctccagcttaatcctaggtggaggaattctagctgtggtttgtgaatgtacacaggtcagagaggtttagcaccttttgggaggaggaggtcagaatgcggtggtgaaacctctcccactgtgaccaacaaaccctcatacttaaaaagaagcatgcacctctggcttaaggatctggatgctactggaatttttgtctgtttcaa

SEQ ID NO: 342832 - DNA, 1000 bp, Homo Sapiens
ttttttttttttttttttttttttaggtaattgagagtacattttttaaacacaatctatgcacaatacagtgattaggcatattaggggtaaagagctttacaaaacattgctgaaacataattgcgagtctgaatcaaatcaaaaagaccacagaaatattcagtattgtatcttagtttctgttaagtactttcaaaatgtatttaatactaaaagtaattagtagaagagaatttgaattcttgatttttgttctgaaaatttttactctcgatatattaaacaaacatggaaaacttctgtattaaagtcttccacatgtaaaccatttgtcattcattcatatatttttctactttacttctttaccaaaaatcgtgtgatgtctgatccatgctttgatgctagagattgtcttctcacctggcttctttccttagcttgtctggcagttctctctttgtgacagactgtgcagagagtctgcaggttgtccagggaacactgtcctcctcccccatacactggcttgatgtgatccacctgccagaaatgtccttcccctgggtttcttatcatttcatttagctgttctaatgggagctttgaagtccaggtagcatacagaagattcttcctctgacttttaggggcatctctcagacgtaaaaagagttcttgtgcgttcacattacagagctgacacacaccatgttcagtttcaaatactttggctctcaggtaactgttattagatcgaatccaaaactcttcctgacatttcagagagcaaaaccgtgaatcccaagagttcgctttacatgcttgcttagtctggcaagtgggttgctgacagcgaaggcaaagtggatttccttcattatccacagcttgcaaatagcctttggatgtagagggcttcacagtgagatctgcctggactgtgtatggatttagaaatgggacacaggctccatcttcaagaagtttttttgtg

SEQ ID NO: 342833 - DNA, 1000 bp, Homo Sapiens
tttttttttttttttgtcaaacaagtattaaaattttatttaaatgaacgtttttaagttattgagccatgttaagggaaaacattaattttattagaacttgaacaaatgtttcacaaagaaaacattttaacaaaatggtatggtggcataacaataacaaaaaagagaacagcaaaatgtgtaaaagaaatataaggtggaaaaattgttaagtatctcataatccagtgtggaaataagaagtctaaatttaaaaacaatgaattttaaaaagcataactataaaacaaaagttaatgcttgtgctatcctaaccacagacacattcttcagcaaaactttaaaaggcagagttacattttatggtatttaatatctcttttctgttgttttttccacagaaatagagactgtttattcaatctcacagttgaaaaagaaattttaagcactgagaaataagtattctactatttaaaatgactggtgaggcaaaacaattgattagtctttaatgctctgtttttcaactgtactaaggacttcatccaaccaaaacaaatcttaagcttcagaactctctaatgcttaaggaacgcctctgcctgattgccatataagggaatcaagaacctagtaatcgtggagtactctcagggacaaatgtaggaagagaggacacaacagagttttcacaattttaacaagtaatctgtcaccatttcagactaccaaatgctaatttacttaagacaaattatttaagtatatattcccacctttgcaatttatttctaaatactgatatattcattttttaagcagaccacatcaggttaataatggtataaatcaatttgaaaactataataaactacttcaagaataggtatatttttccattataccttgatcattatgtaaagatgcaattcttactttcttggtggtgaagcctatgggaaattaactcggaaatgtttcaaagagattgtca

SEQ ID NO: 342834 - DNA, 1000 bp, Homo Sapiens
ttttttttttttttttatattttacattttattgacagtgacacatagtaaaaattgaatatatattaattacccatggtcccttataaatatttaaagttctttttcacaagcacaattcatactgcaaagtcataaactaaattttttaaaaagacaattaaaaaataaaatatattaaacatatcataaattatgatgggatgagatggcttataactgacttttaaacattctacgtacaatcaaatgtagaccttcactaagaacttgataattctagggagcccttttgagggaatatttagtttttaaataattaatggccaaattagcatacctgaagtcctatgttcttaaaaaggtcagagtccataaatgcaagcagaaaattatattttttgatgcataaacatcttttacaaaatgtattctatttgtcttagatagattccttgaattgaaaattgctgaggtttccaactattatcttttcatgtcttcacagtctggatctgatcttgaagccagtctacaccttcttgcaagccttctccttttatggcatcactagcacaaatatgccagggtttatctttgatgttctctaaacacagcaactgagacacttttacagatgtcactgcatctctaagatccattttatttgcaaagaataagattggaattcgacggtgtttaatatctggatgattcagaagagtatcgagttcttctttggccacaaccattcttaatctatcactactatcaatgacaaaaataatagcttggccttctttataatagtgttcccagagatttctgtatcttccttgacctgacatgtcaaacactgtaaatgacaaactggatgatttgaatttctctatgctgaatcctattgttggaaggatattttgagattgagcatttgaaggtttaagtttgttaatgatcgtcgttttgccactattatctagcccaaggcacaaaacat

SEQ ID NO: 342835 - DNA, 1000 bp, Homo Sapiens
cctttttttttttttttttttttttttttttttttagagcggccgccccttttttttttttttttttttttttttttttttttttttttttttttttttttagagtctaattttccatctattaagaatttgtatagaaaatacctgaaaaagatacatgtatataaaatgatgccacttgaactttgttggtagaagattgcacaagttcatcatccgagccaattaagacataaaaatataaaagaggtaacatcagtctgaggtaaacaccaaaagtttaaaactccaaatatgaaaaaagtagttaccttcagttgatatatacatttatactttgtaaaaaaaaaaaattgttagatataaaatgtataaatgtagtatacactgattcacaagaaaaaatgaagtttaaaatggtacatcagtcttttaaaaagtatatatataaatcacaggaagaaaaccccattgtctttggatcagctaaggatttcattagacgaggtatcagcgtcttcattgggatgttggctccccaacaggagctctggaggcaaaagtttagaatgtccattctcagtaactcgttgggtataaaacaagatataagcttgagccttgcatacttcatccatagtgcacatgcttagtttggaatcattgcagtgtacccagaaccctccttcagaattatagcagtaggcagtgtagtgccctgagccaaatcctttcccatggtgcatcaccaccgcggacaagtcatagataaagcattctggtctgagggatttcagggtctccctgcagcaatagggctccatgtttaagatttcctcaaagccaacatgaacaccaatcttctctcggttattacgtcctgaccacctgaatcgtttgaggtgcagtctgagaacctgaggtaggtggcatatcataagttgtttctgggcttctgtgagtacaactggtttggaggaaaaccttctacgctttgagt

SEQ ID NO: 342836 - DNA, 1000 bp, Homo Sapiens
gactcaacaaatctttattgagtggcaactacatatcaagcaatctagtaggcactgggaacacagtgacagcaagactaaatattgccagtctactaagcaaaactgataatcatcaaataatcacccatacacatgctcacatcagtaataaaaaactgaataccccaagagaaaatgggcacacaatctattcatgaaataaacaccaaagacaaacaaacttctccaaatatgttctacagcaataccaatcagggagatgcaaagtaaaaccattgtttttgtttataaaattagcaatgacttaaatgtgataagatctaatgctggcaacagtgtagtatgattgagcactctcaaaaactgccagaggcataaaaactgaccagctcttttgaaaagcctgagaaccattcattctctgacccaagataatataacctgaaatgaaataacttcaactaaacatgtctatctcagtattttttccagcactgagaagcttgaaaacaacttaaacatctaacaaaaaggactgtgtaagtaaattatggtatgtccatcttgtgaaatacaggcactaaaatatgtctatgcatttttcaggatttagaaaaatgtttatgatccatttttatatcttttgtttttgtgtgcagcaaaacacaaaaaccaaagatacaaaattctctgttcaaaattatctcacctgtgcaaaaatcagcagtagaaaaaatcagcaggaaatatgccaaaattttaacagtgtctgtctatggatggtgaggttataggtgattctttttcctgtttatttccatttatctgtgctttgcaatttttctcagagtacgtattactgtttcccattatatgttacaaatgaaatgaacacattctcataagttaaaaaaatatagaatatatatttttctttttccttttctttttttttttttctgaatattattaatataagtaactgggttggtttatc

SEQ ID NO: 342837 - DNA, 1000 bp, Homo Sapiens
acaagttgcttttagctttttatttttgtattaacaggagtcttattacacataggtctgataaaactggtttatgatcttcagtctgtttccagtgctgcataactagataacgtatgaaggaaaaacgacgacgaacaaaaaattaattgcttggaagacttagttgaatctatccatgaaaacagaatcaattaaacatgtatgtgttacttagactaaatataaataacccatataaatggtagctcaaacatctcaagtgtttcagagaatgttagaatctattgtttgaagtgtctattgtactctatgcaaaaatccaaagtcatttgcgtctttaaaaatgatatggataatttttcttccgaaatgaagtgaaatcatgattaatcagatatatcagacaatttggtcaacatttaaataagcagctaatagcccacatattaagtgtcttgatatcttagaatgtcaggtacccttgccaggtgtggtggctcatgcctgtaatcccagcattttgggaggcccaggtgggcagatcaccaggtcaagagattgagaccagcctgaccaatgtggtgaaacgctgtcactactaaaaatacaaaaatgagccaagcatggtggcgtgcacctgtaatcccagctattcaggaggctgacgtaggagaatcacttgaacccggtaggcggaggttgcagtgagccgagatcagaccactgcactccagcctgggcaacaaagtgagactccatcccaaaaaaaaaaaaaaaaaaaaaaaaaagaatgttaggtatccttacctttggaagtggtgttatactgcattctatttatgctttttcctaaatcaacaaatgaaaacgtttctatttctgatcaaagttaatcaagccaaacaaagcaattcaaaaattatcattaatatttactcacttaaaattgtgatatactttgtataccaagaatgccaaagatacttggtgatgtaca

SEQ ID NO: 342838 - DNA, 1000 bp, Homo Sapiens
tttttttttttttttttttttttttttttttttttttttttttttttttttttttttttttttttttttttttttttttttttttttttttttttttttttttttttttttttttcacatagaaacatatcaaaatgacagcactttatttcttttttgagatggagtctcgctctgttgcccaggctggagtgcagtggcatgatctcagctcactgcaacttccgcctcctgggttcaagtgattctcctacctcagcctcccgaatagctgggcttacaggcatgcaccaccatgcccggctcatttttgtatttttagtagagacaggattttaccatgttggccaggctggtttcaaactcctgatctcaaatgatctgcctgccttggcctcccaaagtgctgggattataggcgtgagccaccacgcccagccgacagcactttattttgatgaattctttggtgtcggataaggtgtgtactttgtctaaatctttccccacattcaagacatttgtaaggcttttccccagtgtgaattctctggtgtttaatgagggttgcactctgattgaagcgtttcccacagacggaacatccatagggcttctccccagtgtggattctgtggtgtttaaagaggtcagagcgctgtttgaagctcttctcgcattcttcacacttatagggtctttcccctttatgtagtctctgatgtctaaaaaggttggaaatatgacaggtttccccgcattcctcacatttaaaatgtttgtctctactgtgggtactttgatgacgatttaggtgtgaattctgcctgaagcgctccccacatttcagacaggtgtacggcttctcgcctgtgtgtgtcctctggtgcttggtcagggcagcactctggctgaagcttttcccacattcttggcagccatagggtttctcacctgtgtggattctctggtgtctaaagaggtcagagcgttgtttgaa

SEQ ID NO: 342839 - DNA, 1000 bp, Homo Sapiens
actcagaaaatgtttttattatttttagactgtgatattttatttctccttaaaacatattaattatttagaaattacaaggcagaaaaaaactcacatttactcatttaaatactactagaaattaaatgagaatttaatcaaattaatatgcactataattaatgatttgtgcacctcatgaaaacataatgcacctcacgaaaacataatggaatcggtatgaaatatgattgtgatttgaatccttcagcaaattactaggtaccattgactaatatcatccatcaaaaggagtaaacatacatctataaaagaaacattatttatatatcttacattttttcactaggctcaatattttggtgattcctcagcaaagaatttgtcattactacttccttaaatgggattcttatggtgggaatactgcttgccttgctgtcttctctcttctgacatactaatatttcctgatgtcttccttccatattttcacatgtggcggatttgcttaatggggagtggctggagacagagtccatccatttctcaggaatatctggtgagtctggctcaccttcacgtgcacaagagtagaagactccattttgcagagtgctgtcactgtttgtaggggccaaatgatttttctgggcttctgattcatctttcttggtgatagttacatcccctcgttcgtgtgcatgtcggtattcagtactaagtatcatcaatttcttaaaataatgacagagattttctgcagtatccaaggtaaatacatctccttttccagttatataattttcaattagcaagttgaattctcgaatctgagactgacaaagtgccaggaaacctgctgatcccagttgattgtgttcttcagtgcggctttctgaattagagtttagtatattgccattgaggattctcagagcaggcaacactttaagtagagaatccctccagtttgtttcttgaagaagtgggtttc

SEQ ID NO: 342840 - DNA, 1000 bp, Homo Sapiens
gagaaggaccttctctcttgttgcccaggctggagtgcaatggcatcatcttggctccgcctctcatattcaagcgattctcctgcctcagcatcccaagtatctggagttacaggcatgcaccaccatgcctggctaattttgtatttttttatacgtagagaaggggtttcaccatgttggtcaggctggtctagaactcctgacctcaggtgatccacccaccctggtgtcccaaagtgctgggattacaggtgtgagccactgcgcctggccaactccactgttaaggcagcaggtgcaggcaagttacggctattcacactcctgcagataaacacagaagtcaccataccacaactattctcctaacgctgccttcgtcctgagcttcctgtgctagtggcaagtcagatgcaaggaaaatccagagtaaaaataaaaaacaataacaggcacagtctcatcagactgtgaaaccctgtgaaccctgtgaaatgaaaatgacagatgtatgtataaagcaagaatttcaaggcacacattctgacattaactttgtattaagtgccctcaaatgtactcccttcccctctttcagttctcaggggaagagcaaataatactccttccaaataacactcctaaatcaacaactgaagaatgaatgataccctgggcaaatataaagcttgcagacctattttacccaataccatagaaagagaaaacagtgaacttaaccccctcattaaaagtgcaagggaaggctgggcgtggtggctcatgcctgtaaacccagcaatctgggaggccaaggcaggcagatcacctgaggtcaggagtttgagaccagcctggccaacatggtgaaaccccatccccactaaaaatacaaaaattagctgggtgtggtgacaggtgcctgtaatcccagctactcgggaggctgaggcaggagaatagcctgaacccgggaggtggaggttgcagtgagctg

SEQ ID NO: 342841 - DNA, 1000 bp, Homo Sapiens
ttttttttttttttttttttttttaaggaccagatatagcctttaattcctaatgttcaaaaacaatcctgtcttctaaatcacaacttttcgagttacaagatttatccacttcaaataaggataccttttataaagtactttcttgtggttttacagatttcaaggtgcttctacgtggcttcagcaattctcacaacaaaccctcagtgggtcagggtcttctaagattaaaatgttaacaccaatgcgtgtgaagtacagtgaagtacagtgaggttaaggctcagtggcaaacgttaaagaggcccacacaacacaccagggatcagagccaggtcaaattcttgctccccacctccaccccacctcaagaagaaatttattttttgtttttatttttagaaacagtctcactcggtcacccaggctggaggccatgtcacgatcacagcttactgtaacctcaaactcctagactcaagcaatcctcctgcctcagcctcccaagtagctaggactacaagcatgtgccaccacacttgtttcatttttaaattttttgtagcaatgggggtctcgctatgttgcccaggctggtcctgaactcctggcctcaaggaggcactagattgaatgacaacagctacagcatttcttactgaacttaaccctgtgtgacccttgaaataataaaacccactgatcaaaatagatgctataatctttaccacaaatgaataattaaccctgtgctcaaactgctacaaaaatatgagattcaaatgttggagccaatgaagtttgtataaaggagagtttctgccagtgggatgtggcagtgccaccctccttatatcttggctgtcagtcttttggcttggtcccgcagctccattgttgcgattgctgaaagatgaacttcgtcaggtccatctgctaaacgcaaaactcgggttatagcatacatgttagccagagggtaatcctgggaaacacc

SEQ ID NO: 342842 - DNA, 1000 bp, Homo Sapiens
aaaggtttttaaatagaaactttatttaaataaatgaactcttctcaaccccaaaacccagcttctgatcttgactaagttcataattactcagggaaaaacactgctggttccttataagccactgtgctgtacgaaatcaattcatgaaaaggaaacgccctatttccaagcatacctgtactagaatatattaagtatattcacttaacatattaatttaaatgttaatgttagtctaaatgttaaattaatttaatatgttaaacttaatacgtttatttaatttttacttaatacccttactggaacatattaagcattttttcggcttaaaaaaaacaaaaaaacaaaaaaaaaccctgaatttacagaactaaaattatgagaggagattcgcattacaaaatcttcctctatgggttcttctagctcaagacatttttcttactgatttttaactacttgagttggcgtaataattagagaaaagcaggagaggtagcaactgtgaaaccagtgtactaggagttactagccaatgattatctatcaggaacagatacatcaaaaagccaagaaaataagaatctctctttataaaaaaataatagttacaggctggacacagtggctcacacctgtaatccaagcacttcgggaggcagaggcaggtagatcacttgaggtcaggagttttagaccagcccggtaaggtgaaaccccgtctctactaaaactacaaaaattagccaggcgtggtggggcacacctgtaatcccagctactcaggaggctgaggcaggagaactgcttaaacccgggagggcagaggttgcagtggactgagattgcatcactgtactccagcctgggcgataaagcgagaccctgtctttaaaaaaaaaaaaaaaacttctaaaaaataattatttacattaaacttttaaaaacaactatttttcaaagcaaactgctctgcattggggttccgaaatac

SEQ ID NO: 342843 - DNA, 1000 bp, Homo Sapiens
ctgacctcaagtgatctgcccgccttggtctcctaaagtgttgggattacaggcgtgagccaccgtgcctggccaatgttagtttttatccttaaaattgcctgagttcttagaacacagaaaaaacaaatttgaatgcatttctaacagcttaataatttatatgtcccattatgattttagcggaatgttttaaagcaaagcataattcactgcaaagataaacctgaaaaagcaaacaaacttacaaatggtatgttatgacctagacaaaactgattatcaactagtaatactcataattagcacatgcaacagattgagaaattaaatcctgtgctatatactcttaagtattttgtcagatatatctttaaatgttctatcaattgcattcctttccacacatattttaaacaagaaaacaattgtctttcctccagattctcatgtttatcagtgcaaaacgttgcaatctcagtaaaaatggtttattacaatgttattttagaaaggcttagtcctcaaactgttgaaaatgtacttaaaagatgtccaaatcatgagaatgatcaacttcaatggcttcctctgcctccaacttggcttctgcatgtccttcctgtgactcatcaagagaggccaaggcctcattcgtgtcacttgcaaaagtttctcgtgatgtatcatcatcttcttgaaaatttagacttttaatagcttgtttcatctttttccccaacacttgtgttctcctcttcctagcagcttttttattttcatattccttttggttttcaatgtagaaaatgtccttaatttgttcctcgctgatactaggagtgtttttcaagagattcagaaaaactccacctggtgttcttcttcgactaccattcattataaagagaccaccattttgttcaacttcagcggtttccatcagaagttcaattgcctttttgttaccaataatcctcactactcgggctatcaggtc

SEQ ID NO: 342844 - DNA, 1000 bp, Homo Sapiens
aagattttatgtaatgtttatttttttaattcccatcctaactttggctttaatccttacctctcatttccattcttttctttgaaatccaattaaaaaaaaaaaaaaaaaaacaaagtgtttaaaatcacaattatctagagtcataataaaattttcttgtctccaaagagggggaaaacacaccacttttatttttatgcagcattttcaaatatgcatgtcaatatatattttataaactatttaaaataaaaacccttcatcctttgaggttattgacattttctagttcactgacacatctcccataatacaatagttctattcattttcatgaatgaggtgggaactacactaaaaagtaggattttaatccctgaggtgccagttaaaatggacgaggttgcccttgcaacacaagattttaaaaatcagccttaaataataagcatggatcatgctatttgaatcagaatcacctccatagcatgaagtcatttaggaaattgcatttattgggttaagttcaccctgctattcccagccctcatgctataatgatctttccttttgcaaaggaataacacagagcaaggaagtctgctgaaacttctgagatcctcagaaatcaagagaaaccacagtcgcgtttctccgatctccatccacagtgttggagaggatttttcagcaccattccgagacctggaaagggtgatgaactgctttgatttttctacttctccatacatttggccaaaaaggagcaatcctcctggctagaaaaggggcatgtcctgctttttctctgaaatcacaatattagcagagctgggttcagttccttgtgcccactgtccctgcagacgctctcctttccaggcggcctccagtggtttccggggtcctgctgctccctaatagtagcgattcaggctcctggtcccgggcacctcaggctggccattcatccagatctccctgatgatgcgctcgc

SEQ ID NO: 342845 - DNA, 1000 bp, Homo Sapiens; identical to SEQ ID NO: 160391

SEQ ID NO: 342846 - DNA, 1000 bp, Homo Sapiens; identical to SEQ ID NO: 160392

SEQ ID NO: 342847 - DNA, 1000 bp, Homo Sapiens; identical to SEQ ID NO: 160393

SEQ ID NO: 342848 - DNA, 1000 bp, Homo Sapiens
ttaaataaaagtaaactgtttattaaaagatacagcaaaggtacagatacagagatacatacaaagatacagatatatatatatatttacatatatatacagtcttgctgttttcatgtgcactatatttagcagcacattatttaatcaggcggcattttaatggggttgttttgacacttggcattattaagatacaactatagccccgtggaaatttcaacgtttgaattccacttctccgacttttaatagtagcaaagaggggaaggagaagggaatggagtaccaaggctgagcattaggttaaacacaagaatttaaaagggccaaggtagcaaagggaaggaaaaataattaaaattaaaggctatctgacaaacaacccagagaaacagtaagaaaccatcattaagggcaatgggctatgtacccaagatgctcacatcaacctacaatgaccttttccaatccagttcttgtgttgaacctgaggatctgccctctccgatcaatccctccacccgataaatttgctaccaccaaaatctagagctatagagccttgaagcaaatcgggaagctaaatagttgtaccttggactaccttcccacaagtgcagggagggcccaatgttgggtagggatgtgataacactgttctctgcaattcgatgcttttcactttgtggcttggttccacaaagtgaattgcatcgagttactgtcaaatgagaagctgcgggttgtttcatctgtcgtctaacccggccctgccgtttaacccggccctctgagggcaaattgctgctgaaaacattatcatcatctttgttttcttcaccatttttctccacaggaacccattctccataaacactatccgcttcttttttccgatgttgagatccagatgatacagggaattcttttgttaatgttacctggctttttggtggagttggttttgctgcagcaatattcagattgaaaaaaatag

SEQ ID NO: 342849 - DNA, 1000 bp, Homo Sapiens; identical to SEQ ID NO: 160394

SEQ ID NO: 342850 - DNA, 1000 bp, Homo Sapiens; identical to SEQ ID NO: 160395

SEQ ID NO: 342851 - DNA, 1000 bp, Homo Sapiens; identical to SEQ ID NO: 160397

SEQ ID NO: 342852 - DNA, 1000 bp, Homo Sapiens; identical to SEQ ID NO: 160398

SEQ ID NO: 342853 - DNA, 1000 bp, Homo Sapiens
tttttttttttttttttttttcaatgaagggcgttttaatggagacacatcagaagaagttagggaaggtgtggcacggcggcacgtctcaagcagccggctgccacagggccctcagcccacccttcccagtggtcacccctccttcctgtgctgggctgcaggcctgtccacccatgagtcagtgttcctgtttcccagttccacagaccatgggtccccaccacctcagcggaacagcagggtggcaagggcgtgggcaccagaggagccactgggctgcaggaggacagccctgtgggaacactgaaccaagctctactgcgcccatgctcggagcccacagccacagggccatgtactctccaaggttctgtggattaactcctgatgactttttcacgacttccttgtgggtgggtgtcacgtggtcacacacggaatgccgtgtcttacagtgaaggctgggagcagaacggcctctatgagttcttccgagcaaaaatgcgggcccggcggaggaaaggccaggagaagaggaacaggtaaaagcgcagatgtctgcagtggccggggggccagggtccacagcttgtgatgggtgggagcagaccccagatacactcatcacgtccaccctcacacagcctgtgcctatggggcggtgttttccacaaggcctgaattcacacagcagcaggctcggccacactatttaggaacttggtaccgttgctgtggctatggcgccacatccacagccagagcccctgcatctggggtggtctaggaacctgagggccagggtgggctgggtgcagcccatccactggggcacctgatcatcaggcctctccccacagcggaccctcgaggtctcggagcagatccaagagtcgagggcgttcttcctcccgctccaactcaagatcctccaagtcttcaggctcgtactcaaggtcaaggtcgcgctcctgctcccgttcctactcccgctcca

SEQ ID NO: 342854 - DNA, 1000 bp, Homo Sapiens
ttttttttttttttttttttgatttaagaaatttattatttttttaaaaaaagcaacttccagggttgtcattgtacaggttttgcccagtctcctatagcatggtatagtgataactgattttttataacaatgactcagaggcattgaagatccataactatcttctgaattatcacagaaagaagaaagttagaagagtttaatgttaagtgtattaaaaatcatattctaattcttttaatttggttatctgagtatgataatataggagagctcagataacaagaaaaggcaattggttagaacactccattcccacaggatgtgcattaacagactttttactgcatatgtctttatatagtttgcaaactaattcaaccattttacacagcattaattttttttttaactgggttgacattgggctgaaacatttgcttatcatcttataattattttttcctgttctttaatggattttacccccatctgacatagtgtttggactttagtgtatgtgacacttcaagatcatctctgcccattctgatgatagttacaatgaggttacccatggccagatatcgaagactattaattaatccaccagctctgttctcaactttggtaaaagagagatcttgtgtctcactggagggtgcaccaagcttcaggcaagaaactgtgagctggctgtcaacagaatatggttcttatcaaggttcttattaatgctgtgcaaacaagggtctcgtcatttcagtaactatttgtacatttataaaagcaatacagtcatgggaaaaaccaacaagcacagcttggtagaataacctgccatgaaatatcatcggctttataataatttactacaactgttctttttattcacactggataggaaatgcttccatctaacacatggaatacgaatatatacaacacaaatttggctttaataaaaaaaaaacagttcaaaaggacaataacacgg

SEQ ID NO: 342855 - DNA, 1000 bp, Homo Sapiens; identical to SEQ ID NO: 160399

SEQ ID NO: 342856 - DNA, 1000 bp, Homo Sapiens
tttttttttttttttttttagaacaattcttttatttgaaaactgctggtatgaatttcctccttccctcaattaggccagaaactcatcatggggcatgcacagcatctacaggaggaagccccagcttgtgggggctaggatggagcagccgtgagagacacctagccaaatgtccgtttttccatcataaacaatggagcgggggtcagggggagaagagagtgggtaagtgaatggccagaaactccagagggggcctcacacccacctgtgaggtacctccttgccctacccccactgaggcctcaggccccttgcttgggtcatgctgccccctgtcggctgctgcccctgcctcttcctctgagttctaacaacacagacactggtgcctgaaagccctgctgctgccagggagtcagaattctggctgcctctacttgggaatctcctcccatgtggggatctgcagaacatccagatggggccatcccacctcatgatccattcactcccagtgggatacactggaattcaacccggagactggagcccaacagattaaggcagaattctccttgctctggaggcaggtctgcgggaagggggtgaagtctagctgcccctcatgtcccatgccggtgagggtacttggcttcccacagctaagcccaggagcttcctatatcccatctgctgagacagcaaggggtgtggcctggccaggctcctgacatgaccccctgaaagcccctgcagctcagcctttaagcctccattcatctcggaggtcagatcagccatacgccttcggatgagtgagactgcaggtcactctcacctgtgaaggtgagatccttgaagggaggggcttctggcccatagcacttctgtgctcccaacaaggaggcctgtccctttgacaccctggccaagtacagctccagggtcttgagcagccgcagtgggctcttcttggccaatacttccaactctg

SEQ ID NO: 342857 - DNA, 1000 bp, Homo Sapiens
acaaagaaaaccagactctgctggatgtctataatactcatttgcagtaaggctttcaagatacaggaatttttatagcatttgtattttaaggatttagggcaaatacatttttttttctacttgataaaaagaaaattagtacttaaaaggttcaaaaatatattgattgagttatttttcttacataaataaattatattgatttttaggatttaacagctgaaaaaaccctttctgcttccactggaggcaaaactgaacaaaatgttagttaaatagagagagcagcatttctaagaaatctgtggtcagcattatagaccatctatgctacaaggatgtcattaaataggatttgttcaattactggattcttcttctatgatcagttatagaatttctggtttatatctctgattcataaaactgggactccactttttgaagatacatctgattgatttttttcagtcatgatttaacagacttctttgagatgctcattttaacatttacataatttataatcccaaatgtataaaagacaatgaaaaaagcatcataaataaataatgcaaaatgaaatagttatgtcagacttttggaccttctgataaattagcaaaactgtaacagaaaaagtaaaaaatacagtaaattgtgacaacaaaaagtgaaactggtactagtaacacttgcaacatttccaagggtcctgcgcagccctgcgcccccagagtactgaaccatgagcttacttcaagtctcagagtgtgaactacctgtgaagagtgagaccatcagaagggacgttaacatgaaggtgaaaggacatggggaagtgctgcttaggcaggttctttctcagttcctaaacatggagaagctgaggaagaagagaaaataatgttgacttgcaatgtagtttcgattaactgataatttggaatttgggtccaactgtaagatataaacagaatggagaaattaatggaga

SEQ ID NO: 342858 - DNA, 1000 bp, Homo Sapiens; identical to SEQ ID NO: 160400

SEQ ID NO: 342859 - DNA, 1000 bp, Homo Sapiens
tttttttttttttttttttttttcagaatgctaagtacacaaattaatgaccatttatttccaaaggcgactgcagataccatttcggtacaatcaaaaggttttacaagacagagaaaacacattacaaaatgccccaagaggtgagcaaactggtgggggcacagagcacgcaagaaccagcctgacaaaaatcctaagcctgctgctgtttagggagagtacaaagactggttctaagggaagccactgtgtgggggttcaggggagacagtgacgggtctgcccagtgcatagcaatcccagctgggaactgaggaaggacaggggtaggggaagaggggcagaggcatttgctaagctcctgacagaaaccattacagatcagcctatcacattctcttcactacaataacaccaatataaatgaaagattctttaaaatagaacacaaaatggacaccaaaagaaagcaagagttttcaaaacaacagctttgtttgaaatgacttttgttttgttttatttttcatggggctttgtctgtttcttgccatgagtagcaaaccagtgtacaaaaatgtcacagacgagagcaacaagcgactaggttttcctgagcccaaatcagctcactctatatacacaaaaggagggctgcctccctgtcactgactctacccgccacaaagcgggcaggatgggcagtggggggagctccttcccagcctggggccttgccaaggagcccacaagggcctgcaggagaccctccataatcagcgtcagtgtcttgtctaacagcatcacacatggtccttttttcctcctcccctacctccccttcagtagaaaccagtaagaaaatcctcttcaggaggggacagaggactctgggtcaacatctacaaatccaaggaagtctttttggcagagggaaaaatggcccttctgccactccctgagccacctagcttacccccagggcactgccctgccc

SEQ ID NO: 342860 - DNA, 1000 bp, Homo Sapiens; identical to SEQ ID NO: 160401

SEQ ID NO: 342861 - DNA, 1000 bp, Homo Sapiens
ttttttttttttttttttgagttttcattttagttttattgtagtgagtagtatttttaattttcttgaaaggcacccaagaataattacttttgtgaaccaaaactatataaaactgtacagaataaatatttcatagaaatctaactatgccttcttgtaaaataaagctacattgtccctctcttgaggcaacttaaaccacttacctttagaagtgccttttgctactgatttatggcatctatcaatgtacatcaataaaaataaaataatttttcctatttactttacaactgtgaattacttgccacaagaaatgtatttctattatggtcattcagatttacaaagaattaagcctatgaaataaagcaaacccaatatattctctagtcatatttacagcagaatctcagtagcatttttaaaatatcccaagaagaagaattaaactttgagcataaatgacatactttagttcacagcagcactgacattaaaattgtctacacaaaatgtgtagaaaacccaaaaagtatgcttatttcttccacctgaactattaatcattttaactttttaatttagaatgcatgagagtggcatttgtttaagctcaaatgttcaaagttttgagccacccatggcctatataattgcaacctttctattttttcttcactattactatttataattgtcaagttccagtttcttttgcatttattgcaagaaagttaggtatgtttgacaatacacatttttgaagtacatactggttataaacaatgtattccttacatattataactacatatacaagtatggtttttaaatgatgaaatccaattgtaattaatctatagggaaagcaattcaagaaaattcgggatacttaaatgttcagcctttttagatgtgcaagaggactcctatgagacacttttcagtatatgaaatattactataatccttgaatgatttacatgcaaggatt

SEQ ID NO: 342862 - DNA, 1000 bp, Homo Sapiens
ttttttttttttttttttattaatcatgtttttcttttaataagggtttttactcaaaagtgtagctttgaaaatctctagcttgttgtgaaaaccaggaaagccaaggagctgcctcacactgcacaccaccacgtgaagctgtgggccgctgtgtgtttgcaaactctccattaccaaggctggaatcaaatgcaccactttaaaatcagagccaacatttaaaattaggaggatgatgcatgtcctactttgattcaaggagaaaggacaagttcttagtacagtaaaacaaaacacaaaagtaaacaaatctttagaaatcactatatatatgtgtgtttatatatatatttttatataattaggattatcatcatttcaaactattaaaaataaggttgccaccttaccttttcttttggtaatggggtgttattttttttaagagaaaaaaccaaacattttgcccagactctagagtttcccaacttcaattctgttttctgctgtgcaacttccccaccttcacgctgtatccccaagtcccgccaccaattctggctggcaggaggcagagcaagctttcattctggtcatcaagatgacaggcccacaaaagtacagctgagacgggaactgaattcttccccaggaagaaaatacctatacccacaataggtctgcaaaatctcccacaggcacctcttctccctttcttgtggttgtttgttaattggtttgttttgcctaaaagcaagatggcaatcttaatcaaaaagggaagctagatttttaaaataacttaaaaaaaccatttttatataaagcagcaaaaacatatcttcctctctgcagaaagaaaaatgttaacaaggaaacacagcgatgtgaacggactgtccgtcaactcctgctccactggatcccccatccagcttcacctcgagctactccttaactccagcagtgctgtctgaagaagatcctttggcgtctt

SEQ ID NO: 342863 - DNA, 1000 bp, Homo Sapiens; identical to SEQ ID NO: 246564

SEQ ID NO: 342864 - DNA, 1000 bp, Homo Sapiens; identical to SEQ ID NO: 160404

SEQ ID NO: 342865 - DNA, 1000 bp, Homo Sapiens
ttttttttttttttttttttttttttttttttttttttttttttttagcaaaaatgtttaatctctccttaatgtgtgtgtttatttacaagtactaaatctgaagaacagtaaaataggaaatagccgtatatgtacacatctgagggccgggcccacagtcagcggtgctgcttctgcaaagagcccggctgagggtgcccgcccggaccgtccgagggatcgctcttcttctgggagggggttctgcggtgttaaaggacagctaattgtgggctttgtcttaaaaatatctctctctctaaatatatctattctagctgtgtagcaccaacgtgagccactgaatccagacagggagaaagccagggcggaggctctcagcaaggccgagccgagatggcacgccgctccgggctctctcccggactcgacgctgcaggtcgtggggcccccagcccctcaggccaaggggccagtggtcctggggctggggagcacaggggaagctcgaggtatatcaagaggccaggctcccaggccgaggcgtgagcttttccagcactcctgagccaggcgcggggagagggaggacacggagcagggtaggaggtgctgcaggaagcaagtggcggcagcagcacgccaggtgggtgccagtttcacagcacatgtgccgcagccctggctccctgcagacacagggcccatgggagccgctcaccgctgctgggcacagaacggcctccaactgcagctcctaccagggcctccagccccaggccagagctcccaggtgctgcacagttaggagcacagtgggaaccagtgacaagtagggactggggcctaactccacgacctggcagagggaggtacggagtagctcggagactgctgtcccagtagacagcacaggtagtcggcttgatccttgcgcatgtaaacagatactgctaaagtgcttgcgcctagacacagccatgtgctctgtggtggc

SEQ ID NO: 342866 - DNA, 1000 bp, Homo Sapiens
cttcaatattttatttatatagaaatacttaaaaaatgaagtagcaccattacttaagttttacctttattatgtagaactttaaatgtcagaaaaataaaactcttgatacaatttcaaatcttgtctcagcaaatataatattagtatttgaccatgaggttaaaggccctttatcataaaataaaatatactttgttttttaaactttgctcagtaaagtacatttaagctcaagtaacatcacctacatatacataaacaagtggtaaacaaatgtattaaaatagaaatactaaaactagagtggtgcaacagaatttttgtaacttgcactgaattctatttatacaaatgttagaaagcatcaacagttctttttgacatgtttatacatttccgtttttgtaataatatagaataaaatatgctttatatcactgaatagaaaatatgctgggtgaagcagatctagaagatttgtctgaacctataaaatctccatcccaacagaatactgttcaaaacattacacattttatggttgtaattccgtcacaattgtgtgattattaaaataatacagtgttctttgccataaggccatactaaaataaaaagatttaacccagctacaaaaaagttcactgaacttaaattaaaatacttgtaaacatctttgcaatatgaaatataatttttcaagtcaaaaaagaataaaatacttcaatctgtattaatgcaatttctctctaaaacttttaaacgtttttaatatataagagatatgttacagtttctttaactttaataaagctgcagtatcctggtttcacaggaactcctggcccttccacgaacattcaaaaaggatccactgtgttctataataagtatcataggaacccacccacaaaggggaacacactaaacagtccacacatcccatagcactactatcatcttcatcataattattactgttcattttttcctactt

SEQ ID NO: 342867 - DNA, 1000 bp, Homo Sapiens
ttttttttttaaaaattatgagctaattattaatataaatattcaaagtaaactataaataccaatgggaaaactaaaccaaatatagttttgctaagttttaccacatttatcctaaattatgattttataacaagtaggtgcctttaaaacattacatggtcataaaaacatgtaatttgacatattttcagatttgttaatatgaataataacaaagctataccaactaaaatacataaaaagctagttaaagcaaggtattacaagacacagcaatacacttcaattcatctggggaatctagaattaagtgtcgaagaaaatcacttaattaaattttaatttgaaaatactcacttcaggtgtaaacatttccatttataactacattatggtcttaacatgtggcaacataaagacattaaaattactatttcagcaatacagaactatctaccttaaaatatgactctgtgcctaataaaatttcataggtgacacaatgtcttttctcaaagtaaatcatctctcacctctatcttttatttcctagaaatgaggcatgtttctaagccgatatagtaaacacatttttcctttttttattaaaacagctttgttgaaatataatttacatactatagaatgtatctgttttaacttaaagttaaaagatttttagtacatttactgagttgtgcagccatctctacaatccaactttagagcatttccatcactgtaagattcctcatgcccattagcagtcactaccagcttccagccccagccccttgcaaacatgaatctactttttgtccctatacatttatcttttctggatgcttcatgtaaatggaattatacagtatggtaaacacacttttaatctagatttttatattcaactaagttcaacatgtatccagaaccaaatgtttaaattgtctttctagaagtttgaaaatatttatcttccttgatacttactactcct

SEQ ID NO: 342868 - DNA, 1000 bp, Homo Sapiens
ttttttttttttttttttttttttttttttttttttttttttttttttttcaggaggctgcagttcagctttattctcatgcccctcatgtccagttaaggctcaagatcagcccaggccacagtcccccagcactgggactcagcttcccacctggacagggcagggggttctcttgccaactcctgccagcctccttcagctgggggatcccccagagaccgctgcctcagcgggagccacctggaagaaccagaactccagcctggagctgctcgtgggggccagccatcccccctgtccacacactcgtcccagctccatctccgggccccggcgctgaccgtggaggatctcagggcccaggcctccttgtccaaggactccccttggggtccctggctccctgagctcttgggctgcctggggcctccgctgacactccagtgccgagaaggctgcactcccaagcctgctgttcccacggtgtcactggctgagggatggggtgaggggacgtttctccggttcctgtacctcagggccctctcggttggcatctgtttcgtgttcctgcagggtctcagcggagttctcccatcccacaccaggtcctttgctgtgggagacgggcgcccccagggggcctggatggcgctgtcggaatcgttgcctaggggtgtccccagggctgaatgactcagagcttcgccccaccgggaaccttgagctgagtttccgccgctgcccgcctgccaaggtctcatcccgcaggcagagggagctctgggcccggcgcatgggtgccggggaaggggaccctgtcccatctgcctccctgccctcaggaagctccgtctccggggggccccccaggctctcggtgctgccagccccatcggcccccaggcgcagccccccaggggggcccccctcccgccggggccgcatcagcctcttcaccttgtctgccagccagctgcccttcttggtccggggc

SEQ ID NO: 342869 - DNA, 1000 bp, Homo Sapiens
ttttttttttgctgtataattcttatttattaatgtgcaatatttagttcttaaaaaacaaaaacaaaaaacacatacgcaaaacaagacattaaacaaattctttcatgcacggcttctctacctgacaaggttccgctgcatgattttttgaggagttcccttgctcagggttggcatatgtttttcaattttcactatccagagccatatttgcagaaagatatacgaatattgtaaatggtgggatgtgctgctctcatatgatgaaaacttcagttccttggttgtctgggactttgtgtaaatgccaataaatttgagagttcgcccaactgtgtctcttaacctttgttcccaaaggtgaagggcaggatttttaatcaagtagcaatttatctttaattaggaaaacataattaggtatcatcacctcatttcaattactggtgggagaaagtcacatttcacgagtagtgacccatgttgggttatggatctcctattactgaattttgcatctgtatttatatttggcagacagccaataaaaattaaaaggtgatcaccatgtttctctgcagtccagttgtcaaagtcaccaactctgctgctgaataagaaaccaagagatacttcctgagtcacatttagctatttctgttttctgctcagacatcaagtgtagatcaaaatagttgtatacaaaacgcccatgtgaaataggttaggtaactgttccacacttcatttctggtacagttaaaaacagtttaatgtctcaaggcaccactatggttgaacatcagatacatgggtcatcagctaatcttccactatgctgtaaagtcagtaatagcttgtgcaattgtgaaaagcaatctctagaggactgttgagtatacagtaggcacgtgtattataatacaaatagaaaacaatgaatcctagaaaaagcatgttgagcaccgttgtggcattgttcatatttttacctaac

SEQ ID NO: 342870 - DNA, 1000 bp, Homo Sapiens; identical to SEQ ID NO: 160405

SEQ ID NO: 342871 - DNA, 1000 bp, Homo Sapiens; identical to SEQ ID NO: 160407

SEQ ID NO: 342872 - DNA, 1000 bp, Homo Sapiens; identical to SEQ ID NO: 160408

SEQ ID NO: 342873 - DNA, 1000 bp, Homo Sapiens
gaggctactcctccgtgacgtttctgtcccgtgctgccctggtggggagcagagaccgtgccaagggctcactggtgacaaatctcagccctctccccaaaccaccccagcacgcgtgtgctcatcaccgagacagccctctcgcccctccccttccagccagccagccagccacccactcttccaggcgagaatcctgcagcagctgcgctctccctcctgggtaggactcttctttgatgcgccctccagtgcctggcaactaggaggcgctcagcaaatgaccatttcccacaatcttttattaagaaaaattccaaacatacagaaaagttgaaagaacaagtacactgttcactgaaataccagccactgcagattcaacaatgaacattttggccttatttgctttgtgtattttggggggaactatttggaattaaattacacatttcttgaaggcattcacctatataatccagcatctatctcctaagaatgaggacattttcccatgaactgcagtaccgttaaatggctattagaggaatggttggtctttgtgagggtctcacgtccaggaacctcatcaaagtgtgctaggcccttagcagagagggtagaacctgctcgccggctccctcaccttctctcccatcccagaaaggcagaacaggggcaacacaggattctggagagctgtccagatagaggatcacaaacatgagctccacctgggaaacacagacagccccaatcccacccccacaacaagagcaggcaacctgggtccaaattcagaggacaccacagccggcagagggctgcagcatgccaggtaggacggaagtcgctgggggtggggatgagcaccagcccctagagcctggaatagcacccggcgtgggctacagccctgccccacccacctcacagctgctcggctcacccatggcactgccaaagcagcaggcttaagccgccaaggcgggcacatgaa

SEQ ID NO: 342874 - DNA, 1000 bp, Homo Sapiens
ttttttttttttttttggcaaattaagagtgtgtttatttacaggaaaatcatgagaagcaggaacaaacagggctgtaggggaggtgggctggcagtgaggccaggtgtctgtgtaaacaggcattggctggatagagggaacacaggagccaggctgcgggaagaggtttcctttctctggcagctctggcggaggccccaggagggacatcaagcgaatattttctggagctcccccaggcgtgggtccttgtagagcttttcctccagagccaggtacttcagtggggccagttccttgtgtcgattgaggcgctgctccaggatgcggatgcggaacatggcctgagagcagtaactcaggtacaggtcttcatcctcgggtgtcagcgtcacctggttctcctggtaccactgctgcttcttttgcagctcctgggtctccttctcaaagcgggcctggatgaggttggccttgttgatgagccgctgcttgaagtcgctgaggcactcatccttgaggcgcaccgcctgccagcatgttagtttctctcctggcgggagctgggccaggaatggggccaggtagtccagctgggtctccacctgccgcaggtgctcttcgtgcatcatgcgctccatggcctcccgatattccttgctcttctcattccgcttggtgtcatagatggagatggtcagtgtgtgcgccgcctcctcttcctctcgaagcttcagaatctccagcacctccagctctgactcccagacctgatgtctggacagcttctcctccctcttcaggtgcatcatggcctcgtactggtagagcagcttcttggtgtgctccatgggctccacctcgaagctgatgcacatgtcgggcgtcatgatgatcttgttgcctttgctgtccacctcggtgcgccgcaggaactcgcgcttggaggccgtgatgtggtcctcacggcagtggtagcgcagctggatgcgctcct

SEQ ID NO: 342875 - DNA, 1000 bp, Homo Sapiens
ggtagaagcgtgtttcagtcaaactttaacgaaaaataagttattctgttttcatttgctcccggacgtcagaaggcagagtttcaaacagagcatcttctacaactaaaccagctcgcttcagagcccgacagtcacccagttcaggagggaggatttcaaagtgattaccttttacatctaagtaggaaagaaatagcaaatttccaattttcggtgaaagtacagataggctgttttttccaatcttcagagttttaagtttcttgcagaagtagagttcatctggaaggctttccactttgttacatgtgatggaaaaatactgtaaactttgtagaactccaatttcaggggggataaatcgaatgtcattgtacgataagtccaagtatcggatcttgttgcataggaagaggtgggaaggcagcacctctattttattgtgactaaaggacaggcgttccaggctggtgagtttctttatatgctctgggatgtaggtgatgctgttatgccacagttttagcactgtcaactttcttaagtgctgaaagctaacgatttcttctatagatttcagattgttttccttcaggtccaattcctggaggctgagtaggctgaacacagcatgaggaatacgctccaggtcacagtggaccagctccagctctgtcagattggtcatcttctttaagttgttgagcatcaccagcttggtgccatcattatgtatgcacatcttctggagatggctggaaacatcaaccactgcctgagggattttggaaacgttgcttttgatagagagaattttaaggcttttgagatcccgcagagactcaagggtgacatttctggaaatatcatgacttagagagccaactaggtacagctcttccagatttcggagcccatacatccagggggggagttccctcatgtcatcaaacttgacgctcaagaccttgaggttttccttcaggaaagagagcgc

SEQ ID NO: 342876 - DNA, 1000 bp, Homo Sapiens; identical to SEQ ID NO: 160409

SEQ ID NO: 342877 - DNA, 773 bp, Homo Sapiens
tttttttttttttttttttttttttttttttttttttttttttttttctgtttttaccattttatttttgtttacatatttgtttaaaatcagtgaatttctttgccaggttcagataactgaagggcctttataagtagtttatattgttcagacccaaggtatgctgaaaacatagtctggagcaaaataggaaataacatctttctaaagacaggcttagaagttctaatccagtaacttaagatgttccctttgtgtggtaacagagctgattgatacctggctgctagaccaccatttacaggtatagccaagaaaacagggtatagaccaccaataacaagaccagtcagtccactccgtgttatggtacaggtttcacaatccaaatcacctgtattcaaaggaaaacttacaaaacatctgtaagttaagtctgttgtaagaaaaggtatccctgccattggtaagccagcagctatgcgagcctttgtcacattcaagatgcgtcgaaaaagactgtttgctatgaggccacaaagagcagcatttaatccaacataaaccgatccattttcaagtagattcctttctgcttctggaagctggttaatttttctggatatatcaacaattgttatgttttccttattattggatttatgattttccattttgagccttatgctctcctcccagcagcctgtgggtgcctcctccttcctcagccacgccggagttcactgtggcctttgctcaaattacctggg

SEQ ID NO: 342878 - DNA, 1000 bp, Homo Sapiens
ttttttttttttttttcaatggacacatagcatttatttttaagtctgttttcttgactatatgttattgaatatgttttcctgattgtaaaagtaacacacacacataaacacatcttccaagacagtaatataaagttataaaaatgaagaaagcaaaatcccatgtactccactcccaaagataacccctgctaagatttgggtatatttctttccagatgtttgccttatgcatctggaaggcatatctattatgtgcataatcagaaaactatataagttgtagatcaaaaaaggaagatcttttcctgcttctctcttttaaaatatctctgttgacagtaagacatcagtgatcttctgactttgtccttttattcatggaacacaagcaccaggaaatgccttaaacgactcagacagacaatctgtggattgtaacgtggcggggcccaagggcgtgttttggacatttggctaggacaagtggctggtacaatggccaattaagaggcacttttatgaggaaaaacatactttctgcaagatagatctctagtgaccgatccaccaaatgccttcgctctactctgtatgtggcatctgctgctactttgctgatgcgttaaatgatgtcctatctcctggacacacaagctgccactgggaaggggctgggaacctacattgctggtgtcactgatactaatggtgtgtgtaggagtcttccccaccttaggtctttcttacacttcttcaataagactttctataaaggcagagcaataccagagcagagcgaaagccctgcaaacaccagccagacgcaggggcccgaggagctgaggagctgaggcgccggggttggggagagtaggacaacattcggccaaggcagccacatcctgttcctggacagccacagtggcaatgcgccaggaggacgcggggatggctccacacccgctgccaagtcaaacacggggcactccaggca

SEQ ID NO: 342879 - DNA, 1000 bp, Homo Sapiens; identical to SEQ ID NO: 160410

SEQ ID NO: 342880 - DNA, 1000 bp, Homo Sapiens
aagattctgaacttttattttctggcatgaaaagtacaaataattaaacaattccatgtaaaagtctgttaccgcggccaggcctgtgatcccggtaataaatagtctaaacgcaacgcgaagtgttcttgttgggttttttttttttttttgtcttttgttttgtctttttttttttttttttttttacagttttttatcacctccaacatggactctgtcgtgatttgaaaccttccgaataaataacaggatgaagggaggggtggaggggctgagccccctcccccctggcctggcccctgccccccagggacgtggaagccccaagtccccctcgcctgggagccccggcctggccccctgcggggaggggctggcctccagggagggggcctggctgggctgagttttgtgttttagaaaaagaagtcccctcccagtcttgggggtggcaggggcctaggcctcggtggggggggggtgtgtggggaggtgccccctctctggagcctggccccccccagggtgggggacaaacccagcccttattgctcggacgccctgctgcaagcttcccacgcggacgtgcgtgttcccgaatgcagagggcggaggggagagagccccaagagacagcaggggagaggggtccctgccctgctgcaggggagaggagagagggcagggaggacttaaaaccacgagaataaataggttcgtgtatcaagaacaagctagggatttcaccagctaaataggactgaaaaaattctcaagacaagagcaaaaagaatcccattggtgacctggacgtcgctggccgtggggactgtcccgcagagcacacgcccccgcgtgccactcggctaccattactgttattaataattattattactttaatgattccacttccccttttataaataaattaggcataaccatgtctcggcaaaacttaaagaaacaaagagaacattgtcgttcctttaacttg

SEQ ID NO: 342881 - DNA, 1000 bp, Homo Sapiens; identical to SEQ ID NO: 160411

SEQ ID NO: 342882 - DNA, 1000 bp, Homo Sapiens
tttttttttttttttttttttttttttttttttttttttatgggaaacaggtgtgtccggtttaataaaaagggaaagggtcatcaggtggccacagcctttccttgtcagtcatatccccaacctccagatcctttatactctcataagtttgaatacagtcaaggttagttgggtcaaaaactgatgttgattatgattaaaaagatacaaaactcagcacctccttcattaaaaataaaggttgagaaacttgataagaaaaaaactaaaatattcttatagctgcctgggggagatcttaatccttccacatacagatatcctcatatccacaggaggccatgtggactaaaaccaaactgagtccattactcattccctctccggctcttcttgtggctcttcttagacctttcgggagactttgagtggctcctgtgtctgtgactacggtgatgacctggggacttggaacgggatctgtgccgccgatctcgggacctgctgcggtgacgtcttggactcttgctccgatgcctttctcggcgaggggaggggcttctccttttgggagatcgactccgccttctgggagaccggctcctactcctcctgtagcgcagtgtgggagagcgacggggcttgtccaagtctcggtagcttctccggcggtgatcaggtgatggcactctttccaacttctcatcctcctcttcttcctcttcactggactccacatcatccatgtcctcttccagagcactaactcgaggctccagttgctcagcttcctctaatacatagcgtttcttaactccatggctttatcgactacaagttcagctgtaagtccaaagcactcctctttccagtacttggactcatagattcgcgttcgaatgatcttctccaccagatattgagggttggtgccatggatgctgtgcgcatccttcactgtacggttagccattttagaatgccttcaattctattt

SEQ ID NO: 342883 - DNA, 1000 bp, Homo Sapiens; identical to SEQ ID NO: 160412

SEQ ID NO: 342884 - DNA, 1000 bp, Homo Sapiens
tttttttttttttttttggaactttgacttagatttattttcatctcatcttttttaaatttctatttttgtgtatgttttataatgtacataatattttagtacagtagtacatgtatataatttacaaataaataattatacaattaaggaagtgaactaaacatttttttactgatgggaggcacaacccatgctcaggaagcacatctgtccacagctgccagagctcctggctctgctctccactcacccgccctcgggaagtgaagggtgggacactgaccccgaaactcacagaacttttgaggcagcatggggaaagtacagagagctcttttgtggtgccacatggcgttttcaatttcatttaagtgaacatttacttcctctgagcaaaacgaaggggccagatggtttgggtctaaaacacacttcagctgatccaacttaaataatctgaatttaaatcactacatctctccacatactcaatagccccttgcctcaaatgtgagtgggcctgtaaagttagatacttagttgcaagcctggcttattttattaactaagtgtgttaccactgacgccaaattcctggccaaactacagtaatctatttaaacaatagagaggattcgctcttcatagccacactgaatgtgccatcacccccacccacttgtcagttggagaaatgcagggcttaaaggtgctagctaatccgtgatcgtcaagtggcaaatttctccactcttcccagatgtggccttggctaagcctttctgattcactagacaaatgaaagaaatagcgacagaaaaacaatcaataacttgtcattccaccttttcccacaaccaagaattaagggcttccataaccgtcctccgacaagcatctttgggcttgttgacaagcagccatttgcgagacagagtgtcttttattcctatagcagtagatctgtccaagaggccacctctggagctcagagacc

SEQ ID NO: 342885 - DNA, 1000 bp, Homo Sapiens
tttttttttttttttttttaatatttacatgtttttaatatgctttgtattaatattcaattttttaaatgaattgattacttaaaaacacattgttatattcatatgctggataattctcagtttgctgctgcttactctccattgattttggtgtcataaattccatgtttcatggaatttagaattttgcattttctattttggtttcaaaatcaaattggatacctttacataaaatgagtatatttagttcgttcaaagaaacttcaacaccagactgctgtagggggccaactgagagtttgttgaatagtaagaattttcccatggtaaaacaaatcattttggacattctcttggtagcaagcactgatagaggagtacaaagattaatttaaaaagtttcactataaacaattgccagtcacaatctcattttagaagtaaaactttaaaaatttaatttaattctaaaatttaaaggggctaaagattctttgttaaatttgagtgggtgtaaaatgaaatttaacaactaattataaaaataataacttaataattacagctatttaatagcataacctgtaatagaaattggtttatgtttaaataagttctatgacttaaaggaagactaacattttcagatattaatgagggaaggttttacaactgagactcccgaagaagtttgtctttctaaatgttcatatggcagggccagattgaataattacagtttttattataccttgcaacgatgaaacgacatacatttttgataactctccttttgcttctccaagaatggcaaagatttacagttttatacaatgaatcctaatcatccaaaaggaaatttattacacagtaatgtgaatagaatttcatttatgaagcttattttttcattctcaaatgatataaacaatgattaaaactctccttctggatctaaacagtggacttttttttccctaaaattctcagtctc

SEQ ID NO: 342886 - DNA, 1000 bp, Homo Sapiens; identical to SEQ ID NO: 160413

SEQ ID NO: 342887 - DNA, 1000 bp, Homo Sapiens
ttttttttttttttttgcagtaaataagaatgagtatttttgatttattcaaagtttcaatctaaaacctcaatgaaatctaccacctttattacaaggggactgatggttcctgaacagaaagaaacaaaggtcaggaaagatggcaccggacattggagagggaactggccgagtgtgcagaaggtttggtccaatagatcactgacaggctaaaagccacattttgttgagaaattacatcagaactgtttaaagagtataaacctccataagaaaactaaagatggcaaatgagattcaactctgttacttcaagtctataatgtcttcatcggagaaagccgtgagctggaaggggctgctgccggagaccgggctgccctctctgtctgccacagggtcctggtcagagctggctgagtgcccctcagggttggcttcggaagtagaagcactttccaaggagcctgatgggatcctgtcactgctagatgacctcactgcccctggcttggggcctccttggctttcttctaaccgcttccggggttttgatttggcctttggcgctccttctgacttgggtccaccttcatccgagaggcccagtagttccctgcgggtcctgcttgctatttctttgatctccatgcgagacagggacaaggagtgcgtgactggaatggcagcaaggcccacactgatgggagtgggtggggtgatgaccttggagactaagggtgacttcagaggtcgttcgatgcttctgcccacgaggtttctaagtggaatcttgtacagattttttgattgaatttcaccttcccccagggaagaaggaaatactggagtatctcggcccgggggtgtctgaggagaatttcgggcactggcccccttggagctgcctccagatgagacctcattcacagctgcagttgctgtgaagtatatatccgacctggaggccaccagctgcagctgcggcacgactgca

SEQ ID NO: 342888 - DNA, 1000 bp, Homo Sapiens
tttttttttttttttttttttttttttttttctttttaactcaagaaagggcttttattgtttttaactcacttcctgggaagttaatttttaaaacactcttatagagtttgctcatcgcttgtgctacattcaaaaacaacgatgccaaccaaaaccctcagtgacagggtgagcatcccacctgggcctacccctgagctttccaagggtgggtccgatcaaagtggtccccccagaccagatgctcaagaaacacttggggatcagtgattggctcttaacttgccttccactaactctataaaagtgttcttaaaaacagtaccgagtaactttttaagcttcgggccacactgccttagcccagaggagccggggagaaacgtggacccactgacaatggggcacattcggctcctagccttaaatagacgtagaaactgtattacagatgcatgtaccagtgcaggacatacgagtgagctgtgtgcaacagatgagcacgcgacatgcacccacaggcgcggagatgcagcgggatccgggtttctcccccagccagcctcccttctccaaacaagccctcctccaacaggacacccacacctgtggccaaaagcccttgtccatccatgtttccagggcagtgtccgagtcctgcgtgaccctgtgggggtcaacctctatgagcattcggtcagcaaatgccacgtcggccagccggacactgatcccagagagaaggtgaaggctgctccggaagagctgtgtctgcacgcgctccagcacccccgctctgagcaggctgactgctgatgtcctcagggtgaggcaattgccgcagaggccacctgccagcgtgcacacccctccaggttctgtgtctcgtgatccctccgacctggacagtttgtccttcgttgtaggagtgtgagtgcagctcttgggcccagatgggtaggccggtgtaggaggagaggctgggttccagttattt

SEQ ID NO: 342889 - DNA, 1000 bp, Homo Sapiens
tttttttttttttttttttggagtgagacccacagagtgtgtttattctggcgttgatagcagcagcagtggggggaccggccagacgcagggtgtggcgaacagaaggggtggacacaggtgtgtgtgtgtctgaaaggacagagaggattggcccattgacattcacggcgagaacaagggtcgggacactgagtcttggacaaacagcaaagagacagagacagacagagggttttggggggcaggggtcccccagacatgcatggcccctcgcctcgagggggagccccagggaagaaaagacagacacagtggaggctgaatgacccccaccctgaaagaaggagctgggccggcctcctctcatcctctcgcttccagggttaggaagcctagggccagggctgccccgcaccagcagctcggacgttatggcttcaaggagatgaattcacggtccgggcaggaaaggatggggtcctgagggagcctggtccgatcccgggcctaggccagacccctcactcggagttctctttctctgatagtcctttgctgccttttgtgaagctggtcacagtcttttcctccactagctgatgccagtgctccacgggcttgcggggattggccagcatctctgcccagtgctcgcggccgtgcgggtcggcagcgtcggggcccacacggcacacgccgatcacctcgttgtgcccgatgcagtcgtagtccaccacggcgatgctgagccccacgttctccacgctctcgggggccacgtcgaacaccagcgcctcattataggtggggttcagcgtgttcttcttgatggaggttttccgcttcttcagacgccgcccctcgctgatcagggaggccttcacgtaggggtctgagaagccagtgaggtccatcgctttgaggttagaggctttgatgatggtcacggtgaggcgcccggccgtggggaggtagcagagtgagaagttgagctccc

SEQ ID NO: 342890 - DNA, 1000 bp, Homo Sapiens
tttttttttccgaagcaggattttatttcaccattactggacatctgaaatggggaacgcaacagagagcatgcgtgatgaacgtgctgctcaggggatcagagtcaaagagttgcaagaaaatgaacaacagatgaaggacgtggtttgcagcttgatctgtttctacaggacagtggaagtgaaaggtaagacagcccttaagactcaggatttttaataaactctgatttttaataaccatggaacaatgccctgtaattagctgtaatttacggagatatggaatcttgaacataatgtgatgaaaactaaacctcagaggaagggtatagtaaaaatacaagtcataaaataatattattgctgcaaggaacttgttcctgtttgtagaaatgaatgtagacctgtatcacgctgatataatggtgggagagatttctggccggtctgtggttctgagactcatctagtttcttcaggctcagtgcttctccctctgggcacatatatcccagaaggctacatgtagtagccaagacattcccaatgtgtcctacgtgtcacgcccctgcctttaaaaggttagccaaccaggtgaccttctaaggtacctttttggttttagagatggggtctcactcttttgcccaggttggactcgaactcctgggctcaagcaatcctcttgccgcagcctcccgggtagctgggactaaaggcacgtgccaccacacccagtttgaagttcgttttggggcttagtaacatacatgttgggatcagtcactcacagacaatgctctatggaaattctaccaaaatgcttcctggaggaggaaagactcatctcttgccacttttctggaatgcgtccatggacgtcagagtgttccggggttctaatttgttcacagttcttttcttccagaatataaaagatgtaatacttttgggaccactaaattaataaactctgaaatcaactgcaccaagacct

SEQ ID NO: 342891 - DNA, 1000 bp, Homo Sapiens
ttttttttttttttttttttttttttttttttttttttttttttttttttttttttccaagcaccaacatgtcaggtttatttctccttcgctctcaactgagagcggggcatccaaatcataacaaaaccagggcccaagagtgggaagcggccccctgggtgggcctgaaccccaatttcacccttcccccgggcatagggcccaggccaggacgctcacccgaatgtggctgggactccttgtgccctaggcccacggggcggaggcagcaccaacattggggatggtcccccaagaacagaggaggaagcccagcctccggcaggcagtatccacatccacgcccacctgctcaggcctgcagcctccagacctctagcgacaggtctccagagccggccaccaccaggttgccctcagcacagaccctattgagcccattgtcatgccttcgggtgcaaatggtccttggtgggtctgtgggcacgtgcacccggatggtcttgtcagtggatgtggtgtacaaggctcccacggagtactggatcccagtgatgggaaagctgtggcccacatcaaaggaccggataagctggaagcagccgttgcggttggcgaagacgtgcagcaggccctggttgtcaccagcccagagctggggttcctggtaggacatgcagagcaggtaggagtccagctgcagacgctgcaggacgctgttggctcggcggtccaccaccaccagggtgtggtcctcgctgcctgagatgatgtgccggtcatccgccagcagggtcagcacgggtctggagtgtagttgctggtgcttcaacagggctgggccggctctggggtcgtagatggtcaccttcttgtcataggtgccagtcaccaggatgtcaggcaggtaggagaggcacagcacggctgagctggcctttatctcgccgaactgctgcccatccgctgccatgtcccagagcttcactgtgctgtc

SEQ ID NO: 342892 - DNA, 1000 bp, Homo Sapiens
ttttttttttttttttttttttgggatacacattcgcttttaataaaaaagaaatttcctcctacaattgatcctgcacacgggggggccatgagccacgcctgctgactcattcctccaattctcaaacacaagcaacgattcaggtcctggtgagaaccattcacgactcctccgggacctgttccaccctccccgtcatgcacagatgatcttagtaaccagagtaagagtctgcctgagacacgagtcttttttcctggctccaagggctagtgccaaagttcctccctccaccggggagggaggtgagacttgagtccctgagtgggtgtctgggtgttcacgtgtcctgctaagcagcgcggggcggctgcctccaggtcaccacacctggcacacccggatcacctccctcagcgccttcagcccctccatgcttttgtccttcacggccacggcgaggaggactgctctgtttccagcttcttgagacacaaacgctaccaggttctttgcaaagacatggatgagaggctcatcctgccccagaaggacttttgtggtgagcacaggcttgctgacgtcactggccacgctgctgggctccagggagaccagggtgcccatcttcccaaactgggtcaccaccaccaggatgtgactgctgaaggccgtacacaccacctgggtggggaccccgcacaccacctccgtcttctgcttcgatatcaccaacggcgtgtcttccatggcggggctctgcagtggcagctttaatttaggttaaaaagaaaggggaaaaaaaggagtcaatcaaacagtacagccttggggctcccaaaaaagtagcacggggcattgaaacggaaacgcaaggaggcccattcaaaagaaggggccaggcgcggtggctcatgcctgtcatcccggcactttgggaggccgagacaggacgatcgttgaggccaggaattcgagaccagcctggccaacatag

SEQ ID NO: 342893 - DNA, 1000 bp, Homo Sapiens
aaagatctaattggcttttattagcgattcatgaactgggtagcatccagcctacaaaataaaacagaagccccgccaggtatgatagaatggtctgcatttgtaaagcagcactagcaggaacaaggaaacagcatagtagacacagcagattggttaacatcaggttacttcaggttacgttccttgtgtggattaaagcagagggggcttcctcatcataatcacgcttgctcacgttgactggactccctttgatcagttgctgtgaatctcctgacttgttgaaactgtcctatttttaagttcactttgattacatggactccattcctggatggagaggtgagatcttggagttccattcaacataaatgtattgtaaagtttttgttagagggcttgttaatgttggccttgggctagtcctttcccatctctgatcctctgcttcctaacttgtaaaatacagattaaatgctcctaacattatgaatctaagaaatgtcaggattagctaaattgcttaatggcacaacaatattagagtggaagctgagaagcaaaattgttacactgagcaagtatttttaactgattgaaatgaaagataagagctttttaaaagtttatcttcccctcaaccctcccagcctctcaaaccactgtattagcttgctagggctgccataataaaataccacagattggggggctttttaaattaatttattaggggggtagagatagggtcttactatgttgtccaggctggccttgaactcctggcctcaagcaatcctcctgcgtcggcctcccacagtggacggcttaacaacagaaatttatttctcactattctggagattagaagtcaaagatcaaggtgctggtgattttgtttcttctgaagcctctctctttgcttgcagataactgccttctcactgtgtcctctcctggtctttgttctgtgcacacattgctggtatctcttatg

SEQ ID NO: 342894 - DNA, 1000 bp, Homo Sapiens
tttttttttttttttttttttttttttggcctttcaaagctttattcatagttcggaggccccgtgtgccccacttcccagacacccaggtctcggcgcccacacaggccccactgagtggtcctgtgtgtccacccgggaagcaccaggttgcccaccctccgaggctgggcagatggctggccagggcctcgaagaaggttccagaggtggccctcatgtgggtccagctggccgaggtcacgaggagggacgcaggccccagccctgtgagggtctgggtggctcagtcgtgtggggctgcactcaggagcccccactgcagcgcaaggagggcccgcgcctgtggctgccgcggctcgcccgcctgttcgaagcgcgcccgctccttgcatagcgcctccaggacgtcggcggggaccgccttgcccgtgaacttgcgcaccggctcctctgccacccgcaggaaggggttgtagaggcgctcctcgcccagagtcgacggcacagtgggcacgtcatcctcatccctcttcttagcccaggacagcttggctctcacgtggtcgttgcagggctccactttctgggcaaactccaggttgctaagcgtgtgctcgtggccgcagaacaccttcgtctcggggggcagggtacccagctcggccaggctctggtacatctgctgggcgctgccctccaggcacgagccgcagccggccaccgacagcgcgtcgcccgagaacagggcgggtgggtccgggcaatcgtcctcccacaggaagtagctcatgtggccggcggtgtggccgggcgtcaggaggcaacgcacgtggatggccccgaaccgcagctcctcgccgtgcgccagcctgcgcgtcagcgagaagatgcgctcgtccgcgcccagcaccgccagcccgggacgaagccgcgccagctccgggtttccccgcgcgtggtcccagtgatggtgggtggtcagcacagcggtcagaga

SEQ ID NO: 342895 - DNA, 1000 bp, Homo Sapiens; identical to SEQ ID NO: 160416

SEQ ID NO: 342896 - DNA, 1000 bp, Homo Sapiens
aagaaaaattttgaatatttttattgaattccaatatagttactctgaaaaaacaaattagacagatatcctaaattgaaaatcatgatgtacaaaacccactgtcattaccaataaaaagtttaaaataaagtgtcaagattgatttttacaagaacagcattcatatatcaaaaacctctctcttttttataccaaatgattaaggtatactgaaaattacacacctcaagaaaatatatcagtagatgaaatattatcactgaagattagtcacataaggcatgattagttttgggaaatttaaataaaatattaaagttccttcacgatttccgtcaactacatgtccacagggggaaaaaaaaaaaaacataagtcaaaactaaacaggcagacaaatgataaagttgggaatacatagcgatgtcaggaatttttttttttttttgagacaaggtctccatctgttgcccaggatagaatgcagtggcgtgactgtggctcactgcagcctcaaacccctgggctcaagaaatccaccctcctcagcctcagcctaccgcgtatttgggattacagagcgtgccaccatgctaggctaatttttaaatttttgtagagatgggggtctccctatgttgcctaggctggtcttgaactcctcgcctcaagcaatcctcctgccttggcctcccaaagtgctaagattatacatatgagccaccacatctggcctaggaagttttgttgttgttgttgttgttgttgttgttttttgagacaaagtttcactcttgttgctgaggctggagtgcaatggcctaatctcgcctcactgcaacctccaccttctgagttcaagcgattctcttgcctcagcctcccaagtaactgggattacaggcacgtgccaccacgcccagctaattttgtatttttagtagagatggggtttcaccatgttggccaggtggtctcaaactcctgatctcagatg

SEQ ID NO: 342897 - DNA, 1000 bp, Homo Sapiens
gagagaacttgaacatttaatatggtcagcaccttgtaaggtgaaggtgtgttttttacacaaattataaataatgaaaaatatgcatttagaaaaagaagcagcagtccccttggcgggccggctcgaggactctttggttgagtggcaggtgaggccctgggtccagggtctgtcagagcccccctaggtcatctgccaggaaggccagcaggtagcggctgacatgtctgtcgatgatgacaggcgagaaaccgaggacgcgccgggtccctggcaggcccttggggtctggcggatagcagtacaggagcagggccagtcccacagcaaggcccaggccagccaggaagctcatgggtcctggggagaaaccagcgtgaacagggctcccctgggcctcagaggggtggggtcctgaggcctgggggctgtgcaggggagtgggggtgccaggctgaggtgctgcctgaagagcccccaaacgagcaccttaggggggggtctgtcaccaacagaaggccaggaatggagccagacttggggtggagaagcccctgaggcggagatggagccctggggagggtaaagagagagggagagagagggagagagagggaggggcagcagggaggtgttacccctgttactcagctcgccgctctggctgcccgagtctagctctgtgcaatctgagttctctggaaacaaaaccacagagcatagttagtcaacgggcagggccggagggcaaggtagtcaccccgcaggaagcccaaggttgctgctgcgtcctggggccgccaggccgaaccaggctgtggcacctgaggctagccctcctcagggaactatgcacagtctgggtcttctcctctgctccaactcctggacgggcctaaaggcacccgggagccacagaaggtgctctacctccagtggggccaaggcttggccctgcctggttttgaaagccccctgtggcatactcgtggctggg

SEQ ID NO: 342898 - DNA, 1000 bp, Homo Sapiens; identical to SEQ ID NO: 160418

SEQ ID NO: 342899 - DNA, 1000 bp, Homo Sapiens
ttttttttttttttttttttttttttttttttttttaagaatgggagctttatttatgcgttatatgtttaatacaaattcaatgtattttgttgtgttcaatacagttaatatctggagtgaacaaggtcggtctcatacatttatctttcctttcttcttcctcacgttgtacataagggaaggaggcttcttggttttataggccacacttttcttgatgcgctgtcctttgatgttaacaatatatggcaagagagggggccggacggtcaaaactgttccttcaggtgtatagcctcggagatgcagtctgtccttaaaattaggtgttactgaaacccaacctgcagaggaaaacttgatgtcggccactgcttcagatgcccccagtccttcttttaacataatgtcttcagcaacaagaggaggaaatcctgccattcgttcttttccacccattggaatctggagtaacgtatgacctgcatgcttctgatacagagcgtctgccctgtccaaggaggtgatatgcacagggaggatgttggaagccacgactgtaaaccaagctgactgatttccctgcaggaaatctatgcggcctatagcacccaaaaacagaaccattcctggtttaagcacaaaagttcttggaacaatggactgtgttggcaaaacaatatttacttctttttctgttagaagatttaaaatacaattttcttttgtaattccaggggtgtcataaaaccagtgggcatctttcacatcttgtgcagtcaattctacttgtttggtggatttgtgtgtacccataacagggtcattttccatgtcaaaggcaagtgaatcagcatcaaactcaaagggaatgttatccttctgttcttctgaatacaagaatgtccttccaactcttcctacgacataaccatgctttttgaggacattaagctgattttgttcttgctcactaagatcttcttcagcttgagtt

SEQ ID NO: 342900 - DNA, 1000 bp, Homo Sapiens
ggtttttttttttttttttttttttttttttttttttttttttttttttttttatacttaaattaaatagcatgatttaatttagttggtgcttaaccctgaatcctcttaagttaaaaaaaagttataattaactattaacgttaatgaatttaaaccttccagaaagcatgaatccaaaaggaaatgtccaacaggtgatatgaaccagatattttatggcctttcctgtttcagtctcaaactttctaaacatcaatggggaaaaaaaattctctagagtttttcagttttattcttctagagcacaattttccggcctgttactgagtacggtcttctaacaggtacacaattaactcataagtagacaacacaatggcagtatttgggatctgccggataagctgggcaaacagtcctctataaaaggcaaggtagccttcttcccggaacaccaggcgcgccgtctggacaaaagacttgtacttggtgccctcttcccggagcctcgtccttatgacttcgtgtggataagcaatgcaggaggcacagcccttagaaagagcagcagctgccataagtccaaaaaaacttgtggaatttttctcagtcccatttgcagaagaggctaatggagcttctttcagatacttctttaaactttcataaatagcaaagcagattatagtttcggaaattccagcatacgaggcagttaatcctctatagaagccacgaatgccttcggtctggtaaacgtaacgagcacactggagtgtattcatctgcttagagcccctcactttctgttctagctgcattcgggttttaaccatccatataggattcattaaggaatttgtgataaaagctgcagagccagctgagaaaatatgcacaatattgctgttaggcacgaaaatgccattaaattgctctttggctttggagtaacatgcaaagtatacagcccttgatggtgcaactccaaccaaat

SEQ ID NO: 342901 - DNA, 1000 bp, Homo Sapiens; identical to SEQ ID NO: 160420

SEQ ID NO: 342902 - DNA, 1000 bp, Homo Sapiens; identical to SEQ ID NO: 160421

SEQ ID NO: 342903 - DNA, 1000 bp, Homo Sapiens
atactttttgctcatcaagggcagcaaactatacaaattgtactggaggaatactttgacagaagcacttaaattatattgtgcatcacaactataaaatggcttgaacatttccatttaaccaccatttataaagtgcaactatatattactctgcattttatctgaggtgtgatgaatatcagtccaaactgaaagtaccccagctgccaatttccaccacttctgaaaagacctagctgtgtgaaaaaggaccatcccccatacaaagaaccaatttcacaaacctactggtaaacaaatacatttacaactggaacttcaaaatgctagagttgtactcatttaaaaaaaaaccattcagctacctttggtctttaaaaaagcctacactgcaatatcctaaacattgttatgtgcatctcacaatgaagaagagtggccttgcagtgcagaatgaggagagtacaacgtcactgtgaagagtagcatgctatggtttcaaggaagatcagcatcacagcattggattctgtgcatcaggatcgaggtcactgttgccagaaggggggtggatagggagaatatccagctcatccacttgtggagttggatgcatgactaccagctggtcctggggaatgtctgctgcagctgctgcaagattggtgatagatttactctttacacactgaaagtctacatgccgactctttccttcttccttctcccaggacattcgaataaagggtctttggacatagttgtagatcacttctgggcggcctccaggccttttctttactttttctttgtaggtaggataaccttctattcccaatctaatcttcttaagacccctctccttcaaaactgacttggccacatctctgttttcaatatacttgaaaaatctatataattttgtgctataaataatttgtgaatattcttctcccatctgtggtggatattcttcatcccaatcaaccacatcatc

SEQ ID NO: 342904 - DNA, 926 bp, Homo Sapiens; identical to SEQ ID NO: 160422

SEQ ID NO: 342905 - DNA, 1000 bp, Homo Sapiens; identical to SEQ ID NO: 160423

SEQ ID NO: 342906 - DNA, 1000 bp, Homo Sapiens; identical to SEQ ID NO: 160426

SEQ ID NO: 342907 - DNA, 1000 bp, Homo Sapiens
tttttttttttttttttttttttttttttttttttttttttttttttttttttttttttttttttttctggatctagttggagctgggctgtattggttcatgtgggttcgctcccaccctctatcttaggcatgaggcccctgggatgtaagcaccttggacccaaccccaagtcctaagtcaggaattccaactacctgaggagcccagggcagaatggcaggaagggtggaggaccatgctctggcctcagagctgaatggcactaaggaagtcctcatgatctgagtcctgaaggaagcaaggtgaggtgggaggtctggggggtgagaggatttgggcccccagagccagctgggccacactgagcttcccgcccttgtgcatgaggtagagatggaagtggaaaccgctgccataggtagcatgcctcagggaccagccataataggcttgggcatagtgtctggtccgaaagtggggggcagcagaagtcattgagataaaccggcctccagggacaagcacgcggctcacctcactcaacacctggtccacagtgtggacaccttcagaggacacggtccagggatctcgttccccagccagcagggcatccagcgtgcccttctcgagcaccacatcaaaagaagcactggggaagtccagcttccgcacatccatggtctcccagcgcagctgcggcacatgggcatagcgagcctgcatggcagccaccacgactgatgagtagtccacactggtcacattagggaagcctccgaggaacagctcgtagctcagggcactgttcccgcaacctagcacaaggatacggtcctcgggccgcagctccggctctaggagggcacggaaggaggagaagtccccgaaccaatcgtagggggcagaatcggctgcgccttggtagcgctgatcccagtactcgacttcgcggtacccgcagttccgctccggtaactccggaggcgccctacc

SEQ ID NO: 342908 - DNA, 1000 bp, Homo Sapiens
ctgatgcataattttattaaagccagagatggactttttttctagagaaacagatctctgaggttagaatggaagataatgaaacaagagatctcactttataatttacctttgtcaaactatcccagagcatgtcaattctattatgaaagtattactttgacatcatataaccaattattaatagaaaacacacatgccaaaaaaccttaaattttgtaatcttcaagtcaatcatcaacttttcttgaatttttgaagacccgaaaagaaaaataatttcaaacaacagcactcaaacatcatatgcatttgtaatgaggcacagcaatcaattttttttttttttttttttttttagttagagtctcagtcacccaggctggaatacagtggtgtgatctcagctcaccgcaacctccacctcccaggttcaagtgattctcctgcctcagcctcccgggtagctgggactacaggtgcctgccaccacacccgggtgatttttgtatttttagtagagacggggtttcgccatgttgctcaggctggtctcgaactcccgacctcaagtgacttgctcaccttggcctcccaaagtgctgggattacaggtgtgagccactgcacccagcctggcagtcaattttaagcctcctatttcccaggttttagcttaataatcctcattagtttttcagatttttgtcagtcttgttttggggctattttgccttagtgggcctaaacagaatattaaaatacattaataatccatactgagagtagagtataaatgggtttctcactccttagggacacgagtggaaacaatacatcccatgaacacaggtgaatgtccctggttatccctgagctgggcagtttcacacaatcattttttctctgaggccaaagtctgtggtttgatcatcttagcagcttccagaacagaaagtaggtttactttgtctccaaattcattttctcggtgctcaag

SEQ ID NO: 342909 - DNA, 998 bp, Homo Sapiens
tttttttttttttttttttttttttttttttttagctaaagcatatgggttcatttacaaaaataagtttggtcttttattataaatacttctagttgtaaaaaattcattttcacatttgaatgtccttgaaagtatccaaaggattcattctccttctgcattctgcttctcagaaagtacttttgggttagatctgttccgaattctttttctttttcttctcttttcagaagcagatgattgtgtgtccggtgcctttttctttttcttcaaacaactaagaggattgggaccacttattttcttgcgcttttttcttctactctgttcagtgtttttcactaaaccctgttcctctttgagatgtttgatactttctttctcatgcactgagacaagctgacctgactccactgcttttacaaaggcaattgttttgggagaaggtttgtccaaaaccatagtgttctgaataataaacatgagaggaactccaggcttcttttttactttcacagacaaattctgatcctgtgttgccacaaaataatgatgaggatttccctcttcaaccatggaaagcagacattctgatccactcactgcattcttgaaatgaggacaatttcgaacttggcatttttgtgcaatcagttttgccccatataagtcctttcccaatgtttctagctcttttaacacacatcttgtggtgcacagctgcgtctcccccatgaggtagcggggcagctgctcccgcagctggatgcggccccgcagcgccgcctgacagaaggtgccgtccagcaggatctggtacggctcgcggactccgaagttgttgcggaagaagccaagatgcttcttggcatgtttctgccttgtgatcttcatgcctggcttaccgggaccgaggccaccggaccaggaagcatcagtaaacgcctcacgcacgccccagtaccctcaatgccagtttcacccggaaatgaagc

SEQ ID NO: 342910 - DNA, 781 bp, Homo Sapiens
tttttttttttttttttttttttttttttagtgtttgtagcgccactttactgccaatagctgacattgccctgggttaggggagaataaataaaatctgtggcatcagacaggtattaccgaggcgaagagtggactgggctttcgtgggcacttaccctgggaagggggtatgaggtggctggagaagtgttcatggagagtgtctctctcctgcccccaaggccacggaatcttctattccttctttgtacccaaagggcaaagtggaggccagggtctctttgctaaggagctaagtaggggaaagaggcagggggagctcccagcaggaccaaagggagaccaaggtttggaccccagaacagagcaggaacccagagtcctgtgcagtcacaggatgacgcagggaggacggctgttggtgatcttttctagggtttctccattactggctcttcggatggcctcaatgagatctttctcatagggaaagcccccattctccagcttggagaacaccagctgtccatttatctctatctcaaaggcacctgtgcccccgaggcgcgactcgatctcgatgcccggatactgctccttcacagcactggccagctccaggtaggtcgcctcgaagccgcagggttcacagtactccaccacgatgcggaccccactgcccggctcgacctcctcgggagggggcgctacggacgtctgccccggctccccgctcatcgcggccggctccgctcgggcccctgcttccgggtgtgac

SEQ ID NO: 342911 - DNA, 1000 bp, Homo Sapiens
tttttttttttttttttttggatgtaaacatttgttttaatttatattaataaaaggaaatgctctacttaaacaataattcatctgggtcttcttgtataatacaaaattcttccatgggagtctgatgatttgggggccagcaactcttctcacatgtgtaaactagaattgttccaaattccacagaaagacctaaattagcactcttgagcatgctgaccagtgctggcataagctgaaactcaaatatcctttggcctccacactggctgcaggctgggagctcggtgacttctgatgtagggcaggtcaaaaagagtggctctccactccaggaatacctcaaaatctgctcctgacaagcagcaattcgcttcatgaatttgtaaaacgtctgatctccacttttaattatggtcttctcatatttttcatcaccatcattaggaaggctttgggaaagcaactgatccatggcaatgccttctctctgctgatagtccctcagaaggctgtgggcatgatccaggttgacaaagtccctgtaatcatcctcatctgcaacacagatgtagtagggcaggaagagcggcagcccaggaggcacaggatgggcagcacccaggacagcatcctgcaggcggaggtcttggagccgagcagtccagtctacgtctttggcactgctggcatcattcccaaaatccaaggtaaactgtggtgaaggcccctcctcagtatcacttccccagtcatcagcaccttcacaccagtcctcagctgcaaggctgtttccctgtttctgagcgtcctgcgcctctctctctggcacctgcaggcactgggagcggaacaccttccagctgcgcgcaccgccggtgctacagccggggcaggcgcacgcgaacacgtgcagcagacggtgaaacggggagccttccagcgggcaatacacctgcacgaccagagcgagcggctgcccgcagcgctgacacac

SEQ ID NO: 342912 - DNA, 1000 bp, Homo Sapiens
ttttttttttttttttttttctgttacattttttaactttttattttcttattacttcatagtggcagtatgttgttgactcagtcaccatatcagtaatagtgactctatctctccaatgtccttggacttagcaaaatttactcgttctccatttatgcgtggtcccatggccatgaatggccttgactgggttcctgttaagtctccttatgctagtctcttttcagtcttgaaagtcttagccctgcctctgaagaattaatgtggatcctttcacagctttcacctaggtcatgaggtttaaattgttggagaggcccactgtgatatgattgtaagagtcaccatgccatttttacaaccttgagttataagtttcttgtaggtgcttcactagcctcatgatatgccttgccagaagtagcgcctgagatggagatttgggtgcaggtgatttattgacgatgtgttcttcaggaaaaatactttctattcacatttttagatggcaggatggtggctggcaaagtgttgatggcaaagcaagaaattgttgaatgtgtagcctcagcagctatgatatcgccgggaaaacttcctggagaaacacattcccaacggatagctgaagaagctttgggaggtctggacaacttaattcctcgaaatgaaggttcctgagggagtccctgtgatttttcttctgagatgccctcttttgttgctgtttcactgttctcacaatcacttttaggggaaaggcatggtttccaggatttcagctgtgtctttaagggctggaggtggatgtctgttgactcttgggatgctctgagacatgttaaatccttccatggcactgctggtccctgtggactagctgggacctgctgccctgggtcatcaaactccctctctaaatcctccaacagggtcacagcttcctcgccgctttctggattatgttgctgaacccagatctgcagctcctcaggca

SEQ ID NO: 342913 - DNA, 1000 bp, Homo Sapiens; identical to SEQ ID NO: 160429

SEQ ID NO: 342914 - DNA, 1000 bp, Homo Sapiens
ttttttttttttttttttttgctgctgggtcgggttttatttcaaatgcagccacagaggcggtttctgcacaggtacgtgatccgactccacaagctcccaccaggggctccccatgacccgcaatgacgctgtgtggggtcaaaggaaaacaggccacagccaggcccctcgatggacgcaggcaggggaccaggaatgcagcccacgcagggggatcgggaatcaggcggaaggtgcaggtttgcagctggcgggaggagccagcatgccccaatctctaaaatattcccggtagaaaaatagacatttccctccaaagcagattcctggggctggagggtccctccaaggccaggggtccgggtgattccagagcatccacgctctgcgctgaaggcactgaacctgccatcactgtcacagccgtcaccggccaaggagggtctggaggagggaaggggcccttgcgaggctctggtgctggtgatcccggcccccaccaccggaggagctgaaagcccttgctcagccgctgccctgctggtgaacccggcccccaccgccggaggagctgcaccctgtgtggtctgaggcagccctgcactgggcagcggccccgccccgcgctgaacccactaggagagcagctgcagcacctgtcggatgcgctgggccctccccggcagggggggatcagagccctcctcatccagctcccgcatcagggcttccgccttctgcaccgtcagctctcgggcccggccctgcagcccctccaggtaggccagcagggtggagaagtgctcatcgggaaccttgtcactgtcatacatgtgcagcaggagccacgtctgcctcgtcttctgaaacctccagttcttgtgcttttgggcccatctgcagaggtagtccagggccagttcggcccccgagcgcctggcaggcgggtgctgggccacaaggcctgcctcccgcagacgctgcctctcctctttct

SEQ ID NO: 342915 - DNA, 1000 bp, Homo Sapiens; identical to SEQ ID NO: 160430

SEQ ID NO: 342916 - DNA, 1000 bp, Homo Sapiens
tttttttttttttttttttttcacactgaaacacatctttttattatatactaaatttaaaaatacaaatcttattaaaaatgcttatcaaacattgtatacataagtactgtcaaatactattgggttttgacattatgtacatttgctaaggttaattagaaacagaacaacgtaatatcactttgctgacactgaatttcagcagttaagtgttttaaaatttggcaactatgaagtagtgatctgcacaggaagatgtttggagaggtaaaataataagaaaacaaacggaataatgcagacatttctgcagtaagtgttaataagtagatttcttcctcatcctcttaactcattgtaacagaaattaaagtgcacaagaccaccaggaatacctgatttggtgtaccctaaatatacactacagccggctgtgctgccatattgagggtttcaattctttgtactgttcctgaggttttggaagttaattttgaatgtggctagcggaagggaggccaacactttctaaattgcaccaaatggccttaaagtgtagaaataccaaagaaaaaaatattaatttggaaatagattcaaggaaataatccctgtctactttgccctaggaataaaattagaataaggacacagttttacctctggaaaatgcttactaaaatctgtttcaaaagaccagacatgtacagcaagcacaatactgtcagttattgttcaccacttatatactgcatcataaataccaggtataaatacctgccgctaaagggtcactagaaatacaggtagaagcatgttatcactttacactaattttactcattaggtataatttgtaaaaataggtcaccaccccaccatacaatcaagaaagaggaaaagaaaagttgctattctacaaaagtgctccttttagctttcaaccccaatagcttaattttgggtaaaacaagattgtaaggtatggccatcagtt

SEQ ID NO: 342917 - DNA, 1000 bp, Homo Sapiens
ttttttttttttttttttattatttcactgcctaaattccagaaagcaacaaaaaccaaatcacaattttcaagaacaaacaaatttagcaagactgcaaaatagacaaacagcaatagcaagactgcaaaatagacaaacagcaaggttatcccagtcagaacttcatagctatgtttgtggatatctgctaatcagcataacacaaatgtaagtgatcgtcagaaagaatcagacaggagcaatcagggtgttgcaagtcctgattacgcagagacgttaatcacgtttcatgcatctccaatcatcatgttctaatctgccctccggaggaggaacaggtaaggattatcccacctgacgatacagacaaacagccgacattctgcactcagtgaaaaagattccgttacaagctagggtgagttcataacgcgctggtatgagcaatcctattatttagcgtccttccagttgttttgccatattagctcgcacatttttttaaatttttttttcattcggctgccgaaaaggaataaattacttcttcccagaatgctccgatcagttacgtgccggacgttctaactgtacgcactttctatttacatatctccgcccactcccttccgccaggcacctaccgtagtaaccaaaatagaagcgataccaagtatcttacggtctgcaggactagaaaacagcgttgttttttttttattcagtagttcagccatctcaattgtcccctaaaactgtatataagtcttaatgttactacaaaacatattttattacaaagcactaaatacaatgcggataatcccagactcaagacgtaattattccaacacatatcctccagcagaagcagtttccgaggggaaaaccgaagcctatgccttccttcttccaggaatacgaagcggcccttgcccctgtaggcttcgtccttaggttcccgtcatgaaggtaatcagaagggtttctttttcag

SEQ ID NO: 342918 - DNA, 1000 bp, Homo Sapiens; identical to SEQ ID NO: 160432

SEQ ID NO: 342919 - DNA, 1000 bp, Homo Sapiens
ttttttttttttttttttttttttttcggtcataagtttaatgaagtctgaaaggtaagcgccatcgtggtcagagatacggaggcccggtcagactctccctctgcacctcaatggaaacgatgtggtgtccgggtaccatggccaggcccagcacacggggctccccggcagagaaggaatccgacggcttgaggaactcctgcgccgagcccaggatgacattgcagtcacggtcagtgcagaggaagcagccgaccagtgtccgtccatctgtcatgcgaatgcgcatagtcttgttgagcagcgcctctagctgctgtcgggcgcgctcagccgccgagtcctcgcgctctccgtccgaatcctgcgcggggtgtaacaagcgctcagaccgcgcagcccaggctgcccgcccgcggaaccacagctcccggcagcccgcggggcactcacacaaagcccagaggctgccgggagctgcagttccccaccccctccatcttgctgcttgactgcccctcagtcccagaaccagagcccgtgctaaccccagcactggagctgctctgacgccgactgcaacagccattctcttctcgtagcagcatggtcggtccagctccggccatttgcccggaggcctcctctgggcctttcaacttcctaagcacctttcaggttgggtggtccgagatctcgcgagcgctcccgacctctttcctttcgcgagatcccctctcctccccctcctagtctcctcggcaacggcacagatctcgcgagcttctcctacttctctagcgctgtggctcactgaagcgtactacgccggatgtcttaagatatcgcgagacctttacctctggtttcttacacatcctttagaaactggaatttagcgagaatacattctttcatactgcctcctcccttgtttttctgtctcagagagatagtctgtcctaaatatcccatgtagcccaggccactgaattaa

SEQ ID NO: 342920 - DNA, 1000 bp, Homo Sapiens
tttttttttttttttttttttgagtgaaatattttattgaaaatagttaatttaaaatatatacatcatttttcaaaagccatgtgactgataaaaatatcaaactttccatacaagcatcatctcagcttcatcccctcggcaaagtgtctcccgaatctttccagatggacatttcgtttgagtctctagcgccctctggtgaaacaccatgaaattgcccaaaaacgtaattcaggctctgctcaggacggaaggtgaaatagcagaatgagcgcctatttcaatgtgacaggttgtgatgtgctgccttctccccgagctcaggagaaaggcagcctctgtgagtgcttctctctctttagggaaagtattcttcccatggacactcagccaagcttattgcaaaataccttcttcctaagttttcatcatcactgccttctgaaaaaacaaaaaccggtcaatacagacaggataaataatgaaagcctccaagtcattcaggaccaggcccctactcctcgcaaatgttaaaaggacagcaaaaatgataaagcaagctgagtatgcaagaaaagctttcctagtggtccccgattcttcaagctgtctttacaataatgaataccaccactctagtcaactcaggtttacattttctggcagcagatgaccttgtcctcaggtttcaagaagcacacctcttctaaatgggggccatttccaaaagtagacattaacagagtctaagttcattctccagaccaaacactttcgacttaagattcttcagttctccttgtatcttatgtgcccgtctattgctgtcacggacctcacacagaagggcaagatcctggtttgcccgggcattaactgttgccttatacaacatttgctccaagtctttcagtttctgtcggagaactttaatatctgtcttaaagccttctacttccaggatacgtcgacgctccaatgcctcatagcgttttgt

SEQ ID NO: 342921 - DNA, 1000 bp, Homo Sapiens
tttttttttttttttttttttttttttttcatacacaagccggtgatactttattatataagagagttgtcaaaaggacagtttcatttctgtttcagaatccccacattccagtgatccatctgttgacacaattaacataaactatttgctgatatttactgagtgcttgcaatgtatcagagtcattaaataagatgcaacttctactgtgaaaactggaatcttcattaggacacagacttagaaaaggcccagtttcaaggattctgacttgcacagactgagcactcccatttccagaagttcgaatacctcctttcttatctcgggaatgtccatcattctcctcaacttctgatctctccagttccagtcaaaaaccagaaattttaaggggctcaaattaaggccaccttgtttaacaagttctttaattctccccggagttcctacacccaggtgcaccacacgcttctccagcaactttacctgcgcctggacctttatgtgctttgcaaataattttataactttgccgtctcctctgaatgctgtcatcgacctaatgagctccagggctcggacggccgagctgcagatgatcagcatcaggaccgatttcttctcactgtggttcttcctaagttttacccacttaggacaaattccttttaggtatgaggaaagactgtgagtcaaatcattggccttgaggaaacaggagtctggcaggttcagttcttctaattcaatcaccaagcgtctgctgctataatagtccttcatcagcttctgtaggtcttcaggtaaccctggttttggttctgattttgcaagaacatcagtaattttcttctttcttcttttcctggtcttggtggtattctcttttctttcctttggttgtatcaaaaaacattctttaggctgtttggttttctctgaaggtacaggaactggaactgtctcctgctgcatcacttctgtgtctccttct

SEQ ID NO: 342922 - DNA, 1000 bp, Homo Sapiens
ttttttttttttttttttttttttttttttcccagttccacagaactgattttattagccaatacataccaaagacgggtggaaaagaagtattatttttgtagttttctttcataatggaagccttatgctattacagactgcagttttccagtcttttgattaagccttgccagttgtgtgccgctgcagcaccaaagaaactgttttgcagcctgtcacctcctctggcaggcagccatcctggtctcggagagtggggtcagcaccagactggagcagcagctctacaatatccagaaactcacaggcagaggcataatgtagagctgtttggccttcattgtcctgacagttaatgtcagctctatgttgcagcaacactgtgactagttccttatgtcctcgatcacaggcccagtgaagtagagccctaccctcttcatctttcacattcacatccacatttttcgatttgatggctttggttatatggtcaatgttgttttccctgcagtaatcaaatatatttttgtcttcttccctgatggtttcttcatgatatagagaactaataactggcccaccaaaacctgtatttgcttcttttcctttcttctctggtatctgaggattccaacctggatctagttttttaactactgcgatatattcctgcattgcttggctggggcttgaatcaccaagtgctttccaagcttcccatttttgctttccttcaaaatcaaagaagcttggtttaggagtattacaatttccaactttgacctgtttgtacctggcatacaggtacaagagctgctccctgctggccacctgaatcaggccttgcaggtgcgcggcagccttctcaaacagctcggccaggcaactggtctcctcgatctcagggctatgggggaactccacctccccggagtcgtcccctgagctcagctctccaccgctgtcgccggtgatggcccccgcgggcaggaat

SEQ ID NO: 342923 - DNA, 1000 bp, Homo Sapiens
ttttttttttttttttccataataacaaaagtcagtttattaaatgctcaattctcaaaattatatgtatatatttttaattatttaaaaaaacttccatgcccttccattcccctccctccaaactaggtattgtccaagttgtatcaaatgccacaaagtctaccatgcacccagaagcagagaagacaggaggtccagaggacaaggtatgctggggtcactactcgcactgcagagtccacgcgagttaactcatgctgggggcaaagaatggaaagagctaatacacagacaaagcaaaagaacgaaatgcgcagcctgaccagagacgtttacaatttataccaacttacaaatatttagggtgcccaccaactccgagagaacagaccaaactaaccacatgaaggaagacctctgccggggcctcctctccctacaacctcctctcaagaatcattaggaagcccaaacagcttcacagttccggcttcccggctgctgtcatatttgccgtctttgtcatcacaggcaaatgccagcagaggccttttggggtgccacgccactgtgaaggtcggagactcacactgtacctcccatagtttgtcccctgtctccacttcagcaatgtcaataaaatgatcttccgatgctgacgccagcattttcccatcatggctgaaactgagggttcttacaggccaatccagcctggaaaagcaccgaacacacactaactcatccacatcccagaggctgaccaaagcatctgcacttcctgtggcaaagtacttccccatggggtcaaacttgatacagatgcagttggaaggatgggcgttgatggactgcacaggcttcagttctgggtagctgaggatgttgatacaaccattgccatttgtcaggaagaacatattattgtcattgttccaggagatttcgttgacctcgaacttgaactgctcttctgctttggaacggtgtgtcttgg

SEQ ID NO: 342924 - DNA, 1000 bp, Homo Sapiens
gggcaacaaagagggaagatacaggttgccagttatacatttatagaaagataatcccctggctttaaatagtcatgtacatacaaatatgaacaaacttaaaaaaaaaatacaaacccttggatcacatgggggcttctgggaacccccgtattcttccccctcacccaagggcagtgggcatgaatctactttttaaaaatgattaattttggccatccttgcagaaaagagcctaaaattgggtgatttacccacaaagtgaaagtcgagggaaaattcagtttccagtctctgaactctatgcgataatctcctatcattagggctacatgctttcttgttctgtcttttaaatattatatcaggataaaggagagggctccctcctgaaatgggtcaagaaagaagatagacttgtagctttaaaagggtgggaaaaagtgtcatctgccctaaaagcaaatgacaagacaaaggcatacagaccccagggaaatacccagttcccacacctaaagggatacactgtccagcccaggtccaggccctaggttctttactctagctaccccctatttctttggtattgtcaaaagacaagattcaggccgggcacagtggcttatgcctgtaatccagcactttgggaggccaagacgggtggatcacctgagctcaggagttcgagaccagcctgggcaacatggtgaaaccccgtctctactaaaaatacaaaaaagaattagctgggccaggtgtggtggtgtgtgcctgtaatcccagctactcaggaggctgagatgggagaattgcttgaacccgggagacagaggttgcagtaagctgagatcacaccactgcactccagctgggcaacagagcaagactccatctcaaaaaataaaaagaaaaagattcagttcctaggtgttgggggaggaaggataaatcaaactccatcctgtgctacagcccttttgactccctgacattgatt

SEQ ID NO: 342925 - DNA, 1000 bp, Homo Sapiens; identical to SEQ ID NO: 160434

SEQ ID NO: 342926 - DNA, 1000 bp, Homo Sapiens
ttttttttttttttttttccagggaaaagagagagtttattttatacagtagttgttttattttatacagtagttgtacagtaattgaggaaaaatgttgtcaggtggcagaaaacaatggagccacctagaagctggctgatgcagctggggcacacagaggaggggcctgggtaccccttttggggaaactgagacgaagctatttagaacagcttgaaaataagagacttttctagaatggggtggcagctaaagtagcttctttttctttctttcagaatgctcagatgcatcagttccttaatatacacgtgaaatttgaaaactgtacattcggtgagattaaattttatatacaactagcaattgtccagctttgttgctcattttcaattaaggctaaagtgttcaacatgagaaaatgtgatacatttgatacagtgtggggtgggagtggatgggcagctcttggtggtactggaccttccacaaggctgtgtccacccagaatccatgctggcaggagggaggcagaggtatcaaaccaaacctctcaccaagcggcccaggaggggcagctgttcctctcgtgacagcacaggcccatgagacagtgtcttctttttgaggggagctggtccgggtctagttcacttcaccaagaagtccatgctgtcgcaatagtttgttaagtctttcaatttcttgttccttctcagagcagctgaactcaaggtgttgaatcttggcggccaattgtacattcatctgttttaaccttaagagttgccgttctgaacgtgtcttaactgagatgataatcccattgatgatccgggccacccgccacagccggagcagaatcagcaggcccagagcctcaaactggtgctcctggaacaggaggacaatgtcgaggatgaatgagaccaccaccacgacggcatccaggatctcaaacttgtggtgaaagaactccaggcggaagacaaataat

SEQ ID NO: 342927 - DNA, 1000 bp, Homo Sapiens
tttttttttttttttttttaaggcaaaaatcctgtatttcgggacggtggcatttgtgccccctgggaaggggatgagcactgctgcctcctggtatccaccggaccccgcagggcgcaggaaagaaagcccctccacccctccctggtggtcacctgcacgcacctgagggcgcgtcggagccgccctggggtcttcgggggctgctgccagcaccttggctctttttccagacggcggcgctggaagccggcggcccgggtgcagcggccaggaaggggcgcaggcgcggggggcttaggccaaagggcgcagggttcaagtagggcaggaacggtccggtgggggcaggggcgggggtcgtgaagggttccagcagcgggaacggcaggcccggcgctgatgcggggtcaacctccggggggcgctccggcgcgggcggctctcggtccagggccgggggtggcggcggggctgggctctgcgcatgctccgcgcaaacatgcaggtgcttgaagagcgagcggtgcgtgcggaagcgcaggaggcagttctcacacttgaagtagcgattgggtttgtagtgcagtttgctgtgagccaccagctcctgcatgctggggaaggtctcggtgcagctcagggctgagcagcggaagagcttgccttccagggactgtgtgggcgggcagtgggttcgcagatgctgtgccaggtcacggacgctgggaaaactgaggcagcagccagggctggagcaagggatttgcttccctggaggtgggcgtcgtctgggaggccgcaggtcctcgctggtcccggagactatgctggtcaggccagggctgggtccggggccaggctggcagctgtctggggctggggaggagccctgccgcatccctccagcccctccacgttcccacactggcggtgtggctgcctgctcagggcctggctcctccgacatggaggaggaaggggctgcagctggcacagc

SEQ ID NO: 342928 - DNA, 766 bp, Homo Sapiens
tttttttttttttttttttttttttttttttttttttttttgttttttttttttttttttttttgacagtttctccactttattagcctggagctcctccctgccagccccaggggctggtcgctggtccctgggcacagtgagcagggctgaggtcagacgggttcggcccttggccatggcagcttggttgggacagccgggccaagggaaaaaaaggtgcaaaagtccaaatgctggcacttcaggtgtggccggcacccagccaggcgcagtgggtgggcagggcgccatgcttctctcctggcgacaggtcggccgtgtagcagcgccccctcccagcagccactaggaacagctggtgattctcgccaggaactgctgcgcccaccactcgtctaggtcaatgggcacaaagttctgcagccggggattgggggtcctctccacgtactgcacaggccttggcccgccctcaccggctgggccaccatccagctgctgttgcacctgctgccaggctcgacaggggccagggtcccggcggctgcgcaaagggctgcgcccgcgggggctgcgaggtcggcggcgcgggctgccggcatttcaggagctcgccgagccggccctccacctgctgctgcgtgggacctgtgcggcgctgcgcgaccagcttgctgggccccttggtgatggtgtacatgacgcgccgctcccacaccgccgccggcccccggccagatccggcccctgcgccggggctcgc

SEQ ID NO: 342929 - DNA, 1000 bp, Homo Sapiens
ttttttttttttttttttttttttttttttttttttttttttttttttttttatggagtaaggtctttcagtttattgcttaagaaacaacagattaaagaaaacttttagttttagtctctgatgttacagattcagatgattcctataggttatttaaagaattcattttatcattttataagcaccctaaatttataaagctaaccacaaaagttgcctgtacattttttctatacctagtttcttgcaaattctacaatctgacttaagggataattaacggggaatacagtgtattactagacatgaaagtagtcctatccttagaaagctgtagttgaatataccaaaataagtcagttgaagaaatctgtgattctagtagtaataccatatcacttaggaccatcaaaaaaatgtgtacctttctccaaacgacaactgatgcctttctttatgtaagcttttcacgtgttttggcacatattccattgcatttcaataaaaatgttaatgcattatcagtaaataaaagaattctatataaaactattctcagtttcataattgcttcctatatatttccttggaaaatagtgaaatacatatgacaaggcaaccagccaaatttaaagagattttgtagataaaattcatttatgaccattaagttttggctggggggccaaaacatcaaagtctcacttgtgatttttaaaatgcactcttaattcattttgagttaattaaaattccatttgcaaaacactattttaatcgctgacctaggtgtgacaaatttataataatttgtaaaagttcttagggatgtctgggaacagtttcacaccatagaaaaataatttctgtagctagatagtaaattcagttttttcagccatttatagttaatgaaaatctgccttttaaattctgcttgtgagccattccaagaacaaaaacaatgtaacaaaacaaagttaaagtattgccataa

SEQ ID NO: 342930 - DNA, 1000 bp, Homo Sapiens
ttttttttttttttttttttgagacggagtctcgctttgtcgtcaggctggagtgcagtggcgcaatcttggctcactgcaacctctgcctgctgggttcaagtgattctcgtgcctcagcctcccgagtagctggcattacaggcacacgccaccacacccagctaatttttgcatttttagtagaaacggggtttcaccatgttgggcaggatggtctcgatctcctgacctcatgatctgcccacctcggcctcccaaagtgctgggattataggcgtgagccaccgcacctggccagaataatcttaattacaatttatttgtgaccaaaagtaacacatatcacaatcatttaatttttttttttttttgagacgggagtattgctctgtcgcccaggctggagtgcagtggcgcgatctcggctcactgcaacctccacctaccgggttcatgctattctcctgccttagcctcccaaggagctgggattacaggcaccctccacctccctggttcatgctattctcccgcctcagcttcccaaagagctgggactaaaggcaccctccatcatgcctggctaatttttgtagacagggtttcaccatgtttggccaggctggtcttgaactgacctcaggtgatccgcccaccttggccacccaaagtgctgagattacaggcgtgagccagtgcgcccggccttttttattatttttttaaatttttatttgagacagggtctggctctgttgcctagtggtaggatcttggcttagtgcagcctggacctcactggctcaatcaatcctcgaagctcagcctcccgagtagctgggactacaggcgcatgctaccatgcccagctaatttttgcatgttttgtagaggcagggtttcgccatgttgcccaaactggttcgaactcctgagctcaagtgatttgcttgccttggcctcccaaattgttgggattacaggtatgagtcaccat

SEQ ID NO: 342931 - DNA, 1000 bp, Homo Sapiens; identical to SEQ ID NO: 160435

SEQ ID NO: 342932 - DNA, 1000 bp, Homo Sapiens; identical to SEQ ID NO: 160437

SEQ ID NO: 342933 - DNA, 1000 bp, Homo Sapiens
catgaagaccagtttattttacatgcttgctttcacattctttactgggaatttaaggccttttttcagccttaacttgtataccaacctcaaggattttgtttgatacagaaaaggatagggctgggcccttctgccaaggactgataacctgcctgccaaaaggaagagggaatgaaagccttttgtccttctaggccccttacagtacctcaaaatctaaaggccttaaaggggaaaaaaaccgtatctgttctttctccttatctcctacccttctctttaagcatattgaagatggacttttttccaaatgtttatttgtaggaagaggtgatgagcgcaggccagcagctgagaacttacagctttgatgcaccaggaactgtattcaagctgagggcaaaagcctcctagggagggagccaggtccaccaaggccagagacagacaggcgagactgtggaaggccagggagatgctgcctggtaaatgctcagctggcctactgggcaagtcctctggggttctagagctgataggaagaaggagtccattttgatagtcctgcctggagacttggacctagctgatactaaggtattttataaagctacagtggatgtttttcttaagagaactgaaagttggaaaaggcacaagtatatataagaatttagtaaaatgataatggtggtctttcaaatcaaagagtgatctttaaattgttcttgggaaccacagggttcctggccatgtctggcggctgagaggaggccaggatggggacttcaacccaagctgctgtggttttgcctttgataaggttcctggtaaaaatcatcttgaataaatgttgctgagaaactggtaaagcattcgggggagaaaggattttgctctttgctctgccatgtttttccgggctctttcttcggggagaaagagggctctaacctttggtcctcattcagataggctaattaggggtctcgggtgt

SEQ ID NO: 342934 - DNA, 1000 bp, Homo Sapiens
ttttttttttttttttttcttgtttccagcatttttattggttgctgctaatgtggtgtgagcatatcccctacactctcccagctgggagtgggcccctctagaagcatccaggcttgggtgggattgcttagtggttgactcttggcaggggaggtgctagagatgaagatggtaggcagcagaactaacacctccacacagcaaacagttcacatatgtttggctcttcactataatggagctgcactctccatgcccccctggccttctaccccttcagtgttgggatcttccttgctcagttttgttgatcagaaagcatcagattctgagaacacaagctccatggtgggccctggtgtgggggagatacatggcttctgttctgaattcacatcctgccaacatccccggcgaatgtcacccccttgcttgcccgctgctcctgggagccggtgctgctgccactcagagagttccttcgcatgatgccagggcctgggggctcagagcgctgtaggctgttgcggcgggaggtggggaagctgcccttggagaggcggcgctggcggctggacagcatagcagctggggccacaatacccggtgggggctgcttccccagccggctgtacaaatcttcaatttcttttttctgtagtgtctgtagtgtttccacctctgacaagtgcttctgccgaagactctgcagctcagcccagaactcctcatcttccccactgctttctgactcctcgctgctcaaacacaggctgctgtaggagtagttcatccacactgggctgggatggctcaggggttgggggctgcccccaacttggggttccttcccatcatctccttcctcctcaactccagcccccagaccctcagctgcacggtcgctctcagccagagcttccctggtctctggcccgcctccagcactgtcctctgtatctgagctctctgaagtgagctgaggggttgaaggttt

SEQ ID NO: 342935 - DNA, 1000 bp, Homo Sapiens; identical to SEQ ID NO: 160438

SEQ ID NO: 342936 - DNA, 1000 bp, Homo Sapiens
gctgaggatgtgaattaggtccacagatgagtcaagtatcttccccctgaaatgggaccacaaaccacactctggcaggccaccatctcacaaaggcactaactttgatctaggaagggccagttgaaagtgtgaatgcatcaccaggaaaacatcttcatcactaaaaaaacagctccattccttcctcaatatgatgtaggaataaaaaagcactaacagggtcaagcatgacttgctaaaccttacctgtccgggaggggcgctctctgcacccaacacctgcctatagaacaccggatcacagctccgcagcgtgttctggcggctggccagtggactggctgcaccaggtttcttcagcagcgggtcgctgcggcgggagtccgtggtgagatacacctgatggtaaaggtgcggcgacatcaggcctccccgcacggcgtccgcgtgcaaggagggccctggtgttcggtacagtgagctcaccggggctcggtataggtctctagactgcttccacttgtaaactttgaatatgattactccgaacactgtgaccacaaaccccacagaaaccaggattagagaaagaagtagataaaaggtgagattttttttctgctcccggggggcagagccagaggggaactcggctcgggcttcaggagagtcctcggttactgacacagtgagggtagcagtggtggagagcgaaggctccccattgtctttgatcaagaccgtgagagtctgcctgggtgaatctgtgtcttggactggacgggcagtactgatttgaccagtgtgcagccctatggcaaaaaggctctggttaggggatcccaagagactgtaggagagccaggcattgtgccctgcatccgcgtcccagcctaccacccgtgacactaggtggccagctgaggtacctcgaggcagcatctccaccgagctcccacctggccgaggatataggacctggggggcattgtcattg

SEQ ID NO: 342937 - DNA, 1000 bp, Homo Sapiens
ttttttttttttttttttaggagcatcacaattttaatgagaaaagataatcaactgatgccaacaccaacatgaatcaggagttggaattattaatatctgacaaggattataaagcagccatcataagaatgcttcaatgagcaattgcaaatcctcttgaaacaaaggaagagctgcagaaccacatagagacccagatgtaccattgaacgtgagtggcccggccagcttcataagggcgatgtcattgcccagcctctttggcttgtacttgctgtggtagacaatcttctccaccaagtgggatggggctggattgtccaacagggaaactagacccacctggatggtccatgacttggggaggtacaagtcataaacacagtgtgcagcagtgatgatccacaggggcgtgatgacagagcccccgcacaggtggtagccctggaactgaaggctggcctgccagggccactgcgagagcaaggacatgtttccacccacgatgcgtgagctgtagccccttctatgaccacaggctgtgcactgcaaggtaaccacgtggccagaggcacatccctccctcacatatactgagtggtgtaatgcagtcaccttgtcatctggcaagaggtgatcgatggacacaaactcctcccggaactgcccctccagcgagctcactctgaggttatctgaactcacatagcttgggaaacccagttgggcacaggcaacatttgcgtagtgacccttccagtcatcggagcacatggtcttccacgaagcagctgtgaacacctggagcacggcattctgaccacccacccggacacagcggtactcgtcctccccgtctttgcaatccgagactccgtcacatcgagctatcagctcgatacacttaaaggatgagcgacatctgtacttccctgagcagtcgaagtggatgcccagaccaatggccagtgctaatatcaatgcaatgatcccaatg

SEQ ID NO: 342938 - DNA, 1000 bp, Homo Sapiens
ttggtttcttctttataaacacaagtacatgaggtttatttgaaattccaatttattacaagttcaccctttaatggggcccttcctctttgaagacaataaaaaaaaaaaacaacaacaaacaattcaggtgtcactgaagtgggaacacaggattctcactatgaacaagaacagactggatgtaggaggcaggggaagctggcggtggtggggttatgaagctgtgatgtcagtgccaactccatgcctatagaagggacggtaaactacccagcagccctggagcaatcctcgtcgtccttgggcaggaggacggaggaagcagaggccacattccgcagtttaaaattaagaggcttgattctcatgttctaggagctgcagtccccttggtggactttaaataggtacagaagagcttgggtgctcaaaatttccaaattcaaaggtgataaaaaagaaaaaccctgttttgtacttttatcaaaatccatcataaaagggaaagaagactacaaagttttgcctaaatataacaactagagctagatttgttgtgggggaaggggctctcagagcttctctgccgctctctcctcccaccccccaccgacactgaccactggaatcttcaggttcttgaggagttccaaggctgaggtcagaacgggcatgggaggcagcagacacagcactgccctgctccccctccaatgttgctgcttgcctcaatgagcctccaacccaactgctctagaggagagtggatgggctgaaggagaagccagggaagttagagcaaacacattatcatagaaactgtactgtacatgtgctaaagcaagatgtcaggagtatcttacaagatgttctttatacaatatcactgctgaaacaagcaacttttaataactagaaaagtcaatttaaaaaaaaaattaaacatttaaattcttcctgcttttcttctgctcccctaagagcttgactggtatgt

SEQ ID NO: 342939 - DNA, 1000 bp, Homo Sapiens; identical to SEQ ID NO: 160442

SEQ ID NO: 342940 - DNA, 1000 bp, Homo Sapiens
ttttttttttttttttaataatacattttaatgcaagagaaatcatagcctggtacacaccccttccccgatctgtcctgcctggggatgtgtttatggtgagtgtgtccccaggactggtagtcacctggctgtccgggtccccgccctactggcggcagcatgcctgtccccagcattacattcaactgctgctctggctctcgagaggccggctggcctcgggcctccggcttggcgttctttgctcccctgtctccctgctaaggccagcagggccaaactgctaggccaggtcagccagggctgggggaatgggctgtaccctgctcctccccaggcacgactgtccccccggggctccatcaccgggtggggcggagcgtctgctggggcagctctgtgggccacaggatccccccgcacccactgcatctctctgcccagggtgcctgcctcataggatgccccgcgccacagagtctctctgcccagggcgcccgcctcacagctggtcctcgtccacccagatggtcttgcgctgctcctcgccgatcttgtccttgacaacgcggagcagctcctctacgctgccccacatgtcaggttccaccgtggcgtacaggcacggcagggcctccagctccttctccttcagccggcacacgcgcaggaactcctcctccgtctcaggccggggcagcagctttctgaacctcttgatgttcttctcacacacccggatgaagagcacgatggggtagatgttggacttgatcaagtctcttgtgcagccgatcccagcctccagcaggcagtgcttgttcttggcggccacagcttcaatgttggcaggggcgatgcattcgaacgcgttggggttcttctctcgggagtagatgatggtctccgtcttctgccttctgaggaactcatctcttgtgacgatatctgacttgcagatggtgaactccatggcacctcccgagttgagcagcct

SEQ ID NO: 342941 - DNA, 1000 bp, Homo Sapiens
ctaccacacagtagtttcgtttttccagggtcccgttcggatgttgccggtcccgtcggtgccaaacggcaggccttctagcaatttacccttgggcagcccgttctggctggggccaccaaagggcagggactgtgtcctccgcagcatctccaagtggccgggcccgagcgctgcctccctgcccggctgcgtggggcagctgtagagggcagggctcccatcactgccctcgggctgggtgaccatggggaaggggtcgccctgggtgcagcaggccagcgtgtgtgtccccgccgggccatccagagagctgggggggctgtctgtgcgcgagctgcgggggctgccatccaggctggatgggatgtggtaggcgtactcgggctcctctgctgggtgccggctaaagtagggcggcttagttctgccctgaaggcacccgtgcaggtgggggtcgtgcccgaaggcgccctcctcctgcaggtgcacgtgcgcctcgtccgccgtcagtggctcgcagtgcatcttggcgcagcacggggtggccggtgacaggcaactggcgtggccctgcgcggcctgcaggttggtcatcttgcaggggcccggtgggtgcgcgaagccccgtggctggcccagtcccggcgagtgcaggcaggcggcgcggcccagcgcggccccgttggcgtcaagtgcggggtgggcgtccttgcggggcgggcagcatgcccaccagcactgccacacgtcctcacgcttggcgcagtggtggatgagcacgaagagtcccagggtcacgcagaaggcgccgtacaggcagctgaagaccatgtccaggaagtggccctgtgacaccgccagcgccccgaaggcccacgtggccgtgaacaggaacagcgtgaaggcggcggcgcgcagctgtgcctggaatgagtgctcgttctgcagcacggaggcgccgggggcatcgtgtgcgggtggggtgcctggccggatc

SEQ ID NO: 342942 - DNA, 1000 bp, Homo Sapiens
ttttttttttttttttttacttaggaaaaatgaaactttattactacaaacatgagagctgcatacattctaaatcaaatggttgcaacttataataccaagaattaaatgtgaatcctacttaagaatatgctgagctggccaggtgtggtggctcacgcctgtaatcctagcactttcaggctgaggcagatggatcgcctgaggtcaggagtttgagaccagtgtggccaacgtggtgaaaccccatctctactaaaaatacaaaaattagctgggtatggtggtacacgcctgtaatcccagctacttgggaggctgaggcaggagaattgcttgaacccgggaggcggaggttgcagtgagccgagatcgcgccaccgcactacagcctgggtgacaagggcgaaactctgtctcatctaaaaaaagaatatgctgatccggtcattttgattaaactctcaactgtgatataactgttctctattccatttcaaaaatgaggctgggcaccatggttcatgcctgtaatcccagcactttgggaggctgaggtgaacatatcacttgaggtcaggagttggagacctgcctggccaacatggtaaacactgtctctactaaaaatacaaaaatgaactgggtgtggtggcgcacgtctgtagtctcagctacttaggaggctaaggcagaaggactgcttgagcccaggaggcggagggtgcagtgagccaagaacacaccactacactccagcctgggcaacagagtgagactctatctccaaaaaaaaaaaagtctacttctcatcagtctttgctaaacagcaggtactgctgttcaatggagaaggtggctacctttttccttgcattatttctaccatataatcagacactagcaacctattactctcttcccactaataacctatgccttaagattacagcatactctatttcatggtcagttggtggacactgaagctctgtgcact

SEQ ID NO: 342943 - DNA, 1000 bp, Homo Sapiens
tttttttttcagatagtataggcaaatttatttctatggtagaagcatttatttcagatatagaaaaataacactatttcaaagtcagagtaagtaaacagaagtatattttttccttgcatacccatcctcaaatgtcaacacacagtttccagccattcttacaaggaacaaatgcaaaattaaagtaataactgtcaacagaagagctgtattaaagctacgtatcaaccttgaaaatcagaaaacacaaagtgatctagtgcagtgattctcaactttagtgtgtatcagaatcacttggattgtggaaaaagcaccttcagagagctgaaggaaaatcatcaggtcaagcaagcccttggtctcagaataaatatcaaagagactaaagatacgtgctttgttcctcagggaagagggaaggacaaaatatactacaatatagaagatcagccatttactctgtgtcacttctctgagcttcacattcagaaataacgacagatacaactctcaagaattgttctacatattaggttagatagtgtaataagtgcttctccaatccataatacatacctactatcattatttcaacatcattattatttgatacggagtacatcttccccacctaccccctactcccaaatggctgctattacttattttaaaagtcaaacaatcagtcattgggttcaagctcatggactacaagtaccatttttatactggtatcatttttactagcttcaactattcacttataagatttcagtacattactgaaatgacatttttgtacccaaactaagacaatgactgaaagaaaaggaactaaagctttaaaattgcgtcttgcttctaaagcattaatagtgagaaaaagaattcttttcaaagtgacccattttagaaaatttctgatgttctctgtattgttttctgaatctgagaaggctatttatagatggaaacatgggaataaaatacctat

SEQ ID NO: 342944 - DNA, 1000 bp, Homo Sapiens
cagctctatatttttgtttaatcactagacacagcatcccactgaagtagaggattgtgggaaaattgtaaaagtgaggagtgaatatggggaagaaattctgtaatccactggatgttttctaggttctctggctttttcttaatttgcatactgtttggttactccaaacaaacctataacatttcaatctatcctgcaagcttcaggaaaattaaatgaaaagacacaatggaaagattaaaccatacctatctattagagcaaattaaggagtttgttgcttggaactagtacctcctcatgacatggggtttaaataaactacaagttctattaccttttttattttccagggaaaaagaaacttgggaaggctattttacacaattaattacacattgacaccacagttctgtttggataaattggatactgtatcctggagtttagacagggaaaagtgatcccaatattttactttcaggtgtaagatttaaaacaagaatttggaccaaaatgttcatcactgcagttactttctgctttccatttttaagcatgttatcttcatgtagtccacctgaacatcaacagttcagcctctacagagtttctgtaatatactgccttttagtgcttggagtttgtaaattgtcttccctttcttctttaggaattgttccccaagatttcatcaagattgatgtctttcatccagtcatcattaccaggctctgtcttcaataaagaatcaatgaaatcagcatcactgtttagggcagggcccatgttatcattttgttggctgaggaagtcaaaagctaagtcactgctgtggtcagttccttgaaaagccctggaactttggttgggtgaaggaaaattgctgggcgtcagggatggtggctggttgatgcccgtcctcgactgattcaaccctgttcctgactgattcaaattaggcaaaatctgtgtgcttagctgattgggtctgaga

SEQ ID NO: 342945 - DNA, 1000 bp, Homo Sapiens; identical to SEQ ID NO: 160443

SEQ ID NO: 342946 - DNA, 1000 bp, Homo Sapiens
ttttttttttttttttttttttttttttttgccgccggcggaatcagagacacggacgcaggcaggatcacgcgaaaccagaattccttccggagagcaaatccgtacagaaggtcgtggggggaggaccaggggaggaggggcccgggaagagggggttggggacgacacagggacagagggccctgtccggatctgctaagccaccccaaccagctcccgtccctcccccaccccaccccgcagagagattgatcaataaataaaataataaattaatcaataaataaaatagaaacagctcccccgccccctgttcccctagaaccacccccagttgggcacggcctgtggagccccatccctgcagggcaaggccggtttttgtgtccacccccctcccgacatgttccttgggccttatttacagattcacagttggggggcacggaaggggggtggaggggggtcccctccctccccggccccgtggggtcagggcagaggggtcccgttggtggccaggagcttcttgtccttgggggggcctcggcggggagagctgctcagctctgggtctgggcggccgggtgggggctgcaggcttcggggtggggcaccagcaggccgggtctgggccccgttcttctcgtctgccagggcctgcacggagggctggtcatgagtgctcaggagctgtgcctggatggtctccaccactcgcttgaaccgacggctgggacccgagatgagagtgaaggtgacggagtagatgccaccacctccgctgccgtcccgtcgcggggagggctctggaccctcagaggagctgatgtccacctggaagcggacgggcttttggaagacggaggggccgccactggccttgtactcggccctgaagctggtctgtgacagcacactgtgactcaggctggggatcgacagaaaggcatggacgatgtctgctttgatgctgctgagaggtttgtcctttagc

SEQ ID NO: 342947 - DNA, 1000 bp, Homo Sapiens; identical to SEQ ID NO: 160444

SEQ ID NO: 342948 - DNA, 1000 bp, Homo Sapiens
gcaaatttaccaagctctcgggtagccatttctgcaccaataactctggatttgtatcatatatgtatgaccataaaagtgattcatagataattttattatttaaatcctgatctgctattcaaagatccatttctgaaaataattcataatatagttgtcgtttccaccatatgagcttatttcaacagatgtctaacatttatccacaattaaatgaaatgtgaaataacaacaacatacttaacttctaatagtactgtactgctgttccttgagttgtcagtgtctttgggattattaggataattatgcactcaaatagagaaaataaaattaagacacatgactgtttacaatacatgatatctgtgaagagctaggtatctgtaacaatttttaaaagttctactggagaatgaaaaagctttccacttctgaatatcaaataaagggctactgatggaggaagaacgttttctataggaaaaacctaaagattagcctcactcaaggggcacaccatgtggtctcagtcaaatggcaaggactgaactttgaacatctattttggagttctaatgaataaaatgcttataacttatattcagtaaagcttttataagttacattccgtataatttcctcagagagaaatatcattgcataatttaagtgagaactggacatatgcattatcggcccacagccaaggttaggtagtttaaacaggactttatatctattccagtcatcagacttttaagaacctttacttactaatatcacattattcttgccaagaaactaaagctctttcttggctttttgttgcaaaaatgacaattaagaaaagaaactacaagagaaaaaaacaagaaacaagacaagaaaaaggaaagaaaggaaaaaagaaaaaaaaggaaggaaagaaacaaaaatagtgaagctcattacaatttctgttgtgtgcaaatggacaaaggcataaatgagaacg

SEQ ID NO: 342949 - DNA, 1000 bp, Homo Sapiens
tttttttttttttttttttttgacatgaaaacctttctttttaatttggttgatacacatttgacaaaatattttagaataaaataatccatgaacaggtacaaggtatttacagtaacataattgaaaaacataaaatcgatatatttctttaacagaaatgtctataaaattttctactgtgaatctggaagactttcagttcctacttatcaacctggtcttaagccccaacaggcgacatgtaaggcccaggagtaggatatacaaactctaacacatttggcaattaagaatcatctattagtgtgagctggcaggcggtgggtggggggtggggatggggagggaagaaccagatcttagggtaagatacagaatggaagactccactgaaaacaactatggacaagaaagatctaaaatcacacttatctttcacttgtctcctgtgggagaaggctgcaaactattttaaagacttagtcaatttttcccattagcagaaaatcagcaaccctgagactccaacatttcatgacataaaagctaataaacatctagaagctgattaagatttataaactaattttacatcagatagaaaataactcttatgatttaaaaatacatgtaaggaaacaaaatttctcaaatttatttttcatgcctaattcttaaacatttcaactaatattttctattgtctgaaattagttccacacacagatacactttaactgaatgctttgagtacaacttgctcttgattattaaatggaatgcctacttccttgtattattattcatacatatttaaaagaaatgagaagtttaatccatctggactatacagaaatttattgacttacaagatagtcacatagacagagaccagaaaaaaatgatcaaatgctcattcttagtaacacaactgagacagtgaaacacggtacaccatacatgtcatctactgatccaactatgctatctgataagc

SEQ ID NO: 342950 - DNA, 1000 bp, Homo Sapiens
ttttttttttttttttttttttttttttttttttgaaagcattatttatattttaataataaagtacataccatggacataaaatgaaaatgcatataaattgaatagattattatttaggtacatcagttaagtagcatttagttgtttaataaataacagactaaatctgaaataattcttagtttggtaagttctaagtataattatttaagaaataagagaatatatacaataatatatccattcttgtcgttcattcaaaggcattacatgttgacaaaccattgtagatttgggtcccacttctactgcaaatatgttgagtcctctgttgtttatgcagtttttacttagctcattgctgatgtgaataatcactttctcatctgacttgttttcaataactgacgttatccaggtgtcacaactgtaagtatgcacgattatattttcatagccatccattactttggcatcaccgttgctaagaacagatttacaaatggccttctcaagttgtccactacatgcctccatatggacagctttaatttttggcttgcatttttctgcatagatatcaatgacaaatggacatgcctctgtcaactccagagctttattgtagcccatagagtgtagagttacccaaaggtcacaaggatctccttctcgatcattagcttccattagattcaaatccataaatccttgtcttgttagttcattcctctttgtatcaaaattctctctgcagacagcccaagcatcttcatcacatttctcaccacttgttctcaattcaaaaaaattatattcttcaaggctaagaagaccatttccatctaaatcaattacttcaaatatatctgataaagtagacttaaattcctttgtaaggaataattcccctgtttcatctctatatacaagttgggcttcatctgttactggttttatttttttcctcagcttacagccagttgtggaaggaatt

SEQ ID NO: 342951 - DNA, 1000 bp, Homo Sapiens
tttttttttcttgttagggaaagtttatttagtatccaaagactgtttatgttgatgtatggaaaagagcatgattttaaaaaatcaatcataggaggaaaagaaattcgcttttcaagtaggaaggaatacagctagcaagaaagcaatttatttgaaacttctaatggatttttgagtgataaaacatttactaccttgtcctttaagtctgctaggctctcagtaccctaaaataaactagattgtgttgctattttttttctttctctataaaaataacacattattttatccgttatttgaaattttacatttctggttaccaaagttcattctgatagcatgtactttgtgaattattatctttgtctataactgacagatgtttatattaaaataaaatattgtattaaaaatttaaaataggtattttggatagatatgtgtctgtagtatataatctaatgtgtccatagtattattgctaatcttttggtttactataagatgatataactattttttcattgggaatatacatttttcttaatgttccaacatctatactttgtaaagtcaaaacatttcccatgagctgtagttattcatccttctgtacaaaatgaaaagtttggaaattgtttgccctgataccttgaaaaagaagccagaatatttatttgcttcatcaacttcagtgtatatcattttgtgttattttatacgaaaacatgtttattattttcatttttgtaaaaggaagtaaaaggtcaacattttctctcatgtaccaaccttgtttgtatttctattttctgtaatgtttaagtatgatgttgaagaaattcacattctcttatagtttggatgggaagactattgactatttcagaaacagacttatttcagaggcttattgttttctctgtatttacctaatattttataacttttatgaatcagaataatgtccttcataaatttgtttaattgaagt

SEQ ID NO: 342952 - DNA, 1000 bp, Homo Sapiens; identical to SEQ ID NO: 160447

SEQ ID NO: 342953 - DNA, 1000 bp, Homo Sapiens; identical to SEQ ID NO: 246565

SEQ ID NO: 342954 - DNA, 1000 bp, Homo Sapiens
tttttttttttttttaataaagcctttttggtttattgcacatcatataaaactgactgcactgtatttgaaacagacgaggacattcacaaggatggagaaaccaaggtttccttctttcctggccctcatcttcctccacactgctcctgaggctggaggcagctttaacccaaagaatggaatccgctagtgaacatgtttgttttgtggtggcatcagagttgttctgggcccttgtgcactgtccagtttggagactgctggtaacaatgacaagtgtccgggtagcacggctgggtcaggagaactgcatctgggctgtggcagtgcagggagcctcaggacacctggtctcaggctggcggtggctggggttggcctgagtgctgaggaggacgggcccgggctgccggggcaggctggacctgacgtccatctcaggacagacatgtagggcagctgtgcccaggactggtgggctcagagggtggcaaatgtggcagaataggccatgccctggccagctggtgatggcccactgccccctgggacagctgagggccctcttgggttaagggagacacactgggccgggcgcagtggctggcgcctgtgatcccagcactttgggaggccgcagcaggcggattgcctgagctctggagtttgtgaccagcctgagcaacatggtgaaaccccgtttctactaaaatataaaaaatcagctgggcgtggcagcgtgtgcctgtagtcccagctatctgggaggctgaggcaggagaattgcttgaacccgggaggcggaggttgcagtgagccgagattgtgccactgcactccagcctaggtgacacagcacgactgtctcaaaaagaaaaaaaaaaagaaaaccaaaaagggagacacactgtgagcacggacagaggaaggggctggagtctgtaaatccagtgggtgacatgctccaaatgccaccctagaaagcagagcccagagg

SEQ ID NO: 342955 - DNA, 1000 bp, Homo Sapiens
agtttgagaaatttgttttattttgtacaaggtacaatccctctgcacagtgaacatatattacaaatctgtgatttaaaaaagtattgccgtttcatagtctcattaatacctctgtacaataatggtttttctttcattcattttaattgtacacatattaattttttgaaaatttagtttctgaaaaataattgaacagatctttcaaagtcacccataaaatgcacagtatacatgtttaggctgaccatgaacctatttgtgatggtgttagacagaagtttctaacagttgctttgtaagattgaaatgtcttttactgataactgttcgataggggaaggcagctattgtcaccataatcacaccctctgcctttcccttctcctctgtattgcctggtttgacttgtattacatttccttaaaaagtcatggactgctagagctgaagggttagtagagctgtcttcccactctctgcttctcccctttttatgcatagaaaaaaagggagcccagagagggcgactaacttgaccagagtaacactgaaatctcttgattcagtgtctagccattccacctcttgctgaatacctttgcccagaggatagttgacaaaagcggcgaaacttcaaacttgagtgatgctgcttgtttgcagtttgccaggcagcagttattgtacatgcaggataagggaagaagagaaaacctgggattgagttgaagtttctccttgctgatctgacatcttcatgctgctcatccttgcttcacaaacacttgctgccctgaaatactgaggtaagctgcttacctatatttctttctacatatgtatgagaaatatttacttgggtctccaaagtaattttctaatatttatattttaataaggcttttttggaaagtaaatttactattgctactcagttgctcccatgcacacatgcaacattcatgtaagtattacatattttcctctaacagta

SEQ ID NO: 342956 - DNA, 1000 bp, Homo Sapiens
attagaaagtttattgcattaatctataaactcatttggtgatataaatgacaatgtaggctaagaacgatgaaagtttatcatctttggaaaatagagatatttcaacactgaaagcattttttgtttgtttgccacaaccaagtaaaccctaatgtattttgatttttctttttaaaaatatagattgcaattcagtcatatcaaaatgaagcctagaccaaatactgaactagcataagcagacccagtgttaggacatcaatattaacaggactctaaacgggcagtttgctgtacatctttagttaataaacaagcaaccatccataccacgtaattcacacttgcatatgcatgtacactttcatgatgaagcctttaagaccaaaatctctcttaaacattcagcttgaataataaagacatgttgcctagagatagaaaattcattattttaaaaaatataaccttaaaacttgattttttatgattttattttaagcataaagtggactactaatattgacatcaattataaatgatattgtggtacccttgtttaacttttgcaatatttaccatttaaaaatctcaataattgacagctactgtggctctttgggggtcaagatgaccacactttcataaagttgtttgcatttctcagaacacacagtcattatgctgatggatttggttcagtcaggttataactgtcctattataaagttctatggttggttttcctgaaattggtgaatataaattccataaagataatgctaaacatattaaactctctgttaacattactactgtatcataggacagcaattaatgtcaaacactgtaaataattgtaaaatgttcctcactatcatataattaacctcaaataacatattttccttattaaagcaaacatgagttatcatgtgggcaagttctgatgtacttatatataaatacaaataacttataaattttctgatacatc

SEQ ID NO: 342957 - DNA, 1000 bp, Homo Sapiens
taacccaaaataactttattatcgtctccacttttgatataaaagcattctccaaatggggggcaaatgtggcaagtcactgtggagtctgggccccctgtacacccttctactccgaggaataagccctgtgcccaccccagttgcccattgccatgtcctgccaaccccctgccccccgccagggcaagccacagtgcagtacagaagtgaaagcctgagattggccagacacggtgaccacagggcctcttcctgaccttggctgtgggggcagggggattgcacattgcagcttcttgctgtctccaggaaagactgagtaactggggggcccccggggctggcacagaggcccaggcagaggccgggcttgcctgaggttgtcgtgtagcatttcactcttcctgagtttcggggttcaatctggtcagccatcgcttctggggatcagtccttcccagttccagaatcccccttctctggacagctggggcccactgaggctcctcccaactaaagcaactgcagctgcaccttcagcctcaaggcctggccccatggccctggctgcccctctggctggacaccccagggtcctgccatgtggctcaccacctccagccggtaggttccaggccccggccgcctccgccccagctgcagggagctgacgccacggaggtgatgcatgcgaaagaaaccttgctcgtttccgcggacgatgacgtagcggatccggccctctagaccctccagggccggccggagctccaggatgcgctcggcccggcccaggtgtgagaggttcaggcccaaggtcagcagggcctcggagtcaagggtggccaggttcacctggtggtccctgtgggcactgcgtcgtggccggtcccgaggggagaggccattgatcttgcattcgtagcaggcttcagacgagagcagctcctctttgtccggggtgtcctggggtccggggctgaagcccaggccggag

SEQ ID NO: 342958 - DNA, 1000 bp, Homo Sapiens
tttttttttttttttttttttttagtgttttctgactttttaataacaggagataacccctcataatctagtgttgctaataaaaaatcagaatacaacagattcccatttattttaaaatgaaattagctaggcatcatatatatgaatgaaagatcagaatgaaacacatgaagatgttaacaatgattgttttgggccacagaatcaggcacaagctcgggagagaagccaacaaaagctcttctgcacaatgggagggagacaccattgaaaaaggcatcgttccttcttcatgcaagcgaggcctggctcccacaggcatggtctccttgcagctgcaacagcagaggagggcgctggcagggctctgcgtccaggtgtgcctctttttctctccatactctttctggaggttgactagtaccttctccactggtcatgctcatactgtctgcttcctggtccctggtctctccacggctgtccctgactggaacggctatacccagagcccgtcctgtggtagctggagccctgtcttccccacctccctgcgtggtgtgagccccagtgggctcggccagtgatgcgtctgttctccttcatgcaggccttgcagacgactgccttcaggttgtggaatttggtgagccgagatctattttgttctaaaagaacctccacagcataacccttttcagattgcaagtacttctgatgaaaaagcttcccgtcaaatacattccagggcatgaaatcactcgtcttccaggggaagccacatgcgctgttgactaaaaccagagtggtgaggccgcggacgagaagggagcccagctgcacggctctggggttgatgtaatcaggctgtagatttacaagctgcgaggtggattttccttggaggcacaaggcctgcgcaataaacgcatgcaaatcctccaggcaaagcgtgtccacctggacaaagaggtagatcaagaggcagcacaaagct

SEQ ID NO: 342959 - DNA, 1000 bp, Homo Sapiens
gattctaaaaaatttctgtagtttattcagtttgctaattcagaagaaagtgtgcattgcatgagatcaaagaattgaaaattttaaaatgatttgggttgtagctggctcccaactgcaggtgagtcactaatctccaatgtttggatactgtatttgtgtttgttttgagacagagtcttgctctgtcgcccaggctggagtgcagtggtacaatcgaggctcactgcaacctctgcttcctgggctcaagggattcgtgtgtctcagcctccctagtagctgggattacaggcgccggccaccatgcccagctaattgtttttgtttttagtggagacggggtttcaccatgttggccaggctggtctcgaattcctgacctcaggtgatccacctgcctcagctttccaaagtggtgggattacaggcgtgagccactgtgtcccgcctgtttcctgtatgtggataaatctcaggacaagatgaagctgggacaggctcctcctactaccagtgacgcatgcatgcctttggctacaacaaaggccttttaagaacttcaatctccaagtctggtgggaggctttgtcttgcctcgtcagcctggaggttctgttttgaaagagcaaagcagcagactgaaattgaatgggttgcaaaggagaaacctttagagctatagaaaactttctatctatcgaaataggccatttccaacagaggcctgaatttagaaactcctagagctggctggaactttagaggataaccacagtggtccgtaaccctcttaggaagcactgggttggatacacaccctaaggggagtaggttgggttaggaacccttccagtcacctttctttgctctataggtcatcttatgaaggctaatcaccctccttttcattctagattattgctgtgttgcatacacgtgactgcaattaagtgttaaatctcacatctgtggaagttttggtagctcacttctgata

SEQ ID NO: 342960 - DNA, 1000 bp, Homo Sapiens
tttttgactgtgagacctcctttattaggccaagagtggccatgtgcacagatttacagagctgctcctccctgtgccaggaccgcccagcatcttcaggagcctctgggccaggggcgagtgaggacagcaccagaatgtggtagggccaggagaggcaggacacatgtggtttggaccccagggaaagggaaagggcaagggcagggagcagcttggcacggacctttttttttttcgagacagagtctcgctctgtcgcccaggctggagtgcagtggtgcaatctcggctcactgcaacctacacctcccgggttcaagcgattctcctgcctcagcctcccctgtagctgggattacaggttcctgccactatacctggctaatttttgcattttcagtagagacaacatttcatcatgttggccaggctggtctcaaactcctgacctcaggtgatcctccctcctcggcctcccaaagtgctggaattacaggcctgaaccaccacgcctggccagacctttcaaacaggtgggggtgcctcccaggaggaccctgcctactcagagacttcccagatgcctctgctgcctgagtccccacaaagggagagcagaggcaagcagggcactctggtccagctgggagccaagataccctgtccccacctagacgtccactggggaagggaaactgccgttcgcattcctggggacggagaagagcatgggaacatgggatgcagtctgtgccaggatctagaaccttctgctttctctcttcagtgagaaaacccaccctgttccctccccttcctccctggcaaggaatcctgagaagaaacagcctcccccagggagggttttgaagtgcgcctgaacccaaatgagctctggggccaggaaacagtgtatataaatatatagactgtgtgtatatattataaatgtatctatatatgtatatatgtacatgcacagctcagagcgtcctag

SEQ ID NO: 342961 - DNA, 1000 bp, Homo Sapiens
ttttttttttttttttgaacttttttattaatatattttttttgttaaatttctttgtatttttttcctgcaagacttggtgttggtggcactgttgtagtttaacttcaatcccaaattccatgaaatagaaatcagaagtaaaggttgagaggggaggaaggagggaggcaagccaaggaataaacaagagtttgactagaaaaaaagaagagggtatgtgtggtgggcattcctgggcaaggccattccttgagggagggggttggcaggcagcttgcctctgcctcatgcaggggagggaggaaagatcccctggggaccctgcagtcccctcttcctagggcttcctgctcccaggggaaaaactaataccagagagggatcagccacaacctcaaacagtgctctccacccacctgtcacccgggtttgactcccacctctgccctgcctgggaagcatgtgagatcagctatctttgatcccctccttctgttgttttcccatttcacaagattctgatgtaaagggggaagggatataacccattttgggactactaaacttgtcacagcttctgcttccatgtgagctcctgttatcttgtctggtcctatcccccagaagtgcctcctcccaccacaactcccagagttgggatgtgggggccttgctcaagtgcctctaaccctctgcagtagaaatgtcttcttcaggccccttaggaatttaatcaaaggccacaagtgagtccagaccaaccaaataaactattatgggggagacagaagggtgggagaagtcagtggcaaagtctgggcagggtggacttgactgcattggatattctctgttcctttacacgttgctcttggcatggcatgccaccagagggggctggaggaggggctggccgatgaggagaaaaagagggaaatgctggggagttactctacttttcacttcccttctctccttcagggaaggatggaattgg

SEQ ID NO: 342962 - DNA, 1000 bp, Homo Sapiens; identical to SEQ ID NO: 160448

SEQ ID NO: 342963 - DNA, 1000 bp, Homo Sapiens
aaaggctgcgggagggctgggagggctggagaggagggaaggtggtggcacatgagcctggggaggtgtccacgaaagagaaaacagggaagcaggaaggggaaggagggaagaaaacaacgagcaaatccatctccctgagtatttagcatacttgaaaaagttacaaggcattatgcacagggtaacatttaaaatcttaatattcttatttaacgtcaatgaaagtattcaatatattaatccataaaaattcatgatacatatacatttatctgaatacatgatcaataaatgatcaataaatagaagttattacatcatattctgtgacatttttaaaatgtttttacatttagaagtatgagacggtatatttaaatttcaggtaatttacttgctaagcaccaatgatacattcaatggctaatttacacaccctcaccaatcagagcaatattacattttccatgcttttttgtaacaaactgcaatctggaacatgaccatgttctgggatgatgatgccagagctttagccgtttcttttctgggtatttccctttgttaagtgtgcatatctggtagaacttctactttcctttctgtcatctttgtctcgggatgccattttactagaaacatccttcatatttgttgattttttcctattttccttggttttagcacttttttctaggtccactttctctttttctctgtcctttttacccttaggagactccttcctggataggtctgcatcagcaattttcttatcctttcggacatcctctttcttccccttttttctctcttcattcttactttccttccttgactcaggtttctctttctccttcttgagctcttctttagtgagttctttaactttagccttagtttttctcttggctaccccactgggtccttctaataaaactttggcatcatccacatcaaaatctccatcaccatcagcatcatagattcctagttt

SEQ ID NO: 342964 - DNA, 1000 bp, Homo Sapiens
ttttccgggtacctcagtttctcctttattgctcctgtacgaacccctcccctcccccctgtaaacacagtgctgcgagatcgctggcagagaaggcttcctccagcggctgggtggtgaaggaccctggctcttctctcggggcgacccctcagtgctcggcagtcatactggggtgcgagagaggtgggcagcagctcagcctccccccgctggggagcgaaagtttcttggtctcagcttcatttccgtgaagggcaccgagaactcgaagcccttccagtggtaccagctcactccctgatggtccactgtgctcccgtagagcccgttgaggttggcgtagtggcagttcctgtaccaccaggcccctcggtaggagacagcgcaggagatgagcaagctgttggggtcccgatcacgggcagagaagacactgccgctgtggtagctcatggagtcccctgcggtgccgtggtagccctccaagtggaggcggtagtactccgcagccgagtctacgtggaaggagtcgtactgggcgaacacagcctcgtccccagcccgcaggtccacgcgcatggagtagtcacctgcctgtgtcaggctgtgcagggcctcattgcccagccagaactctccagagatgttcccaaaaccatgggcatagtcctcccagtccctccagaagtctgtctgtccatccatgcggcgctggaacaccagccagccgcccccatcagtctccatgtcgcaaaacacgttcaggggccgctcgcggttgccgttgaggaagatggtgctggtcctggaggcaccggctccgttctgcatctcctccccgcagtccctggggaaggggatccgcagcccacccgtggtgaaagaggtggacacgggcggcaggaggctctggccccacatggcctggagccgtgcattgtaggaggtggagggaaagaggccaaggagctggtgagatgtgatccctcctgggagc

SEQ ID NO: 342965 - DNA, 1000 bp, Homo Sapiens
ttttttttttttttttttttttttttttttcagtaagaaatctctttaatagtgaaagagtttatttggttactgtatacagacatagcctaagtcaacaatcaaataaaacataactgcatgcatatatttctgaaaatgaaaataaattaattactgacatttttaaaacttcagaattctattatttttctaaaatatctaataaatcaaaatttactaacactttggttttatttttgctccttttaaaatatatgcttagatatatatttaaaggatgtattttactatttctaccaatatcattgactaaatgcttaagtgcctactgctatgttagctactttaaaaaaatataaaaattaaggtctgcattgctgaggaagttatttaaaaacaagtcagacatacacaaaagccctaagaataagaaaagagagtgtaaaacaactagtattttgtataattcatattaaagtaaaacacacacacatacacagaccaaagttagggaagatagtaaaattcatttaataggcatgttccatataaccattttgttacaaattttgcattttccacatgaaaaaaatcacagtaggcacatactagaagcaaaatatgtcagacaaaaatatcctaaagatgtttctgttatcaaacttttacaatttttccaagacgtttttgaggtttgggaaaaagtctggggcatttttggcaaaaaacaaacacactctatccatgtgagttttgactattgttctttctcaccaaaaatgtccataattttctacaaattccatgaagttttaaatcaatcatgtttgatttacatttaccaagaatgatttgcccatcaccataaaaattgaattaaaaatacatcaggctaaataaatccaaaagagaacagtgaattttgttgggtttacagacagtggtatgcatttctgtgatcatgtattattcttaaccttttccttcagtgcgattt

SEQ ID NO: 342966 - DNA, 1000 bp, Homo Sapiens
tttttttttttttttttttttttttttttttttttttttgcccggcaagaaatcatgtttattcacattccccaccccaccacctgagagtcactttcactccaagccctgggcctgacgggagggggccaaagaggggggctgcctaaggcagggcccagaccccacagtgtgggcctctggagctgtgtctttactcttgctgccgatcaatcccatgctctgaaatgcgcacactctggctccttagtagatgccataggtgggctcatgactgtccctgtaccggtccaggtagcgcaggggctgccggtgggggaagcgcttctgcttggggtggtaagggggcggccgcacgaactcaaacaccggctcccgcatgtccagaagctggtggaagatgtaggtgacggagtcatcccagcggcactggaagaaggacaagccggctggagtcatggtttcttggtgtttcttgtagaaatcaaaagtgcggaaggtccgctgggccagctgatagcagggtgaggggcgtgcgtcctcagagaagtcaatcggctggtcctgcttgaagagcaggaaggcaagacggtggatgccggagcctcgggcagggaagggggggaggtagggacacgtcacctgtccttcagccacccggttacccgggatgttggttagcagccagtggaggtactcagcatctggctccagcaggtgcccatccaagctagtgagtagcaacgtccacaaggagccctcttctgcctcataggtcacctctggcgcttgggcagcctcggttggagtcacctcattgccacagtacacaggcatcaggtcatcctcacccacagcgtaggccacgtgcagggggactcggggcacaaaggtggcaccgtggaacaggtctcggtagaggccgtaatactcagccagacgctgcttgtggtaggggccacaggtcctctcccactcggcccgcacggcatccagcggg

SEQ ID NO: 342967 - DNA, 1000 bp, Homo Sapiens; identical to SEQ ID NO: 160450

SEQ ID NO: 342968 - DNA, 1000 bp, Homo Sapiens; identical to SEQ ID NO: 160451

SEQ ID NO: 342969 - DNA, 1000 bp, Homo Sapiens
aaaaacaaaatcagtctattaaacatgccctgaatatgctttgttcattctcatctttagcaacttgttcattttagtatgcttgcctggatatctgcgctccatcccaatgccaccccttccatgatggcatacctctgctatggagtctcgttcctcaccacagcaaccttctttccctaaacttcaataagcttaaatcttatcactcatttggcacatagcatattgtaccacaaatgctctcttccaagggaaatataagctcaccaacgtcaagttatagaagaaacactatgggaaacattattttaacttggttctactcaatagacatctgttcttgagcttcaccattattatcccccaaacccattatagaaatacaacagaaatattggcatcccaataggtgaagtattttctcttctcccagaaacatataatatccaaagttttctgtcacatatactcaaaacattttcttccaaccattttatctgtatttcagaagcatctttggtgtactatgttgggtccaacttctttaaattctgcagcagtgatccacatgtcctggaaggcagacaaggatgcaagaatagaacctcccatccacactgatattttcctttctggaggagctataacttgcacagcggtgttggcaggagccacctttgctatatccttaactaaccgcttgtctaaaccagggaaagaggttgatcccccggcaaggataatattggaaaagaaggaattcctcaggcctgtatcacgtttcattatgctgctgaagcatatcttatcaatgccaggggcctcaaggttcatatgacacggagagaagagggcctctggacaagaaaagagctggtcatggagctggatgaccttcccatcaggtagttggtaaactttctctagacaatcgggtttcttggccatttcctcttcgtagttcattgccacataacaaaagctctccttgatgtct

SEQ ID NO: 342970 - DNA, 538 bp, Homo Sapiens
tttttttttttttttttggttttcaggtttttattgtgggtgtatttctggcagcgggacaggggtggtgaggcagtccctcccaggagtggccagagaaggccagaggcgagactggtggaaaaggacggggaagacagggaacttccttactctcggatcttcagttcccgcgccatctggcagagggcgcagggcagacaaaaggtgagggccgcccagtcgtgcccgacggagccctggatgtggtagcgctcccgcatgccggtgcggatggagtgcaggcctccgggcaggtagggcgcgcagcagcactcgccaaagtcgtcggagatgcggcaggcaaggcacagaggagcaaaagtgccgcacagacagacaggcatgtcgttgcagcagtccgtgagacctgtgtgccagtcactgagctgggtctggtagcagctggtggtggcgcactggggctgactggtcacagggtaggacatagctgcaggatcgcgatggcagtgatggaggcagacgtgtggagacacgg

SEQ ID NO: 342971 - DNA, 1000 bp, Homo Sapiens
ttttttttagaaatggtatagtaagagatattgtttcactttatttataatagtaagaaactggaaacaaatgtctaacaataggaaactggtttaaaaaaatcatagaaccataatttattttaagccctaaaatgaaattgtgaaccattaaaaatatgttgtaaaactatttaatgtcataaagagaactaactctgtttttatggtccatctaccaatgtcttccgagcagttctctctcctcaaacctcctctacctctttactcaccctcactcagcctaaccttgcttccgattttattaaggaaatccaatcaatcagaagaggtttctacaatttactatcacatttacccaccagccatcacctctgccatatatgctcctctcctattccaatggctggaatgtctcagggaagaccaagcccttcacttgtacattagatcccagctctctgtcccatccattatggaagctgcacatcaccccagtcacacaagagggcactctgaatgaggaatcttgtaaactactccaaatcaccagtcttgaacagtcttgaacacgcatgggcgttaaagtactctttatctgtacattgctacctttttatgtctattttatttacatgacttcttttcagtatccaaaactttagccaacaattcttgtgtttcaggagtcagtggagcatgagaaaactggcagtattctccctgataacattttgttcctgtatggtaaaacttacaaggatattcattatgcaaatacagacagttttcacctctggaacaaaatccttggacataaaacttacacatttcctttttcttttctatctctgcatcatgatcaaatttacactggtctcccttaatacatttcctttcaagaaaatatttacaaatttgttttcccttgcgttccactgtatgttggttgatgaatgcctgactcaaatgctgctgcttctctttaggtttaccatcc

SEQ ID NO: 342972 - DNA, 1000 bp, Homo Sapiens; identical to SEQ ID NO: 160453

SEQ ID NO: 342973 - DNA, 1000 bp, Homo Sapiens
ttttttttttttttttttttcagaccagctagatatttttattaatgatatataacctctttaaaacatgtatatttaccaaaagcattctgatatggcattcctctagtgtgactttttgcatgtaaattaatacagcctttttgaccttccatacagtcaggttcctcttcagtgtggatgtttcctaacgaccaagttcaagggctttccaacatctctttcactcatgggacttctcaatgtgtgctttgacatgttcccaaagtggaagctaaaaacaaagaagaatctccacacattttacattcataagatttttcacacttgtgagatcacagctgaatattaaggtataaggcagagtgaaaggtttcaacacattccttacagccagaggacgtgcatttatatccaatgtgctcacaagctcagtaaggcccgaggaaaataatgaaagcttttccaccttcctcacattcatagcatttctctccagcatgagttcaaacagactcagtaagatgtaagcatcgacaggtttcctacgttcagtttgtttcctaggatgcacagacacatgaatagtaaggcctatggaaggagccaagattttcccacattccttacattcatatgtcttctcttctattggaattgttaagatctgagacaccaaggaaggcttcccacattccttatgactgtgtacattgccactatgaatgagtacatgttcagtaagtgtgaggaagtagtggctttaccacattctttccaagtatcagccccaattcacacacattcagtaaggcatgaggaattactaaaggtttgcccacattccttatatggtttctccacactatgacttcttagatgtcgaataagatatgtggaccgagtaaaggctttcccacattcctgacattcaaagggccgttcaccagtgtgagttctcatgtgtactgtaaggcctgatgagatactgaaggcttgc

SEQ ID NO: 342974 - DNA, 1000 bp, Homo Sapiens
ggcatttcttaacaatttttattgagaacttactgaccccatgtgacacacaaaacaaatgtacatacccttcacatatttatagaaacatttttacaagtgccctaaaaatgggtcaatgatgtacttttctttaaaacgtttaatagacatttgatgaactacttttgatggggtgctatgcaaaatatgaatctggctcaaagacactctggcaaaaagtggcacagaggctatcccttagacattggggaatgtgaaagaaggcacgataacaaaagggaatgggccaaattcagcctggccagcgggtggcataggtggaagaagcatgagtggaaggggcaaggacggaggaggaaagggtggcatggggaaacacaggctgctggaatggctgtggtcccagaagtaatcatctctcatcccgctgatgaacaagggtgccgttatggcctcagctgcggttaccatgacaggctggcccactgccatgaagggcagcatgtttcttgccattaatgccctctgatgtctcctccatttggctcttctattctcaaaccaaatctgcactgcgagttcagtcacattcatgcttcttgccagcctccttcgcaggaactcactggggaactgctcgcgttggaaaatgcgctccagctcctgcagctgcaatggggtgaaggcgtggacgttgggctgctgcgcgttgccaggctccagccccccgacggcgccctgtgggcgcgaatactgctgcccaggttccttctcgctctggtcgctgtcctcaacgttgccatcgctgccgctggtgccctcgaggtctccttcccataggtggccaggaactccggcgccgccgccatctttttcttctccgccgccatctttttcttctccgccttgggctcctgccgactttaacttttctcctgctgctgtgccttgctcaggctcaggctgtgcatcctcttcctcctctttgacctcttca

SEQ ID NO: 342975 - DNA, 1000 bp, Homo Sapiens
ccttttttattttttaatttatttgttcacgttcatcataataaatttgtttaatgtaaaataaacaaatccttgacaagggtttaacaggattttcaacatctgtgcagataaatgtaatttattcctaaagaaaaaacagtttagaacatgccaggaaacctgcttttaacatttttgtataaagtgtgtgtgtgtgtgtgtgtgtatccaggcaatacagtagtggtttcaaatcattctatttcactcagaagcctgcatgatgaattttatactgaaacagaagtttgcctgacccttctttagcatttcatcttctgcctctctcttttgatttaatgcaccccactcagagttaaaatccacacatgttgggaccaggtttgtgtccttcaaaaggaaaagcagcaggcatatttttacaaaccttctttggtagaaaataaacaaagtataaatgacatatttagtcttttgaaaaaaatcaagcaatgtatataagttaaagctgtctgcaaaaattacattgttgttattagtatttcccatatcatctattcaacattataaaagttgttatgtcagcatggcagggtggcgggggcaaatattttactaaatacgttttgggtacagattaatattcaacttcccgaaagataggtttattattaacttactgatgtttcgctttagactgaaatctgatttgcagtacataaaagtacacaaaagtgaataaattaaagtgaacaaatagaaaaatctcctttattttgcttatttaaaaattgctccaggtttatttctggcacactcagttcatacaaagctaaacatttctaatgctgaacttactcgagtgttttataattacatggtataaaatgcatatactaagcagtatacagaatgtgcctttaaaaaactcgactcataaaaatactagctcacgtacatactgacaactagccatgtttaaaaataaactctcctc

SEQ ID NO: 342976 - DNA, 1000 bp, Homo Sapiens
ttttttttttttttttgaacaaaataaagctttatttgaactccctcccctacagatcattcagatgcccgggaccatgtccaggttcctctcagcaacatggaaagctaagccatttcacaaacgcacaactgtagctacactacagccccccatgcccagggcacagctttgttgctaagcctgtaacaaaagaccaccactcagtatttgtgtaccctgcagccaacaccacctcctgggcttcacaggttcactcacccaagaggccagcacaaccacgaccgagtgggtactcagtggcccagacaccccccgaacactggcactgccacaaggccctgaagggtagactgtggggcaaagaggacaaactctccctcccctaagggacccggctcactgggcctccttcccctgccaaccgccagcccctgcatgcctagcagggaggtaagcacccactggcgtcgtgatttccattatcttgctaatgttgacagcacctaagtcacattaaaacaaagagagactggatccagacctccaagtctcatcattggacctcagtggttctcaccgccccaaccacagagtgaaggtcaggcagcgtttgccaggatttggctctgaccaagttagtgctctaacaagtcacctgagtttctaatagcttccctgaagaacccaactatttggagtatgttgcctctcctatcaagaggcatctgggggcacaaaaatctttctggatcacagcttgaagaaacagaacataactggagtagcttcagaactaaggcggccacattcaccccaccgcttaggagttagctccattatacacaaccaagcacaggagaaacactcaccaggaaaagatgccggaggcttggaagttctcaagggaactgtttagacagaggtacaaacatctccaattcagacttccaaatacactaacaataattaaaaatgtggcctctgatcctcatgtttc

SEQ ID NO: 342977 - DNA, 1000 bp, Homo Sapiens
ttttcaatcagaaaaggttttattataagaaacaatgacatcaggtaaaaatgcaaaaaattgtgcaattatggcaaaatgtttaaaaatatctacacatttgcccccacaggactacagtacttactacatacctgagcactgaacattgaattccattttaaactgctttacatagggaatctgattccttcatgatcacatccatttgttctcatgaccaataaaatcagcttgatgcttaagcatcaactttgtagaacagaaaacaaagatggaaaataaagaatacaatttctactttcctataacatagttatacccagtccagttttcaatgtgtgacaaatatataggaaagtgctacatacattcttcaaatgcaaaaacaaagttaaagtggaactggcattatgttagacctacattttaattctgtagtacccattgtgccttttacttaaggtcttaccacactatgaaaatgcaccttaaatatctaaatataaacccacacatgtcactaatcttacttttctaggacctcttctgaatccattttaacagtggcaaaatatcccagctatataatttaaacaaatagttcttcatacaaaattcaatatatattctactcccataacaaatcctaagccttgcttttgacacacttaacttagatcgtaccctccatacaaattgtcatagccaaaagatcaactgttgtgcaggctaaaagaataaatctactgttgaattagccacagtatgtcattctcttatataacatacagcccatgtaaattgctaactcaatgttctatgtcatgttttcaagtaatacatttttctaaatacacaagattgtcaaaaagcggcaggaaatcttattcaacaaagctttcaaaaataaattacatgaacatctcttgcaaaaaaattgttttttctctctcctcagcaatgcaaaactgtaaagaatgatttctaaaatacacag

SEQ ID NO: 342978 - DNA, 1000 bp, Homo Sapiens
ttttttttttttttttttcaattgaacaaatacatgatttcccatgtctgacacaaaacttgacatagagaaaggtactacagttcaacattctcacagacaatttttaacattacttgttacaatagtctttgaaactctatataaatgtctgatttttaaaagtattatttaataacttcattacatatatcagatttactttgggagggtacaacagcatgtataattattatttttctatgtcttattaatgtctgcactatgtccattttatgtaccctaatctgacagatgagcattgtgttccaagtagaaatgtgcaacaaatctccgaaaatccaaggggtctagagaagcacctgggttacaggctctgtgtagttgccatgcattgttcatggctacatcaatcatgtagctcaccaaaattgagtaccatttcttgcttcttatcctcaccctgtatttcgaaataatttgatccattttagctacaccttccttgcattcatcatacacttttactatggatggttgacttatctgagggatttcttcgttatcagcatcacaacagcttacctcattgactggttctatgcccacagcattggagcacagactgataatgccatccccataccaacgacacaaaattatctcattgttttcttctattcggaaatcaaaataccctctcttcatttttttcatatgttctacattcataaggggacatttttcggtcctgttctcacgaattgttcctgttgccctcacccccttctttttcaaggctgacaacaatttgacacttgtaaagaagctatcaaaacacaggtgatagggatactgacctctctctaaaagaacatcagcgaagttcatcactagatttccacctaacccaagatcaggatcctcatctaccttcatagttgattcttcttgatagggttcaaaccaaaccagataaccctgtgtggttgtaccacac

SEQ ID NO: 342979 - DNA, 1000 bp, Homo Sapiens; identical to SEQ ID NO: 160454

SEQ ID NO: 342980 - DNA, 1000 bp, Homo Sapiens
ttttttttttttttttactcaaaagtcaaaaaagtttttattctctgatatataaaaccaagaaaactttaatacataatatgcatagttttgtttttttaaaaggagaaagtggcagaagtacagacctgtgtagaaaaatacacccaagcagctgttctaagcagtaattcctaaaattatgaatagcacacaaatctcagtgaaagcctcatttcttaaaaaaaaactcacatttgcttaacaacttaaaatgtgataagaaatataaccttccttcttgatagccgacccagttatataacagacattcaagaatcagcaataacttacttagtaaaagaacatttcctttgtgagggtaacattattagttttagttccacaaaaactgcttctgactgctggggcactgaacgacatgcccttcatcagagagcaagtccggggggtgcggatcctcaccggagaggtcatggggaagcatctttggtcttctcttgcttaggaacaaagggccagcaatccattgcatacaaataacatcaaacacaggtgcaggaattcacaactcctcagcaaaagctatttcttacaaatagaacttgcttttcacttaatattcagaaaaaatgaaaatgctgagatgcagttttccctcttagcagttccatgttcacgaagtcaggacagttctgccactgaccagcaggtggtgctggaccacaaggagaagcagcgggaggtacgcagctccgacaacctagaaaaatatttctttacctgtatctgtatgaaagatttggtcagagttctcaaagtataaatgtaacattttattcaagcaaaacacattatataaaatttaattgtatcaaataggaatttttaaaattactaaatatataaacgttgctggaagatcaacataaagtgaggatgaatttagtatttgttaaaaatcactaagttccacgtgacttcttatagttaaaagtga

SEQ ID NO: 342981 - DNA, 1000 bp, Homo Sapiens
caaccaagtacaaaggcagcttgctttattcttgagatgcagggggggaaggggtggtgcagtctgtctgcctccaatctggggctctccaagcctaaggggcaccccacaggcagcgtagttcacacgtgcaaatcctgaggaggttgggggcctctccttcccagtcagcccaccgcctctcactggggtccaggttgcggatcgccaccaagtcctccccaggccgcatggcccgaggtcttccactgctgctcatggggcttggtttctagagccctcaccatctaagcaccttcctcagttcactcagaagagaagcccctgctccagatggtgtggggcgcagaacgggctctgtgacttcttggtggacaccctgcaggacccctccgttcctgcagtcttgctctctctgagtcactggggaaacaggtgccccccagaggctccccgttcccacacctcagagtggaagccaccagaacagctgcttcccattcctcccacctttccctccccttccctcccatccatccccagccctccctcccactcttcctccccaactcccttcccagccatcagtggagaggggagttccacttctgccaggctgcctgaaggagctgccagcccccagggcaggtccacaaaacaaaacaactattggcaagcacagaaagggagaaaaaccacaaaaatcaggggtgcctttgtctacaaataactgcagtgcgcagcggcggggagaggccgcgctcagcagcgaagccggacactctcttgtgctcctttcagctcagcttccctgtctgcaagtacacgggtcgggtggagagagcactgggtgtgtgtgtgcgtgcacgtgcaagcacacgcaagagcatgggggatggggaatgcacacgcacagctgaaggggtgcccatcacaggtgtgcccccagtgctggccactggcatggtcactttacttgggcagaaggaagaaaagcgtc

SEQ ID NO: 342982 - DNA, 1000 bp, Homo Sapiens
acttggccaactggctcttgttctcaaccctgtgagggaggcatcaaccctgtcggtgtacagatgagactgtggggcagaggccagctcgcccaaggcacttgcttacaatggcagagacagaccttgtgacacaggactccctgataactgggcatgttgtctcgatgagtcggggacaggtttcccctcttgcatcttgtaaacaaaagccacccctaagtcaggaatcttcacacacaagccccaggaagctgcggtttccctcctagctggcctctggaccgagtgcagccccacttgtctccctttccctccaccatgtcaggctccgactgggtcaggccaggtaggcaacagagttggcccagccatatctttctggagactctgaatcccctgggacactctcagggcaacagaagtgccagggggcttggaggctgttagtgcagaacccaagctgaaatctctctaccccctgcccaccacctgtgccaaagttgttttttgtgttggcacagctgaggaaataaggaaagaggaaacctgtctcttacctagtaagaagcctctcccctccaggaaagggaacatttggctcatagctgaagtgactaaggcacagataggcctcaggtgcctcctggctccctgcctcagggaggctcaaatgagagtgtgagggtcctcacccccgtgcctattgctataggcagatggaggggctcagattcataaaggcaaaggccagccaggctgagaatggggcatgaggcaggcagtatgggcgcgctggggccagcctccccttggacgtcccgtggctcaccacctttgcccctgcgagtggtagaacagttgctgaggattaggcccaaatacagcccttccagagctggcccaggagctggaagagcagggtcacactagctttatacccgctgagtccccaccctggctgtagtcagatgggaggctgggaagagctccattcctg

SEQ ID NO: 342983 - DNA, 1000 bp, Homo Sapiens
tttttttttttttttttttttttttttttttttttttttttttttttttttttttttttttttgccaggcaggcctgagcaatctttattctgcagagggacaatgaccacagatccatacaccacgtggagaccgaggggcggggagccaggggccagtctttcaggggtgggcaggtccaggcggtgggcagagcctcgggtgggtgaggggcagatgggcagacaggcaggggcctaaaaaaaagatgaaccacacagcaggggtgctgggagctgctccccaccctcccccatcccaccagccagcacccagagggacaaccctaacacgaccggcccaggatccacccaggggcagagtaggtgggttggtgccctctgactaggggggcacatgcctgcccagcccaccacggtagaggcagctcagttcaggaaccaggagctctctgggcagggcctgaccggggccccccgactcccaggccgagcccccctactgctggctcagaagccgaaggtttcctgggaggcgtagaccatatagaggaagccgtcctcgtctttctcctgctcgtagatgtccgcgatgggcgtggacacactcaccatgctgtgctggttcaccagcaggaagaaggcctgcgtggggttcagctgcaggcggcgccggatgatcttgaccaactcgctcatgttgacatggtccgggaccaaaaacttggtcttgtccaggacgggcagctgcttctcacccttgtagcgctcgatgatcaccgggattttgctggggtgctggtcgcggatctgctgtacctccttacagcggtcggcgaagctccgccgctgcttgaaaggccggtctgagggcatcgcgcgggcccggctgggcgcgcaggccggggctctggggcgcggggatgtgtctgcggtttgggggctccgggggctccgcgcctcgcgctcaagggctccggggctcgcgctgagcacggcg

SEQ ID NO: 342984 - DNA, 1000 bp, Homo Sapiens
ttttttttttttttttatagcatgtaaaatttaattagaaaattcatagctcacaaaagtacatatattttgttgatagctcgagaacattatcataaatttacttaagatacagaacaaaattcacagttaggcttgacatttagtactataaaattttatgttggatccactgatacttttgttaataaggtgcacttgaaataattgattcagcctaccaatgagctgatattttatcgtataaccaggatctattggttttacaatatatctagtaatcaattatttcaccaataatttaagaaacagagatctacttgaaaataccattgatagatacccttaacaggataattaaaataaaaagcaatagcagctttgatttccatttccatgaatgcgtacaagataaatctgtattttacagttaaaatttgtacaaaaagtcaagccctgaagtagtttttcccccaaaagttctgatgttaaaactttaaaaaaaaaaaaagagaggtagtgtgtaaaaatatttttacttaaaatgttgaacccctgcaccacttatattataaatgaaagttaaccttctacatactaacattattttgccattcaagagtcaaatttataagactcacagaatgttaaagccggaatgccattaaaaatagtatataaatggaagaacttcggtgaattcaacaaaaagtacaacgtattacataatgtgcagtcagttaatagtttactgataatatgcttagtggtaatgtgaacaaaatacattgaagtattctgagtcaagtgatcttcacgtaatcaagacttcttcatatatattttaccatatagagaaaacatccttcaaagcggagtcatttgaatcttcattgttgtaatagcacacaattgttaaaaaggtattcatactagccctaccataaagttaattaataaataactctccataagccatagggaacttatgtacttcata

SEQ ID NO: 342985 - DNA, 1000 bp, Homo Sapiens
tttttttttttttttttttttttctatgcctgaaaatttatttaagatttatttagataaatatttgtttaaaatggaatagctccatatgagaaattatggcagagagcaaatatttcaattaagatagttgacagatttcagagcaaattacaacttatgttcatttggtagagaggtaaaatgtggggggagcatatatttggaggccagattcaatctaagaattggttggaactgaagttttccaactagcttcccataactcagctcatagatgagctacatcaagaatgctggttgatgagaatctggtgagtccagatgacagcctcagcagcaagaagcactagagcaggttgggcggcagcacatggtctggcagcagttggggcggcagcaactggagatgcagcaggagagcctgcagcagctgaagccacagcaggaggagctactgctgctagagatactgcaggaaggctggcagcagctggaaatgcaatagctggggtggcagcaggtggtcctgtagcaggtggtttgccagcagatgggctagcagcatagagactggccacaatggggcctgtagcacctggacacacagcagctggggcggcagcaggtggttctgcagcaggtggtctggcagcactggggtctgcagcagctggacacacagtagctggggcagcagcaggtgggctggcagcacacagactggcagcactggggcctgcagcagctggggcggcagcaggtggtcctacagcaggtagtctggcagcattggggtctgcagcaggtgggctggcagcacacagactggcagcactggggtctgcagcagctggacacacagcagctggggtggcagcaggtggtcctgcagcaggtggtctggcagcactggggtctgcagcagctggacacacagcagctggggcggcagcaggtggtcctgcagcaggtggtctggcagtagctgggacggcag

SEQ ID NO: 342986 - DNA, 1000 bp, Homo Sapiens
ttgcacattgattcccaagaaaccctttttaagagtgtggaatgactggacttggtgcagggcagtgcaccgcctggaagccaggaagaaccaccttgcccttgcgatgcaaatccccctgcgtgcccatgttcaggcgctgcaccaggagcttctcatagagtagtgggtggtacgccccgagggtgcaggctgcgtcgtagtacagctcgtggtagtggcacagctccgtctgccgcacggatgggatatattcatacacgtgcacctctctgcacatggacatcatgatgaggattccaatgaaaccagaagatggtgggtttggttgaatcttctctttagtgttctcctggataatatcccagagctgccatataaatttaggatgaagaatgtaaaatggctgatttgggtttctctgacgatgctgaatatatggagtgaacaggttgtaatccggttttttgtaccacaggttaagatttgcggaatatggggcagggtcccaggccaccaaaatgacgtctttatacagtgaactgtcaatgaagtgatggctggggttggtcagaatctgcgaattaatgatgcgtatggtggttttattcccaacatctttctcataaccacgtgtaggagcagagttaaatctcaaaaccgcatcatgagaatctatttcctcgcccaaggaagagttgaggattgcgcctgcagacatgacgacagcgcagctgcgcaggccgcgggggtgcagctggctcaggggcacggcgggcaccaggcgccgccagcccagcgcagaaaagggcgcctcggtgccgtccagcgtccgcacgcgcgcgcggctccgcagctggcacagcagctgtgccctgctcagcccggcctcccgcttcccgcggaagcgcaccccgtgcttgttggcggtcaggtaatccttcatcgccttctgcaggcgcgggttcagcattttggaagagacgttccccttccagag

SEQ ID NO: 342987 - DNA, 1000 bp, Homo Sapiens
ttttttttttttttttttttttttttttctggtgaacaagtacaaatttagcaattttaatcaatattcttgcagacaagtgtggatatgtatatgcatatatacatatatatatcaaaattgagaatttacaaataagatttgatacatttattctagcagtgggtaagtccatagagtaaatttcaagtaggatatatttattttctttggtggtgtttttaataattcctttctactgcatacaaagggacctgaagcttaaattcagttagttttggagaaatccaaaatgagaaaaacagaaagcatgtagcattccatgaagcaagaacagcgtgcatatgctattcctggaaatactgaagtgtccgaatttcatgcctaaaaagtctggaaatcacactgaatcagttgctggtttctgatgtctctgggatgtgctattacaaacaaacaaaaaaaagtagagaagcaaagttaacagcaaaactgaatcctgttcattgtccaggccaagaagtgggactgagttccagactgagatgaccagaatggccagtgtccatctatgaccttcctggcacctagggcagcggggctgagcacgctggctgtctttgctcacagcccctagtgcgacttagttggtggggctgggcagggcaagcttgcagcatgacggtcctgtgattaccactttccagggatggagaccccacactcgtaccagcccacatagtagtagggggttccgaagccgatgttcccaaacctgacaggctcctgacgatactggcgatagtagccttgaatagtagggagggcttctacataggactgaggccctgttcttccatcaaggtgtgaatccacaaattggcaatggtcttcacctcttccccagctgtctccaatgctgtagaatgtatctttcaggttgtcactgaggtagattttatacctcagtgaattacaaagaacaactcccacgaacttt

SEQ ID NO: 342988 - DNA, 1000 bp, Homo Sapiens
ccttagcaactcacttctttaatttcagaatccacagaggtaagtccagcttagaccagggggctgagttctctcaaatgaaatctgtgccaatatttactccaggaaggcaagagcccagcccttcaaggctcctgagatcaggaacggctggtggttaggaggcgctctcctggccgctctagctgtgtggggcaccccctgcatatgtggggcacacgtggcctatgcacaccacccacctacaagcttgggcggctccagtgggaaagacaggagagggaagcaacatttgattgaatctgagccaagagggccagaggctgaggaaggcacccccacagcagcctcctgagcaaacagcacctgggggctctacccagttgggacaaagggcgaggctcccagcaacagtaagggagatggcgtcctctgggagagggtggcctggggtggggtgacagggcttccacgccaccactgcaccctcggcaagaacgagcagatgtggagaagaggaatgccatcaatgcgccccccatctcgggtccctgtgctccccaccccacagttcttcctggagggccctctgcactcctcccagcaggctgctcggctccttgggccgctctgggatcccgtctggtgccactcctgaggtcggcacgtctgcatctgcactggctgcaggaggagaggctccctgcaggggtaaggcagcaggcactaaagggggaagggggctctggtggcccccggtatgtgcgaggagggggtgtgcaggcggcgcagcatggcagctgggtgtagaggacagcagctgctgggaagagctgcagtggagcccaggaggttctgccgggggagcgtctggaggcagcggacgtgcccggcgagcggtccctctggagagtccttgcaggtcaccagccctgcagctctctccctggccacgcaggatctttggtttaggcctcgtgggtcccttctgcctccagta

SEQ ID NO: 342989 - DNA, 1000 bp, Homo Sapiens; identical to SEQ ID NO: 160455

SEQ ID NO: 342990 - DNA, 1000 bp, Homo Sapiens; identical to SEQ ID NO: 160457

SEQ ID NO: 342991 - DNA, 1000 bp, Homo Sapiens
caagacaatgagaaaacgtctgacactttctggaatgatccagaaagtcctgtgttgacacatgtttaatttcaggaaacacagaagtcataatttcaatatcaatagcaaacttcacaacgaaactgcaccgaacgtcacaagagaccaaaatatttccacagttgatcttggacagtaagaaaaatactaataacagaagaatagccgctgttccagcagtccccgctcccgagggagccgctcggattcccaccgggtccgctcagagaggggcgttgtcctcccccaggacgcacagcccgcgcgcggccagcccactgctccctggcttctgcgccctggcgggggccgggtgggaccccaggcggagcagctccgcgtgtggggctgcggggtccgagggtccgggccggcgggggcggcgggggcggcgcggcgcgcaggggcagacgcggcggaaggcctgtcggaagtgcgagcccaggaaggcgtagagcagcgggttcagcgcggagttgctgtaggacatgcagtgagcccaggtcttaagcgcgtaggcggcgtagctgcgtgggtgccaggagcccgcggggcccagcgcctgcagcaccaggaacagctggatggggccccagcaggcggcgaagagcaggaccacggccgccaccagccgcgagaccttggcccgcacggcgcctgcgcgctctgccagcacctgcccctgcagggcgctatcggcgggcgcggggcgcacggcgacccggcccaggtggcgcagcatggccgcatagcaggcgcaggtggcgagcagcggcagcaggtacagcgccagcaggttgtacagtgcgaaggcgcgctccagggcgcggctggggaaggcctcactgcagtaggcgcgcggcccgggtgacaggcggtgcagggcgagcaccggcgcagacaccgccgcagagcctacccagatgctgaggctgacagccagcgccaggcggggcgt

SEQ ID NO: 342992 - DNA, 1000 bp, Homo Sapiens; identical to SEQ ID NO: 160458

SEQ ID NO: 342993 - DNA, 1000 bp, Homo Sapiens
ttttttttttttagaggtttacaataacacaagtttattattttatagttgtggaggtcagaagtctgaaatgggtgtcactgagctgaaatccatgtgtcaagagctgtgttccttccggagactctagaggagaatccgttcccttggcttttccaccttctaaaaacacctgcatttgttggctcaaggcccctcactccatcttcaaaattagaagcatggtatcttccattctctctctgactctcccttcctgcctccttcttgtgattaaactgagcccacaaggataacccaggattgtctcctcatttcaagatccttaacataatcacatttgcaaaacctctttggacatgtatggtaacatatgcacagatcttgggattaggatgtggacatatttcgggggacattattctgcctaccatagaccctgagcaggatgagcttggtttgggggcacaaggctaaaacgcagtttcctgtctccctaccagctctgttcaaagtaaaacttggtacgggctgagggctcactctccttggtgagctgtactggctgctggggctctgccgggccacacaggaaccagccaggccaggcagcagcctcaagcctgaaggcggagcctgagctgctctggaagaaggtgaagcgtgtggcctcttcaccacctttgtacagttcctcaatgttcacatcctccagctgtagggaaggcccctcttctgtctccacacatgccaggcagcggctccctccctggatccccaggaaaatggggaccttggtgcgggccaagcctctgttaggaagtatgcagatcttctctgcacagcagttgtctgcaacaggatctcccaccagcagctggccatctcttgtgtatagagccttctggtctgcatatttaattatgtagtatcttgccatggggagggaacacattcctgcaatcagtggtgtctggtcctcactgatggggaggagaga

SEQ ID NO: 342994 - DNA, 1000 bp, Homo Sapiens
ttttttttttttttttttttatgtgatcaatgtttaatattctgaggaataagtaacaaaatcaagacagattttttacttagctgggttaatttcctctgaattcttctaagagttaaaaatgaactatcacattgattgatttagaaccatcagattttacttctggaaaatctattacctttcaaaaagttataattttaatgttagcacgaaaattacttcctaacatttcattaaaattttgcagccaaagattcctatttttgaattacagtactgcaaggcacatacagaactcacctccttcaaaaccacagaagatatactccctgaaatagaattttaaaatccttgaacaattagaaatactataaagttagcattttttaggtaaaaatgttgctcctacaggatcatgcaactttcttaaaatcaattcagcacatatgtataaagaatcctttttaaaaacatttgtacttgaaatacagacacagtgatgctgaagacactaaacaaaaactgaaaagtactatatcttgataaattttgttattgccttctttagagactttataatctctagttgattttcaaggacttgaatttaataatggggtaattacacaagacgtaaaggattttttaaaaacaagtatttttttttacctctagcatcaattcttttataaagaatgctaaataaattacattttttgttcagtaaaactgaagatagaccatttaaatgcttctaccaaatttaacgcagcttaattagggaccaggtacatattttcttctgaacatttttggtcaagcatgtctaaccataaaagcaaatggaattttaagaggtagattttttttccatgatgcattttgttaataaatgtgtcaagaaaataaaaacaagcactgagtgtgttctcttgaagtataagggtctaatgaaaaataaaagatagatatttgttatagtctgacattttaacag

SEQ ID NO: 342995 - DNA, 1000 bp, Homo Sapiens; identical to SEQ ID NO: 160459

SEQ ID NO: 342996 - DNA, 1000 bp, Homo Sapiens
tttttttttttttttttttctcttactcttcacttttctttttattattaaaaagtcaaatgtttttaaatcatccatcctcaattttgatttaatgtaccgtcatttccccaagaaaagaaatttcagaatctctttggaatactaatttcatgtttctagatttaacaaaactgttgaagttttaaattccattctatttccctgaattctcaagacagttgctgatgtaaattttaatataaaatatttagtcacaaaatagtattgcttttgtatgcacatagttgtaagattactttgcttttgtcaataaaaactataccatctttcataaaactctaaacaaattaagaactgtgatgtagaacaaaaattacacatggtaaaacaggtaccagcacaacgttaggttatattacatcaaaaaaagttttaatggtcccaaatatatatactcaacaactaagcatacactcaggggaggaaaaaaaaaatcaaaaacaaaataaaacaaaaaaattatgacacaaatgaccacatctagaattccactcaatctttaatcaagtagggagaagtccccacttaaaaaaaaaaatatctgcagtttgaagggcaaagggaacagttaaaaaagaggaaaactttatactcgcccctcccccacagaggttttccaaacctgttgtagcttgactaaaatgttcagaatgtatgattttaaaggcaggtctctttatacaaagaaactgctggcattcttgactagtgaagaattatggcagaaaggcccattcttctgagtctcaaacatggtccaagaaagcatattctgattgtagcaactgaccagtcaatccagagttccacttacaaaacccctgccctgttggctttttgtttccatttccttccctgagaaaagggcaatgtgtggtccaagctggagagctcaaaggcttaagtctttcccctaaatatatgatatcccctcctc

SEQ ID NO: 342997 - DNA, 1000 bp, Homo Sapiens
aaccgttgcagaggtttattgagatcattaacagagtggaattcagcacccgccacagcagccagccatggggtgcccaagaggttggttcccgttgccacttgaaatatgcaaacaggtagctagaaaccatctgggcttgacaaagtctaatgccttgaacaaataagcttatccctctgaaaacaaaatggtgcttgtaatgacccacgttaaatatgttttattggccagttaatcattgtggttgaatacttgcctaaggcggtaagaaatcaaataagtaaatcctaaaacaggaagaaaggaatcatattcattcctgaattcagaaaactaaatgaacaggccacaggtcagaagtggtgggaagcaggcccagtggatacctttagacacatgtcctagtagggatgctcgggctttgcttctctgcggacggggctgtgagtctcagaggctccatctgcattccggggcaggggctaggctgctgagtatgccttggggtactgcagggcagtgctatgccaccacctgacgtggcagaaggctggtaggatgggctggcctgaggatggccctgcctggcagaggagtggactccagtggtcgagcttgggctaccctgcccgtctctggagacagattaagtggtggcaagacccttcctaagttcctcactccttctgtggtcaatgtcttccatttcccggagtttctgggagatttcagcaaggatgattcctcggtactgtttgccctgtcccagggcctccatgtcagccaggaattctttcctctcctggatttccttcaccagctcttcaaatcggtctagctcaggggctggagccttctgtcgtgcaggaggggcctttcttttccgttcctccatgtccttccccgtggcaaagatattttggagtctttgtttctccttctccaaatccctggtggcttgaggcttgaactgctcccggctgtaggccccattggc

SEQ ID NO: 342998 - DNA, 1000 bp, Homo Sapiens; identical to SEQ ID NO: 160460

SEQ ID NO: 342999 - DNA, 1000 bp, Homo Sapiens; identical to SEQ ID NO: 160461

SEQ ID NO: 343000 - DNA, 1000 bp, Homo Sapiens
agagaggtaatgacctttattgcagccaacacagggtaactggctcttcagagcactcgtttcttcatgagtgaactcttacctagttcaccgcttgcctctgtgacagtgacttctttcttgcgcaactggtagagtagaaggtacactgtatttagagcaaggagacctaggttcaagtccaggttctgctactaactaattagacaagctctttaattcattaagctttctaaaaccttaatttcctcatccataaagaaggcatacaatccctgtcaagtctatgtcacaagggattagaggattctatacaaatatgaagtggtatttatttatatttttctttccttcaggtcacctcactgccacgtcagagctggggaagacctctagttcaggaacagaaacagctgtgtccacaaatcccatatgcctcctttccatttatttcctctccttgtcatgctgccctaatgccagggggcaggggagacatgtgcaatggcatgaccagggaacccacagacctgagcttgctgtttcttggggataagcatctgggaaaacagcaacaaaaagatgaaaagccatccttctagagctcagctcaccagagtgtcagcttcagcctcccagcagaggctgaaccaggaacagccccaagagatgaggggaagagaatgctctgggtgtaggggagtggtgcggagtcctggagagggaattgaaggtcagccaaagagcaagccagtctggaaacctaaaggactctgtccaagtgtacaggaaccaggtggaattgctgagagtcctttttctggggaggcttacaggccactacgtaagacttgttctgtcgcttctctttgtacctgcagttcggatacttccctgaggtgagcttacacatggtcagggacacgggcccgtggctctggtggcagtttttatcgccattcttgcaggctattttgggggtctggcaggtggcggccac

SEQ ID NO: 343001 - DNA, 1000 bp, Homo Sapiens
tttttttttttttttgtcagtttatattttcttttatgtagatattatgggctccagagtttaaattagtatttgatttcacattacgaaaccattataaaaaagtctcaaattaagataatttaaggtgatgaacacacaaacgtacactttgaaaggagaaggcaatgaaaacatgcattccaataaagggggaaaatgaggctgatgtgcaacatagttggggaaattggtaagaagctttctgttaccacacagttgagtagttctaaaaaaacagagatatggtagaaaaaggagaggaaattttcattataaaatcaatagttacaactaaaagagaaacatgtacacaaaatatatccatcagtacaatgatcacacttaatcttaatcaatgcctagaggagatcctgtggagagggcttttgagtagcattttacttcattcattcctttggggtcagcctccagatggactcctggggctcttttagaggaagtgttcagcatattggaagaatccaggtcagcacaggaatgcgtcacaggcactgctaaatctacatctgctactttcacagagacctgccctttcagaattcccagtttctcactgagttcattcctttctatttgaagagccttgtacagcttctctaaccgctccaattttatttgaaagaccttataatttttatcacgaatagttttctcttcagccatttgcagaagtgttgtattattattttcccatttggtataccatattaccatctctttttccagttttttaattttctttgtcagcttttccgtttcctgcttgaaggctgtaaaaagttcattggtttttgccatggtagtctggaattcttcaaacttatccatataaaggaaaagctgctctttcagttgtgcttcttcttgtttcatttcttcatatttgtgcctcgattctgttgcttcttttaataactagaaaacagatacattctga

SEQ ID NO: 343002 - DNA, 1000 bp, Homo Sapiens
tttttttttttcattcaaccagcaaatatttattgaatgtctactttgtgctaggtactcttctaggtactagggatatcacagtgaacttaagtctaaaaattccttaagaggcagggtttgaattggtgattagagtaaagatgcatattcccctttctcccaacttttccacctagcagaatattctctacatagaaaatgcaatttgaccaatgatctcaaagcatttcaaagctattaaagacctctccttccaaaacccctgctctgctggggcaagtgacaaaaacaacactctcccatcatttcctctccttgtttgtatctcttccttcctcctacactttcagacttttggggaaaggggtaggagcccatgaggtgtattttatgggcaaatgatgactcttgcacattttgtaagtggtagttgaagctagtagtttttaaagtgaccccacagaggatttctttctgattggtttattaccaatcctttagttctagtgtctagggatatgcaaagtcagaaaaaaacagtcaccacccaaaagaaaatagtgcagacaagctggtaaggccatgctttggccacaaaataagtgcactgtgcaatatcaagtgtttcagcaagtttttggaatctcaagcacattttgacaccttattatgtggctcagtacacccaggatatgcaaatcaaaagtgtttgcccgcatacgtgagttgtatggcatgacctcctaatgctaagtggaagctgatttggtgaattcaccaaaactactgctatacatgtaatcgatgaaaggtgatggtgacctgtccgcctttctccttggcattgtttggtgagttagtcatatcctaaggtcactactgcctagctcttctcagcccaggcatatggctcctaattgctcctagtatgacctaaacatccctaacacaacagggagcaggggagcatgctagttttttcccaaagcagtggatg

SEQ ID NO: 343003 - DNA, 1000 bp, Homo Sapiens
tttttttttttttttttttttaaaatgccaaattagtttttaataataccaatactattaataactatgcacaggggaaattcattgttaaagaatgacaaaaagacatctgtaaattcacagtgatattttacaaatattttaaattgtacacagggttcctattaagttaatacaatatcaagtttcactgcccgattgccttacagttcttaactacaatttatggcaatagatcttattccattctgttactggagctaaaagaaaatcaaattcatttatgtcaaaatccacattgtaaacagggctaatgaatgaaaacgagttcatgctttttgaagaactcggtttaaactggtagccaaagcagttgcagttaaaactatgtccagagtataaatgctttggcagccttcaaagcatacaaatttttcatatatctgagctctgcataagcaggaacaagaggaaaacactagcatgctctcttggtgactacagcaagggactatgaagaaggaaaccgctgtgcagtcacagtgaaaaagagccaagaactggacagctccttaggtcttcctcaacggtcaactgactcagcctcagccgtgctttctctctctcactctgaatgatgacttaagtacatttgctttacaggggaaccgcaaccatagccaaaaggaccacggctagcaaacatcaaacttttatttccatctagaggtcacatacagatacatacaagtttgtttcaacttctgccatgtcgtctttttcatttttactttttagttgggaggtaactaaattgattattcttttgatatcatactaagatatttaaaacaggcctgttcactaacaagaaagacatttctttttcttcgtgttttaaatttaagaacacaaacataaacaactttagttaatatataaatgtcctttgtccatatttcactacctttattttctttcatgacattttatagatgaa

SEQ ID NO: 343004 - DNA, 1000 bp, Homo Sapiens
cggtacatcaacactattttatttacactctatttatgtacattaacatctttctaaagtcagtgcattgtcaacaagttttatacagtaatttacaaggtgaatgtagttaatagttaatttaataaattttctgctagttcatgaattaaaaaaattaattacaaccagtataacaaacacagatcaaacaacattagtagattgagctacctgcttaaataaaacatctgtaaagaaattatttaaaatcttccactttttaatgggaatggacagattttatatactgaaaatcttgaaactataaagtatgcattttgtctgactttattacattagacaatttaggccagtcctacctacttgcaattatattttttctgaaaaggatttcaatttaggtagccatttaagataacctttccaaatgctctgagaactagatattaatagttactggcctcagatatcagaacacaaatacttagttacattggtaattactatctatgaggaagaaagggtagtggaatctgacaattaatgagaatcaacttgcagggtctaaatgaataaacaaagaccaaaaataaggtgaaacatttccttcaagtatatattaaaaaactacacgaaaaaaatgctacctgaaataaataatatttatacttttgttccagtcttgattagagaaaaaaatgaagtaagcaaagaaacataactttcgatgactactgtaaaatttaaaaaaaagacaaatatcaaaataaaaaaattagtggacatgcaaacaaagcaaaactaaagttgacttcctaaaaccaccaatttcattaaatacacttatgaactcctaatgtctgggatgtgttttgtttgtaatttatagcccttagagccatcaaatacacacaagcaagttcatttgcatgtgttctctcttttttaaagtgcaagacaaacacagaaaagaacaaccactaattgtgaaacgtga

SEQ ID NO: 343005 - DNA, 1000 bp, Homo Sapiens
ggttctttcccagataggcaccacgaaaggtgcttaaggatgcaaaatagccacagatccatagttcaggttgaaagtcacaaacagtagcctttttgagaaacctcaaacaatggaataaaagattttataacctgaaggtaagtagccatttccaaatgtcctttgacctttgaaatatataatgtcttaagttttaccatattggaacgtgtaattattgtgcagtttatcattttaaaagtgaatcaaagaactagagactgagtcactctttgtatgaatcctcacctacagttacagtcttagagtaagagcttcaggatgctcttacacattacatttgtgtggttccatcaaatacgtagattttaatgcctgcaaagctgtgaggcctgaataaagcctctgtcacacacagtacatttatgtgatttctcattattatggactcttggatgtctattaatacttgaactcatgaggagtttgccacagtcattgcattttttttttttcctttaagatggagttttgctctttttgcccaggatggagtgcattggcacgatcttggctcactgcaacctccgcctcctgggttcaagtgattctcctgcctcagcctcctatatagctgggattacaggcgcacgccaccaggcctagctaattgtgtacttttagtagaaatggggtttcgccatgttggtcaggctggtcttgaactcctgacctcaggtgatccacctgcctcggactcccaaagtgttgggattacaggcatgagccactgcacccagccagtcattgcattttcaaggaatctctcaggcataaattctctgacgttgtcaaaggaatgaattctaactgcaaaagttaccaccttcatttgtaaggtttctctccactatgaattctgtgatggcttgcaaggtttgaactctgactttagaactttccacacgttacatttgtaaggtttcccaccagtatg

SEQ ID NO: 343006 - DNA, 1000 bp, Homo Sapiens
tttttttttttttttttttttttttaatgccaaatgattaattttattggttgttaattcattatttctacctataagggtcaaatgagagagttttcccattcaagcaaattggggctattagcagaagctagttgatttaaccacaccaaataagcagggttatctgctcagtggctgatattgaaccagaagcttttgacaaagatacctctggagcagccaacaactaagatactttctcagacacagaggcaactttcgtcctattgtacagtcactttgcaattagagaccctaaccccattcttctccaagtggggttgtctcatagacccccattccctgggtgcaagttatacattatctaataatacccaagattggattcaattatctactgcttgattctagtcttaattattttcatatttttcttcttggttagggatataacacttacagatatcttaaagatatccaattcgggctgggcactgtggcttacacacgtaatcccaacactttgagaggcctaggtgggcggatcacctgaggtcgggagttcaagaccagcctgaccaacatggagaaaccctgcctctactaaaaatacaaaattagctgggtgtggtggtgcatgcctgtaatcccagctactcgagaggctgaggcaggagaatcactttaagccaggaagcagaggttgcggtgagccgagatcgtgccattgcactccagcctgggcaacaagagtgaaactctgtctcaaacaaacaaacaaagatatccaattcggtcatgtatatctttctttgttttacatgctaatgacagtagtcttttactttcatggcaactcttctgcttactatatgataggaatggcctgggtaaaggatatgctttatagatctctggagttagctctttaatgcttccctcccctcttctgccctgcttttgagtggtgtgccttagcttgtgaaggattggttga

SEQ ID NO: 343007 - DNA, 1000 bp, Homo Sapiens
tttttttttttttttttttttttttttttttttttttctgactctcctagttttgtttaataggagagagggagggcccaggctgaaccacagcttaaggagtttcccactgctacagcgaaagacaagaaacagttcttcaggcacaaagccaagttagataccttcctggcaaatggcacatccacagtcagtcttctgcagccccagaacgccccaggtccacagtggctgctgggccctctggccacgagacaatgaccagcttacctgcgttggtcacttggctcctggctctgagagggacgggggtcttctgccacttgggatttgcctgcaagcacctgctggaccctctgcatccccaggcaaagccggtggacctggtctgagaagacaaagcgaaaccaaccaggctctttacactcgaaggccttgccaaaggacagcagcaccttgttgtccaaaaagcggcgccagagcagcatttcctcctcaaaggtgcccttgggcaggtactttctcaagtcaacccagatgaagaagccagccccacgactcaagaaggggatccccaatgccctaagctcttctgagacataggtgtgggcagccttgagccgggcatggttttccggcaggtacacctggttgatccagtcacggtcccggagcagctgtgccatctggtactggaccaagccactgaggccgtggtagcggcagagggaagccacggcagtggccacatcctggttttctgtgtacagcgtgccaaagcggagcccagacatcccgaagtccttgctggttgcccacatcacatgggtcctctgggggtcagggagcctttccaggcttaggacactgcggtacccaacagacttctcaaacacggacagcatgtagacctcatccacaatcacatgcagcctgtgcctcttggcaaataccaggtactcctgtagctcttcaggggagtatacatcacccagagggt

SEQ ID NO: 343008 - DNA, 652 bp, Homo Sapiens; identical to SEQ ID NO: 160462

SEQ ID NO: 343009 - DNA, 1000 bp, Homo Sapiens
ttttttttttttggtttgttgtcattttattttaagtaagaacaaattgtttgagtgctcagcatgcccttcatttttttgtaagttaatgaggtggcaaccacagttgagaacacagattggaggaggcaatattgtttttcccaatttaattccattaatgggggcagtgtggtattgggtagattctgcatgttagtcagagtcttcagattgctgttgatcttttggatcacatgaagtagaagttaaattcacatcttctttatatgaatttgaggaagctgaagtgtctggttgcacatcttgttctgaatctagattggacaaataggctaaacatgtgtcttgtactgagctttggccagaagaagaatgaaaatctgccttcacgtcttctgattgcaggtcccctgaggtttgccctatacatttcatgtcccctggtttgatgtctctagtgtacatatctcctttttgtgtaactctggattgaaggtcttgttggtctttatcttgagtgtcttgacattctaggttatgttgggctgttgcgtgctgggtttggacttcttggtatagagctttctgctttagggcttctttctctaatagatcctgtgtttgccagtgcttcatttcaaattgccattctcgtgctttataatctttgtttctccagccctgagttatccagtcaggggattcttggccaaaagattgacagtcctgggttgtccagcctggagattgcctttgtggaattgccagaattggtattgctgtatttgggattctgaatcttggcataacagttttggcactttctccacctgagcttgctgtccttcggcttgaacattttggaattgtcctttcggggatttcttctcttgggccggctggtcttcagtttgctgatcctgggtttgcttctttgagttttgctccttatcagtctgctggtctttaacttgtctatctttagattgtccttctg

SEQ ID NO: 343010 - DNA, 1000 bp, Homo Sapiens
gggctggtctgcggcctggtgatgtgattttggccattggggagcagatggtacaaaatgctgaagatgtttatgaagctgttcgaacccaatcccagttggcagtgcagatccggcggggacgagaaacactgaccttatatgtgacccctgaggtcacagaatgaatagatcaccaagagtatgaggctcctgctctgatttcctccttgcctttctggctgaggttctgagggcaccgagacagagggttaaatgaaccagtgggggcaggtccctccaaccaccagcactgactcctgggctctgaagaatcacagaaacactttttatataaaataaaattatacctagcaacatattatagtaaaaaatgaggtgggagggctggatcttttcccccaccaaaaggctagaggtaaagctgtatccccctaaacttaggggagatactggagctgaccatcctgacctcctattaaagaaaatgagctgctgccatcttttgtgggcagttagtcaggtgctgctctttgtggtgtggtgggctctggtctgttctgctcggtgctgggcctgggagcaaagattcccatgcttggctacagatactgacagctggcctctgaaggagggtgaaaacttctgcttgacagttccacatccatagtgcatggtctgatgagtgcggttgctgacatgggtttcttggtaagctcctgaggtaatggcagcctcagacccctgccattaggggccagtggtggtttgcagagggcagtggcacttagataatctggttgctggtctggccagggtagcgttcaaacctcctgttggcctcttcactgaaggcatcaccaatgtggcagttgtgcacccagattctatgtccatcatatttgcagttacatttcattgcattgttggtaaagtcactctctgctacttcaaagtttgggttgatgacaacctggagaatgtagtttcctggcttcac

SEQ ID NO: 343011 - DNA, 1000 bp, Homo Sapiens
gtataacagactatacattttctgattatagtaacagaaaaatgtgacatgccaacattaagaacaggtttcttaagaactaaataaaaattatcaatgaaaaacactatatgcatattgagcacccccagtattagtcatttttaacaagaacaatttgtagggtttaagatgtctatagttggataaatttttccaagaaaaagatatgtgacaaaaatagtgttatagacttatttctgccaaaatgtcttctagcatattgttttaattttaataacctaatttttaaaaaaatcaagaaataaagaatttagccagtgaaaatagcactagaggtttacacatattttccctctcatgttttagtattaagttttagtaccttctcacatcttgaaaagtgcaactttgaatttgttgggttcacatgtatcacacttctcatgttgctgccaagtatagatggatacagtgatatgtctaaagtcatattctacaaagtaaatattttcattttgaatcacttattttttctaatttatgttatattaacatagaaaatttaaaattatgaagttgaaaacaactcataaagttgtctcttttctctgtattcccaggaagaaatgactagcaaagaatttagaaagaatgattataatacatgtaactattaaataacatatatttagaaggaaatgtttcaattgtttgttatactaaaacagatgtttagaatatcatacattcattttaggatacaaaatatgctttcacattttaggcaataattactgaactattccttggattcatatatgcaacaatatacttttaggatctttgtttaataagataatgtattgattttaataaagaacatttccctttcatattgctcaataacaatcgtatgctggtaaaaaggattacagttaaaaagcagaataaaagaacaaatacaactgggcattagaataactacattgtgctctat

SEQ ID NO: 343012 - DNA, 1000 bp, Homo Sapiens
gggtgtgtgggctcatttatttgttctttggctcattcattcattcatcattcatcagtttcttgaatgcttgtacacacttatacatacacaggatagagaaatgaattggcaaaggaatataatcgacaagcatggggattaagggagcatggaggaggagcatttgtttcagtttgatatatcaggaaagacttcctggaggaagtgagctgaaactggccaagtgaagaggaggaggaaggtcatggcatgtagacatgtaggaagagaaatagaagtatacaccccaaactacacacagtttgggttggttctattctaacagtcctacccctatctgcaccccatcaactctctggaatcccaggtagcaaggccatagagaaggcacagatgcccaggagtcaacactttattttgttcaggccaaccacactgggagcccagcatccccgcaggatatgcctctgtgggctcatctcgcctcttgagggtggccatgctggctggctctggccaccggggaggcctggccagtctctctgtctccaagttattgtagagtcgggaagtcttcaagggcagcttcaaggaggctgaactggttcctacttctggaggtatttcttcattatgctcgcaacatcgtcgtctttcctccccgtccctggctctctccgctcgggggacgttcgctcgccaccgtcacccgcaagtcgtgggattcctggtcgacttttgatgctgtcagcacttttgaaggacacgatggagccggaggatgaggacgagtcagacaggtgagcgggatcctccttgggctccgggctcttcttcaaaatggtcttgatccccgagagaaaggaacggttagcctcttccgtttcaaagtggatgcttgaacgctgtgaaccgtcttgcccacctttggctgatccagccaaggaggtaggtgtctggggcttccggatagctgggaggaagtcatcgaagtcca

SEQ ID NO: 343013 - DNA, 684 bp, Homo Sapiens
ggagctttactggggttaagggcaggggaggggaggggccgccagaggctcccagccagggcggagcctcagggagacagctggggatgcaagtcacttcttccactgcttcttctcatagtcccagcgggaggccaggccctgcacaggattcaccttcatgtccagcatgcgctgcagctgctgggctttccgctcgtccgtcaaggtgatcggctttggaggaaatacgtagacccgctgccaccaaatcaccagagctgcgaatccaatgaagaagaagacacaacccatcactgtcttccactcattggagcgacggttcatctccgcaaaggtctcattgaactggagccggtacaaggccaccttttcggcgtgggtcagctgggtccagcttcccttctccttctccttcagggcctgctcctcagcgttgagttctgtgcagaagggctcttctggcatggggtagtagcgctgggcatagcagttggtgtagggggacatcttccccccaccacgggtggtgccttctgagctgtgcatccctcgtcttccacctccacctttcctcagcaccaagctccaggcagctctggggagcatctcgcgggctcggcagtgggagcgcgacctgggtctgcccagcgagcaactgagaacccgctgcggagggacctg

SEQ ID NO: 343014 - DNA, 1000 bp, Homo Sapiens
ttttttttttttttttttttttttttttttttttttttttttttttttttttttttttttttttcacggctcctgttttattgccttcgggtgtccggagcacctgactgccccggggtctaataatttaaggtgccgagaacaggtcaggacaaggggtcgcaaaagaggggctgggggcccagtggttacaaaatatacccccaccccacaacaaacaggctagaggagaccagcctggctggtgtgggagggggcgggcagagggcgcccgacccacctcagagagacagagccacggccagcgccgccagagggagtggcggagacaggagaaagggcccagaggccacccagggcccgaggggctcctcgctcctcggacacaagtgcacggaggtgtcggggaggaaaaggcgatgtggggccagccaaggcctggagcccctgctgggctgggcagagcagggctgggcagggcctccaggtccagccaaggtcctgacctacatgacgaccaggcccagccaaggtcctgagctacataacgcagcaccgggtcttgtgcgtgtgtgggtctttgaaccgcagcctctgtttgggccggtatttctccaggtaggtgagctgcttgctgttgatggctccgcggcgcttctggcggatgaactggatggcgtcctcgtacttcatcccgctctcaataagcgccagcgccacaaggactggagcccggcccaggcccgccacgcagtgcacagccacgcagctgccgggggcctcacagaacttggccttcaccaggctcagccagtcttccactaccttgccgggcgggggcgccccatcgtcaaacggccagtccacaacggtgatgccatccttctccagcggcgttttgtcataggtcacttcacacacacgcaccacagtggtagccccgtacttcttcaggtcctcaatgaaggtgctgagcgtggcgttggtggggttgtgggtg

SEQ ID NO: 343015 - DNA, 1000 bp, Homo Sapiens
aacacaataccatttatatatgatacacaagacaaacatatttgaaaggtacatccacaagtatgcaaacattcaaagttctggaaagacacacattaagccatgacaaccacagaagggctaaggaaaatttccatgttgaaacacttctggggccaggtgtgatagctcacgcctgtgatcccagcactttgggaggccaaggtaggcagattacctgaggtcaaggagttcaagaccagcctggtcaacatggtgaaaccttgtctctactaaaaatacaaaaattagcctggcgtggtggtgtgcgcctgtagtcccagctactcaagaggctgaggcaggagaatcacttgaacccgggaggtggaggttgcagtaagccgaggtcgcaccactgaactccagcctgggtgacagagcgagactctgtctcaaaaaaagaaaaaaattagccgggcatgctggcacatgcctgtaatcccagctactcaggaggctgaggcaggagaagcgcttgagccccggagatggaggttgcagtgagccaaggtcgcaccactgcactccagcctgggcaatagacagaggagggaagggtaggggaaggggaaggggaaggggaaggggaaggggaaagggaaagggaaaaggaaagggaagggaagggaagggaagaaaataaacacttctagatcacctgagttttttttacattcctttggtatttgcaaaataaataaaaaactacgaaacaaatatactgagatcctcctatctccatcccaacccggatgccccagcatcaagggtcgaacgggacctccattcagccccattccagggcctgaatctccagggagtccctgcagggatctcactacctctcagctgtgttgcttcactatttgagaatcaagttctttcccaggcgaatgagaatcccaattggcctaaactgtttccagatcccccgaggctcctgggtctccacgcagct

SEQ ID NO: 343016 - DNA, 1000 bp, Homo Sapiens; identical to SEQ ID NO: 160463

SEQ ID NO: 343017 - DNA, 996 bp, Homo Sapiens
tttttttttttttttttttctgctcagaaactcattgattttactctgaagcacccacgaatgacagattcccaggaggggcagagaaggctgagcagcaccacgtggggctggccgcgggttgtgggcatgagcacgcctggagaggccatggggctggtgacaagctctggccagaagaccccaaggtctgatcctggggtctgatccaggcctgcggcactgggtcctaggcagactgtctgcctggtgagacgtggaaggagccagtgtccgcagccgtctcaggacgtcagagagctcggtggcctgtctccagcagcatgctctccagatgcagcctgctgtcgctctccacatagggctggtgcagccacatggacaggtagctcagggtgaggtcgggatccccggtgtgggcaagctccttggccaccgtgcgcttcaggagcagctccttcctgtacatctccaagagcttatgcgaaacctcatagaaatgggttgtaggccacgtgtggaacagagggggtcgtttactctcctccccataatggtagttttctagttcacaaattcccttggtagttgaagacagcttttccattttcacctgtattttggtcaacccatccaaggtggcctgcagttcctcacacagcttctccagttcctcgttatattccagacacaccttttcttcattttccttcgaggctgggctgctgctgtctagttctatcttgtctttattcaataaactgattttcaagttggcaatattatttgcagtggtaaaacctgcatcattgagggtttcccacttcaggattaaattgtgccaatcagccgcattgtccttaatttttcttgcactgacagataagacaggttttctgggcgttacagttccaagagtctttgcttccataaggtccacagatatccgtagaaggagacgcgaagccccgcccaccccaccggaaacgcatttgc

SEQ ID NO: 343018 - DNA, 1000 bp, Homo Sapiens
tttttttttttttttttttttttttttttttttttttcttttttcattaaaaaaccatttatagtcatttcatgttggttggaaatcacagaaattaggcaggaaaaaaaaacccaagggaacaaatacaaacagcacagcgttccccacagttctctgctctgctctcctgcgagccggggaaggagaggggcagcctgagctcgggcgggggctgggcctggctgcccgcggctcagctctcctcgtccagggcctccgagtccccccgtgccctctcgcgctcctgccggtcgctcccaggcctgtccaggtcgggaccctcccgtacgtcgtgcaggtcttcagaggagccacaccttggcccctcctccgagtcccgaccctcctcgtgctccttgtcctctgcgctctcccccttctgtgatgtggcctcgccattcactggggctgagagatcggtgctgggcttgtcctccgccttctcctggggggcctcctccccggccagctcctccccggccagcttctcctcggccttctccttctccatcccagccttgttcactttctgcaccgcctcgatctttgggccgaggacccgcgacttgagccgggtatagacttctgctgccttctccattacgtccttgttcgctttgtaacggcgaatcttcttcaaggtggccaccacgtctgtgttcttctggaggatctgagaggtcacctgcagggttcccagctcctctagggcattcaggcacctcttcacgtccgggctgtcgacctttagggcaaacttgatctcactgtgcagcttctgcagcttctcctccacggagggctctttcttcttctctaccttcctgtccatcgagaagccctcggaccgcttccgggtccgctccaccttcacgggcttggcttgttgcttctcctcgggccgcactctcttctccttctggccaggtttcctggcgggctctgtgcttgaggactg

SEQ ID NO: 343019 - DNA, 869 bp, Homo Sapiens; identical to SEQ ID NO: 160465

SEQ ID NO: 343020 - DNA, 1000 bp, Homo Sapiens
tttttttttttttttttttttagtttaagcactcatttttataaaaatgtgttttattgttttaaaacaagtctataaaagtagaaatcacatacaaaaatacagattactctgacatgttggcaaaatagcttatggctggacttgagtttggaagttctgtatgtttgagggcatccgatgtcagagtccaaccggatcctaaccccagctcttgtcactaatagtaaagtttcaggtattatatcatagcaccgactgagtgataggtgttggaggtagttgagctggaaaaattcctgaaagcagtcattctttagcatgacactatcacttaagtctagatggacaagattggggcatcttctaactaaagtagagagatctgatttctggagattctttctgtagccgctaagattcagctgggtgatggtctctgacacatgcgcaacagccacctgtacatgcttttcagtgaaatcaaaacaccaggagaggttcagctcatccagtctggaacagctgcttagcaaagtctgcagggcaaattcagagaatccagaacacccagaaaggttaagtcgcactaaatttgagttttttgcgagagtattgacaatgggatccgaaagccgcaggccttccaggcttagattctgcaacttggaacactgagacagtatgccgtggagggtggacacttctataactgagttcgataggtccatgtgctgtacacgaaaagggctgaaatgttcagccaatggttggtccataaatgatcgtgggcagcggaaggcaatcaccccttgagacagcaaccgaccagtcacatccgggtgcagatttttacctgtgaggtctaaggtctgccatagagactcatcagacgctaggcgataccacctcttacaaacaccagagacctttagcagctcagggaggcacagacaggaaaagattcccaagagcagctcatccggaagggagtcccatg

SEQ ID NO: 343021 - DNA, 1000 bp, Homo Sapiens
ttttttttttttttttttcacaaaaagtattttattattcttaacagtactcactttaaaggaataagaggatagcatacattttttacagacaatatataaatgttgtacataattaacaataacttagttcactaatccaaaataaaacaagccaaataaaacataaaaacagaaaatactgccgattctttttcttatgcggacactagtacaaaataagttacttctggccgtggtgctccctgcagcgactgcccgcccatattgcacttggtcactacatcagcacaatcctcctcctgggccaggggcccctcacaggccaccacaccccgccgtcaccgcatacagaatctaagctcgggacacgtttatatacagctgtaccttgggaaggatccagacagccacagtaaagctggacctgagaccccagcagggacacagcctctccctgggtcctggtcctgacctgcccccaactcctgccttcaccccctgccaggccagcaaatgccaaccagcccccagaaaccaagggcagcaaaggcccctccccacccccagctttcatactagggctgtgggatcccagctcttttccaaaaagaattgcaaagctccaaccttgtgtgtaggttttattcctttcatagcagggctcctgtggctacgtacaatcaactggacccaaaaagagtttaaaaataaaacaattaactcatcagcgagttaagcctatgcatttttttaatattttttcttttgtctcagagtaggaggcgagggggttgaagggttagcagaaaaaggatgtatttacagggtccacctgacaagacaggctgtggcttgcgctcagtaaggggacacagtcacagcagcttcggcctcaaagccaagggagcgatctgggagacgtttcccctttcaagaaaatgttgtttccttcctgtgacccagccctggcctgggaatctgtgcaggaccgcccgtg

SEQ ID NO: 343022 - DNA, 1000 bp, Homo Sapiens
ttttttttttttttttttttttttttttttttttttttttttctataacaacatctcttactatttttacttgaaaaaatgttttgcgtagcagactgtcatagccttgaacgccggctccctttcttcctccctccaagtggctctggggctgttgatttccgcagagcttgggttggggtaggggctcagcctcaccagctttcagcagctggtctaggccagcagtgcctccccacctccccaaggggaggggtggtggcaagacctcagcacagtctgtggtatcacagggctcactggtagagcaggtagcgcttcatggcagggggcaagggcagggcagacacctggccgagccgggtatcccccaggttgtggcgcacacacaggcggctcaggtgcagaagggagtgtggctccgctctcctttcgcccaggtagcggatgcggacctggcactggccccagacagcgcttactgccggatagagggtcctgcccttcagtccgcggaatgctggccccaggtaggtgcccccaatagcgtagcccagagttccctcctccatgtccagaaccaccagcagtctctctggcacctccagctgctcaccctgagttcccgctggatactggggggctccgggccccttgctctgatggtacagcttcccccgcccgatgtcccagccccacgactcgctgttgctgcccagcagcgccgcgtagtggtcagtctgcagcggggcgagggccgtggccacgcccaccacggcatgcgtgcccctctgctctaggggccagctgatctcccaggcgtgcaggccccttgaatagcccctcttaccccgggccccatcagtgctctgggccacgggccgccgctcaaagtacaaccctccttccttgacctcgatgttctctgaacagtctttggggttccaaccgtggcgccgctgggcccccaggtcaggagggggtgcagacagcagctctt

SEQ ID NO: 343023 - DNA, 1000 bp, Homo Sapiens
tttttttttttttttttttttttttttttccatgaagggcatttaatgtcagagagaaaccgtacacctggggcagagatgatgagcacgccgggcccgccagcctgacccgttgcagcgtcctgtggtttgtgaggcctccctcggtggaggagtgacagcagcagctcaagcttcccctccccgggggtgggggaagacagtataacgtccacgcagcctggtcatgcaccctggcttctgcagcccaggcgcaaacattcagtttagggctttcctgacatgtcaggtcaaatggccccctttcctcttcaggtaggagctagtgaaccgtggaggatgaagaattctcgctggaaaggcaggcctgaagtccgggaggtgcagatctctctgtggtcactgggccagagatgaccttggacttctcattttagggaaggagccgttcctgtaaactgcagatgccgcacaagtgcacgtggatgaaagagtaagagagcaccaggcctcttacggaacccatctacattctggacaagaccctgaagacatcgaggttgaagctgagttcccgccaccttcatagggcctcttggcctagtggccaggatcacaggcagtcctctaaccaacaaagactctagacttccagacaagatcatctcctccatccaaccacaacctccctcctccaggccgtggtggacagacagtaaatatttccaagtccctacatcctgagagtcctcgccagagggagagaaaaagccctgtctcccacccaccaagaggagagaaccagcaaagtccactcctcagagatctccagcgtctcttaaataagctcttcctttccattttcatctttccattgtatagcacccacccatttacttatacaaatataaaatagatttatatagatttatataatatagacctttgtgaggcagagtgcaggggggccgggagcaggccctccgggctatttacagat

SEQ ID NO: 343024 - DNA, 1000 bp, Homo Sapiens; identical to SEQ ID NO: 160466

SEQ ID NO: 343025 - DNA, 959 bp, Homo Sapiens
ttttttttttttttttttttttttgggaaccagagaaagcgtttattgaggagtttgagggtgtgagctcctcctcctccccctcccagctgggtcagcagaggaaacaggatgctggggttttgcactcttggaattcagctctcagaaacctgaatgttcctcctcccccgccaggagctggtgcctctggggcacccctccctttcctcttcccaggcaggcaggggaagcggcattgggagagggggcggggagtcggggggcacaggtgttcctcagcagagggtgaagcgccgggcgctgatgttcatgcgcgtgaggcccaggtgccgcagcagcggggccagggctaggccggccccgggctccagctccagctccagctcggcctcatccagcagctcctggtgcaggtgacaggcttggtccatcttcagtcggtgcagctgggcccgcagccgcagcagctgccctgccagctgcctgtcctgcgcctgcatctcccgcagctcccgtcggagccactcaagggcggagtccattgagtcgaaaccacagatgtccccaggtccccctggtccaggtttggcttgggccctgcgccaggcctggctctggacctgggctgtccactccagatatgagggccgccgagtctgcagctgcagcttggctgtcagtgccttcacagagtccaggctctccccctcctcatcctcctcgtcctcttcacccactgcctggaatttcagtagccccagggacatggcaggtttgaggtgagtgacagggcagggctgcagctctgagattagggaaaggctggcagtattgcccagggagaggtggcagaagttgagggtgagaagagcgtgccagggagtgtgtggtggtcaatgttcaaggtgggttaggggggctgaatgtgccagggtgagtgagcagatgggtgtgtg

SEQ ID NO: 343026 - DNA, 1000 bp, Homo Sapiens
tttttttttttttttgggtgcaaggaacattttattccataactgtctccaccgaagccgcagaagcaaagccaggagcagaatccattctgccagcgctgggctctggggagacatctgtgccctcaccatggaggacagaaggcaggggcctcccgactccttggtcctgcctggggtgctcctgtccctctttcttgctgggggacctaccccaccctccccctcccacctcagccacagaggaacaagggagacaaactgagggctctgcagtccccgttcaaggccaacataatagtcgtgtggccccagcccagctaggcgcatcctctgcggcatggcagcggtgaccaagcacagccaacgtcagctccgctccctgccgtctgagagctgaccacaggcagatgagatgcccactccctgttgccataacacaggaaaggcgttggcggccaccctcccaagaaggcatggagcctgggggcccccagccaggcccctcaaggtcaacacagagctcagtggctcacctaacatctgggacggctgtgaggccagggctgggcagccctccctgactctggagagggaagaattgcaggaaggaggccctccacgtgcctcctcggccttctggcagggcgggcggggaagggactgcagagatctccagccctgctgctccacaggggactaatgtagtccaaagagcacactgaacagaacagcgtccagcacgtgagatgaaatcatcatccaccatataataaacagttcaaaaagtcacccccgggccagatggcacgggcggcagcacccttcatacgggatcgagctctcatggatgagggttcccagggcttgacccacttcctgagagcaggccacgaagcccatgccaggtggtcacggtcgcacggtgacaggctgctgccagccctccagtccccaaaccagtcctcggccctgcagccaggtttctggtcagtggaca

SEQ ID NO: 343027 - DNA, 1000 bp, Homo Sapiens
ttttttttttttttttttcttctaaattgttgcctttaataatttcattaattcttgtcaacaatttttatgggcctgcttattaaaaataaaagatctaagtggaaacgttgattagacaaaggtacctcccctctgagaacacctaacattacaatatgaaaacggtggcttcaagaatctgagttcttttaattacctgtatcagatgagtaaaaagacactccggacataatgaatgctttcttaacacaacagaaccacctacacacatgaacaggactgttcagggagcctggtttggtgtgaactggggctggctcccaggtggagcctgctcttagaacacaccagaaggctggaaggctctagtggggccgcttgcacacgcaacagtacagttttacttttttcctggacagtgcagacagtgccatcagctctagccttgcaggagggcacagtcattcttcagacttgcactcctggctctggtgctgcatcctggaaaggacgcgctcgtagaacagcaggtaggcgctggaggacaggacctcctgcaggctggccttgcggacagtgtcatcggagacccacagccactgattgctagttgagagagggttcctggcagaaggtggggaccgtcggtaagtgacaaagtgtccagagtgcatgtctccatggtggacgacaactgccatcagccggaagaggtatgtggaggagctgtagtcgggaacaactgggagagggaagggcatcggcgctgacagcgttggcaataaagatggggagcaggcgccattcataaaaatctgtgttttgggggcccctggctgattcagaactggtgtgggggctcccggcccatcctgcagctccagtgtaggccctgggttcttgttcagtttagggttgtgttgactaggtttatgtccaaggaggtggtacttgtaaatgtccatcatcaggaactcattgaactgcacgtgctcat

SEQ ID NO: 343028 - DNA, 1000 bp, Homo Sapiens; identical to SEQ ID NO: 246566

SEQ ID NO: 343029 - DNA, 1000 bp, Homo Sapiens
tttttttttttttttttttttttttttttttgaagctgacacaaaatagtttattgaaggaaaaacgaggggagaggagtcaggtgggaaagtgctggaatgtgaggagtctgccccttttcttcaggaactagagcaggtggggcgctgtcggagagcacccccagcaggttcagagctgcccagagtctctaggacaggggcagaagcagaagcaggagcaggagcaggcaggttggcctccgtcagcaaagctgcatcttcccaggagcctgaaccatcactggcctcaggctctagctcctcttctccgctcaggggctgctgatctggtttctcctcctcggacagctgaccctctgtccctgagggatcttcagggctctcaccatcctctgtaacatctgattgcggagttgactcctcctggccttcaggccctggctgatgagcagagatccttcgttggacttccttccgggaattgtctctttttcggatgttaacctgcaaagagaagcggtgtcggggccagatgcccccccacacccactgcatgtagctgaagagcacgatgacgctgaggaaggtgaagttgctggcaacacctatgaaggcgcaggtcatcgggaagttgtatagcaggtatctgagcccagtgaagtgcgcgtggatgcggaggtaggctccatacagctggatgcgcttgctgtggatctcaatgatcgctccagtggtcggcacgtacgagttctctctatagtctgcgtagagttccacctccagcagctgcttctgctctgcaaagccaaatagcaggaggctagagaagaccagtgtgtccagcatctggagcaggtctgagcggtaatgcagcatcaccgaacgcgaagaagtggagatgattcggccacctctggtgtagcaggaaatggtgaccaagaacatgcccaaatcttgattcacaggggactctggcagctcaagctctaaggtaaca

SEQ ID NO: 343030 - DNA, 1000 bp, Homo Sapiens
ttttttttttttttttttgtagaggtagtctcgctatgttgcccagggtggtctcaaacttgcgggctcaagtgatcttcctgccttggcctcccaaagtgctgagattacaggtgtgagccactgtgcctggccaggtaggttaatttatataatttcagaatagatacaaatttacgtttagcaacatttcaagcaccataaatctcatgttctttttggacatttaggagttattttccagtgctgatgtgattttaacatttcaagagcatctataatgctcacatataacaatcatagcataagattctctgattatagaataaaatcttaacatacttgcctcataataagatagggagattatcctggcttatctgggttttcacagtgtaatcacaagggtcctcaaacatggaagagggagacagaacactcaagtgtttgagtgatgtaagactgattggccattgctggttttgaaaggaggccccaaaccacagaatttgggcagcttctagaagctggaagggcaaagaaagacgctcccctagagcctccaaaaagaaaagcagccctgtcaacagcttgatgtagccccgtgagatgcatttggacttcagtcctccagaactgtaagataatgattttgtgttgttttaagccattaaatttgtgttagtttggtgcaacactcataagaaactaacacaattttacttccatatttgttatattcataggttttcattacataatactattcctggggttcaagatttcattaaacacgtccctccaagactctcaagacataaaagtatgatacatgagttaatttggtgagttgccatcatttcttactttcaagagtttttcttttctataaattctcccatattttacgaaaaatgttttccatatccattgcctctacagttgtctatgtttctttggcacacgaggcacaatttagcgctaaaagcaccatcacaat

SEQ ID NO: 343031 - DNA, 1000 bp, Homo Sapiens
ttttttttttttttttttaccagtaaactttgagtttattgctgggggtctttgaaggctgagaaagctttttcttggtgctctgtttgtgattcatttactcattcaacaaacatgaacagaacacagccgagttacggatttccattctggccccatcagagagtagctgtgtcgcctgtggtaaattacttctttcctctaatatcaacttcccatcagtaaattcctgtgaatgaactgccctactcacctaacagttttgctgacaatgaacgagataatatttctagcatagattaaatgctcattaaacccagctctgctcgcatgagatcaagtaccaagcacagtcctgtgagggactcagaggagtggggcagagcctccccaccaggaggaataaactggatgtgggcgcatgtgtaaacggaccaaacataatagagtggctacttggtggtccaaacactgcactggggaccaagggaattgagggcactctctcagcaggcacgtttttccagcacgtaggcaaggatgaccctcagactggtccttccgaccccaggcttctgggaggtgctctcagcacaggccagtgcccaccgacgcaccttaggaaatccagctgcttgaggagcccggccttctcacgctgtagactctccgtcacacggtacacttccatctccttctcttggtggagtttgcaggcctcttgctggaggctttccaactgctgctgagcatcctggagctcccaggaagtccgctccagctcccgggccagctcctggttagtgagtttcagcttggtattctcagccttggtctcatgcttgtcatgatgcagggctgtgcactgaccttccagccttttctgcttctgggtgagctgctccagctcctgctccttacataacagtttctgctccagctcttgactgcgggcttgaaacctctctgtgtccttcaggagaaactgctccttctcact

SEQ ID NO: 343032 - DNA, 1000 bp, Homo Sapiens
tacaaaagttcaatagttttgacactccccattgttaatcactacttcactgataaacttggaaaagtgtgaccctggaatttcatcatgcaaaatatttactgcagcaggagaaaacattttttaaacaacatttttttttcttttcaaatgtatgaacttgtttaagatagccaggaaggcagtggtaggataaacacaagggataggaatgtatcaaaaaacagattaacacacacgcacgcgcgcacacacacacacacacacacacaaaacctgtacaaaatgctccaatcaatgagaacagaaaaaagaaatcttcaactatgttacagtttaaaagcagaaaaaaaaagttagggagtttctccctcccacatgtcaggaaatgtcatccaatattcttaaagcaaggataactaaataaaatacatgtgcagcatattctgcaattccgttacatacagtagttttttttccaaagctatttttttttagtatcgttaatataaagcagttgcacaaaaagcaaaggtgttttgacaaacaggtgtatgcatttattcctttttaggaacaatatctaaaaaaagaaccgccctctgccctcccccaaaaaagacaaagattcacacagacacatcgggatatatgtacaacgtaataaaccccatcctaaagaagcaactgggataacccccaggggatacagaatcagaattgtaaaaatcatagtgaagtttgcttgctgtaaagcctgagaatttttttttcagttggttcttctgcaaggctgtgatacctgcaaagatatgtaaaatctaatttttcttttttttttttttttgctacagtctttagactaagcatgcaagacatacgactaagtgcaactgagtgaaatgttttttttttaaattttaatcattccctaaaggtttgaactgaggtatgcgtactaacagtttctcatgctgttatctttactcatgtctagcta

SEQ ID NO: 343033 - DNA, 1000 bp, Homo Sapiens; identical to SEQ ID NO: 160468

SEQ ID NO: 343034 - DNA, 1000 bp, Homo Sapiens
atacagaagctaatgtttattgaacgtaacagtatatttcatgtagcttcccataattttttcatgtactaactcatgtaattctttgttttttagagatctgaagtgattttacctttacttccttcactttaagccaatcatgaaatttcagtgatttctggggtgagggcgaaaggtggtgttacgaatcatcggggctgtggcccagttgcctcacggaggtgcaggtaggctggggcctcactagggcagctggaggagcacggactgccctgccggcaggcaggtgatgttccgagagcatgagagctggtatgcaatgtcttctgcagcttccagcttgcacagctcgctctggccgtcccctgcagtggccagtgagttggcgatcagctcagctgccttggagtcaccctcagcagagatgatggccgccttttccaccacaaatctggcgctctctgcttcctggggggccacctgtctgttaactccttcaagaaggtcagatgtgtcaaagacacgtcgtccagaatgagcccaaaggtggctgctcactccataaggttgttgctcacctggctggagaccagctccctctgggtgattagttctccagcatcaaagcgagccaccagtgacttgaggatctccgtggtaatgaacggcagcacacactcatcgtagtcctctccaatgctggtgaagatgcgaggaagctggctagtgatgggccggaagaggatgcacagtgtgatgttgacattctgtaaatctttgctaccagtgatgactggcgcactacgtggttgagaacagcagtcaaagataattggtttttgtacacatgggatgagaaagtgagtcccttcccctaccacaatgttctgtactccacggaattggtcaaagatggcagctctgtgcccagcatccacattacataaggcagagttcaccatgcctcctgcaacagctaaggccaggccaaacttgc

SEQ ID NO: 343035 - DNA, 1000 bp, Homo Sapiens
ttttttttttttttttttttttttttttttttgctgcttataacaaggttttaataaaataaaaagttcaagtgcttccaatcccccaacatacccctttctggtgtgggggaggggagggaactccccaccccaatagcaccaggatagcaccatgagaaagatgaggtcacacccggcctccctgagacccacggggggtggtgaggggaacatgcctccagacaccccccaaccttccccccaccgcagacagctgcagagctgagagcgaacccagtcccctcgtgagggcagtctctggggagtgccaccccctacatcagttccacctcctcctgaggcctgtacttctggggagatgccgtggggtggcccctgccccttatggctttgctccctggggaggaaggggctgaggggggcggatggctcctgcagtcctgaggctggggcaggggtggggagggcagcaaatggccggggctccctgtgggagtgggggtggctcaggggtcagcagtcacaaagggtcagggctcagatccctgggggtgtccaaaccaaccccattccagggtcagagctatgctggagtcaagggtcagctccctcccagaggtccaagggctccttctggaggtcctgggtagcagctaggagagagaccctctctccctgctgggcctccccgtccggcctgtcacagctcttcaccgccgacatccaggtcgatggagccgtggctgaccaccagccgtaggcgcttgggtggggagaagggggcgaaggcgagggcctgcttcgggatcaggatggggcctggggtcccagcaggggctggggtagctggtggggctggggccaggcgacgaaggtccacacgcaccacgtaaggcagcccatagcgccgggcccagtgccagtcctgctgaggggcccagcgggcgtgggggggctggcccagggccaccagggcctctcctcgcaggcggcagtg

SEQ ID NO: 343036 - DNA, 1000 bp, Homo Sapiens; identical to SEQ ID NO: 160469

SEQ ID NO: 343037 - DNA, 1000 bp, Homo Sapiens
tttttttttttttttttttttttttttttaagctaaagaacaaattttatttttcattttccccaaacactaaaatagcacatggcatagtaattcagcacacagcataaactgatatatgcaatcgataatcccgaaaatgtttaagtttcactttgggagtctttaaaaacttatgtccttaaatgacctttattaaagttatcaacagacgacaacaggagtcaccttgaaaaattttagggtacaggatactgcaattcttagaatctgggaaactttttatgtgggaaataactcgatttgcttctctgtaactgagctacttttttctcgagctcatttttgtttaaggtaacactgctagggttctgagtttgagaagggatcttctaaaggtaaacttaatattgcaactttcaccacagggcctctgtctaaattgcatttcaagtggaaggaaaggggtatgagaagtgaaatcgaattttgctgcagaccaaaatcattctacaaaatgtagacatggtaacagcttaccacgaattcagcaagatttaacgccaagtacagtggtgtagactttacaagtatccacttccattgggtgatcagacaagtcaaaaggacacacaggatttgggacagtagccctttagaatggatgttgaagacagaacttcatggtaaatccgtatgttctaatctggtatttatacaggctatgatcgtctcctgaaatgtttcccaattctttatatgtcttttaaagcacaatttaacacatgccaaaaaagttccttccgcatcaactggctttgaatttaaactcaatttactttaagtctgccaggtcgtacaaaactacagcaggaacctaagggctgcacagtttgcatccagacttaatgcgaaagaaatcattctaagacaactcttaaaattaatctattggtattgttctgcttgtaccttaactatggcataatgtatttgctaa

SEQ ID NO: 343038 - DNA, 1000 bp, Homo Sapiens
ttttttttttttttttttttatctgtatgaaatattagttttaataaaacagaaccagtccatgtatggaggcatgggcataaggtcaacttgcactaaatgtaactcgtacgttttttctaaaataatttcttgagcattgtggtggccttatgtactaacccgaagctgaacttcctgggaagctgatccaatggagcacttggaattcaggggtggagtcttcttcctgggtcagagctggttcagggtcacatgctcttgaggtccctaaaggccacatgtgctgcatttcgcccagcagctcccatcacacctcctccaggatgagccccacttccacagagatacaggccctggagagggcagcggtagccagaatgcaggggcacggggcgggcgaagtagagctggtccagggacatggcgcagtggaatatgttccctccaggaagcccgaagattctctccaaatctggtggtgtgaggatgtctctgccaaccacagagtccttgaagccaggggcatagacctcgatgcaatcaaacactctgtctgcataagcgtctctctcctgctcgtcccaggccttgcctccagccagcgtatagggcgtgtactgagtgaagagggagactacatggcagccagggggagccagggtggggtccagcgaggaagggatgcagagctcaatcacaggcctgtgggaagacaggccatccatggcatcttcaaaggcctgatgaaggaggagggtgtcttcacagttcaggtggatggagcattggtgatggggcagcggctggcccctgggagcattgggggccgccaggaagctgggcagcctgtctacggccacattgatcttggtgacaggcgaccgggtgtccagctgagagattctctccaggaactcctcaggaagccactcctgtggcgtcagcttcaggaaggtgatctgcggtgatgtgttggacagcaccattttgcttctca

SEQ ID NO: 343039 - DNA, 1000 bp, Homo Sapiens; identical to SEQ ID NO: 160470

SEQ ID NO: 343040 - DNA, 1000 bp, Homo Sapiens
ttttttttttttttttttcttttttaaaaaatttttattttagactcgggggtacatgtgcgtgtttgccacatggtacactgtgtaacgtaggcgatttgccttctagggcagtggtccccagcctttttggcaccagggactggttttgtggaagacaatttttccatagactggggtgacgggaatggtttagggataaaactgttccacccccgatcatcaggcattagattgtcatgaggagcgcgcagcctggatcccttgcgcgcgtgcgtgcgctggagaatctaatgcagtgctgatctgacatgaggtgcagctcaggcaggaatgcccgcccaccgctcacttcctgctgcgtggcccggttccaataggccaggtaccggtccgcagcctggcggttggggacccttgttctagtgggcctgacaccaagtagcgacgaacactgtaccctgtaggtagtttttcaactctcgccctggagcccgtgtccctgtctccatcttgcgtccacgtgaaccaccctgtagttccctcttattggcatttcattttctgtttctgggttggttcacttaggatcacggcctccagctccatccacggtgtgcaaaggatatgagctcattctgtcctttctatggctgctgcaaccctagtttctgtgggcagctgccagggacagtgagctggattctagcctgagacctggcttctggctggacccctggggttactccgagggagccacctccctgccatctggaggtgctgcttaggtgaggtggctgggagccaaagggcaggtgggcctggccttgggagcaggagggggagccggcaggaccgctacagtggggactcaccgcaggcgagccaggacgtccagcagctgcagcccgataaactcgttccgcagctgggtgcgcgcgcgcaggtcctcggggcccaagatgacggcgttgatcacgctaagcagggtgaccacgta

SEQ ID NO: 343041 - DNA, 1000 bp, Homo Sapiens
tagaaatatagaatttatttatattcataagacagtttcacattctgtacatggttaccagaacagatacaatactctcagtagtttacaacggcattatattgctgtcaaacattgcttatgctgtgtgagttggggaaaacttatttccccctctaaaaaaaattaaggctcagtttccaaaagataattatatcagtcatttttctgtttaagagactgggaaaattcgggaataaaaagcacaaaggggtggagggtgaggggtagctccacacactctcattcattcatactgaagttactcaatgtgattttttttttttaaggctccttctatctgaaaatgtgtttggttacaaaaacaaacaaatcagtagatgggaggggtactaggtacagatctacagcattcaaacaaggaaaactaagctctttgttaccagttgctggttaaaatgtggtctacgagctgcctacatataaatgcgcacacacattaactttgactcacttttctttggcgaagcttactgaatagtatttctcttccaacacactaatgacactaatttacatttccttttgactttcagagcaggtggccacaaagttgtcccttttcctaaatacaatcctccatttttcctttcaaccttgcagtagaccataaccataatggtcatcttgcactgatgtgtaatctcaccatttaagtgactgaagaaagtggcaaggctaattacagaaaaagagtttgggcatttttggagaattaccctatcgatgagttccaaacacacttttcaagcacttttttctatacaaatatttcattcagtccacagtgatgccatcattttacaaaagcagaatctgttttaactcagtaaaccaccttacaatccatggggctaatgttacaacaacaacaaaagccaaaaagggcacctgtaggttctgcctctggcataaagaggtagagacaatcattctgtag

SEQ ID NO: 343042 - DNA, 1000 bp, Homo Sapiens
gtatttttagtagagacggggtttcaccatgttagccaggatggtctccatctcctgaccaagtgattcacctgcctcagcctcccaaagtgctgggattacaggcctgagccaccgagcctggccaggaaatgattcttaacacaagacgcagtagcatcaagttctggtctggcatgactcctgacccttattctgcataaactgttcatttttaaagcattcctgtgctttggcttcaccactgggttctgtcagcaccagaaggatgcaacctgactggaatgcaggcttccaggagcaggctgtggcaaccccagcatctaagtggtttagtccaacttcagagcaagctgggctctcagaggcagggagcacagggaacaggtcccaggggcccgctgctccatcatgcagtacaactgctgagagctgggaaaggtgtaacacactgtgattacaaacacaattttaagagtccaaatttagttagctgtgtaaaaacagccaagcctatgtactttaatcaaaatcagtgcagtctcagtgtggtctttactgccatgagaaatcgccagcagtgcttacaaaacaccacggatttcttggccccacccaggcccactgaatcatctctaggggtgaggtcagtatcttatttttaaccagctttgaaaagcgacaggctggttctaataaaccagcttcttcaatctgcaggattttgatagaaaactccctcctagtgtatggaatttaactggaaactcaagttccagttgatcagaatttgactgacatgtcaccctatttttcagtaggaaaatgcttgtggtttcttcccttcctccaggtatcatgttcttttattccaccaccacttccctatcctgtagctggtagtttgtttacccttgaaaattgtaacctgattagcccaggtgggaagaagagacttccaggtaaacgctgaatatgctcaccttggaaaagctttgct

SEQ ID NO: 343043 - DNA, 1000 bp, Homo Sapiens; identical to SEQ ID NO: 160471

SEQ ID NO: 343044 - DNA, 1000 bp, Homo Sapiens; identical to SEQ ID NO: 160472

SEQ ID NO: 343045 - DNA, 1000 bp, Homo Sapiens
ttttttttttttttttttggtgagattcgtgtgacttttaatttattatgttactaatgtcttacagtaagtgtgaggagtaaagacagggatggggtaaaggtaaggaaaagtatttttcaagttccttgaactattgaagcatgtgctaggataagaaagttcagtaaaagcatcatgtccttatcaccagagctcttaaaggagacatggaacagagacggggcaactcttcagctctggccgaagtgactgctggacagagaacaaatcctgcatcagccttggcacacatgaaagactgggcaatgcagatgctacacagttgggcagatgaagagctgactgtccagaatctacttctagcaagcgagtaggcgcatgcacaccccttctctggtctgagtgtctcttcctctccggcaggaccccaccaactgtgcagccatggggtaagtgttagggaagtcttttagaaaagagaaagatgtctttcttatatatacgctggtagtgttgattgaccagaagtggtttcttttactttggggcggtagcattgtgttctggtgacaaaatatcctacacttagcactcgtaaaaggcataggagagtgaaagcaacgcctctttatgacctaggctagtgggaaggggaatacgtggattctaagggtaaggggatgaaaaagctaattctatatcaccacaaatgaactgacacataaatgacaccttggctttttccactcatagaaacactcacttcttctagcttacactactaaatctaaggtcggcttcatcacagtttgggatatttactgtgcttctaaagtaaaggtgaaaagctacatccttaatagttttttttcctaattaaatagatttgtgtaagctgaaagcctaaagtctagggattctttgcattattttatatgttgggggaaacccttaaaattcatcactgccatttttttaacctacagaattgaaagaa

SEQ ID NO: 343046 - DNA, 1000 bp, Homo Sapiens
ttttttttttttttttttttttttttttcactaaactgcatttttatttaaacaacattaattacagtctttcctcgtgcgtgtcctctttccaccttcaggaaggcttctggaactttagaaaaaggaaaggtttgttcaataactggccggatctttcccgcatccaccagttctgcaatgtcatctaaacatgggccactggccatgaaaaatgcccagcgataatggactcctttccagaaatgctttaatgcctttgaacctacagtgactcctgtctgcaacatgccatctgctatgcccaatcggtccatgttcaggaggaaaggagtcaccaaagtcacataggtggctcctgaccatttcttgagaaaatctggagcccatgtttcagtggatccgccaacattatcaaggataaaatcaaatggttttaaggatttcaactgctcttccacacttccagatttgtaatcaattacatcgtctgcaccaagcttccttacaagttcactggcatcttgggagcaaactgctgtcacatgagcatcccatgctttcattacctgtatagcaaaagtaccaactccgcctgaagcgcctaagattagaacacgttttcctgtgcaattcttgtcattcaggccaccaactttgtttatagcagaccaggctgtgagagccacatatggcaaagaggcagcttgagtatgagtgagtgatttgggtttgtgagagacctcattcccactgactacaacaaactctgaaagagtgccttgtttccaaggaggaactgcagcccagacctcatctccaggcttgaagtatttcacatcaagcccacattccatcaccacgccagagacatcccgacccagagtcagaggaaattcttctcctttgattttcacgtgtaaaggatcacgcttcatatttaaagctgtagctccataaccacttctcatattaacgtctataggatttacactggcag

SEQ ID NO: 343047 - DNA, 1000 bp, Homo Sapiens
cccgaggtttttttttttttttttttttttttttttttttttttttttttttttttttttttttttttttttttttttttttttttgtttttagcacaaatttattgagtattttgctgggcgctgtgaaagatgaatgacaatcactgagacattaatgtatcctctaagaatatataagcagaataatttttgttattccttgcagggtcacacatcttacttatccaaagtgtgaaaggaaaatatcttgggtccccaaaatcactaagctaaagggaaaagtcaagttgggaactgcttacggcatacatgcctcccattctattaaagtcattgctccgttcactgagataaatgcatatctgattgcctcctttggagagactaatcagaaacccagaagaatgcaaccatttgtctcttacctacctatgacccggaagccccctccccactttgagtcatctctggcttttccagactgaaccaatgtttatcttacatatgttgatcgatgtctcatgtcttcctacaatgcataaaaccaaactgttctgaccgctttgggcacatgtcatcaggaccacctgaggctgtgtcacgggtgcacatcctcaaccctggcaaaataaactttctaaattaactgagacctgtctcagattttgggggttcacaaaagtaactccacctttggaaatcaaagttggtcaactgaaagaaaatctctaggttgttggtcaagtccattccaaaagtatttgttatgaaatggaatgtcaccctcatcaggacttcaagccattttaagcagagaccaatatttttttcagaatatgatcattattgtcattgctgaggctatgctaattatagttactgatttgctacagttcggcaacactctgagtgggcttgtcctcccaccacttggttccctgcacgtgtctgtctccatgccatgctctcctcaggccccatcacacccctggcatag

SEQ ID NO: 343048 - DNA, 1000 bp, Homo Sapiens
tttttttttttttttttttaaaatcaaaatgtttattggagtgttgtacaaaaaagtttccagtcataaaatgtatattacaaatcattggaaaaaaaaaagaacacattaggcatgcatcttcttaaaaaccgaatctctgaaatgaaagtccatgccagccccagctgcagcccagctccgtttttgcaggttgtgctgtgacgctcgctggacgcagggcttggaagaggctgcaggcggcgacgccccaggactgaggagtccctcagatctttaacaaagaactgccgcgtgcaggcttcagaccaaccccagccaaagccgctggcatgaggacaggtgcatgatcggattctgggtcagcccgcaggcctcccggctcctgggctcagcggggcaggcttcagcgttaacctggcgctgtgcaccccagaacccgcgttggtccagcaggcgtgggcctccccccagggctgggtggcgtctgatgcttcgcagggagggcgctaggcttcgagtcacacggcacgggcttacacagagggatggtttcgcatcgttctaagcggcacacagctaagcgtatttggggacaaatgcaaattgtttcccaggccataaataacttttaaaaatttgattttcttagtgtttccaaagactcaattctcaatgaacctccaattacccacaggctgcccagtccacgcttctccccacccccttcagctaagggcacccgcagtcctaggaccacccccagctccacccaaggcaaatgtagggtggggggttctgtgggcctggggcgtgctgttttcaggacaggactgggcagcgtctggacatgaggacctgcgggttttgggggggactttgtccctgagcccagcctgcaaggctgtcggcaaatcacagaccaactccaggatacagctttgctcctccagagccaaaatacataggatgtggctgagaccactgcagactccccata

SEQ ID NO: 343049 - DNA, 1000 bp, Homo Sapiens
tttttttttttttagcttacaaacaacagaattttatttctcatagttctggaggctggaagttcaagatcaaggcaacgacagagtcggtgtttggcgacagctgttttttggttctcatacatgtcatcttcttgccacgtcctcatatggtggaagggtgagttagctctctggggcctttttaaataagggcactaatcctaatcatgagggctctgcactcctgatctaatcacttcccaaaggcccacttcttaatgccatcaccttggggattaggatttcaacataatggcttttgaggggatacaaactagaactaaagaacagaccatagcaccagctaaagactggtatgtcagtaagaatagctgaatgaggctggaaagagataataattagaagggacaaagtcccattccagagcccaacacctagggtttcattaggctggggtttctcaaactcagtacaactgacattttgggccagattatttttcgttgtggggtactgccctgtgcattataggatgtttagcggcacccctggcttctatttactggatgccagtagcacacacatcccaccatcccccaaccccccaagtataatgaccaaaatgtctccaaacattgcccaatgtcctctggggggcaaaattgcccccagttgagactgctgtattcaatccacttccattagttctctttaaatcacaacattctggtcgatataacagatagaaattcctgatctagacagcagaattctgttgtgttaagagagaatacacaattatagctaaactctaattctcactttatataaatttatttacactcacctaactacattattctaacaaaacactgggacaacttgtaaaagtacttatgcatatgtgcaggacaggaagagaaaataaagaatcagatttattggggtggttaagtgagatcatggatgaactgtttacttctattcagcagtagcc

SEQ ID NO: 343050 - DNA, 1000 bp, Homo Sapiens
tttttttttttttttgaatttttaagtttttatttaagaaataaacattgtaaaacatcattataaaacccccaactattgcaagttctagagaaatttaaaactagaacagaaatttaggggactagaaagagcagccaatggcacaagtctttacaattaattaaaaaaataaatcattctgaagatactgcatttgctctctcacaagcagcctcctgaggtaggtaaccttgtttactgatggggaacaaggcagtgttctttaccaaatctcagggcgggtagcctgcaagcctacagtgtggatgttggccacttgtgtcacttcttgggacggggcttagggacctgacttacttaggaacataaattttggggttggaggaagcagcagtgctctactgcggcacgacagacaccctgttaaggcaacactgggatccagctcaggaaaagcattattttcaaattgtgcaagccaatgcacagaaaagtggtcctcaaacttggggaacgtagaatcacttggggagctttaaaaaggtcctgatgtctgggacctacttcccaggttctgactgcattgatctgaggtgtggctcttcaagtaactgatgtgcagtcaagcgcgaggaccactggcacacaatgtttaaattctaaatatattttacttcctagtgtattgctactgacaaaacgtagttttctggactcatcagaatgttaggctcataccttctggcaataaattaaggtagttaaaagtaactgctgaacctaaaatgaaggcagcagcaattagatataaaaaaatcttaagatcagcctgcaaattgtaaactagtttacaaagcaggctatacaatgaggaataattcgagcttgtagaaatccatggtttccaccagatacaggtattccggatctagaattatctttctatttgcaggatttccgaagagaccgttaagcatctacgcgccccttcctggat

SEQ ID NO: 343051 - DNA, 1000 bp, Homo Sapiens
tttttttttttttttttttttttttttttgttactataccatttatttgatgaattaatcaatgttcaaatggaagaggttttgacaatgtcactatgtttgatgtttatacctgccctgaatgcttgctcagaagagaaacagatttcccagtattttttataacttactttcccattgtcttcaattaatttgctattatcccaagtagacagacaacttcagtagtagccatctccctacatttttagatcactgaaaaaaatggatgagcaacccatgaaaataactagcttactgaaatgcttgtcttttaaagaaaagttgggattatttaaaaaaaaaaaaatggcccaggaccagtagctaggagatctgggagagagaagtcattgccttggttctgacactaagtaacccttttgccttttgcaggtaacttctcatctaggtcctcagcatccttctctgtaaactgaagagtttaaatgactctaagttcctctctctctctctagatgttctctaacaccaagtttatgtgagtttctttggtcagattttaaccagagaccatcctccacgaaggtcaaagataattaattctgagatagcaggagttgtttttggcatgtgcagtcaacctttcaaaaaaccaagagttctcaagttaagctaccttcacgaacctcttattaaatttaagtatcactctctgtccctcctactttgctatgttcctccaccacctccctccaccagaaaaaaaaaaaaaaaagatgagaaaaatctcttgtgttttcttctttcttggttcttggaaaatggtgtgcaattacttcctcttcttccgtggctgcctcatgtcaccccatttccagtggttgagcttctctccaagtaggtagatgctggcgatgaagacgtagctgagagagaagaaagctgctagacccaagaggctgagtttggcaaacacaggatacacccaggtacccgt

SEQ ID NO: 343052 - DNA, 1000 bp, Homo Sapiens
tttttttttttttttttttttttttttttttttttttttggtttagatttggtttttatttgtattgagtcagggtctggctctgttgcacaggctggagtgcagcagtgtgatcacagctccctgcagcctcgaccttctgggctcaagtgatcctcttgcctcagcttcttgggtagctgggatgacaggtgtgcaccagtacacccggcacattttaaaaacgtttgtggagatggggtcttgctgtgtcacccaggctggtctcaagcaatcctcccacctcagcctcccaaagcactgggattacaggcatgagccaccgcacctggcctggtttagctttaaaaaaaaaaaaatctttcttgtgcttactgccgtgtccccactgcctggtgtgcggtgacattgggtgatggcggggcgttggaccacaggactggtgtgtgaggtgccgcctagagatggggtgacctggtgatctgggagtgatctggggagcccaggctggagacggggagggtagctactgcagctcctgccctggtgccgcacttctgtcccgggaggtggcgctggcccagactgtcccatcccatgcctcagggccccctcctgctgcactgggccagccgtgcttgccagtcccagcgggttctcggccccgcgacagcctccttgctcagagctcttgggcgatgcgactgggttggacagagcagatgctggccatgcctccactggggacatgcacagggcctggggtctgtggggacgtgaggaacggtctgacgatgacgacacacccagcatcagcccgcctccacctggaggcccaccagcacctggcccgggacccaccctctctccagaacctgtcgctgtgccccggacggtaggaccggtgatgggtctgaaaggcagctccatccactcctggccgtgcgactttggggacctggcttcctgcctaagccccggtttccctctctatagaatg

SEQ ID NO: 343053 - DNA, 1000 bp, Homo Sapiens
ttttttttttttttttttgagatggagtcttgctctattgcccaggctggagtgcagtggctcagtctcggcttactgcaagctccgcctcccaggttcatgtcattctcctgcctcagcctcttgcgagctgatgttttttaagatctgaagtttgatatatacagtcattaattcagagttaagactgcagaagtagatgaagaaattctggaattccttaatttatttgtggcagcactcagaatgcaaggtttcacaagtgtctccatttttttctcctttgcaattaaaagggctgtttaatattaagctttcacggcttggaagattcctgtgaatatttcaatactgtccagtcttaaagctgcagagaatcgggctttgcagaacactccactgtttttaatggcatgaatttaacagtgtttggcatggtgtcactgcccaacactttcagataactcaactgaagaagttgaccctatcttctgcaaaataacatgagtatatacttgagaaaagcctcaacatttttttttggctgccatttttagctacctcaaaggagataacagaaaaacaaggagtactgatgatggaagcatctggtccctcttgcagagtgatgaatgattttattggtggcagctgggtggcaggacaatccaggcatccagttatgcctgatccccaataagtgaaatctttgttcattttctttttatacacccgtctgcttcctaaaacctgacaccatttaatggtgcccttggtcaaatctaaatgatcttactttcataattctttgattctagcttgcagagtcaagacgaactctaactcatgggatggacaaactggaagatgtaaaataagtaaggctttctgggccaaaaagcctcttcttacagaaaatcaaattttaaaagaacattgacctcaaaacaataaaactgtcctggttatgcaatagaaatagctatataaatggaatcat

SEQ ID NO: 343054 - DNA, 1000 bp, Homo Sapiens; identical to SEQ ID NO: 160475

SEQ ID NO: 343055 - DNA, 1000 bp, Homo Sapiens
ttttttttttttttttttttttttttttttttttaacagttaacaccttctgtaagatgctttatttcattgaccaacaacatggggtctgaaaacccagcgggaggggtctttttatcacagagccagtcccaggcgagctgatgcatctctgctcctctgcccctcaggagctctcatcctccaaccccagctgcccccacagccccaccccattcacagaaagagggctaccacgtgcctcagcccccctgcccaggctgccagctcccaggtccttttggagaaggactgatctaggcagggaggagagaaggccaacccctccagggctcactgaggaaggccaaagcctttcagaagcagttcctgcagtgacgtaatccacagcctgggatctgcatggccctgagatgcctgcggcaggctggccaaggggctggtgtgaagaaagagggcagggcccataagctgtggccaacaggggcaggggccctgcctggagtaaagtgctctggcctaggctgcgtgggtttcactgccctgcagccccagcctcccttccctctgatgccaggcacagggagcctagtcctcactggagttgtcaaactcctcccagtcagacacactcatcacctcagaggcaaagtccgggtcggcctggctgcggtcaggggtcccgcggggcggctcaaggagcagggagcggggcagggtgagcacacaggccgccaggcctgagatggagttgtccagctggggcccttcctcccagcagtccttctccacatcgtaaatgtgcacgtagcctgtgcggctgccgcggttgtgtgagcggccacctaacacatagatcctgttgtccagcacagcaatgccaggctcaccgtgcccagcagggagtgggcagacagatgaccactgtccagacgtgcagctgtagcaggccacctggtgcacgtccctcctgtatccggcatcgttgttgctgcccccg

SEQ ID NO: 343056 - DNA, 1000 bp, Homo Sapiens
gccacattgagtattttatagacttaaatactggtttttcccctcatccagctttgcccatctttaacagcctcgtaactcccttttgtccatagtgttgcgtgcctctcatctgtggggaagtattatttaataaatgtatggtacaggataactttattttaatgggcatgggcttgtctatacacaaaggtatgtatattttcattataaaaaaccagtttaaaattttttcttattttaattgtttgaaatttttctagagccaaagaagctctttaaagaagttgtttcttccaaagaacaaagccaggttaatgacattcaattctaaatgatacattggaattgtgccttttctaccacactggattaaataaacttgtcaaaatatggttttgtcattttctgagacacttggtaatttgctgttctttctttcatgtgcccgttagtacatttggccaactgaccacctgtaacagggaggtctcatgtttgttagtagatacgcaggtaaggaaacttgaattcatcctctcctcggctcaggtctttgcttttcttttaatatatgcatataaaatagtaggcatttgattctgcaaaggcactagactacttgaattaaacattctgtccagagggataataccaggctttccttttcctcatctgtagtaagtttcaggtccttgacagaaatagctggactattccaaatttgcttcagtgcatccaaatgtgacaaagggaagcgaagtccatgaaactctgtttcctcctcatttcccatcatgtgtgtctctctactattctttaaggaatgatagatgtacaccatcttttcttgagcttcatcagattgatcttgatccggcagtactgtgaggacaatgtggtctttaaactgcagtctcactacactgtccagcctcggtaactttccacctggtgttgacagctctgccccatctcccgcagagtaaggggggagtct

SEQ ID NO: 343057 - DNA, 1000 bp, Homo Sapiens
gagacagagtcttgctctgtcacccaggctggagtgctgtggctggatctcagctcactgcaagctccgcctcccaggttcacaccattctcctgcctcagcctcccgagtagctgggactacaggcacccgccaccacgcccggctaattttttgtatttttagtggaaacagggtttcaccgtgttagccaggatggtcttgatctcctgacctcatgatccgcctgcctcggtctcccaaagtgctggattacaggcgtgagccacctcgcccagcccctaatcttggattcttaagcccaggctctttgtagcttattctccagtatgctttcctccaagcttccagttctgggcttccttaatatgcaattccaaatgtctggattttccagctagagatggggagctcttaactttctggctcctggtcccaggctccttaggattcaggactggttcccaggcaggaaaaaaacggcaggtgccaacggggtcgctggtgttgcctgagggcaagccaggcctgctgatttcccaccaggtagccctccgggctaggtccccttcctcctagtgtgctttgcagctgacctgtctgggctggagatgttccaggctggagcgggggctccaagctctccaggctattgaggcagctgctgggcaatttcgtggtctggacctcctgacaagcacagcaacaggggggcctcctgtggacttgagacttgggcaggggctgctgcaacagacacagtagggccccatccagctgctggaagatgctgagcatgagcagggtctggcggagatcaggggacaggctccactgctcctcttccagcaactccctgaccactccaaagtcttgtttgagctgcagcgctccctgcaggctgaaccgaatcccatgggtaagaatgtggtcaagccaggcacccacgatggccgtcagagcctgaccaagggcaggggcctgggcttgaggtggcaac

SEQ ID NO: 343058 - DNA, 1000 bp, Homo Sapiens; identical to SEQ ID NO: 160476

SEQ ID NO: 343059 - DNA, 1000 bp, Homo Sapiens; identical to SEQ ID NO: 160477

SEQ ID NO: 343060 - DNA, 1000 bp, Homo Sapiens
tttttttttttttttttttttaaaatcattaaatactttatttaagaacagtttgtttaccaagttaggacagtggttatgatttctcaatttacacatattccttttgaaaatcttagaaaaaatgtttcaccaatgttaaggtacaactcttgaatatgcagcgtagtcttctctctttattctgaataacagaagcacgtaaattaaattatcctctttgcacaattattccccccaaaactaatttataacatataattatctccctaaaaagcagttacaaaccataaattgaatatgaataaaatatgaaaaagagcacaaattttaaagccctccatgcaaaaaaaaattaatacattggctttacctataaaccttattttgttaatgctaagcacagaacccttatgggctcataggagtcagcaaacagctacagatgagtcttcttgttaagaattcattcaatgcttctcagaatagcagattttaaaaaatgaattcactgaggttcttaaacctctgaacataaggcaacagttcacaactgatttcagaaatagaaggtaagtattaaattacaaattctactaggtcagtgggagtgggcggattcacctggagtggagcagtgaaggtttattttacctctttcaagatctctccatatattccaccagtttgagataggctgggggaggaggtggaatagcttaaaaggttatatttcttattttaaagtataaaaacatacacttaaaggctaaacctatctataacctacatcttaatgtcagcaaaacatactgctttctacccaaatcaccaattgaatcagcctcgctcatgatttcagagcataaggtgtccagagaagaaaactcaagactgaatgggctgccataatggggaagtacaggtagccaaaggccagcaattgagacagcattagagaaactatctactatgtctgaataagctcccctaccttaca

SEQ ID NO: 343061 - DNA, 1000 bp, Homo Sapiens; identical to SEQ ID NO: 160478

SEQ ID NO: 343062 - DNA, 1000 bp, Homo Sapiens; identical to SEQ ID NO: 160479

SEQ ID NO: 343063 - DNA, 1000 bp, Homo Sapiens
tttttttttttttttttttttttttttttccttatgagtatatttatgtgtcacacacacatgtacacactcaatgctggacgggagggaggttgagacggacaggacaggaggaggcacccaggtggcactggcacaggggaggagaggggacacagcgagtgtgtggccccactttggccccccaccgcctcccaacaggaggtggacctggagctggaagaacaggaaatgcttattctcttagaggacagtttcaaagtgcagaaatttctcttataaaaatcctcttccctccatgctctgccccttgctgaagcccagccccctgcgcaggctgtccgtgaggctggggcaggacaaggtcaaggggaagggcgtaaggccaaagcactggaagggcccagaccacatgggcctaggcatagtggctgccgggcgtcagggggtggtcccctctgtggtccagctggtcctgtaagcgggcaaactccgccagctcgttgagctcctggaactgtcggtcagtcttatggctaaccagtgagcggtagaagtggacggcgaagacgataaagatcaggccgaagggcaccatgatggtggtcgaggcgatggcagctgcctggcccggggtgatgccgctggtgctgacgttggctgctgcgccactggcggggggcttgctggtgggccttggctggcctggctgcttcttgaggggcaagaacttgacccagcagagcagcaccacctcagctaggaagagcagcgtgccgatgacggtggagaaggcccaggccagctcgatgtggcggtgcatgcgctcatggggggactccttgaccgagttgagattgtgcacgttgctcaccgcctcgatgttgggcaggatgcaggtgctgatcatgagcgcaaacaggtgcacagccaccagcactgtggtgcaggcactgaaggcgatgagcagccccggtgggtagtcgtggtcagcgtccag

SEQ ID NO: 343064 - DNA, 1000 bp, Homo Sapiens; identical to SEQ ID NO: 160480

SEQ ID NO: 343065 - DNA, 1000 bp, Homo Sapiens
gagttaacaaaatatctttaataaaatctttttgtttgtttgttttgttttggagacagagtctgtcacccaggttggagtgcagtggcgcgatctcggctcactgcaacctctgcctcccgggttcaagcgattctcctgcctcagcctcccgagtagctgggatgacaggtgcatgccaccactctcggctaatttttgtatttttaatagagacggaggtttcaccatgttggccaggctggtctcgaactcctgactcaggtgatccgcccgcctcagcctctcaaagtgttggattacaggcgtgagccacggcgcctggcctaaaacccttttttaccacaaaatggagacctgtaaggcgaagtgaggttggatggctggacggtgggggtggggtgcagtcctggatcagggccggagctgtcacttcttcctcttcttgttgtccgggggcgcctcgttcttcttgcccagaatctttagaaggctcttggacatgtagtagggccggtccagggagccgttgttccgctccaggtcttccaggaagcagaggaagagcgtgtccacacacatgccgaaaacgctgaagaagccgctggcgatgacataggcccccaggatggaggtcatgatgggcagccagtaatagttgaggtgggggctcttaaagtctttacccagccccgggatgcgaccggagaaaaaaaagaaggacaggacccccacgcctccgaccaccagcagcttcccaaagaacagcagcaggtctgtgactttgtccaggacgaccaccctgacaatgtttcgcatgagtagcatgaacgcatttttggctgagacacagaaattcttcccgtagatggcgatcatgatgtatgcattgcggtttaggaacttgataaatttttccagacaccagaggcagcacttgaaacagcacatgatgcagcgggctacagggttctgcactcctctgagcttgtggtcaata

SEQ ID NO: 343066 - DNA, 1000 bp, Homo Sapiens
cttacaacatattcttttattgcaacattttcctcagtttggaaaactgtgtccccacacgtaggtccttctagaatattgtaagtcaatagaagaaggcctgtcgctcacacactgggattcccacctcgctggaccccaggtcagatagcaccagggcctgtgtttcttaggccgaaggtcctgcctccaggaaggtgggcttcccttcgtggtccataaagaaagacagatacttggatgcaaccaccaggggaacagccatcctccaatagaggcacacgactcacttaggcctgggcgacagccccaacgggatggcctgagaaccccagagaggctggtgtcccaaggactctgcccgagtacccagaggccaccatcaaaagggagcagggaggggcagggtggggaggtggggcctgaatttcttcagatgaactcatcaaccacttctgctatgcagatttaacccaggcagtccaagaggggctcctctggattggaagatctctcccaaatagaggaatcatttatacactgtaacatagtcggtggcagacattagtgcccagctgggcctccagacaagtgaccctggggttggccaggaaaccagaagcacaaaaccacaaagtccctcaagggccctctccccattcccagcatcagctggagttttgtcacttacaaatctgcccataagtaacctagaaatatgctgggggtcacccgcagaaaccccctctgctcgctaatgggtaagcagatggcaccccgcaaagagtcacattatctgcccttccttaaacacctccaatggctggcaggccaggctgcagtctcaacccctgctagccgtgtaaaaatgcactctgtcagggtggggtaaccagaagagcacatttatctagctctttcttcttaaatgaaacctgtggtatggagtaggatctaaaagtggaaatgtgctggccgcagtggctcacgcctggaatcc

SEQ ID NO: 343067 - DNA, 1000 bp, Homo Sapiens
agcattttttaaatggctttattaaaggctacaagtataaaatatgactaagttacaagtcgtcagtaagaatttattacttttgaaaatgttaattaaagaaagggagacgcaaagaaagggaggctcttcctgaaatccacacaggggggtgcggctcagacgggtgacagacccccgctgttcccagtagggcagcacccccaaacccagggggccaagggaggggctcccagatgaaacagaggctggttgctgatttcttgggggaacttttgtaaaaatgaagacactgaatccttgagctgaatcccaggtgcagagactggggggaggtggagaatccaaaatcatgctcaggtttctcctgaaaagtgtgtattttctaaaaaataaatataaactcctggtttgagaaactccctcatgatgaatgggaggaaaatcatggcaaatggagagctaagaaaccatcttcgcatagactttgcccaaggtgtagaggaagatctgccggtcaggcaggatgaagacccacacaggagcctgtgtcctccaggtcgtcccttcttccaaaagcacagcaaagcaatacaacttgaggactccctccaagatttcctaatttttgattttacatttaatctcaggaggctataccattaagaaacattattagagttattgctgggtgctgggccccagacgatactaagtgaggcagaagctttcaataattcctacagccctcagcaccaagaagaacttggagggaatattgggcttgttgagaaagtgggaaagaaattagaatttctcccaatagaagaggcagatcaccttggcctactctctaggacacaggtctttcttctgtgctacaccaacactacagaatacaaactcatacatatacatttgctaccataggttctacaacagccccatgccctccaggcagaaggtggaggcaggtggccgctgattctgaggatccctg

SEQ ID NO: 343068 - DNA, 1000 bp, Homo Sapiens
tttgggtttttttgggtttttttgaagcttttataaatgaggttaaacaaatgccaaattacggtgtgttagtacaagtctgtagcatctgtgtacagcaacatccatccaaaggcagaatcacagcctcgtatcggcctcgagtcttgagtcacattcatatcttaaaatacacgagtattccttttccgtctagtctcagttataggcagctacttcccagactctactttcacttctctctactttttcagacctggttcccatggcactagtgtagaaggttttagggtataagaagagggggcaataaggctaccctatcactatgacaaccaagaaggaggctggagcgtgaatccccaacgctgagggtggggagccatccctctctaccaaggtggcaatgatggagggaacttgcatgctaagcatccaggatgccatgcagcagacaccagggagcactgagccactgctggagcatttcctgcctctgccaggcggcctgcggcaaagtgtttcacataactaaaaaaagtcaacacagtctcatgtatgcaattaaaaaaaagctgtcaaagtataaaaaacccaagacactggaagctgaaagacaaggtgagtagtgagagccattctccaggcacacagtggagtgctccttctcagcagctccttgctttacagcacttcagtcctgagtccagcacggcagggcatgtgaggctgagaacacctgctcttgaagaacacaggcttctgagtgatgttgctaatgtccccccacaaatgggagcagtgtctccggcggatgaaaaatttaaagtcaaaattagaaaactgcttttgattcaggcgtttcactttcctccccgccaggcctttcacctggctgctccacctgacgttctttaaaaggctggactggccgccactccatcatggtttgttttgaaatgcgacagagcctgtggcgtctgggtgctttctctgtggc

SEQ ID NO: 343069 - DNA, 1000 bp, Homo Sapiens
ttttttttttttttttttttttttttttttttttttttttttttttttttttttttttttatttttctactttcttttaatatcattttttaaagttggtaagcagctagacatcatttagaagcagacgggttaaaatagacaagaaatagcaaagacacatccttcacatcgtacagaactgtattagtatccaccaccaccatcacaggggagggctagctgtcactggggtcaggagtactctccattattgtgcaggggaccagacagcatttaggtgtgacgatgtcaaactgagtggacatagagagtgccgggatcaaggtctacagttttggctctagacttgcgtgagggttggttactcttaatctcttccaggctgtgctggatcccatagccgaagtagatagcaaagccaatcagcatccagaccccaaatcgggcccaggtaccagctgtcatctgcatcataaggtaaatattcacaaagatgctcattagtgggaggagaggcaaagcaggcaccttaaagtgaaggggagtggagctctgtggctgtctccagatgaccacaatgatcccaataatgagcagcaggagcagcacaaccactgcagtccacaccaggtctccagaaagcaatggaactgaccactgggccagcaccaggcaaagagcagtcagcaggacagcaagcaatgaggaacaaacatagacaatttggccagagagtggagtggggatggagttgagtgggaaaaatagtccccatagggtcaacttctctgattcagtagttattgcctcctcctgcaactccacttcttccccagtctttgtctcctgatcaggttgatacctgaggatgagaacacaaatcgacaccagggagtaagcaagcagggtcccaattgacatgaggtccacaagatcagtgagtttgaagaggaatgccatgaatgctgcaataatgccagagaccacggtggctatg

SEQ ID NO: 343070 - DNA, 1000 bp, Homo Sapiens
ttttttttttttttttcacccatgaggcaattattgcatttattattcaccataaaagtgattaatatcattgtgctcattagtctttccaaggggaagataacttttatcccacagttgttattaaaacattatctatattggacggagtatatagaaacacaatagcaacacaccaagtcagtcacgactaacagtttatgcacacaggtgcaagatagtttctgcaccacattttgtctttgtaataagcatattctttcctcagtggctcactaaaacaagttatattttgtcttcaccactaatttactcagaatttattagtgaaccaaaagtttcactgttcttattgaactaaatctgagatatcatattgctgttttggcctgcaacaatttcagttactcttttgaaaagcaccttaggttttttcttccaaattgctcgtaattgaaaactttaaaacttctttttttcataatgaagtcataattcttcctttattactatcctacagccaggatgagttttcgtagctttaatgtactaagttgtattataacacatacattgctattaataatcttggtaagctaatcaactttttgctacaatataatccaaaaaagtatgtgattgataaccacattcattactgtgctatggaaaaaaaaacaagatcttttattttgtgaagttttctaagaaaatcatttgcatatctagaattttattttcaaactaagtggcatgaagaactgcttcaaactgcccccaaaggcattttaaactacaccagaatgtggagctacaataaaacaattttagcaacaatgcaggaaatacttggtactatgcctgtgtcaggttttataataaagtggcatgtcctgtggaatatctttttgtgttttgttttggttttatttttaaatcactcaccaagtatttgcttttttatactatcttaaaaactgggaacaaatactccctcacc

SEQ ID NO: 343071 - DNA, 1000 bp, Homo Sapiens
cacgtgtgcacagcgctttacaggttacaaagtgtttcacatacatcatctcatcaattcctcacaacagccctgtgaggtaggcagggcagggggtaatgttcccatttgtacagatgtggagactgaggcccagagaggccagtgacctgcttgaggccacacagcaagtgagcagcagagctgggaccagaggctggggtgggccccacctccagcccctggctctctccactgactgtgctgtcccccaggaggaccccagcctctgtccagagtctcagccacacccaagccaggctcccaccccttgcagtggtgccgcctggcagcccagcagacaggctcccacccccatcggcagacctgtcccctccacctgcgccctgcaaaaagccagcccggagctgggcccaggcctgccccctagcctgctcctgatggtgcctggggcggggtgggcaggtgggtggggctggaacctcctttcctgttttcctgagtgatccctccccactggggaagagaagagaaaggaggaagaagaggaggaggaggaagagaaaaacaagaaactgagttggaagagggccctggagcaatcaggacgtcaaaagtttgcattccgactagctataggaaatagtttttttctctttttattatttcaagttttcataaaaatccataattattgaaacccaagttacagagaaagttcgtaacttttttattgaattattgactctgccgcgtgtcggttcgtcggctttcaactccagtctgtcaatgcccctgtgtaggtggggtccccaggtctgggcttctgaggtcctggtagaaggagggcaggtggtgagggctggcggggggcagcaggggacggaggcgggagggagaaagagaacgtgtgtagaagggtagggaggaggtgggaaggactggagagtgagcaggtggcggccaggccccttcccctgcccggccgcccgggggtccc

SEQ ID NO: 343072 - DNA, 1000 bp, Homo Sapiens
tttttttttttcgtctcaattgtttattcgactcacagtcagtgcacacactctaccatccaaaagtcgaagctgtgacaatcgactgctacaggcagtgcatggatgtgtaaacaaacacaaatgaaaatgcaaatcagagtgggcggggccaaggcccactgttacattcacagcacagggtaagtgcaaaagaacaggatgtcaggatggggggcggggagcacagggtccttcctgccctggaggctgcctccaggcatcagcctgggaggtgggttagtgcccatggaaccctcctgcccaggaagctgcctccgggcatcagcctgggaggcgggttagtgcccatggatccggtgtctgggaaggggcccacagaagatgggccacacccagcatcatctcctctctgtggtgcgccctcccatccccagacccctttcccattcaggggagaggggccctggtcacaggagccagtcctctgacctcctgagtgtggaaacccaggaggggagtgtgtttctcctgcaggcctctcaacctggaaagggcagagccacagcagaacgcgttggggccacagacactcgctcaggtgaagacactgagaagacactgccgggctgacaggaccccgcggcggggggacgtcgctgctaacaggactctctgcaggcccaggggaggctctgcccccatgaggccccaggagcgtttgtgcgttgaactgaaggcaaagtgctgggcagtttcttgtcctaatgaaggtggggaagctggtccggccacatacatcctctgacctcccccaagtggtccccgggcccacaggtgacaggggcctgagcgatccctggtctgagcccccagctcagagcctagcaccacccagggaggtctgggctcatggaagggggatgggcgggggcaggagggcccagccccacctccgcccgtctttggtggtgacagaggtgggaggagaaaagacgat

SEQ ID NO: 343073 - DNA, 1000 bp, Homo Sapiens
aaagagggacccctttattacacatttataaaataatagaatatagttattaaaaatgggacactttttttcatttttggtatcttgtattcagtttttccatcctcttcacaatcttccataacttgctttttgttatccattgttcacctgaaacttccaccccaccattcaaagtacaactgaagaataaacgatctaacagattcttgtgagacacattatcagataaattaatccagtgacacatgaataaagatttagagtttttaaagaaatacagtaaaagcaaaaacatatgaagcataatttaatctgatgattcagaaggcacctcaagattgtgttgtgccgttttcctcatgctgcgtggttaggtgcctataacagaattctggttagtaaaattttgaaaaaaattcacatataattcacattaaacgactacagatagatacaatatgggcattttgatgtgtacatttgtacctgacttagggcacaatttataataatatactaagaaaactaaaattaattataaaatgagtatttttagcacacttagtaacagctacttgttttaaactattatttcatttttggtgaccaaattatatttgaccataattaaagaacacataaccttaaaataatatttaagaaacatagttacaacagacatgttacattaaatgaaaaaaggaaagaaatgtacatgtattaaagggtactgaggtttttcaaacccattcttttgaaaggccttttaatccactttcatgtaaaccaatttaaatttaaaaagtttatactcaagaggtgaaatcagtgttgagcacatggctgcctaacaaccattcaatgctgatcactgaactagtattttcatttgattatcctgacaaacataataattgagcccatgtatatatgcaagatgtggaggatccaactaataactgcagaaataaaaacactcaacttaaaaaaggttgaa

SEQ ID NO: 343074 - DNA, 1000 bp, Homo Sapiens
gagttggagttttgctctgttgcccaggctggagtgcagtggcgcggtctcggctcactgcaacctctgcctcccgggttcaagcgattcttcctgcctcagcctcccgagtagctgggactacaggcgcgtgccaccacgcctggctaattttttgtatttttattagagaccgacttagccaggatggtctcgatctcctgacctcttgatccacccgcctcagcctcccaaagtgctgggattacaggcgtgagccaccgtgcccagcttttcaagtttcttaaatccatgatccttagtaaaaacattttacacatatcttcatacaagtatatgtatatgtggtatacgtacacactatagttgtatatgcattatagctgaaaaaccagttcaacctttctacatgtggtatgttccaaaaattttaaatgtctttctaaaatgaggctcttttaatacgggtattactcaggctgtaatagtgggaaaatatttgttatatgataaaagcagcatatatcatttctgtgtaaatgccagtatgctcaagccatttatgcagagaaaaaaagaaaaacactgcattaacattttaagcagtccccttcccgatttgctattatacaaagtttgtttcttttacattgtaaagtgtatacaacttataaaaagactatactcaaaatcataaaataccagttaacttagcttctcagtttacagtggccagtgtggtgtgctctaaacactgctgcctgatccctccctctgctggtcagatttattactataaagtaccaatcccatttgtgttgtcctcaattggcaattatgaatggcagtgcattaaccattcaattctcaccactccatccccattcttctacttctgggtccttttgtccctccctttccagacagcccttggtaacctgctgctgggtaactaaggcatcccacaggtagtgttgaggtgttaggtgatagagtaaac

SEQ ID NO: 343075 - DNA, 1000 bp, Homo Sapiens
ccctcatgaactaaagctttattatgattttttttttctgatccctttgcaaccctgcacctaagccaaaagcattataatcttgtcatacttcagataagtccacgggagatgttccgagtgaactatagatgacattccactagggaattctatgttcagtgtaaatggtatcttgtataagttttagttttttgtttaccctttgtttcctgggctgagcttgtccagaaatcttgtcttcttcaggctacagcagcttagagcttgtttgtgtgtgtgtttgtttgtttgtcttaaaggtataggcaaaattttagtcttaacacctgtaaaccagtactggtgttgttctgtcctagaaattttagcactgctctgatacaataaagccttctttctctccaactggttcaacttcagcataggcaggatgtccagagcctcttctaaacttcatcgcaggccatctgcttgggcgtctctcaataaagaagatgctggctgctgatgttgggtggtgatacatatagactgtcacaagaatggctgtggctacaatgaggaccaggatgaggattccaatgatgaggccagcgtggagggttccccctttcttctcagctgcactgtcatctgtagaagctccattatcttttagatgtagtgctatcttggtatcatcttctgtagggaggctggtgggaaactgagaagtcactgctcttctggtggtagttaggaccctgaactgggtggttgtcgctcctacggttgtggtggttcgagaagaagtttccactggttctgtattctcacacatcttctcttttgactcttcagggcatccactgtccacccagtcctgccgatgacgatcaaatccactggaacatctttgaagtttactacaccaactgcagttgaagccaatctgagaagatacacaggggccacatctgttaaactggaggcatgtgggtaatggggtcatctccac

SEQ ID NO: 343076 - DNA, 1000 bp, Homo Sapiens
ctagtttgtgtagtaattttactgcataagaaattacagagattgcataaatcattaggtcaacagcatacagagaagaacaaaacaaaacattgtttggatcaaataaaaaacagcaggaacaactcaattcttaaaaataccacgaattccccgaatgtggctccatttgatagaaaattttgcattttctggataatgtctgtagttacattaagcaaaatggaaaacggccttcagataaacacactaaaaagcagcttacacagatgtgttgccctcttcaccttggatgtaacaaaaataaagatgtgaggctgcctgctcttgcctaaagcatggcttgaactttcaattgatagtaaccgcttatgaaaaatattacattacataatctcctgtgtattgaaattgcacaagtcagagcatccaaaaactgcaagagtcaatttcttcctatggggaaaagcatatagatatactatgttaaaacttccattcctcattcgattatttgccctattcaaaacataaaaatacaaataaatatttccttacaaagttcacagtatgttgttttaaaaaaaagagataaaaaaacttaatttgctttgtcattaaataaaaatgctaatatatagacatgttcaatatttatacaaattgtaggggccagtgtatcctttcttggtcataattgaagtttaatagtgctagtccatacacgacaaggctcagatcccaaatgtaagctcaattctactaaaagttgctcaagataattttttctctttttctgtttaattaaaaaagacatttttggaattttagaattacatttgagttgtctgaaaaaatacaatttcaatgaaaaatcatatcacgcattcaagagtatattgctggtgctataatctttttgcatgtctttgttttcatagaaaaaaatcagtaaaataacatgtctaagacttttaaatggttaaatgtaaccacatac

SEQ ID NO: 343077 - DNA, 1000 bp, Homo Sapiens
tttttttttttttttttttttaagagacaaggtctcgctgtgttgcccaggctggtctcaaactcctgggctcaagcaatcctcctgccttggcctcctgagtacaaaagtgcatctcaaatagttttaaaatgatgtgcaatatttagcaaccagtacagcccagcatcaaccaattagaagaagtgtctgactgttgagaacagatgcagccaaggtgtcaccccggtgtgtaccagctggacttcagcactgtgtagtgttctcaatatgaaaggaaaagctgaacagctaacaggagaagatgtaaaatatcttaacaactctattaaataagcaatcaaaaagcaaccaactgcagaacaagataattcatactgtctacattaaaattaaaattttcttttttttttgagacaaagtctctctgtcactcaggctgatgtgcagtggcactgtctctgttcactgcagcctccacctcccgggttcaagtgattctcctgcctctgcctcctgagtagctgggattacaagcatgcgccactgcacccagctaatttttgtatttttagtagagatgggatttcaccaagttggtcagggtggtcttgaactcctggcctcaagtgatccacccaccccggccaccgaaagtgctgggattacagacctgagccatcacgcctagccaaaattaagaatttctgttcagtgacggatacccctagatacaaagaaaatttcaattttttcccctttaaatcttttttttgagtggagccttgctctgtcgccaggctggagtgcagtggtggaaccttggctcactgcaatctccgcctcctgggtttaagcgattcccctgcctcagcctccagagtagctgggactacaggtgtgcgccaccatgcccagctaattttttgtattttagtagagacggggtttcaccatgttggccaggagggtctcaatctcctgccctcatgatctgccc

SEQ ID NO: 343078 - DNA, 1000 bp, Homo Sapiens
tttttttttttttttagcttaaacaaaacacatttatttctcacagttctggaggctgggaggtccaagatcaaggtgccagcagacatggtgtctggtgagggccgtcttcctggcttgcaggtggccatcttctcatcgtatccccaggtggtggagaggaaaaacaccatctctcccatgtcttttttttgttttgttttgtttttttttgacggagtttggctctgtcactccagctggagtgcagtggcgtgatcttggctcactacaagttccgactgcctggttcaagcgattctcctgcctcagcctcccaagtagctggaactacaggcacgcaccaccacgcccagctaatttttgtatttttagtagagacgaggtttcaccatgttggccaggatggtctccatctcctgacctcatgatccacccttctcggcctcccaaaatgttgggattacaggtgtgagccactgcacctggccccatgtctcttcttataagggccttaatcccattcgtgagggctctgccctcaagacccaataaccttccaaaggtcccaattccaagaaccatcacattcaggatttaagcttcaacatatgaatttggggaagacatatacactcaatccaaggcatgtcgtttagccaaaagttaaagttaaaggaatgaatcctgttcctaatccacctatcaggatacacgattcaattaaatgttgaatgttactccctagagaaacacagaggtgcccactccgattcccagtccccggcctcctcagcacagctgtggcaccgagggaatcttgtgatggtttctcctcccaacatcccctccctttagcctgaagttgtaaagcattaaaaagtcaaatggaggaagatggtgcacctagcatggggccgtggggggtcaggggaggatagagaacaatgttccttcattttgaaaggcagagatgctgacttgttcaaggtcccagtta

SEQ ID NO: 343079 - DNA, 1000 bp, Homo Sapiens
ttttttttttttttcacgttatgacaaaaacatttattgagcactttctgcgtgccgggcaccatgccaagcccctggcgcacttcatcatactggatccccaggacaaccctatgaggtagtagtatcgtaagccccattgtacagatgaggaacacggggctcagagaagtgaagtgacttgcccaaggtcacacagcaagtgcatggcaactcttggatttgaagccagatctgtctcatagctgcagtctagccgtgacacctgagtgcctcctaaaagctacatcacagagctgtctgaggatgctgtggggaaccgtctgtgaaaaggtgcaacacgtaaactccgaagagtttatggcaggcctcctgaagaacagcagactagaggctacccagaggcagcctggagacagagtggggaggaatgccctgtctcctctcccaggggccccgaccaccagcctagaccagcgggactctgggctgctcaggcttcagccatctctctcctgccaccatggctctgcccagaaaccgtggatggccctgcccccaaccctagaatgttgcagggctttccggcaggagaggggcacaggagggcgaccatgggctgaggtttctgaatgacattcagcaggatttctgccaatggctcgatggctcgcttccactggtaaggatcaccggtctgcccccaggggccctggacccaaacaggagcatcaggcctgcccaggaaacagacacctcaggtccgtcactcggaggcctggatgtagacgggcacagcgagcatggcacatgggccctcggccccagcctgcagctccgccagagccaggttggagcccagcccctcagcgtgtccaggtaccaccagctcagtttccgcgcccaccgcaccacccacaacgatggacagcaccgcgtccggctctgcgaagggcggcttgccggggacagcctcgggcaccagcccagcccctgtgtc

SEQ ID NO: 343080 - DNA, 1000 bp, Homo Sapiens
ggggagaaaattaaaccttatttatttttaaagtcaaaccactaggaaaatatatcacagcctggaaacagcaaacggacaggctatattataatttcaagtaataagttggtgaaaattcaacgaagttgctatcaaaacaataaggtgccatgctggggcaggaacactgccagctgcacaagccccaggcaaaaatggtatttggtaatgggggctgtctctcctttgctctaagggagtcagctcatcctagcccaagttgcttactttttctcccttgaatttcctgttgccaggggtttgtctcaattgggctctgttaattcagggggctaagtaggcaatgctaggtgtaggctttcattccatatgttctaataaaaccaggttttcccaaatccagtacttcatttactctgttgtaatcaagtagccaactgctcctcttttactgttcattcctagatactagtatatatcacaatcaaaacccccttctcttcaaggggaaagtgttactgcaagattgtcctgtcattttgttacacacagcctcaggggccatcagccagtaattctgcttcccataattagtgtgtcatcacctctcatgtttctgcacagtctccaggctgaaagatgcagcatgtaataattttaagaaatgtacatccacatcttgatgaccagaaatggggatccacaaggaacatttcaaagttcttatccaaactagtctacctcccagttccacatcttaaaatcaacttgtatgcccttgtataaattaccccaaatcaagaaaacaaagacccagaaaactttctttcccttctaagttagtgacctcattgattttgtttcacagcttatggaagatggtggggtgacacttttggtaaacaggatgttggcaacaaagagaaaatatctctcctcagactccaccaactctaacctgccagcctgttagtacctgtgtagtaagaagagtctg

SEQ ID NO: 343081 - DNA, 1000 bp, Homo Sapiens; identical to SEQ ID NO: 160483

SEQ ID NO: 343082 - DNA, 1000 bp, Homo Sapiens
agcatgcaactaaatgtatgtttttattatgaaatgtaatatgccaagattatgtaaaagatacagttctaatttccacaaagttcaccagtaatgggtctcccagcttgccagttaggaagtgctctgggggagccacgtggccaccacccaccccagcacactcagcagcatcgcatgtacacatggcctgagtgagggacaatgagggtaattctttggtagtgaccctcaagacatctctctctgtgcacttgtgttcccctgagctcagagaagacctaactccatgatttgatgtgcatgatgagactcaaacaagggctttgtatagattttttaaaaagggtgggttgggggggagcggaaaaaacctataaatatgcctatattcaaacattaactgttttacttaatatcaaatcacttcagtacaaatgtcaaagagaagtattattgcatctagtaaacctaagacacagagacacggatatactatactccagaaaatcacaatatctacctcaaaggtgactagaagaaagaccaagggtatttattaaaaaacatttttctttaatctggaattgtcatatgttccagagaaaagagggagaacccgaacccacaggcctgccacctatcagctaagaggcatctgtgcagatctttatcataatactttcctcaggttatttccaaatccaacttaatggatattcaactgacactcaagagtcagctttaaaaggactatagaacctcctaccatctgaattcttcattttgatacacagacttccaagataacacaataaaaatttttaggcaatatcaaatcaaagctcactttcagtcttgatgaaggatagtccttcaggcttaactacatttcttatacgggttccaatcacattatcttttctgaagagaacattttttcagccatttcagatctggtcatgatttcctcatctgaatccactaacactggaagagc

SEQ ID NO: 343083 - DNA, 1000 bp, Homo Sapiens
ttttttttggcaaaacattttattcacaaaatctcccattcctccttaactctctgctcaaataactcttaaggctggaagccgatgtttgatatttacacagctcaaaatctgaatacccactaatgtcttgtagctgttctacgtactctcagctttctactccctcctcccccatctttgttcttaaaacctaatggtaatactgtatgaagagctcagacgggatgaataaaatccccgccgtccctccccaccacataatttgttaggaaatcctacttctaaaatcatcatctttttttggagaatgaggccattctctggaatgaaagcaactggcacagaaatgactggcaatcgcaagtgatacacaaaggcatttttattgcgccggggaataaccactactgctctctttggttcacaagagtcatctatgcatttcaaaagatatcagtaagtcaatgtgccaaagaaattattacaacttctttcttagaaagtatcagtatttctgcttttcttttttcacgtatctctggctcccttgcaacttgcctcacttgattaaaattgacaaattttggtaggacggttaccaatttaagtaggtaaggctcaggggaggtgtctcagtatgatactgagatcagaccaacagacagtgatctccaggcatcagcttcagctgctacaagctaactgtaccaactatggagatgtaagggtggggctggtcaccccaagcagcctacttcaaaaacttttaagaatctttaatgttctattagggatcttcttgcactttcttcctgagcatcaaatatgtaaggtgctaactacataatactcttcccttctaccaccaggcaatccagagccaaaagtgaggtagcaggctgcacactgagcaatctctggtgtacctcctcccaatagtcgttcttccttctcttgcttggaatgttaaaaatgtttccccttatttgctttcttg

SEQ ID NO: 343084 - DNA, 1000 bp, Homo Sapiens
gagattgagtctggctctgtcgcccaggctggagtgcagtggcgccatctcagctcactgcaagctctgcctcccgggttcacgccattgccattctcccgcctcagcctcccaagtagctggggctacaggcgcccgccaccacgcccagctaattttctgtatttttttagtagagacagggtttcaccatgttggccaggctggtctcgaactcctgacctcaagtgatccgcccacctaggcctcccaaagtgctgggattacaggcgtgagtcactgcgcccggccccagtgactattcatgagaacaaaagacaaggcatggctgactctccaggttacagctggagaagaggggaaaggtgtttggttgtacaagcagctcagggcagctggtgctgcggcgtgcatgtgcggcccgagagcgtggcttcgggtttaccagatgccttcaaggaaaaggccagaacctgcactgcacggcacagtcactgtgtgtggtgggacccagtgtcggctgggaggcctggaggggtcttgcctcccttgtagtcacttggtgtcataacaaggagggcactcatttggcctgggccggcccctggccccactatccacaggccaggcccggccaatgaccttgcctaggcaggaagtcccccaggctgtcccctcgctgcctagggccatgggcaagctgcacaggctccggggcctgagccagagcccccgcctcctgctgccacagcccaagggagcggctgagtcagccttagaggccattctgtggccgagagctggaggccagtggctgcgggggtcggggaggggtcctttccccaccccggtggcccctctgagtccgtgtggccagggctctggctgggaaaagagaatttgagcctagcgtactttgcagcagccctcaaataactcagcctcctcaagggggcatctgatagatgcccgtgaacatgtcttctccggcctggccagg

SEQ ID NO: 343085 - DNA, 1000 bp, Homo Sapiens
ttttttttttttttttaataataaaatacaatttattaaaggaatcatgtttacatagatacagaacatcttggatatttcaacaccatagcaacacaaaattaatttcttcatgtataaaagatgtgctgaaagctgcatgcctcatcagtatttattttattggttatggctatagttgacatctttccatataaaaacaaactgcacagcatcacatatagagtacagacatcttaagttcattcacaaagttaatttttctaaactgcccttcaaaaatttacatctttgctcaattctaaacattcaacaaaattagcttcccaagaaacaaaaatgatacccaatttctttgcttttctagaagtaactttccatttgttcatgtattttgatatgttatattccccacccgaattaaaccctttgttaaaagaacaacctactttaggttcagtctaaaaataaagcgtactagattctggagtgtttttcaaatattttaaaatatttgccacttatggttaaaaaaaacgtgaataagaatatcatgtgagtgtagataggcaccatactatacactcctctcagaatcatttctagaatgtgtataatcccggcgttaagtgatggtgggaatgatttgcctttaaaagcctacaaattaaaaggggaaagatgctaagctagatgctggttttctgtaaagatgaatttgtgaaaaactgctttatggtctagaaatacgtaagcctggcattagctgatggcacattctaacattttatagcattaaaaaacatcgactcattccattggatgaaagccatggtgacatttttacaaaagctgtacccaggaatccactcaacgtcctctcttcaattgtcgtttttcatcaacaaagcctatatatatatatataaatgagttgctgtgctctcaccatggagcagtgttgatttgatgtaatgaagtattaaacgttctcctagct

SEQ ID NO: 343086 - DNA, 1000 bp, Homo Sapiens
ttttttttttttttttttttttttttttttttttttttttttaattgcaaatatatttattacaatttacagattagttatgttatatacacaaatataattttaactataaaatcccaactagttacatttaaattattgatctgtagaagccaatttagagtcttctagtcccctaactttaccttccttaaattatacaaaaataaaatctgatagttttgatttcaagttaaagatgaagaagtgttacatttcatcactcagaaatggaacttttacctgtctgtacaaagccttttacatgctacattgacacttaaagcaccattaacaagactttaaatgtataaaatgtttaattaaaacctccaaagattttctctttaagattacgggggtttaactttgttctaactagaattgggatgaaacaagaattttgcttttttctccttcagtccaactttaaaatagtcctttctgtccttcttatcaccttctgatcacttcttccaaggaggctagtatatggaagaactcttaatcaagctttcactcatttggtagtgaggttagaatcccatggggaacaattttccaaaatccaatgaaagatgtctcattattttcaaatacacagaggtgctaggtttaagaaacaggaaacacaacgttaagtctcggaaataaaatgtttcagcctggttttaaaagaatgcctgtatgttgtcaaaaggcttttttcaaggcaaatgacgcctgctttccaaccgacattgctgttgcttgaaactagcctgttttcatgttattagaccatcctgtaaatgtgctccctatgattacctaaagtggaggtgcacaaaacacacagaatcccagcactttgagaggccgaggcgggcggatcacgaggtcagcagttcaagaccagtctggccaacatagcgaaaccccgtctctactaaaaagacacaaaaaattagccgggcgtggt

SEQ ID NO: 343087 - DNA, 1000 bp, Homo Sapiens
ttttttttttttttttttgaggtgatggatagattagctttatttaatcccacattatattcaaaaatcataatgccactttgtttctcataagtatatacaactataatttgatatataataaaaaaaatctaaaaaggtagtctcctaacaatcatatgaagactatcctaaaatgtcctttagtaactgtcatggactgaaaagtatcccacgaagagacaatgtctactcagatcatgtgaatacaaacttacttggaacatgggtctttgtaaacataattaagggtctccagacacaatcaccctagatcagggtgggccctacattcaaagacactgtccttaaaaggtaatgaagagaagacagagggaaaggccgtgtgaacacagaggcagagactggagtgaagattgctgtctgcaatacttggacaagatttgtccagaagccaaagaactccaagaattgcacacagccacaagatattaggaaacagacatagaatgtctgtttatggattcttccttagagcctccagaaggaaccaactctgctgacactttgattttagacttctggcctccagactgtgaggaaaattgttgtaagcacccaagtttgtcgtcatttgttatggaagccctgggaagctaatacaatatgtatttcagaaaggaaatcccccttttaaaggattataatcaatacaatttgtctttggccatcatacatttcatattaggaattagtgaaagagcttcatcatttctagattgtaaacaataaccaacaatttgatgtctagacaggcataatgagtctctactttatcatttactatctatgcatttgtattttgacttagaattaaaattatattactgaaatgttaagcaacttttcaatcaagaatatcacctgaccatttgtaaatatttgctaatacattgttattaggttggtaaaaaagtaattgtggttttgccattacttt

SEQ ID NO: 343088 - DNA, 1000 bp, Homo Sapiens; identical to SEQ ID NO: 160485

SEQ ID NO: 343089 - DNA, 1000 bp, Homo Sapiens; identical to SEQ ID NO: 160486

SEQ ID NO: 343090 - DNA, 1000 bp, Homo Sapiens
gcattgttaaaatgtttctccatggtgcttttaatgaagtatatgcaactagtttaacagcatgacaattgttattccaagacatcttcagtaacttttgaaatagcaaatttaaattttaacatgttcttatatttaacatgtttgatattttcttctagaatatcatagcaaataaatattcaacatacaccaaaagtacttaaaagaagctcctttcctttggacatcaacttttaaaaacacgaacaactttttgaaagacagaatttacaaatacagaactgtactgacttaaatttggaatttactaattactggggatactttagtgagtctgcatatgtgtattattaatacatgttaaaccatactgcagataacaaaaaatatacttacatttctcttccagagagtaatgactgtattcaaagtctgagggaatgacaaaacgggatgcacatctaacactgatacacggttcttcagaaaagactagtttcagctgtttccaggtttacataagatgatggaagcagtctctaatatgttaatcaagaaaatatatgcaattgccagctactacatatacagaaaataaagatggtgagtcaaacaaaacatacaaacttggtaacttctcaccctccagatattttgaacatatttaaaaaatttgaagataggatatcactgtgatcttaaaaagagaactttaaaaataacacattatggaatagtaaaactgagctgctaaaaccaaagtagtaaacagttttcctgatgtcctcacactcttaactaaaacccaaattaaaactaccagctaaatttaatctaagtgttgactttttaaatgtcaatactttcaaacctcctttaataatattttaaaatatacataaacttaatacattacttaagagttaatctcatttctttgaatgtgggctttggcctaacttgcagaatgctggggaaacattaaaaaaaaaaaaaa

SEQ ID NO: 343091 - DNA, 1000 bp, Homo Sapiens
ggaactgtatgattattttattattttaatgctaaactgaacagtgaactgaaatcagaggagaaagaaaatcaagctagtggctcactctcaatagtgtcctctaattttattgatgcttcagttttcataaagtgcaataaacaaaataaatagatgaaaaaagctttgaagatttatatacagttttgaggttaagataaattactgactatattcctttcagccttttaactctgtgaaagctgtaacgtacattaaaagcacattgaactaggttaaataatgatctttcccccttagatcaatctagtattaaggagtatataattatgcaagttcattctataacacgaggctagactaaaaggaaaatttttgtgctacagactaaatccagatacggtcaggtgctgagcagtattcctggtttcaaaataggaggtatctgtttcatcatctggctgggggatgaaaggcatagtctgatgctgcagattttcccagtccacatcactgaagagaggatgacgttttagctctttcattccagctctctttgtatcatcaatggttaaaagtatttctactgcactttgagcattatcagataacttttcttcaccttctggccaagggatatctcttttcagaatattctggaatacttgttgtggtgtttcatcattgaaagggggaattcctgttagaaattcaaacaagcaaactccaagtgcccaccagtctaccgcaggaccatgggccctgcctagtaacagctcaggtgcaaggtagtctggggttcctagaattcgcccatcatcaacgggggccacccctcttctcacactcttcggagttcggtatggagttcccgacttgatctgatttggggtctgatgtggcatacaggatcttcttttttgagtaggggttatagccatgggatatgaaccactgtaggcacgcgaaatatccattgcatctaaagaagtcatgt

SEQ ID NO: 343092 - DNA, 1000 bp, Homo Sapiens
gccaggcacttttataaacatgtgacttaatctttcccaaaacccatgcaaagggcatccttttgtctccattttctattatatgtgctgagatgagcctcagggaaggcaagtaactcacccagggccacacagcccgtcacagctcagtcagggccccaggaaggacaatcccatggcttggggtgttgggaagtttgccttcattcagtcctgcgaagcctcggaggaaaggctgagcttggtgctgtcaccctgtctccctccaggtcacctccaggtcacagtgtggctggggctcttgggccttcagttttcttcctgccgagtgggttcaggaagagcaggctctgagtcactgggtccccggctggtgatgggggcttagacacgtgtatggtccattgctgccctccagggatgaggctcatctcaggaccgtgccctggcttctgtcaaggcggctctgtggttgttcggggcctactctgtccggccacagctctgggcctttttccaccagccttctttgagccctcccttggctttgggagcagcatgagatttttccatgcttccggctctgttgcccacaagctgaacagtgacttggtgtcagggtggcaaagagaataggtgccttactgggaatgggcagtggtgggggatcagggagagggaggctagagggtggacaggacctcccagcagcggcaagaacagctccagctcctgccttcttggaacccttctgccatggagccccccaggctgaggaggcctcatgggggccatttcgcacaccaagaggctgagtcacttgcccaagattgggcctctggtgagtgacaggcaattggaccggtcagggtgacccggggcacgcggtctcaccacctcaccacagtgctctcttcccacggcagcaccctgcctagaggatggtggctgggccaggcgctgcccccactgcctcacaggcctcttgggggtcagagat

SEQ ID NO: 343093 - DNA, 1000 bp, Homo Sapiens
ttttttttttttttttttttttttttttttggtacatgcatatatttaataatgaaacaattcatcaacagcaaaaagaaagtagaaaaattcgtaagacctcagggctgtggaagagaatgggacatcaaggaaaaaagatatatatagcaaccaacccagaaggctgcatgatgagtgaagcaaaggcaagtttggctaagatagtattatatgctctgaaaagagaatggctggataggtacccacttatgtgactgcttactagcaggcagccttactgtatgcctcatggaatggaggcaaaaagccagggaaaggtgggaggggagaaggaagagaaatgtataaaacccagggtaaacaaatgagtggggcagaattacagagagaggactctaaagtcttttgtttccttgaaagtctaaaataaaccttaagtttttaactatgtcagtcaaattcaatgaacacataatgagcagcactaggcactgtaaaggaatgatagggggaataatttataaaaataaaggaatgacatggatcctgctctcaaggagcttacaacttatacggaaagacaagattccacacaaaaacaactgcaaaccatatttacatagtaacatacataaaaataaatatacatataaatagacatatgaataaccaacatatgaaaactaaggaatattgtgttaataactgcttagcagtacctaagtctgttactaaagaaaaaatttttggacttttaagtataattagtggagagtagggcatgtgcaaaggtatggaactaggaataaatatgtcacattcagtaagtagattagcctgattggagtagaaagtctaggtctagttaagaagggagtttgatgaaacagtagaagtctatctggtgaaagacactacaatgttagatctggcccctaaaataaaatgaacagggaacaaatgttttctttaggtaataataagtggccacatgtcc

SEQ ID NO: 343094 - DNA, 1000 bp, Homo Sapiens
aagatgaaacagtgttcactcacaaatctcccagttgccgttgtgttccccaggcttcacagacagcctggaaaaactcctctagggcttgcagacttagctggaaactaatcctgagcaggaagcttggcttgaagggataagaggggaccctccaggttggcaatcacgccgtttattcgcacttggcagcaagacaatggatgatgtgggaggtgccaggcccctgggttggcactaatttggagtatggttgagacagggctggagagaggcatcttagaggtggcccccaaatccgcaatcgggagaaaaaggcaagaatcgactagagattgtcaggataaagggaggcactgcccacccctgctatgtctgtctgcccccacaggggcttctttaatacctggggttccctgggtgatgaatgtcctcctaccctggcaaggggccatacctgtcgccgtggccccataggcaaccctgatgaaagagtatcatttccaagggggctttggtttctgggtggccccacctcgtcgtggggtagatggcactgaaatgctaactgagcgagccctggaagtcaccagggggctccggaaggtcacccctgacgtggaaggcctgagatcctgaggcccatttgtgtggggggcactggtggctggatgaccagtgctggggacattcaggtgggtgagggaatgggaaagtccccgcttcagggggcgtgaagagtgtaacccacccatagataacttctgggagtctgccgctggccccggctctgtcttggagggaccagctgggtgaatggctcgcagtggtgcctccctggggcggggcgagtggctacccctgggggtaggtggtggcgtccacaagagagcacggagctttgcggcatcccccttcgccatccgcggggccccgaagctggcgccttcagatcgggagccaaacagcgactcatcacagtaagacggggtgtggctga

SEQ ID NO: 343095 - DNA, 1000 bp, Homo Sapiens
aggttgaacgctaagaaaagttttaattgtgcaaatgtggtacataacatttcaaatataagtggaaggatcatcagtagtgttatcaaaatgcataatacagaaactttttaagaaaggataaaaaattacactcaggacccataactcttcctcattataagcatatgtagtgattcattcatgcaggtttttatatgtagataggattttttttccttttcaagaattccattgtagccatgagatgaaaaatgtattatggtaatggtatagctttcttctattttgcttttagtgttaggtttgctaaaagcttatttaaaattcccaactgacataatgtgttttcaataaggaggacgctgccgtgtccaatacccttcccctgtcattgttcggtaccatatctcctggcttccttctacatgggtcacttagttaagagggaggccaagggagttccgatttcaggcagtgtgtggcagggttactgtcctagcaacctggctactcctcactgtgaacgtttctcataggtgtcatatggcaggatgaaaaacatatttgcctcccagtgaaagatggcacaggcttttgcccagccaggttggcaagagaacagaactcttaaccccttgctcgacaggtttgagttcaaggggttggatgctccaagcagagggccaaaccctgatttatgaagcatgctaggtcaacagccagtcagaccactcccacaaaggctgccacaaaaactcccagggaactgagaaaaatgttcagggtggcagaactctgtggcccttctgcctctttggagaagtgttcaaagtagagaatatcccccagccccacccagtgccatgggaccaaggcctttccatcctggtaatcataagttttaggggaatcagctgccctgggcctgccagggcatcacatccacagaagcagaagagaggagtcctccatagaagccatggaggagccggagatt

SEQ ID NO: 343096 - DNA, 1000 bp, Homo Sapiens
gtctgggaggtgtttaattccacctcgaacaacttggcaaggtcagcagagaagcaaatggataaaagtacttcacaacagcagaaaagttccatcaggggcgcgtgattcccacaaaaccatggcaatgtgtcctactctcaggaacccacaatggagggcggctccggaggattttccatgaggcagtacgaggcccgtacatgcaacgctgctgagccccgcctcaggcggtggtactggccgccccgagtccccgaaacagcgaccagcagggggccaaggccgacagccctgacccccgcctcctccggggtgtgccccactgctccagacaagacagaccccagcgtgcgggcatgggaggcggagctgccaggccacggccgggtttcctgctctcggagtcgagcagaggcaagtgaaacaaaggtcagtgaacaccgaggtccagagcagccgccgcctctggcacctcccgagtcccaagggcccgatacgagagtccttgcggcttcgtcccgcacagcgccctgcatctgagacaatcgtgttccgatctcctctccggtggctgtcgtcggctggggagggcctgggggaagagggtcacagcccctcaaagcaaggcctccagccagggccagatgcagcccagccagtggggagaaagcagctcccaggccaccgggccctggaaccctggacatgtcaccagcactgctgtgtaggcacagcctggagcatccactgagaatggacaagtcatcgtctgtggctttgctcttaacagcacgtctgaccctgctggagcctggctgagccccacggagtcacagccctcaacaacctgcagccccggcaccgtgctgtggaccagagccgacccggcagccacaccccggaagccgcttctccagacgggagcgcggttgggcctccatacaaaggctgcgcttctgccatggcgggcacaggacaatgcggtttgtcactccac

SEQ ID NO: 343097 - DNA, 1000 bp, Homo Sapiens
gaacgcttagtaaaatatttcattcagtacgtcttgtttttctgagagaggcaacggcagagggttgggggcagtgtgtgtgtatttgtgatgaacctaactcctcatgccagttctctcgagatttcttcgcgggggctgccgcgaggaagcagccctcgcccctgtcggtggaaagaaggaagagagttctctaccacagaccgctgtgggtgtagccactgggtccggctctgcagcaaacgggttgtgtatgtgtctgcagaactggggtgacgcccatctggtttaccgctcagggtgatggaatccagtgagctgattaggagaagcgctgtcattttccccagcctgggggtacccatcaaatcgccacccgtttgaggtcaagctcaggctccaataaccccaagcatcacgctaatactaagcactttccctgccctgggcggaggacaaagggggacaccacctcgccgtgcagcaccattgctgagccccccaggttaccccaggcctccctaggccagctccagccgagtcccagacgaggctcgcagtccagcctccgctggagcgacgtgggtctcccctaagctccaagagttctggtctcccgcgaggggcggagttccctccccagtcccgcccccgggcccagcccaagaaggcggggtccggagttcgggactaaaagccggggcggggccgagcttgtgcgccccgccccgctccgcctgcctggcgcgcggggctagtccgtgccgtccaccagctcgcacagcatgttctccagagccgtgatgcgctgctcctgggcctgcacccgctcgcggagggccttgatctcttccagcagcgtctccagggtgtgctgcgacaagggggcgtcgctggccgactggctgcggcgggggccggagggcgggcgcacgtccaggatgttgcgcttcgtgacccggagctcgcggtgcttggggggcacatagccgtccctcag

SEQ ID NO: 343098 - DNA, 1000 bp, Homo Sapiens
tttttttttaatttcatttttatttatttatttattttttgagatggagtctcactctgtcatccaggctggactgcagtgatgcgatctcggctcactgcaacctctgcctcccgggttcaagcaattctcccgcctcaggctcccaagtagctgggattacaggcatgcgccaccacgtccgggtaatttttgaattttttagtatagacggggtttcaccatgttggccaggctggtctcaaactcctgacctcaagcgatctgcctgcctcggccccacagagtgctgggactacaggcatgagccactgagcccggcttgcagtgtgcttttagacaacagaacaaacagatgatatgggaaaagggctcggattcacctggcttcaaatcctggtgctgacacccatagctctgtggccttggtcacgcctcttatcctctctgaacctcagtctcttcttcaaaacatggaggatgaccctccctgagggccttgctctgaggcgtaaaataatgaatagaaggtctggcactggggctgatgtatagctggtgccccaaaccatcagcgtcactctgatgattgttgctaaaataaccagctcaccccatgggtgagtgcaggaacagaccccaaaaacatctttattccatttcccgggttcccgaagacccccggatgccatggtgtggggccatggaagaaatgttaaggcattcaggagtgtggcagcccctggcagcgagtcccagagccagggtggacctgttctctagcagtacccaggggcaaagggtggcggttgttggtactcctccgggagctggtcgttctcaggctctgccaagccctggtgctctggcttggactcctgggaggatagggctctcactaccatttggtgccaactcctgtcccctggggtcacctcaatgcagctgaccgacctctcggccttcctggtggggacctttctgtcttttggtgcctggg

SEQ ID NO: 343099 - DNA, 1000 bp, Homo Sapiens; identical to SEQ ID NO: 160487

SEQ ID NO: 343100 - DNA, 1000 bp, Homo Sapiens
tttttttttttttttttttttttatgaagatattttcctttaatttatcaaacatttcacattcatgaagtcatttacttcagagcaaatgtaagcttataatattaaaaattaaagtattacaatatttacaagatggttggcaggggacacttactagtataaaaataatacaaatattgtattttcctcttatctgccagtaaaaatggcaaacagttttgtctttctgaagtttctagtcaataaccaaagatgaggagcccctaataaagtgccttgccctgtatgctccactgtctatagctttagaccctcaacattcttcttcaagttcagcagctctttttcttgccttcttttctccagtttaaatgctaatttgttagctttcttctccactcttcgttccttgcgctcttcttttatagcttgctttcttgctcttttatcttctttgctttcatttttagaacgtggctgagttgatactttaggaagatcactgccattaatcatctgtattctttcagtttgctttgctgtgagtcctttctttggtaagacattgagaggtattcctgttttagaagatattcgaatttgtttgggctttggttgatacttgataagctgtggatggttatataaatttgagtatgtactacaaatagattcacaatcccacttctctttggcttcttcaaggactacagtaatcatttcttcctcctcagactcatcaagctcattcattggcaggtcttgatcctccaagggttcaagggtattcaattttacacaattctctgccttctctttatagtagtcattcaaaacttcctgtaagcgattgctgtccacttgaatagaaccttccaattctgcattatccagagctccaatttcatcatcatcatattgctcataaaacttctcaaacctctcatcatgtagggtcagctgttcatttctcctcatgactgaggaagtcatcgaa

SEQ ID NO: 343101 - DNA, 1000 bp, Homo Sapiens; identical to SEQ ID NO: 160488

SEQ ID NO: 343102 - DNA, 1000 bp, Homo Sapiens
atctttaaaaacagatttaatgtgttaaaaaaaaatagaatcaagtggtgtgcttcgccactgagatgattgtgctgtggctccggggccacatagcaccagggctcgatagcagacaggagtttcggccctcgtccagtgcatgtgactggtgcaggggcggaggcccagccccacgggggccagagcaggaacacagccacctgttccaacaggcgctgtgccttgtatgccccgtacatgtgcctgccctgagaggagcatgggccaggcctctcttccagctgtgcccccagggtgccagtgaggcagggcgacctctcaccaacagagctcctccaagccatgctggatttggattcctggaaccccctgtacccatgcggtgggccaccccagggggaggggaggagagatgggagactgtgtgtatgtcccctccctccaagtgcagcaggagaaaggtcactgggctggcctggtcacacaccgtcataggggcctgctggggtatgcccgatgccccccagcctccgggccatgctgatgagtgagcgcaactgcaccagcctcagtggccccacctctctggggtcctggttctccagccaccgcagagctgtttctagcccccgcacggcctccccggcagtcggcactgaggtccctccatagtcggtggcctcctcctcgtcctctccgcccccaatggcagagggcagactggctggggccggaggcgctgcagggggcagggctgggcccacctcctccctgcagccctcgggcggacccccatcatcgtccaggtgcagccactccgcaacctcctccggagccaggcacttgtaggccagagccgccaggtgggtgaggtcgctgagcaccctgctgtgctcggcggcttcctcggcctgggccggctgcccagcactgtcctcgccgggccggggctcgaaggcagcccgcaggcccagcagccagcagcgctcaatgctgc

SEQ ID NO: 343103 - DNA, 1000 bp, Homo Sapiens
acattttatttttcatgataggagctgtagcagagtatatgggggcctctgccagcccccaggctgggactggggcctgtgaccttgagaacctcatctcacattctgcagactttggcggcggggcagtgctcgaccactggctgggtgggctgatctcagcctctcctgcaggcccagggctgaaatcataaccgtcaggcccagccttggccaaagataatgcaactttggcagggctggctgctgggagggggcaggcacttgctcctcgtagagcaagagtgggtttcttccctgaccctcccttccaccccggtagggtggtttccttaggaactcaggcctgcgggagaaatggttccagcttctggaggctgggtgggggtggggtgggggtgggtgtgggatagagcccagctcctccaagcctcttagggaagcggcctctttgcattcttgactctctgcttcccccgtgtggctgtgaggctggttgaagccacatagcagtagaggggcgtgtgtgtgtgtgtgtgtgtgtgtgtgtgtgtgtgtgtgtgtgtgtgtgtgttggagcgtgggttgggggagggctcagcaagacaggagctgaggcagaatcacagagagatggcccttatctctgcccccgccgcctaatatgcaacattagggcagctacgataccagctttggaatactcgcctatcaaggaatggaaagaagctgggctgggtggcttgcgcctgtaatcccagcactttgggaggccgaagcaggtggattacctgcggtcaggagttcaagaccagcctggccaacatggtgaaaccctgtctctactaaaaatacaaaattagctgggtgagttgcacatgcctgtaatcccagctactcgggagcctgaggcaggataattgcttgaacctgggaggtggaggttgcagtgagcctagatcacaccactgcagttcagcctgggtgacagtgagactct

SEQ ID NO: 343104 - DNA, 1000 bp, Homo Sapiens
ttttttttttttttttttcaaaattcccattgggtgacagcgtttattgaaaggaaatcttgctttatccaggaattcactcacatggaggtagctgcaaggagaatgtctctttctcatgacaaccaaagcgaccaaaccataccctaaagcagagacgcaatggaataagtcaacgggcattgtagaacgacactcagaagcaggaaaaaccataaaagatacaggatgattgtctcttcagtattgcatttggccatgtatgtgtttttacataaaatatatgttttctttttaagctagctaaagaaaatactcttgatcggggttagttcttaaagcaaaaaacagaagaaaagtatgtatatataataaaattaaagaacgatagcatgttatacctggaaaggaccgtgggcactaatctgcactttgttccaggtaatccatggctctgagagtgagcacactgtcaaagtcactggggtgagatgagccgggacttgaaaacccttctcttaactttcagtctcaactcttcccactccactataccgcatgcgttgccaactccctcagagtgtaggatagcgcaattgtcaaaacgcataacagcctatttttagggtaatgatgcaagtgttttgaaaagtgacctgtgttctctttgcatgggcagttttgcttcttgtagccagccccatggctactggaaagaactggccagaatgaggggcagctactttctcacaaaccaaaacagacacacactcccaaagttcttgggtgtgctgaccttccccagcagcgtctctaggtatgagtgggctgaggcttctctcagcaggcttactggcagatgtctaacgatgggagaagcagcagggaaattatgaacatattgagggtcaaagtgagctctagggaaccaggcttgttgcgtcctcagaaggacagacagagggctgagtacagaggtgctcaacctccatgtcgattt

SEQ ID NO: 343105 - DNA, 1000 bp, Homo Sapiens
cttaaaataaaattaaggctcaaatgttctattaagctctcattgcttatgtatattatattaaggcttataaatgcacctggtaaattaaattcaccctggattgaattaacacctgctatatgagttatttgctttatgtaatcagtaatctcaaggtttctcctctttctctggaaacacaatttaaatattaacctaatctttaaactgcggctgcttctttctgacatttggaaactggtcatccatacaaaaaaaggcaaatatggatatattaatgaaaaggcagcttctcaaaaatcttaaagtatgtaactcaatgaattgggaaggaaaatgataaaagtagcaggaaagtcaagtctttgtgtcactttctagggaaaacaatgctggtcatctgccaacaacacctccagtctgagagcctggctgaagttgactgccaattgccaaagagtctttgggttttcttcatttgaatctctggaagaaccttgggaagctgccatgcgtgcaagagaattttaattttaaaaaatgcagtaaggtataacttaagttccagggatgataaatcctgcagaaagacccatgagggtgtgtggtgcacttggcctgatccggtcccaacgtgcagccagggagagggactacgggcctcctcaagtcctgctcagctgacagcctctggagaatacgaagctttcaaagtgctggtcctcggctttttctctgatgcgttgttcctctaaggaatcgacgagtttgtccctttgctcaatcacttgcatcagctcggtgaatacttcttgctcttcgtttagatccttctcatctttctggctctcctccttgagcattttctctctcagtttctgctccagtctgctttgatgatcttctaattccagttcctgggccatgattaggagctccgactcatatcgcattaatttattcttctccagaaccagcttaaaccattcctgcaaaa

SEQ ID NO: 343106 - DNA, 1000 bp, Homo Sapiens; identical to SEQ ID NO: 160489

SEQ ID NO: 343107 - DNA, 1000 bp, Homo Sapiens
aaagacaaaatttaaaaataaaaatgtattttaaattaaaaatctgcaattttaaataaataatattatataggatttctaacatttaagactatgattatttatcaagtaccaaactgagtttattaaagagagagagaaaggacactttcaactttgaataaattcagtcaattttttttaaaaatcagacaaaatactttaaaaagtatactaccttgatcgggacttagacttgtgtttgcggcttgccttcttaccagacctttgagatttctccgcggatcgcgatcgactatgtttaggcttcttagccttcttttctttgctacttcctggagactcagaactgctccttccactagaatcagagcctgaatgttttttactatctttggtagtacttttcttactatcctgtctagaatcatgtcttatgattttaacagatatagaaccactcctagaaaatgttctttcactttctcgtttcctttttaatctatcatcctgactactgaacttaaaatctttttcttcccttttttgtttctcttttcttttatcctgttcacgttccctttctttgtctttctttttcctatctttatctatacttcgactcctctcctttttcctctcttgttctttagcctcacctttatgcttatgactgttcccactaagatttccacgttgatcatcaattttacgcctatctcgactcctactgcgactggcacgattggttcgtctatcccttgagcgacttctacttctacgtctctctcgggaaggactccgatttcgtcgtctttctctttcaatgctatttctattagatctccttctatctctaatctttaccctagccctattgctctctattttaattctgcgagaatagcttctactcctgctacgtctagctttgattgttggagatctactcctactgtgtctctttttccttttaggagaagaagaccgagaagaagta

SEQ ID NO: 343108 - DNA, 1000 bp, Homo Sapiens; identical to SEQ ID NO: 160490

SEQ ID NO: 343109 - DNA, 1000 bp, Homo Sapiens
ttttttttttttttttttcaactgagaagtttctttttattaaatcatctatgaaccatttaatggagatgctcctgaaaggtgcatctgtaattacaatggtgccatagctgtatcaacaggggagagctctcagccaggaaagcacaagtgccacggagagtttacaaagaatttggcaatacaggtaggtgtggttttcctataactacaaatagtcttcaaataaatacacctgaatcacatacaaaaaaaaatacaatagccttataaatgagaaagaaaccaatacacctctccaaaataacaggtttagaatgatctgtgtataaccaaaatgccttggcatggtgtttccatcttgagtggcaatcaaagaaagaagcagtacatattttccattatacacatctatcctgtacagagtccatgatagttgaacagctggaaaattccaatttgttgtgtaatggcagctaagtgtaaagtatttgcaagaactgattgtatattaagttcgactagtcatcactataattttaaacctacatacaccaatcctactattatttgtacttaaaaatgaagttatttcatctgcatttacaatctttttcccttttcgcttgaattttcattatagctagtcactttcctagggaaattcaatatgttgaagtattaaagagaagcaaatccaattttaattctatgtttaaaaatgaaaagcatctgctatcacctaacaaaatatcccccatcacctttgtaaagtgaacattaacctaaatagatgttaaatcgctctttaccccaccctcctctgcctgtctcatctctccccgcaatgcagccttttagactagtgcctcttctttctcacacgtgtgctggattgcaatttaaatgcaaataaccctgcacctcattatctaagttcgtgcagactcagtaacagttgcctgtgctgaaggctgtgaaatcaaacggaggttcatct

SEQ ID NO: 343110 - DNA, 1000 bp, Homo Sapiens
cctggaaaaaatgtttatttgtgtagcaaagcagggagcggggcggcggggctacttcttcttttttttggccgccttgagcttcccctcgattagccgctgcgcctgcctcttgatctcggcgcgcgaagggacgtagctgtggtccatgtcggggaactggaaggtgtcgatcatatcctcctcccggttctcaaagctgatcctggtgttgtacttctccatcagagtcgaggactccagggtgtccctcacctttgtgtcgccctcctcggtcctggacaccatctgcactctgtcagccaggtacgtgagcttcccctcgcagtacgccagcttgctgttcaaatcgagggtgttggagagcaccacttctctctgtaggccgggaggagggtctcatctcccctctggccctgcccagggacctggtgtgtggcagctcagcctcactcccggtacctgggtcgcaggcaaggtaatgcccatcagccggacatagaggttgtcgatgcccatctggatggtcagcagcagctcctggcccttggtcatgttgctgtgcgccagctggagcctctcttcttcctcttttagcatgtctgtcattttcttctcaacggacttgaagctgcagaaggcaatagggacacagcagtgaggggcacaggcccgagagccatggtgggccacccaggagcccagtcctgagttgggtgctgtgccagaatcagggactcagaagctcaggtgtgtgcaagtggagtcccctggcccctctgtgggacacacaggcttgttggcagtgggtatactcccagctcccagcctggctgcagcccggggcctttgtgagactggggtgggtggcccgcagccccggaagcccggggcacctgatggagctaggcttctggcggaacttgagcacggcctcctccagctccagctgcttcaccagggccttcagctgcacccgccgctcctcacagtcctccat

SEQ ID NO: 343111 - DNA, 1000 bp, Homo Sapiens; identical to SEQ ID NO: 160492

SEQ ID NO: 343112 - DNA, 1000 bp, Homo Sapiens; identical to SEQ ID NO: 160493

SEQ ID NO: 343113 - DNA, 869 bp, Homo Sapiens
tttttttttttttttttttggtggctcaggctgagcatgtttaattatcctcactgggagagttgaaaactacttgacaggttccataatcaataagtcagagattcagatcatcaaaaagggggattgtcacctaccccaaggccacatataggattctgggtcccagagtgagtctgggaggtggaaccctgtgaaaggcagctttgacaggtggtgtctgttggacaccagcttctggcctggccctgctttcttctcgggtaccagacagggtgtgagggcagggaactagctctggagatcactggaggactccgagttggggccagggcttgctgagggcctcacttacagttttttgggggaaattcccaccggccttggcccttgccaccaaagtttcgcacccgatggataatctgcagctgctgctcaatggtcgaggtgatgttcacgtcatctgggatgtggacgtagcggacattgcggcctgtcacaaagaggtcatccagcttgacctgatgcccccaacggtccgtgtaggtgactttggccaggcggatgttcatgaaagcatcgacattgtctatgcgtccgtgggccacgctctcatcccgcaggtccacagtggttacccggccctggaggccctgcagtaggatgatcaggctgttctcagagatggtccgctccttcactgaatggctcaccgccattcttccacaccagctgcctgcttgcacgcgacattccttccgctttccccgtctgggtcgccgccgaagctagcgggcgcctggactggctgcctcccgccggctgcagcaggacggagaaaccatgccggcgaccgggccgctctgtcc

SEQ ID NO: 343114 - DNA, 1000 bp, Homo Sapiens; identical to SEQ ID NO: 160494

SEQ ID NO: 343115 - DNA, 1000 bp, Homo Sapiens; identical to SEQ ID NO: 160495

SEQ ID NO: 343116 - DNA, 1000 bp, Homo Sapiens
cccaagtttttttttttttttttttttttttttttttttttttttttttttttttttttttttttttttttttttttttttggtagagacaaggtctcaccgtattgccgaagctggtctcaaaatcctggcctctagcaatcctcttgcctcaaattcccaaagcgctgggaattacaggtgtgagctaccacacctggccacatttgaagcactacagacagatacatgatttaaatctagacataaaacccagttttaagaattattttctggaaaactatagacttttaccctttatgacctttcaaaggtacctatagattgtaaaattcagttttccatctgttacatagtatatactaggtccataaatccagtaaatctgttttcatgatgacctcatccatcccatgatgtccacctatttggcttaataggacaatatgcctggaggaccaaccgtctgtgcagactgtggcagaatttaagtgatgggtatgactagaacggtagcctacctggataggctgaacccctcagtgatagtcccattacctccattacaagagagtctcaagcccaccatgcacacaatttaaaacaaggtccaaacctcagaagagggcaggctgacaaggctaaaagcctctaggtggtcttgttccaggaataagccaactaaaacttctccaatgaaggccaagttgtagaggtgataggtggagaagctgaataatctgaagatagagtccatttttccaaaacacacattcagtgtctgtcctcccattcactcaacctaactttccccaagttatagaacttgaaatcagtaatccacaaagcaaagaagcaggctataggattaacacaggtggcataattaaaataaaagaggggagggagattttaaaacaatctgccagagaaaaatgacaaatgatttggctttgtagctccttctggcttgagcagttaggagcctgagggctgaggc

SEQ ID NO: 343117 - DNA, 1000 bp, Homo Sapiens; identical to SEQ ID NO: 160496

SEQ ID NO: 343118 - DNA, 1000 bp, Homo Sapiens
ctgaattgaatgctgcatttattatagtgtttttattaacaaactttcaccagaaagttccgagtgtgttaatacagcaggcacattggcttccatgtttggcatttgacagtccacagaattgcacttcactctcacaattctgccacaactttgtgaattatttgggcaagacctacaaccagcctcccccattaaatgattaaataggacttttggttcattctgattgaaatgttctgagttcacacttgcatccgtctgtgacaagctcagctccactttccctcctgccttgttttcagtccctccactgctctccagattgctcacgtctctatttttacagagttccctttgtttattctcggggtcgcaacacgttttgagtaacgatccagtgcttctgcagacaaatgacgatggctctgccatctttggaagatgctcttctatgctcctctgaagactgtgtacattggtcttgccaattttttcttgggcctgaatgtgctgcactgggtggaggaaaaaattcctaggcagagaattctgcattccggctggctttactctgccctgcaggcagggacagtggtggatgtgcgtgatggggtgcacaaagccctcgacagcttggtgtgtggccttcagaggtgccacgccgttttggatctggacaaagctgctagtggtaggagagcactggtggcacaagcagtcccccatctgctggcaagagtgtgggccatagttcaagtgtttgtaggcatctgggcagctacatctctgattcagagagaagaagtgacacacggtatgctgttcaagagggggctgtaacaaggcagagccagcgtcactttcagtgcttttgctgagttcactgttgtaagctgcatgcacaggcatccctaaattctttgcttggctgttgaaaaattcagagcagatgtgggtctcttcataagtggtcttctcaggggcagtgcagctgtgg

SEQ ID NO: 343119 - DNA, 1000 bp, Homo Sapiens
tttttttttttttttttttttttttttttttttttttttttttttttttaagaagcaactttccatttaatcattctacatggatgtttacttttttaaaagttctggctggcaaaaaaaacaaacaaaaaactaaacagtccccattgtccagatccctggcctgccctgctgaggctgcagtgatgagtctactggaacccagtggcaccagcaggaaaagctcctgcagaatacagaggacagcagctctctagttttcaactagtgtcccctctgctaggtgatactactgcaataatcagtaatagtaaaataaattatttttatttgatacttcaaaataatatacatctatgaaaaatcaaaattcaaaaccaaaaattatcctgcaaattggaaagatgagaaacagagtcgctgagcctttcttgaaataacttctgaagaaaatgagttttcccagtttgtttagacagggcatgagcctatccctttcttcttctgggaaacaccctcctaggctgcagtggactttgagtcatgagaggaggacttggtatatgtgccgatggttccgcgatgggtcccattgctgggaatgggtagccgggttccttggtccacctggctagtttttgggaggagtcatgccttctcaggtgtcaatgagcaggctcaccactgagcggattttgcaggcaaaccatcgcctgaggggacaaaagtattgatagtggaattgttcgaactcgggggtctggcggatatcacggaaaaaggcaatgtcaaggtcagactcggtaaggatgatcaggaggaggagcaaaacaaagaggagtcccatggtcacaaggagcaaacggaggacacttagaacaaacttattcacctgttcctcctcgggcccgctgtgcccctgacacagggccctcagctctcccccaagggcctccacctctgtagcagttggggtgctggcttcagattccttctcctc

SEQ ID NO: 343120 - DNA, 1000 bp, Homo Sapiens
tttttttttttttttttttttttttttttttttttttttttttgagatggagttttgctcatcgcccaggctggagtacaatggcgcgatctcggctcactgcaacttcagcctcccaggttcaagcgaatctcctgcctcagcctcctgagtagccgggattacaggcacccgccaccacgcctggctaatttttgtatttttagtagaggcgaggtttcaccatgttggctaggctggtctcgaactcctgaccttaggtgatccacccgcctcagcctcccaaagtgctgggattacaggcgtgagccaccgcacccggcatgattgtaagctccttaaaggcagattcctttattctgtttttcccatactcctcatgcacctacatagtagatgctttaaatgtcctggttttgaaaagtaacatggtcaatcccctataacccaacatatttagtattctttacagcttcttccagaaccagtctggtaataaacatggatattctgctagcccaatgcatgttttgagtgtttggtatcagaactcatcagctgactctgtgtcccagccacaggactgcagttgatcgtcctgtggaaattcaacctcaatgtcataaacaaaatttggatcatccttcttcttctgatttttctcaaaaagttcatccatgatgctctttcttttggcaagctccttgtcatctagtttgttcaggtcttcctcaggatcaatggttgtttcccgttgaatttgttccattgtttctgccagactctgccccgacaagtaacctcgtaaaaaactgaatagcttctctagctgcctcagggatacttgttctaggtaactcttgtgtcgcggattattctttaattgttcagcagctctggtgcaatctgaaaactttgaaaagtttcgaactggcataatgcgctggcgaattttccccttgatttcactctcatagattaagataatagctggaggctg

SEQ ID NO: 343121 - DNA, 1000 bp, Homo Sapiens
ttttttttttttttttctggatatgaaacaaaacaattttaatttcagaatattacaagaatataaaagaaagacaatgcataggatcgtttctttacaattacatatacatagtcaaataagaatgaaaactttaaccaaaacacttaagaaaccttgtttctcttgttgagcaagctcagggataggacaaaggcaacccttgctctgcagaaagaaccctggggtgagggaatatttcccccaacaggttctatctgtccccagacatggccaggggagggctccatggctctttagcacaggctgtggcctcacacactccagtctccatggtaacccaagcactcaggctattatgtcccacacctcctcgctggcctgcttctgtcaactctacgctggtagaagatctcggcattagctgtctggggaagctaacttcctacagtgggttttagttgagttaatcaccactggtgtaaaacgcttgtgcatcttaggaacccaaatcttccccaaattctagacaatcccacaaaatgctagtatctaggtttagatctaggtcctgtcttccgtttgaagccttcagggtaaaggagggcagagataaggctctctcctggggaaaggagttctacacaaaaatgacctcagaatgggggccattagcctcaagcatctgtgtgaggccttgtaggaaaggagacagagtctagagacatctattcctaaaaatcacctggttgcatggccagtcactgtggggcacgttcccagtgaccacaggttctcctagacggcagtattttcaactgcatgctaacacaggctgctgtgagggaaactgaacagaaacgttcctactcaggaggagagaatggctctgttctgacactctaggatcgactgcttccttacaggtcaacagaacagatacctccggagcacccaggtgtcactgcagtcaacagccctccactagcccatttcccaa

SEQ ID NO: 343122 - DNA, 1000 bp, Homo Sapiens
tttttttttttttttttttttttttttttttttttttttttttttttttttttccatggcaaaacagccctttatcaagagttgcaggataaaaatagtctttgcagccagacatccctccaggcatgtcttctgacctgagaggggccagtgtcctgtacagtagaagccggggtttccgtgctgcacccgcagcaccagggcacgcaccgtggggaggcagccttgggctgtgcccgcgacagggcccctgcatgctgagcaacagcctcacatgagcaggcagcacggcctcctctccacgggagcctccaccgccggggctgtgagcttgagcaggggtgggtccccgcctgccctgaagccacagtcaggctggggggtcaccgtgtcaccaggcaggccaggctcagctgtctcagggctctcgggcccctcaggtgggggtcgctgcagcttggcagcagctcgctggcgcttcaggtcagccagggtgtggtgggccttgtcgtggaccagggtgtggggggtggtgctgtccagggggctcagctggtaggagacactccggtctagtcgcttggagtatagatgccgcactggggagccccctactcggccattgtgcggcctgaccacttcggggttgtcctcctccgggggcggcggcctgagctctgcgcctgtctggcggtcatcgttgtcctcgggcggctccgggctggtgggcggcggctgttgccacacgatggcctcctgggcgtgctgcttgcggtacaggtcggtgcgctgggttaggctcacccgcctcaccaccttcccgcggctgccggcgctggaggtgcggcggcgcagcaaggagcgctggcggctctgggcgcgcaggagggcgtcgtgcttgtgcttcagctccagcagcttggcccgcacctcctcgtccccgcacacatcaaggggcgtctcgtccatcagggactttgcgttcaggtcggccccgtgc

SEQ ID NO: 343123 - DNA, 1000 bp, Homo Sapiens; identical to SEQ ID NO: 160499

SEQ ID NO: 343124 - DNA, 1000 bp, Homo Sapiens; identical to SEQ ID NO: 160500

SEQ ID NO: 343125 - DNA, 838 bp, Homo Sapiens
tttttttttttttttttttatttttactttcattttatttcagagcatttaatgcggtttacaaatcaatcacatcttccaaaaacacactgtgttgtttttctcctcaaagcagtttttcatacattgcatcattttctgttcataacagtcccaaggactggatagggtcggctttgctgtctccattttaatgacaggaacttagatgtggaggccttacgctgtccaggaaggggttttacagacgttacttcgtttggtcttctcctcccaccctgcacggcgcaaagagcccatcagtttgcggaagtctggggtggaggacagtctggagtgacaggctgctaccagaccagtcgatctggttcgggctgtgacataagctaggggtcgaagtcaggggcacccgcacaggcggacctgcctggcacctagccaaggcgaatccaccttcccggccagccaccagggccttgaattggcaaagtatcgaatcctgttgtgtgtgaagcaagctcttcatgcgacaccttcagggcgacctcgggtcaagaactactcattgtgctgcttggacgcgccggggcccgagtcttcgtggatcggccaggccaggagtgaaaggtctgggagttcttccggccaagagcacccgaagagccactgggatcagaaatgcgccccggtggaccccaaaccctgcagccgggggcggggggtgtcgtggagtgtccgctcgccccatgccgtgaccgggacaaccggtacagcaaactcacatggagccccaagactctggatccccaagactctggatccctatcgccccgcccct

SEQ ID NO: 343126 - DNA, 1000 bp, Homo Sapiens
ttttttttttttttttttttttttgacagaatgagaaaattatgctttttattatagtcacataaaataaagtcagttacatcaagttgtccaaatgcattggtgaattaatgccgctaacgcttacaaatttttatacatatatctatgcatttataaatacatacatatgtaaaagatatatattttctactaaaataaagtacccaaatcttgatatatataggggcataatgggggagaaaagaatcataaggttttatcagttgtagactgtactttcagaatacaagagtctgttttagacacatttattcagctgtaatgaactttaatcacccattcttttctgaattctcctaagtgagttaatgtatccaaaatatcaaaataagtcatgtggcaaacttaatgaatcagaggctaatttttcttactgtacctggctcaaagtctagacttcccaatggaggcatggttaagctccattcttaatttgcttgtcttttggactgtggtttttctgctaaggtgataaacaaatcagatgtctctaattctacatcttctactagcattcaataaagtcagggtttggtgaaaagacttccaatgtttttatatcaccctgacttgatgaaaaaaggcccagcaggatgtgaattttgtgtcctattgcctttgttatagggaaaatattgtttgagccaaggaaggagagttagggtgtaatgatcaatagatcattgagagaaccaactcaaattgaaatgaattctctgttatagtgaaaaacattagtgagaagatgcttgaactgaagaacaaaataaaattttaaagaaaacctagatgatattagataattcagaaaatcctcacttcaaacagaaactagagttccttctatttcctgttccaatagctcagcttcttctcctgtgtttttactgtattttctgctatcttagacttttaagaaaattatttgtagtatctg

SEQ ID NO: 343127 - DNA, 1000 bp, Homo Sapiens
ttttttttttttttttttctggtctccacgctatttattgagtacagtcacttagatctgagaagcagatattcagggcgaaacagtgaaagggaggcagtgcgtcacaggcgtaatctacagcaatagcggtttcaatgaatctcctttgtgctcaaacagcgtatctttaacttatcggacaggagctggtgggagcgggcttaaccaggagctcgtgtgtctgtccacagtccagtgcttcgaaggaatgtctttctccttgaacacagtgtttacagataagacagcaggtctcgccctgagcatgcgaacatgatggcaattaggaggctttcctcctcagaggcctcttgtggctttccacaacttattgtcccatattttcatggccagtttatacaggcattccacaagcccttttcccaacaattagcagtgtgagaacggactaatacagggtgccatcgggaaggactgcagccaggcggctccaattctcctactgtcctgggcacgggggtccaaggtccaggtgtcaccagggctggttcctgaggcctctgccctgggcttgcagacggcattgcctccctgtttcctcatggggctgtccctctgtgtgtgtctgtgtcctcatctcttcttcttacaaggacaccaagcagcttggatcagggcccacccagagccctgatggcctcttttaacctgctgacctctgtaggggctccatctccaaacccagtcccacactgaggtgctggggttaaggctgcaacatgagaatttggggggacgtaattcagccataacagccatgaggaaggggagacgtccagcacttggccgggtctcagacacaggccccaggcccctctgaggcccagcttcctatcgaaacagagggcatggtcttgcacctcttggtggcctcctgcccactgtgggatgtgggatgggcccagagcccacaagaaccttctccaacaggggaggg

SEQ ID NO: 343128 - DNA, 1000 bp, Homo Sapiens; identical to SEQ ID NO: 160502

SEQ ID NO: 343129 - DNA, 1000 bp, Homo Sapiens; identical to SEQ ID NO: 160504

SEQ ID NO: 343130 - DNA, 1000 bp, Homo Sapiens; identical to SEQ ID NO: 160505

SEQ ID NO: 343131 - DNA, 1000 bp, Homo Sapiens
tttttttttttttttttttttgcataaaccatctttaattagaaaatttagtaacattcatatcaggcatcatcgatttttcttttcttagctcctgtattcttagaaccagactgctgaagcatgtttgcagccttcttctggaagttgcctgaatttttttcctccatctttttatcaccttgttcagaatgacaagtttgagacgattcagccctgaaagagttctgcgtggactttgtcacttgcatagtaatagcatgtgcctcattgttcagaaggttagctttaggtcctattttcaaatacgaaatggtagcataagctgtaaaactgtagtcttctttaagatactgctgtattagaaagtgtgcaataatcttctccagatcttcacgaggaagtgtgggagccacaacacctgctactctcagttttgctgcaccctttcccatccaagaatcaatcagtttcaatggagtgagtttttcattcagttcctctgcctgcttcaggatcttgattagatctctgcagtactctgttatgttctttctttcaaatgcactgtctttacagcagttatcgcacattttgttacatgcttctgagttccatacttcatcaaaatgttgagccatcaacacacgacgacatttgcttatgttttgacagtatgataccatctcataaagcttctgctgtcccacattttccatcaccaccattgaacttattctgaatatatctccaaagccgtagtacaaaatacagtctgctttcatgtcatctcgacctgcacgtccactctcttggtaataattttccatggatttactcattgaatgatggataacaaacctcacatctggcttatcaattcccataccaaatgcaacagttgccactactacctgaatttcattggctgaccattttctatgaactgtggtcttatcttctggctccaaattggcatggtaagcacctgcatgaattc

SEQ ID NO: 343132 - DNA, 1000 bp, Homo Sapiens
tttttttttttttttttttgcacattctagcactttattggaacttggttgtgtacatcaatgagatcacatcaaagtaaaagcagcattttcacacaataatatcccgatatctgtgctatcttcttacataatttaataaatcccaagatgctcctgattttggtatcgaagagcttgagtggtccagaaatatctctacataaatataaatcatcacatctaaaataaccatcattgttttagtaggtcccaaaagtcctgggaacacctcttaaaatataattgccataggctggctgcagagctggtgggagggagtgaagggggtacacgtggagctaattacagcaggagctgggcagagggacacacacaaggggatgggggccagagatcccgaaagctgggcagggaactcagtcaccctgcattttccaacattgcttgagtgtcaaagctaacagatgtgagactccagtgcagaaagaagcccatcaccccaactcccttggcagtgcccaaagatggcacagccttccttcagattacacaggggcagagattctggaatggagaaggttctggaaagctctacccatcaccctccaaactgagaaaacatgaaggaatggcaccttaaagaaaatactttgggccaaagtgctgctggccccttggaatggggacagggtgctcttggcttggtttgacctgaggggcactggcaaagtctgctctgcccccagtatctccctcaccacctttaaggccatcatcagcaatcaggttctctggttcttgaaagcttctcaggattcagcataacacccttatatctgtggtagctttactgatcacaaacagctttcacatccactaagtcaggtggttctcacatccctatgaggtagaaagggcagggatcaccatccccatttgaaagataaggaacctggaactcagagagttaggtcccttgaccaaattcacacagctg

SEQ ID NO: 343133 - DNA, 1000 bp, Homo Sapiens
gcaactacaaccagttttatgaaaaagctttataaaaataagctttaagaaacctcatttcttctatttaaaaaaaagcctctttcagtgcaagtggggtgccaaggatgtagaataaataagagggggccaggatcagtgcacagggaggaagcgctcacggacgctccgctccagcccgggcatcctggccacgcgcagcgcctgcagcagccgcaccagcagcgccccgtcctgcgcccccaggagctccgtgagccgccgacgcagcttcagctgcaaggccgcgcggcccgcccttggtgtcggaccccagccctccggggcctcgagggcctgcagcagccgctgcagcctcttgatggagatgtcctggaaagccacaaagtcgatgacggcacgctcacactcctcagctcctggtaccctggtgctgagggggaagccagtgcagctggtgcacagggtgtcatgggaggaagagcctggcacattgagggccaggcccagggccgtgcagttgcggtggggctggcactgctctgagctggagctgctggctgagaaggtgcctggggggcacggctggcactgcgtgttctggctgggggtgcccggggcaatcacgccggcaccaggtggacacgatgcgtgctccaagcagaaaccagcgtgcgcgaagaagccggtgcggcagcggcaggcacggttgtgggtggcgtggcaagcccgtgcctcctcctcacgctccccgcagaggacgttgcagtagcggcagcgctccaggtagttccagaactgcgtgtagtggcgcggtggacacgggccacacgtcgtggggctgtctcggcggcacggccgctgcacaaaggtgcctggggggcactgggcacacaccagccgctcccctgtctctgcgtcccgccaggggtaggtgggtgtttctgccactccgcgtacagccggcaccggcagcagggcaggcagcgccaacaccagg

SEQ ID NO: 343134 - DNA, 1000 bp, Homo Sapiens
tttttttttttttttttttgaggttttgggggcatttatttctgatagagactggcacaagctttgggctaaggacacccgcccccaccctcatctagaaacaatctctctcgccagacttgatggctcacgcctgtaatcccagcattttgggaggccgagtcgggcggatcacaaggtcaagagatggaggccatcctggccaacatggtgaaaccccatctctactaaaaatacaaaaatgagctgggcatggtggcgtgtgcctgtagtcccagctactcaggaggctgaagcaggaaaatcgcttgaacccgtgaggcagaggttgcagtgagccaagatcgcgccagcctggcgacagagtgagactccgtctcaaaaaaaaaaaaaaaaatagtaaagaaaagaaacaatctctctcagggtccagaagcttcagggcgtgtcccagctcaggctctgcagcctgggccagggaggaggtggagggacacgtgggcccctctggaacccctcaggaagccccctcggcaggagtgctgaacgcgaggtgcgtggtgtatcttctcacactccctgcctcctctgggcctgatagggaagtgctcctgcagctgttgaagcaggtgtatatgagcacagccaggaggaccgtgaggaggacggccaggaggatagacaggatggcgatgatgaccacggtgcccgggctctgggggccggggacagcccgaagtgcctgggcttgctgcaggcgagtgtcgctggaccacttggtttcagccacgggtccttcgtcattcatcaccaggaacttcaccctgtaggggccgggtcctggtaggggatggttgcagccaatttttgttggttggcagtgggtatcattgccgacgcggaggacatggagctggcctctggtctggtacagcacccggttggccctcagtgtgagatagtagcccctctgggagaagttggcaggagcagggatgtc

SEQ ID NO: 343135 - DNA, 1000 bp, Homo Sapiens
tttttttttttttttttttgaggttttgggggcatttatttctgatagagactggcacaagctttgggctaaggacacccacccccaccctcatctagaaacaatctctctcgccagacttgatggctcacgcctgtaatcccagcatcttgggaggccgagtcgggcggatcacaaggtcaagagatggaggccatcctggccaacatggtgaaaccccatctctactaaaaatacaaaaatgagctgggcatggtggcgtgtgcctgtagtcccagctactcaggaggccgaagcaggaaaatcgcttgaacccgtgaggcagaggttgcagtgagccaagatcgcgccagcctggcgacagagtgagactccgtctcaaaaaaaaaaaaaaaaatagtaaagaaaagaaacaatctctctcagggtccagaagcttcagggcgtgtcccagctcaggctctgcagcctgggccagggaggaggtggagggacacgtgggcccctctggaacccctcaggaagccccctcggcaggagtgctgaacgcgaggtgcgtggtgtatcttctcacactccctgcctcctctgggcctgatagggaagtgctcctgcagctgttgaagcaggtgtatatgagcacagccaggaggaccgtgaggaggacggccaggaggatagacaggatggcgatgatgaccacggtgcccgggctctgggggccggggacagcccgaagtgcctgggcttgctgcaggcgagtgtcgctggaccacttggtttcagccacgggtccttcgtcattcatcaccaggaacttcaccctgtaggggccgggtcctggtaggggatggttgcagccaatttttgttggttggcagtgggtatcattgccgacgcggaggacatggagctggcctctggtctggtacagcacccggttggccctcagtgtgagatagtagcccctctgggagaagttggcaggagcagggatgtc

SEQ ID NO: 343136 - DNA, 1000 bp, Homo Sapiens
tttttttttttttttttttaactattaaatctgtttagtaaagacaatttcgctcatacaaaacaacagtttacaacaatcgagtgctggacacaccatctgagacaagggaggcgctgcaggcacccagcgccttcccccatacacaaagacgaccctgggcgcccctccaccacctgcccctgagggagaggaaaggtgaagtattcctgccacctctccctccaagggaagggggagtggggggccatggcacagacagcctaccccagctgctcctcatctgtgctgggggaggcccctcccctcaccggccccgaagctgagttgtttggggtgatggcaaatggctgatgggcaagggggcaaagtcaggacatctttggtgcaaagactccccctgacccaccaggccacacaatggaaatctgagggaagacttcaaaagtggccctgcctttgcccacaaggggtagctggctgatgccccagaacccaggacaaacacaggaaatgcaaaagctctgccaacagaagctgcccaggctcacctacatgagctgggcggtggcccatggagaaatggctaaaaatttaaggaaaataaacaaaaatgggttaataatggcaagaaggggaagtagagaggtcattcagtagatgagtgcctcagaggacctaggaccagcactaagtggggggaggggggccctgggggctgggggtccagtcttcctgatcgcagtgccagtgcccggtcactcctctctgcctcccggaacccagctaatagagacaggccacagagggcctgtttcagaatctgggtgggcttcccaggcactttggcaggctcagtatgggcagggcagacccaagaagggagaaggttcctaagccccagcagggccgtctccctctgcagccctgcctgcccctggcccctcaaatgcacgatcccaggcacagatctgcgcactcatacacacgtgtgcacaca

SEQ ID NO: 343137 - DNA, 1000 bp, Homo Sapiens; identical to SEQ ID NO: 160508

SEQ ID NO: 343138 - DNA, 1000 bp, Homo Sapiens
atgttggccagactggtcttgaactcctgacctcaggtgatccacccacctcggcctcccaaagtgctgggattacaggtgtgagccaccacacccagccaaaaataactttttaataattaaaaggagtggaacagcatgagtacaatcaacataaaaacctagtaaaattattttctatcattgaacatttttttctttttgagacagagtcttgctctgtcacccaggctggagtgcagtggcgccatctcggctcactgcaagctccgcctcccgggttcacgctattctcctgcctcagcctcccgagtagctgggactacaggcgcccgccaccacgccaggctaattttttgtatttttagtggagatggggtttcaccgtgttagccaggatggtctcaatctcctgacctcgtgatccacccgcctcggcctcccaaagtgctgggattacaggcgtgagccaccgcgcccggcccactcaacttttaagcagagtggtgggtaataaaaatgattttctcagcaatattatgttagtgaatattttcaaaacactgaaccagagtgttttggttttgttttttgtttgtttggggtcttaaaaatgtctcttgccctggatacctttcagagagtagtttggctagttcagctcacttccaaactcctggagataatgttttaattattcaacaatcagacagggcaagtaattgcatgtttcatgactgatatattaaccataagtgtatacaccaagacagccttatattacatcatggctgttgattcagagcaaacagagaaacagcatgagagtactctgttattgtgctgcactgtctcttccataaattttaaatttccattgccagattacagctaaagaaagcacaaggttcactaggacatcatttttaagatgatttttgcttgcttttataatgggaaatctagattacaaaattaatgatcttagcctaattttgaa

SEQ ID NO: 343139 - DNA, 1000 bp, Homo Sapiens
atttctcataacttttattaatatatattaataagaaaacatgcaatacagaacctgaaatagaacaattaatacaagtttgcttctggattacatactgccatccttggccatacaatagtcaaccttcttacttccaaagcatggttggaactgctttgggatactgttcactttcagatgctgtatgatatcacagaggaggaatcttcccacaatacaaacataaatacatatttcataaaaatcttaatattttaagcagggatagtataaatttcacacagtttactctttaaaaagtatcacttacaatcactaaacaattgccattaattttttttatttgtgcacatacatttttctgagcagatttttttgttactgtttctgctgttgtcaacttgaactgcttttaaaaatcatatttactaaaagcacatgacggttagtgtaagaaagctactgtgaaagaatattttaaggcctctgcataaaattgatctggtgtggtaattggcacataatatagaaaggttcttgcagaaatatatttcagcttctcttgctcccatgttttcccggccaattgagccagttggaagcattcaaaatagtttctaatggtcataataaaaagtttacctaaactaactataaatttggtttccaaaaaatataaaagaagaaagataagaaataataattataataaaaaatataaatcagaagagtataaataaaagcctaaacaagtagattttcataaatgtgtattagggagtatacacaccttcagtaataccatgaaaaagaaacaaacaaaaaaaactaatgttgaaatagccatgtgagtaaaacgcctttaattttctcaggattgaaaaggattttttgtgtgtgtgacataattacattttaagaactgaacaatttgtgatttgtttagtctatttttttcccatttaatgaccatgtgtgataaatattagtttgggaa

SEQ ID NO: 343140 - DNA, 1000 bp, Homo Sapiens
atgttggccagactggtcttgaactcctgacctcaggtgatccacccgcctcggcctcccaaagtgctgggattacaggtatgagccaccacacccagccaaaaataactttttaataattaaaaggagtggaacagcatgagtacaatcaacataaaaacctagtaaaattattttctatcactgaacatttttttctttttgagacagagtcttgctctgtcacccaggctggagtgcagtggcgccatctcggctcactgcaagctccgcctcccgggttcacgccattctcctgcctcagcctcccgagtagctgggactacaggcgcccgccaccacgcccagctaattttttgtatttttagtggagatggggtttcaccatgttagccaggatggtctcaatatcctgacctcgtgatccacccgcctcggcctcccaaagtgctggaattacaggcgtgagccaccgcgcccggcccactcaacttttaagcagagtggtgggtaataaaaatgattttctcagcaatattatgttagtcaatattttcaaaacactgaaccagagtgttttggttttgttttttgtttgtttggggtcttaaaaatgtctcttgccctggatacctttcagagagtagtttggctagttcagctcacttccaaactcctggagataatgttttaattattcaacaatcagacagggcaagtaattgcatgtttcatgactgatatattaaccataagtgtatacaccaagacagccttatattacatcatggctgttgattcagagcaaacagagaaacagcatgagagtactctgttattgcgctgcactgtctcttccataaattttaaatttccattgccagattacagctaaagaaagcacaaggttcactaggacatcatttttaagatgatttttgcttgcttttataatgggaaatctagattacaaaattaatgatcttagcctaattttgaa

SEQ ID NO: 343141 - DNA, 1000 bp, Homo Sapiens
ttttttttttttttttttttatttctcataacttttattaatatatattaataagaaaacatgcaatacagaacctgaaatagaacaattaatacaagtttgcttctggattacatactgccatccttggccatacaatagtcaaccttcttacttccaaagcatgcttggaactgctttgggatactgttcactttcagatgctgtatgatatcacagaggaggaatcttcccacaatacaaacataaatacatatttcataaaaatcttaatattttaagcagggatagtataaatttcacacagtttactctttaaaaagtatcacttacagtcactaaacaattgccattaattttttttatttgtgcacatacatttttctgagcagatttttttgttactgtttctgctgttgtcaacttgaactgcttttaaaaatcatatttactaaaagcacatgacggttagtgtaagaaagctactgtgaaagaatattttaaggcctctgcataaaattgatctggtgtggtaattggcacataatatagaaaggttcttgcagaaatatatttcagcttctcttgttcccatgttttcccagccaattgagccagttggaaacattcaaaatagtttctaatggtcataataaaaagtttacctaaactaactataaatttggtttccaaaaaatataaaagaagataagaaataataattataataaaaaatataaatcagaagagtataaataaaagtctaaacaagtagattttcataaatgtgtattagggagtatacacaccttcagtaataccatgaaaaagaaacaaacaaaaaaaactaatgttgaaatatccatgtgagtaaaacacctttaattttctcaggattgaaaaggatttttttgtgtgtgtgacataattacattttaagaactgaacaatttgtgatttgtttagtctatttttttcccatttaatgaccatgtgtgat

SEQ ID NO: 343142 - DNA, 1000 bp, Homo Sapiens
tttttttttttttctctgtcaagctacattcaaatccacatgacaatcagagatatcagaacagtgttcttgtgaatattcttataacaaatttactgtacatgaatttgactttcacataaataattataaatgcaggcaccactgagagttgttgttcttcattccttgacatttttttatgagcattcacatatcaaatgaaacactcctaatgcccttccacgccccaaggcattccagttcacctggctgaagtcaaatccagtaaatgaggactgtgagcaggttgttcacatccccaggcctcagctgcctcatctataaatgaaggcgttaaccacaggactttggatctccctatgagggctcacctttaaggattcaaaatacagttccaggaattaacagagaaaaagttcctctagaaattgaaaaaaaaaaaaaaaaaagctcaagtacgtaaaaatgctcaaaatcttaatgaagaaagcatcaaggcgtccttacagagccactcccttcaggcaagccagacatcccctctgccaagaagagcccagtgatcctgagaacagcttcagtttctgacacagcctctctcctcatgccttgggccagaggagcaaagtgtagtagcagtaacaaggtggggactgtccactgcagtctactgcatctgccagccctgaggacatccggccaagagaaaggtgctggcctgtagattgagtcctgattcaagctttgcctgaagccagtgttatccactcctgggtttcaatgtgaaagaggcaataaattcccttctttgcttcagtcaatttgaattgggtgttctgtcaatggcaactgaaatgttccaaccccaatattgaattttttttttaaacaaggtctcgccctgttgcccaagctggagtgcagttgtgtcatcttggctcaccacagcctctgcctcctggattcaagagattctcctgtctcagcctcccgagta

SEQ ID NO: 343143 - DNA, 1000 bp, Homo Sapiens; identical to SEQ ID NO: 336468

SEQ ID NO: 343144 - DNA, 1000 bp, Homo Sapiens
tttttttttttttttttttaataaatatgagcatttatttggcacccgatggcaatacaaaatcctggcagtgggagtggaaaggttctctctctcaaatacttccatactatgtcgacccaaaggcaggacttggcagcaaggctcacaaaccacccaaacaaatatttattgagcaccttgactactacaggcctagcattttgctagggaccatgggagatgtgaaggaagttatctcacacatgatatgtcttcaaggagctaaaaatgccagtggataaaagcaaaacacatggaaaaacaaagtacaaataataatccgtgtatattgtcaaaaggaacattttatcaaaaggtaggattgtagctaaggttggcttgccttcttccctcttttattcaacaaacatttaatgaaggcccactatgtgccaagcacttggtacatgatggtgaataaaacaaacaaggtttctgccctcatttacagcctggtaggggagacagaaatgaacaagtaaaagtagcatatatataaactgcaataaatgcaatgaggggaaaagacaagatgtggtgacagacacagaagtagactgctcagggactgaagggcccgggaattgtcaagacttgaggaagaaggacaccacctgagtcaagagtggtgggggtggagagctgagaaggcccaggaaaagggcaggaaagagcacaaaattagaagctgagaggagaccactcgggctggagcttagcaagaaatcaccatttaatgaggttcaaggggaaggcaagaaccagttctcataaaccaaggtgaagagtttacattttaaatgaggggtaatagaaagcagaagggttctaagcaggggggtgatcagatttatatttaaacaaccaaatcctggccaggtgtggtggctcatgcctgtaagcccagctatttgagaggctgaggcgggaagatggcttgaggccaggagttcgagac

SEQ ID NO: 343145 - DNA, 1000 bp, Homo Sapiens; identical to SEQ ID NO: 160511

SEQ ID NO: 343146 - DNA, 1000 bp, Homo Sapiens
tccgactttttagtgtgtgaaaggcatggatggattttattgattaccctatatctacaatttgaggtaaaatagaagcaacacataaaagggcctatttctgctaccatgtcatataattctccattgtgaatattgtgataaagctactgaaaactatgccgtcacagagcctagcttcttgtagagctggtattttacaactcgcattgcttgtgaaatctcaacacatgtaagactctcctaggaaggcgcagaacgtcagaggttgcatccttagccccctgacccctcctcactccccgcgctggcacctcagggttacaagaagaactaggaaataatgccggccacgcgacccctggagagggggccggctagaacagcgttcctaagaatccgcgccacagcaggtcccgcgatgttggggccttagtgtcatcgagctagccccaatcctcaacccgatcttcaacttctggtacaccatgcattttatttggacgaaaagtaaaagtggaagaggttctctctgtatttcctctataattcacacgctgagatactgacctctgactgttaggtgatccagatggttttgcttttaattatgataaaaaaacataggaaccatgagagatagcttaggaaaaggtttagtcaaatatacagataggaactgttcactcagtcattaaggagagccgtgaacaaaggatcatttaaatgatttttttttttcaaatagaaaaactaaagaactgaactatcacaggaatttttcttcactgcagaagctgagatgttccagtaggagaagtaggagatatcttcacttgattggaaaataaacaccgtaactcaaggctctgctgagtacataaaaaatctggtgagattcattcctgtcattttccctgtcatttcccagcattgctgtaaaatcctgatagtacattcccaagtacaccagccattccagacccacagtcactctgct

SEQ ID NO: 343147 - DNA, 1000 bp, Homo Sapiens
tttttttttttttttttggattttattttgcaatatttattatatattcaattcaaatgtactcactattgtgctaggcaattgaaagtaaaaagtataaagctgcattttgcgctctcagtgaggtttaagtcagggaaatgaggcatgcacacaaaataacgagaaagtagtataatagctgtgatcattagttatcaaaataagtgaatgagctaataatcattgttagaataataattgtgttcttagatctcagatgctttaatgaaaaatgttatcttgaggtcaactttgacaaatggggagataactgaaaaacatctgacattctaggtagggaaaacagaagcaaatgcttaaaaatgggaataagtatgtattctgtacacagagacaacttgatttcaatacatactttatggtggaaataatgtttgtacttttacttacacagtccggactcatgtttctaaaacactgataattttgtgtttaacttcaatgtaatgtgtagactaatacttttagtggggtacaagtgagaggaatgttattttagaaactttactctggcaccactgagtcatcataaattattactctcagatagaagatttaattcttgcagttagccatgtcagtttatcatgagtaatcagaaagtgttactcagaagctttattgtgaatattcagtttgttacagtgaacatggatgtgtatgggtgggaaggtagtgtgcactggcaccacagaatattctgttttcatcttatgcttgaactaatttattgatgagattctcatttctgtagtataaaaggaaaatattttgcagttatctcgtatttgaaagactttgccatagagaactttatcagaaatggatgaacttttcattatttcttataagcatattggttttggcctgcttgagtttaaaactttttttggtagacttagaatgttaatatttagataaagaaaatattttactg

SEQ ID NO: 343148 - DNA, 1000 bp, Homo Sapiens
ttttttttttttttttttcactttagactttttaatatttcatacagcgattatggtgcattcaggaacccaaccccccaaacccactaggagggctcccacccctgccctcccaccccatttcagggccccagggcttagggtggaggaaggggaggtaaccacccatccagggactgaccctggagactgtccctgccctgcctcaccctccccaggagatagggggcaacacctgggcacaacccctcacacccccctcccccaaccctgcttgtgcacatatgcacattatggctcctcgctgagctggtcagttcctggcagggcccctacccaacagcaccgagtgggatgggagcaaggggactgggctggggagaccctgagaaggaaggaggccccagctacgggactgcaggagagaaagagtggggccccccaccttgtccatttcccagagtctctggtagtccccagatccccctgcaactggggatggcgggcgggggtaggaaggcgagtggctgtggcatgctttcccatagccaatcccagggtctggtgatgatcagggttccaaataggggctgtgtccctgtctctgaaaggctgggagcagggcttcattgcacaaaatactgtgggagggccacacgcagggggtggggcccagccagtctgtatacagagatattgcatttaaaaaaaacaaaaatctcatttaaaataattaaaaaaaaaaaaacaatgaatgaaacaaacaaaaaaaggcccacacaatatgaggcaggtggggcaggcaggaaagcaggcagaggatgcctcagactcaaggcattgtcaccatcttgtctgagtcgagatccccagcctgggctagctctggacccctggctggccgtggggtagtggtcctgggggctggtatgatggggggtagacctggcctcagtgtgggaggctggcacggccatgctgtccaccggcaactaccaag

SEQ ID NO: 343149 - DNA, 1000 bp, Homo Sapiens
cagaacctgtgcatatttatttattatccacaaagatggaggtgcggaaaagaagagggagacaggagggaaccgtactctcccactggaactctggggcccactgaggcaccattattggggatttcagggtggctgggcactgcaaactgctccctcctctgtggtccctgaaagagccccacacgcctgcttcagacgtgtccacgcacaccagtcctcacagacacacacacacatgcatggaggcaataaatatgttccgtaccagactgcccccagcctgacgcttcagggggccccctccaaaagggaggggtttaagtgctcaatttttttcgggggggggggcaaggggggggcaaggagatggggattggaaaggccagactctgttatctccatttgctgactagaggccaatcgtggggtcttccccgggaaagggtaggggaaaccagctgtttctctataagccccaggctacccctgtgtccatgctggaacccaggataggggctgccccccacaaagagtgcctcatgctagtctttgtgtcgtccaagggagggagaaacagtgcagtgctcaaagctaatactgatttggttggcagcagcaagagggccgactagaggtgactcaccacaccagggtgatgctcacagtaactggtgttgccccggccaaggggaggcaagagaggccagcctagcaagcgcgagaactacctttttggcaacaaaaggggaagcccttggtgctcaggaaagatggtcacaaccgctggtccctaaaatccccaggccccagacttggcaactagtgtccaaataccgggccctggaaactgggaatgagtctcagccatacacgcgactggtcccgtggtaactcgctggcaaccaggagctcggcctgagcaacaggtctggctctccttggtcaccagggcaccgccttagccactgggcgcccggtccttactaaccggggtccc

SEQ ID NO: 343150 - DNA, 1000 bp, Homo Sapiens; identical to SEQ ID NO: 160513

SEQ ID NO: 343151 - DNA, 1000 bp, Homo Sapiens; identical to SEQ ID NO: 160514

SEQ ID NO: 343152 - DNA, 1000 bp, Homo Sapiens
agaatatcttgaagatccacttttccattcctagtgccatatacacagaagaaatccagccagcagaggaaacagattgcctagcagaagccagagggtgaccaccaggctcgaggaacaggaacaaagatcaagtggcagagctcgggtcaggttagtggctggaggatctgtttctggaggacagagctcacagaagtcccaacatgatgggcagagcaggtttccatcgtgaatccagccattcatctggatactgacagggaggacctgcccagcccgactacacaaatatgaagtatcttggacccaaactttcagaccttgaggagaacaagaaacctgatagcatccgcttccccagtctgggtaactcagcttcttctcacacttctccataacgaatgctgatttctgaattagacaaacggaatgaggtccatacttttcagcgccatagttcttaaaaatttctggttgattttccaatattctacaatctgagctgcgctgatattcaccacttaaatgccaactgaattcctgactgaaagggcagtagtcagcaatttccacggagccaccataataaggcaaatcttctgcaggtattccactgagttcatcaaagtactgatattcctgtggtaaaggcttagggaacttctgcaaattacacacggcaactgctctctggtcctgtctgcaagttagctgcagtgggttacttctgagcgtgtcacagtaagggctcagcatctgtctcccagtgtcctccattaatgccagagtgattcgagagagtactcgattctgagtgtgagaaccagtcatcgcttcattctctaataaccttttttcccaatggttgagctcagtgcccacaccaccttgattttcaagttccattccctctagaactggacaatcaaaatgttttcgtgcttcctcaacaacacgaggcgttaccaggagatacacagtgtgacgaactatctta

SEQ ID NO: 343153 - DNA, 1000 bp, Homo Sapiens
aacaataaccattaattttttattaaatttgtagtcaaatatgacaatattttttctttcataaaaacaagcaacataaatatttataacattatcagtttgggaaaagacaaagaaaggaaaaatgaataaaagcgatcaaaagacaaattcgaacatagaataaatataccctgttaacatgcatgcttagccctgtggctgctgctagagtaccaggccctgagcctcacaatcacagttcaaaatctcctccagcttcaacatatccaaggcagggattttggcgacttcaaagaagaccgggtgagaatacttgtaatacacagccttgagactatcgtaagaactgaaagtcagcagtttgttcagctgtctgaccaaggggtgaagctcagagatactgtagccactgtaatgctccaggaagggaacccagtatccgagcttcttcatgtagagggccaggagtaaggaggcagcagctagcttggaagccttctcctggacatagtggtattcctgcagggtcatctcgcagatgtagcgggacaaggtcagtgtcttcatgttggtgtggatacacctagcatatctgcgcagaaaatggtaggcgatgggaatgttaatgtcacatttgaggacgttcaggatgttgatttccatgctgagtacctcagatcgctgataattatcatcacagatgtacacaaagtcatccacacgaggtgagttgtgctcctcaaattttgctgcaatcataaaggcagtggcaccaaggagttgtaacttatccttcttgcatactgccttcattaggtagagatccaccagcttcactgccaagtacagggtctcatgggtcatctcaaaggacacctgcacctccaccaaccagtccacaagaatggccctcatgtcactggtgatttcaatctgcctgttcatgtaatctgtaagtataaactgttcctctctctctttcatgtaactgaagatt

SEQ ID NO: 343154 - DNA, 1000 bp, Homo Sapiens
gaacagagtaggtttattttgaacagaagcccagatgttcagggcagaggccctggagccccagtgggacaggcttggcatgaggggcttctgggaggtagtcagcccacacctcctccatctatgagctcctgagccagggcctccaagtcagctggggcagccccacatcactgtcatatcagactcaaagcaaaaggagctaaagggttggggaacaggaaggggcggctatgtacagaaggggatgggtggagggggaactgattccattgagaaaatggtatctgtttttggttttccaactgtccagtaaacattccatatccctttgccctttgttctaggcattggcctgacatcacctgccaatgtgagctcaggagaaagatttattctcacagtttgggttcaacatacctgagaaagtaaatctactgcccaaaggccacctcttgattctctgtgctgagaggacattggcaggtcctgactgatcctgaaatcgtggcacttggctttggaatttagagtgggatttgggggtgtctccttttgatatttgcagtgtgcatgtttcaggcggtgttaaaggaaattcacttttcttaggggcatgagagcctaaagtaagggcagtgtgagcctgtggtgggagaggagctgactttgtgaggaaacttccatgggatgatccacagagcagaactgtggtgtgcccatttgaccttttgggggttattgccattctgcggttaagagcaatgcatgctctttctctgccgtctgtccccaccatctgggcctagctgagggtctgcacacaggtgagtggaaggtgactcatgaggcaaaggaggggtcctaggggcagctcagctctcaaggagggaacactggaggggaatgtggagtcaataaagggaggtggggttttggaacatccttgtcttcagccctggtgggagtgtgacatccagggccatggggcaggggctct

SEQ ID NO: 343155 - DNA, 1000 bp, Homo Sapiens; identical to SEQ ID NO: 160515

SEQ ID NO: 343156 - DNA, 1000 bp, Homo Sapiens
ttttttttttttttttttttttttttttttttttttttttttttttttttttttttttttttttttttttttttttttttttttttttttttttttttttcaccatctaacaaaggcactttattgcattaccattcacaattaacagtcaagaacaaataataataacaaataaaataacttttaagaggacaaggcattagaaataaaaaaggacactaataacatttgtaaaagcttgtactggatgtggttgcccccatttgtgtgtgtggttgtgtgtgtgtggttgtgtgttggtggccacagctgagcctctgtcaccagagaaggctgaggccccaatggcacacctcagaaacctacaccccgaggctggacggctggactcctgagcacaagctccctctcgcaccctttgccagacagtttgtctccaatttcaaactgacctaaggctcttactcctggattttttgtttttaaaccttctcccagccagtcttcgggagggcatgattagagaagtgctcctttgctgatggaggaggggacctaaggaagaaggtggatcccaggtgcctcctctctaattgatcctccccacccagtttcctttgcctctcttccttctaccaggtcatgttttttactctctgccccttctgcctcctagcatttcaaaaactgtagagtgcaccccatagtggacatttttagtccaggccttctaattagcatcaaaaagttcctggattcccaggcacgcctcctgaaaaagctgagagatatgtctctttccagtcttcttgggtgaggctaggttgcaagctctgggctgttcaaaggttgccagaatctctccattggagggatagaagcagtgtccctattctgacttgtcagagagtgagcttgtgacccttgaaagatggtgggtatcccttctcatcccctcggacctccacagttgatgcgtatgtctcccaggggaattagg

SEQ ID NO: 343157 - DNA, 1000 bp, Homo Sapiens
ttttttttttttttttttttttttttttttttttttttttttttttttttttttttttttttttttttttttttttttttttttttttttttacaatgaatgttgattttattaggtgagtctgcttttataaatccaagtaaacaaggttataaaaatgactacctcaaataaaatagctcttaatgtacctcctcttccttcacaccacccactttgggaagcactgttgactggaagtactcaattgaacatcccattgaagaaagccttgtgacatttgcttcttaaaagcaacagtagtaacaaaactacccagaagacaagggcctgagctccatccccctcctgagtgtttgtaggtaaggaagactcaggaaagaaagctgacttttttcaaggttttattttaatttaaaagacattgttcgtgcaaaactgttggtagttcttacaaaacatcccttccacattcccctcaggctgtgataatgcacgctttgagttctcccatgggactttcagcacagcacccaggtgactagttagctatactttggagccctcaagacagtcccttgaagaaaaggggcaggctcgctgtagctggagtctgaagcccctcacagggcctgggactgctgtgtgcagcctgcctgtaacccttaaggtcatgctctgctgtcacagaacccagtgtctgcctaatgggggtgtcttaaagctgagaacgtttttccatcaccaggaaagtgcttttccccatccaccagggatccctgagccagagcaggtcattctgaggccaactctggctggaacgcaggtttcttaagcagtgggttgcttaggtcaccagttccctggtcccttcttttgtcttctgggggcctggccatggctgatgttttcagttcctgcaggtaagcatcttcatttctctatgatgtctccatatggtgacaatgggacttgtttataggccacgatgctaattgga

SEQ ID NO: 343158 - DNA, 1000 bp, Homo Sapiens
tttttttttttttttttttgagccagagggaccatttttattagattccagcaagactactgtacatgtttcatgcagattaaatatgtgtcttcactgcccctgggaggggagcactctcactgtcagctccttcattggtgtgtcaaggggtgagtgtcaaggggagctctcaatgtattccgtatggggggcagttgggatcatgactcggggtagaggtgagacagtaggtagctgagggtccctgggaccttgagtcttcagaggttcagggactgcaggaccttggtcctttgctggtactggcaccagaggatcttgatccttcagaggcactgggactataggaacttgattcttcagaggttcagggactatacgaccttgattctttggaggctgtaggactgtggggccttgatccttaactagtactgggagaatggggtcttgattcttcacggactcggggaccacaggaccttgattctttacaggtgccacaactgcagaatcgtgaacctttgcatgctctgggactacaacatcttgatccttgactggccctgagaccactaaaccttgattctttacaggctcagagaccatggaaccttgattctttatgggtgctgtggccatggcactttcatccttcggatgctctgggaccatgggatcttgatccttgataggtgctgagaccatgggaccttcatccttgacaggtgctgggactatgggaccttcacccttgacaggtgctgggactatgggaccttgatccttgacaggtgctgagaccatgggaccttgatccttgacagatgctgagaccatgggaccttcatccttgacaggtgctgggaccataggagcttgattcttcacaggctcaggaatcctaggaccttgatcctttagagactctggtaccacagagccttgatccttaacttttgctggaaccataggactttgattctttggaggaact

SEQ ID NO: 343159 - DNA, 1000 bp, Homo Sapiens
gctcagttaattgtgggtctggttggcccagcctggatagcacttgctgagaggtcaaccacagagctaggaagaagggcctggagaatgtgcccgccctactcaccgtctgctcagactgatagacatgaagacatttaggattagagggaaactcgtgagcaactctctgcaaacactgtccattcttttcttttctttttattttgagacggagttttgctcttgttgcccaggctggagtgcagtggcatgatcttggatcactgcaacctctgcctcctgggttcaagcagttctcctgcctcagcctcccgagtagctgggattacaggcatgcaccaccatgcccggctaatttttgtatttttattagagacggggtttcgccatgttcaccaggctggtcttgaactcctgacctcaggtgatccacccacctcagcctcccagagtgctgggattacaggcatgagccactgtgccctgattattttttattttttttgagacagagtcttgctctgtcgcccaggctggaatgcagtggcacgatcttggctcactgtaacctctgcctctcaggtttaagtgattctcatgcctcagcctcccaagtagctgggattacaggcacctgccaccacgcctggctaatttttgtatttttagtagagatgaggtttcaccatgttggccaggctgttctcaaactcctcacctcaggtgatccgcctgcctcggcctcccaaagtctgggattacaggcgtgagccatcgtgcctggcccagccttttcttaaatacttccagagacagggagctcagtgcttctagagtccatctgaccagtgatccgcatttggaccacattagaaaagtctgtcttctttttcctagggaaatttgcctcccgaacaagaacccgctggtccaagctttgaatgcaggtggctgcggccagcgcactggatttatcttcccgaatgacttctgaaac

SEQ ID NO: 343160 - DNA, 1000 bp, Homo Sapiens
atttaggaaagctctttatttaaatcttaaaaagatcatgtgaaatctgcgaaaggttctcatactcagtgacttaacattattcatatttctaccacagctgcatatgaggtaaaggaaaaaaaattaagttaaaataggtaaccacataaccatacaataaaaatttttttcaaataagattaattaataaattgctgcacttttaaagttgtacacattaaaatgggtcaaatactgttgttttagattgcaactatggatcgctgtatcaagggtacagtgttaaaactccagcattaaacaagaagtctcattgagactcagtatctgaggaaatccatgttgctggtacccactgaggctcctcctgagccttctgtatggcagacaacaactgggcacatgcatcgtgcaagctgtcattcacaatcacatgatcaaaaaattggccaaactgagtttccattctttgggctaaattttccatctcttgtaggtcttcatccttgaacttcatgtccacatagtagtcagtaataaccttggcatttttccgagattgtttcatacacctcatattcgatggctttataaatatgacatagggcttcagttcatgggttcgaaccccttgaatatcctgaggctctaggtccatgacacagatctttccttcgacaaggactgtttgaacagcatccacactagtgccatacaggtggcctttgtactcaccatactccagcatcctgtgactatatatgaggttttcaaatgtttccttggacacatagtgatactcacgcccattcatttcgtaactctttttagtacgagtagtgtgtggcacagcactttgaaaatggctgggattaaattcaataagttgtcttctgagctcatttactccaacaccagagggtcccatgagcactatgaggcggtacttgtctgaagggcgtcgctggtacctcaccacctcctcgtaaggggcacc

SEQ ID NO: 343161 - DNA, 1000 bp, Homo Sapiens
ccattgctcattttatttcaatagccaactgtcctcacagaagaaactgttcatgtcacaggtgatcagaagcaccattctattccctagggactgcatcagtgcttatgaacagcctactttttaaagttggcaatcactataaaaccatcaaatagtcaaactaataaattttttaaaaccagtgcccataatggctgaaactttatggagggggaatgaagtagccccagcagccaggatgcttgctagtaaaaccccttagaggaggggcaaggggctgtggccaggaagatgtgggggacagagcagcaaggcaggatgctgcagaacctgctgtcaacgaccctggtcctggctgctggctccagccacctggatgaactggaatcttgatgtctgtggtgcccccagcaacctggaggaccaggcaaaggcagcagaaggctgaaatagatggtgcctcctgtcctagagtggggcctgaggaaatcaaatactgcctctggggcttgttccaataaatggtagtgtaacccaaggacagttaaattcattcctaaatgggagcttctcccagcgcccactcctcagagccctggccctcccctggtaatagcttcctccacactcttcttcaactgtacagcgcaggattgaaacttagaaattgctctccttcctcctatcttaaactgggaatcagttgccatctatgctatcaacctccttcctccctacatatcactgaatgaagacaggaaaactgttgctgttgccccccagtgccccactctgctggccaggagggcgggcctggggcctagtcggactgctcctgagacgatggctggctgggctcacccgacagtacctctgcatcctggtcatcagtgttctccttgtcagtatcaaacaggacggtcagtgagaaagatgatggaggtggtggtggcggtggcggggggaggaagtggagcgcagagaggtagcctggcgg

SEQ ID NO: 343162 - DNA, 1000 bp, Homo Sapiens; identical to SEQ ID NO: 160516

SEQ ID NO: 343163 - DNA, 923 bp, Homo Sapiens
ttttttttttttttttttttttttttttttacttttctatttttttttattaacaagcaacataatcaaaaacaaaaacacaacaaccttaaagctgaaacagcaataagtcaaactgctgccgcagttcatggatgtacctggggtacatgctccctcattgcgaggcaggacgtaggcacatgactgtgcatttaggcatatatgtgaccaagaagaaggagagaaatggaaaacactggagaacagaaagtatcaggaactcttcatcaggcaatcccaaagcgctctgctcttttcctcttctttgcctctgtatcctctgtggttccagttccagctgaacttgtgacaatcccaaatcgctccttcctctttttcagtttctcatcatcttcagactttctggagattgaagagacattcaaaccaaatctttgagctctttccttcagcttatccaagttaaccataggtttgttatcagatgacagaccttttgttggaactgaagaaatcccaaacctagctgcccgagcagctttcttactctccaagctcacaggtacattgaatcgttcagccctcttctgcattctctcagtctgtggtatttcagatgtaattttcaccactttcttctctgctgccacatcaacagttttttcagggggttcttcctctttgacagggagctcaatgggctttgtttcttcttcctctgtttcatctcccagtacatcttcttcatttgcctcctcttcagcatgttcttcaagatatgcctggagtctgtggataagatcttgctttattcccttggtctccaaaccacgagcaagacattcttgctttagttcggcaagctttagcttatggagctccaccgtctcggtcgccatcttgttacccctcactccact

SEQ ID NO: 343164 - DNA, 1000 bp, Homo Sapiens
ttttttttttttttttgtgttgctgaccttcacttttatttaaatatagtgatcttttaagagaataaacaaaaaatactttacacagcaaatattttacataaatgtaaacatgcatgtctacttcataattaagcaaaaaaacttttaggcacaagattttaaaaataaagaatgagacaatgaaaccaagactggaataacagaagtaacaaaaactcacatttcctaactcttcaattggtcttgtcttccaacctattggttaaggcctgagtttcagaaatcctaccttccttgccaaatagaaacatccactttggctgtatataacattatccacataacacactaattctctttcaaaataatgtaataaatataccattcatacacacacacacacacacacacacacaccctgctgaaccagcctctcaaataggaaaataaggattttggaattttcaagttttcctacaaccaaagcacatacacacacattaacaccttacatagaaaaaatgattctgctacagaaataaaatcgttagtgagtggcatgattacaaacctctagttcatttgtattaagtttcttcaatcacaactttactaaggcttactaagcgcctctgacacttcagatttaattaagtttttcatctcatctaaatgacccacagtacagtagacattgtacagcacaaaaaaaaggcaattttaataattcagttaaagacttctaaatcatgaaagtcagcatggatactttcagctgtctccaaatgcctggaatgttttcctatgtctatcctctgcacttcactggctgggtagtcttctctgccttctaccccaccaggctacaaccatttgaatgtccattcctgtggataccccagggaggagatgagaatgacagtccctgctttttttttccctttttctttttgtagaaacagggtctcgccatgttgcccaggctggtctcaaactc

SEQ ID NO: 343165 - DNA, 1000 bp, Homo Sapiens; identical to SEQ ID NO: 160517

SEQ ID NO: 343166 - DNA, 1000 bp, Homo Sapiens; identical to SEQ ID NO: 160518

SEQ ID NO: 343167 - DNA, 1000 bp, Homo Sapiens
ttttttttttttttttttttttttttttttatttttgcttctttttaatgtaaacagaatacacaatcacattaaaaaccccaacatgacacagaatacacacagaattatatatagatatttacaggccctcgaaagccaaaaggaaaaatggcccctctggttaagggaagcttctcttcctaccttgtccctgtccaaaatcaaagtgctgaggcagctgaaggagcctccgcaattacttctggatataatgtagcaggaggctggaataacatcagaaacaccccacccccaccccagagcacaaccaagataccgactttctggccctggccctaatcctaaactctcctcctttgcaagctgacaaagcaaggatttgtatgtctcgagaggcatcagcatgacccctgaaattcagatgcacggcggaggggttcccatcccattccagctttcccagccttgggctgattgtgaaatgagccaaaaccaaccatatccaagagaggagggtgggggaagtaaaggaagaatggatctcaggcagagatgactgcttcggagcaggaccctgggaaccaaggggaggtcaagctgggctcacccaagcccaggacagactgcggaagacacagtggggctgtgctgccacctggtgggggatgggagcactgcagcaatgaactaggacagtcccacaggtaccttcagatcatcttttctctccatttcagtcccctaaccaacagcctcactgcagcagctcttcccaggaaatgggcttggagaagacctccctttctaaccagaggtcatagttcatctgaaagtcctcagggaggtccacccgttggcccaggacactctgcaggcagttgtccactggcaggaagtcagggttgctgtgggcccggtcatagcgccgggcgttgaagcgttcaatgttggcacgaagggcacactcctctgcctggaagtcccaaggccgggcatc

SEQ ID NO: 343168 - DNA, 1000 bp, Homo Sapiens; identical to SEQ ID NO: 160519

SEQ ID NO: 343169 - DNA, 1000 bp, Homo Sapiens; identical to SEQ ID NO: 160512

SEQ ID NO: 343170 - DNA, 1000 bp, Homo Sapiens
tttttttcaatattacacattgcatcaggttggaagccagcacatacccccaggatccaagcagttttcttggacacgtctacctcccagtaatgtttccctgatgtgatactttgagagcccaggatgccagtacaataattgaaattcacaaatgtctggtatcttgtccctcgtgccccatatattatctgtggtttcggagagctcacttgtctcttatcttcagaaatgacagcacatgaaatgttgtttggagccactgtcacatcaactgtagaaaaattaacaggtcagctaagggatataatgtaactttatttgtgatatgagagaaatcttgataaagacttgagagaaaactgggaggaaccttgtttagaagttataaggaggggtaagttatgtgtgtcttggaaggagaatcataaatcttaaaacatgagcctaatagagaacataaaattctaaaagataaagataataataatgataagccgcagggtggcttatgataatgtgacttctccttaccccagtagcgtcggacatctgtcagctctctaaacacttctagcattcctttcagatcaggagctcgaaacactctcctttgattttttggaaaagtttctggcttcttcaaggtcacgttctccgtcctttttatgacgccatccacaccctgaagcagctccatcactgacccctgcagccgatgctccagatctgagatgagctctctcagggactgggtctgctgcaccatctcagtttcagagttcgtaaggcttttcagaatgtcttcctcctccttctccaggttttgcagctcattgctctcctcccagtccaggatgtctctcagttgctcaaaatctgccaagacgttggttttgtcatactgtatttgagtcttccaggaagctttctcttctctgatgtcagcttccaactcttcagcttcctgctgcttctgcctcagcatctccagagctgc

SEQ ID NO: 343171 - DNA, 1000 bp, Homo Sapiens
tttttttttttttttttttctttatacttcaggaatttattttttcacaatgatccaaagtattagatgaaggttttttgttttattttgcttttaattgacaaataataaatatacatatttatgtggtacagtgtgatgttttgatacatgtatacattgcgtaataaccgaaccagggtaattagcatatccatcacctcaaatatgtgtcatttctttgtgttgagaactttcaaaatcctctcttctagctatttcaaaatatatgcaataggttattgttaactctagtcaccctactatgcaataaaacattagcacttatttaatgtgaagtttttaatacaaaaattattttaagaaaataagcacaggctgggcgccgtggctcacgcctgtaatcccagcactttgggaggccgaggcgggtggatcacctgaggtcagaggttctagacgagcctaaccaacatggggaaaccccgtctctactgaaaatacaaatttagccaggggtggtggtgggcacctgtaatcccagctacttgggaggctgaggcaggagaattgcttgaatctgagaggtggaggttgcagtgaaccgagatcgtgccattgcactccagccccagtagcgtcggacatctgtcagctctctaaacacttctagcattcctttcagatcaggagctcgaaacactctcctttgattttttggaaaagtttctggcttcttcaaggtcacgttctccgtcctttttatgacgccatccacaccctgaagcagctccatcactgacccctgcagccgatgctccagatctgagatgagctctctcagggactgggtctgctgcaccatctcagtttcagagttcgtaaggcttttcagaatgtcttcctcctccttctccaggttttgcagctcattgctctcctcccagtccaggatgtctctcagttgctcaaaatctgccaagacgttggttttgtcata

SEQ ID NO: 343172 - DNA, 1000 bp, Homo Sapiens
tttttttttttttttggtgtcacatccatttattgtccatgaggctacagctccattctcagggccaggaatgggcaagcctgcccagtgtgccattcctgcctcccagctctttccctggaggcctaccatggtgccagcctggagctctgcctgtcctactgggacctagcagacagccccttggcccaccattcgtaacacagggacttggctggcctcaccccactggcggggtctcctccagtgctgacaacacttgccggtgccttaagtttggctgcaccctcctcctctttcctagtgtggctcatgctggctaccgggcacttccccatccatggccagtttgcaagattggctctgccttggtccaagttcctggggttgtccaagagaccaccctcggtcccggatccacttgcaagcccaagcttccagcctagaggtctttaggacgcctgtctgagagacgacagtgcttcccaagctttcatgcccaccctaggcctcccaattcctgcccttgccgggctgcactggtagggtgggagagtgggcaattaattctagctccaggttccattcctctccatgcagccctgcctgggcttgtcctgtttgggagaaaagtccagtagacaaggcctgcaaatgtcctgctgttcaagatatctgcatggcaatttggacaaaaattttcagccttctttagagtcacatctgggggtcgaagaatggatccacctgctgaagcagccaggaggcaagttgagcttcactgtgtgtcagaaagactggtctccacaggtcagcaaacataaatgaaagcagggagcaggggatcagcatggcctttgggtaacagactttattttccatttacaaaagaggttgattgcatgcaagctgtaaggatgctgtattccctgtggagggcaagcatgatccagcacagtcctctcctgaaacacaggctggaaagtacttatttgctcag

SEQ ID NO: 343173 - DNA, 1000 bp, Homo Sapiens
taaccttatttatttatttgaccacaaataaataaataataaagaataaatgaccacattctttaagccattgtattttggagtatctttgttagtctacaacacttgcctctgtgagtgcagtccaggccctgaaggcagatggagccatatcccaggctcctggtggaggaaggtgcagagttcgaggaacctttgcactcttgtgccttccctcaggcccaaagctcctgtagactcagtctcgtgaccccagaggtgaaccaggcctgatgtgctggtgtcaggtggatggtttaatgaggggaggagagtggggccctgggagtgggctgaccttcttgttttctggcggtatttcccctggaaccatcctcaggagtggacacagtagagctggacacttccactgatccggagctcccgcagctgctccagggcctgctggttcatgctggtggcccccagcccctgcccattgagcgccagcttcagccctccctcctggaacaggagcagcacctcaaagaatctctgggggtaaaagaggaagggggctgagatcagtttcttctgcccccagcgggagatccaggccagagttctgtctgcgaaggaggccctgagtgtcacaggagcatgggcagcctggtccctcaggctcacagtaaaatgcttcggctcttgcaagaccagtccccgtactatgatgacctgcccaggcgagagaccctggggaagagcatgtgagcagggcacctccagcctggggctcatcagcaggaaaggatgtccagctgggtactctctgctgccctccacaaatggattgatgttcaggaatccaacagcctctaccaggatgtcaccaaatatacccagcgtgtccacatgagacagtgggagccggtagcggaagtggagaaagtgctgtccattcacactcaccttcacttcctcattcccgaagagaaagaggatgaggaagctggagcctctt

SEQ ID NO: 343174 - DNA, 1000 bp, Homo Sapiens
ttttttttttttattttttttttttttttttttttttttttytttttttttttttttttttttttttttttttttttttttttttaaacatataagaaagcctttaattttgtcaccataaacattatactctgattgctcacttacagtataaaatattcaccccgctaaataaataagacgacattattgcaaacggcacttaaaccccccctgagagataagacctcccttagctcaggcagggggtgctcctgagtttctgtgtgagattccccaagcacagatatactctgggggctgagatggacaaaggcttgggaaaccgcactttgtgcttctggtcctgcagtagctccaaacagggttgtggagctggtggggaaagttgggggtaggggaaagttgggggtaggggaaattttgggcagtgccttcatcagcccagtcctagagagagtagaggggagtggaagtggggggaaccaggctgggccaagagaagaggggtggttagggaagccgttgagacctgaagccccaccctctaccttccttcaacaccctaaccttgggtaacagcatttggaattatcatttgggatgagtagaatttccaaggtcctgggttaggcattttggggggccagaccccaggagaagaagattctggcaatgatcagcccaatgaccagctatctcaggggacctgattgttggggatcccccaccctacccaaatattagacaccaacacagaaaagctagcaatggattcccttctactttgttaaataaataagttaaatatttaaatgcctgtgtctctgtgatggcaacagaaggaccaacaggccacatcctgataaaaggtaagaggggggtggatcagcaaaaagacagtgctgtgggctgaggggacctggttcttgtgtgttgcccctcaggactcttcccctacaaataagtcatatgttcaaatcccatggaggagtgtttc

SEQ ID NO: 343175 - DNA, 1000 bp, Homo Sapiens
ttttttttttttttttcgggtaaatgaatatgtttatttaaatatgtatacaagcatggccctaggagcagcagatacactttcccaaaggtggttgcttcctttaagatattgcacaatagaaaataaactcttgtcaatccttaaaattagtcttcaatgctatgtattttagctatgtaacttgtactgtgtcaacagtgaaccttattagattcacggtgtcatcgaacttatagcaagataaaaatcaatcagtaggaatgtcattttaaaaagtaaaatagtgggacggttgtggtggctcatgcctgtaatcccagcactttgggaggctgaggtgggtggatcatttgaggtcaggatttcgaaacccgcctggccaacatggtgaaacctcacctcaactaaaaatacaaaaatcagccaggcatgctggagggcaccttgtagtcccagctatttgggaggctgaggtaggagaatcgcttgatcccagggggcggaggttgcactgagctgagatcacaccactgcactccagcctgggcaacacagcaagacgctatctcaaacaaaaaaaggaagtcaaatagagctttaaacctgaatcatttacatctttactttataaaatgtaaaactacttttttacccaagacttaaaatatagaattatgtaacttctactttaaacaaaatgaaaaatgttttgagtatcaaacagtatattatctaccttgtagacagcatcttcatctaacactgccactgtgttagtaattcttaaatgacatcaaactagaagaaaagctgctcctacattgtttttatttaataagacaaatttggcactagactttttctagaaatagcattcatagtctatcgatataatagtaacatcttgttttaggttaatgaattcctattaggaagcagcactttgggacagtttttagtgacactaatttaattctatcattacagtcctctgacc

SEQ ID NO: 343176 - DNA, 1000 bp, Homo Sapiens
ttaccaggcgaacatagtaagcatggctaaaaggaataagagggggagggtagtggggtgaacaaatggagttggaagcattagccagatgcttcccaaggctacctggtagctgtagtgtgcagaataattgacccacttcctgacgtcagtcttgtcttctacagagatagatctcacgctggctttggaggcagaagttgtgggcatgctgaactcgacattcacgtgattggcaaatctggaaggcacttcccggtcagagccgagttcaaggtggcaaaagaaacagtgtgggtgaccggaagctgagtttttgtccggcagtcggtttatcctccacacaatggagttgaaggcatgctcgtacttggcagttcccagagttactctcatgacaggctcagagccagaaacactagtggagccaaaacttgccccccggttcactttggctttcaaagacttttcccccaggacactttccctgcggaagtttttcacccactcactgggcacagggtaacggatcatcacattctcacagggaacctgagtgagggggtcacgattggcggagaagccagttgacatcctcagccagctctgcacctccacctctgccccattgacacttgtggccgtcctgagtgtgaaaggcaaggtcttctcagcaaacactgtcctgaaccgcattagctcaaaccggcacgcatccaaagggttgaacagaatgacccgtgagttgtggaaaacatcctcatccacacacccatggaaacggcactcatggagcttgatccactttgtggtggtggtgggcatgatgtcctgcctcaaaactatttcattccctttgacgaggatgtcattgaggcccaggcggcactctgcgagcccagacaggaaactcaggatgtggatccgtgtcaagacatggtgctggagaatctggttgtctcctttgctcacaatgccagagaattcatctctgacatcc

SEQ ID NO: 343177 - DNA, 1000 bp, Homo Sapiens
gagatggagtctagctctgtcacccaggctgaagtgcagtggcgcgacctcgggttcattgtatcctccacctcccgcgttcaagcaattctcctgcctcagcctcttgagtagctggggctacaacaggcatgcgccactatgcctggctaattttttatatttttagtagagacggggtttcgccatgttggccaggctggtcttgaactcctgacctcaagtgatctgccctcctcggcctccgaaaagtgctgggattacaggcatgagccaccatgcctggccactggttattttttactgttgacatacttaattacaaaataataactttaaaaggtatggttcttcaataatgacacatatatcagaaggtaataatactaaaaaaaagatctgtgaaaaaactttcaaaataaaaaaattaaatataattttaaaaaatgacgtagaaaaactggatttatcatgtgtaacatgttttgaaatatctatacattgtggaatggctcaatatagctaattaacgtgcattaccttatgtgcttttttggaaaaaccacttaaaatttactcagtgactttcaaaatacattgttgttaattacagtcaccaagctgtacaacagatctcttgaactcagttgccttgtctaactgaaattttgtaaattttgaccaatatctcctcaatcctccactgccccaccagcccttgataaccaccattctattctctccttctatgagttcaacttaagattccacagtgagattatgcagcatttgtctttctaagcctggcttattttacttaacatgtcctccaggttgtcacagatgaaaggatttccttgtttttaagcattaaatactgttccatcaataccatttttaatatatttaaattatatccattttggaagtagtaacagcatgctttgatggtggctcagtagaagacattgtatcagaaatccacaaattaagcaactgt

SEQ ID NO: 343178 - DNA, 1000 bp, Homo Sapiens; identical to SEQ ID NO: 160520

SEQ ID NO: 343179 - DNA, 1000 bp, Homo Sapiens
accattaaaagtttattgttttatttcaatattcaggaacagtgtacactttccgttcagccatcgtcacagcacgtgctgtgtgggtgcggccacgtatggatcgcagagccgacctcagctcagcgacgcagagtgcttctgctgaaaaatttggaggtttgtgtctggagttttgttctttgtaactctctcatcatcgaggctatataatggttgaacagattatccaaactaattttggtatccaacgggtacgtctctggaaagaatcccttgggttggcactgagcactctgacttttctccgtgatcatgatcttcagcagtaccatgaagacagcagaactcaaagttcaaggaattttcatttttcaaccaatcttcttctgtcttttctccactgacatcttccattgcaagtagatcatctttagtgtcttccagtcaaggggaaccacatagtcatcaggcaacaaggattccattggaacgcctggagatccaaaaagctttactaattgaaaggcaaacccttgtgataatggtagctcaagggaacggtagtcagtgcttgttaagtcttggctgtcctcagctggtaattccttaggttcttcccatcttttcagctttctatcaaacctttcatttaaaaagtgaaaatcagaagtgactcccaaagagcacgaagtatcaggatgactatgtaaaatttctggagaaataaaccctgcatcatttagtttattacctactcttgtctgagattcgaaagtcaaaaacagtttcttgtttgtaaaagatggcttccaaatactagataaattatgtagcacaaaagaaggaatataatttttgtataaagatgcagagcaccttagtctgttaaatgacaggcaatgagaataacgctgtccatcaatatttaaaggggtagctttgataatatcaaggtaaaaccacaatggatgatgatcaaaggtcataagtttttgtt

SEQ ID NO: 343180 - DNA, 1000 bp, Homo Sapiens
tttttttttttttttttttttgggagactcgggtctttattagcaagcccagcctgcggcaccctgccccgccccggctggcagtgagtcggggtctctgtgcggggcgggaggggaatcactgcctctcctcaaaacgtgtgcaccagctggactgcgggtagagtctggacaatctggatggagggcaggccctgaggggtcataacaccaggcccagctcctgcggggaccacttgcaccatctgggaggctggagccccggggagccccgcggggcccgaggctgggcctgacggcggtggggccaggagctgcagcgtggcggtgcctcctccagtgttgctgctgtccagcagctcagtggctggggcgctgcggatgatgaggagtttctgtccgggtgggccggtggcaggcggctccgtcagcccaggaggaagtgtttctacctcctgtacgcagagtcgagtctgttcgccatcggccccgctcagcaccagcacgctctgcaagccctcgtccgtctggagtgtctcaaagaggacatcctggaccacaccagtgctggcctcgccatcccccgcctccccggggcctgggccagtgagcaactcctcagctgccccgctctgaacaaccagcaggttgggtgcctcagtagccacagctcccccactggaattggagagctggccggccacgggctggagctggaccgtggtcacctcctgtgctggctggagctggaccgtggttacttcctgtgctggctggagctggactgtggtcacctcctgcgctggctggagctggaccgtggttacttctggggctggtcggaggggctggagctgcaccccactcatttcctgtggccctgcctccccaccccccacattctgcagaacgatgaggctctgccctgtcccgctggccccagcgctggccgctccctgcacccctagacccccagggcctggcagccagaccactcccg

SEQ ID NO: 343181 - DNA, 1000 bp, Homo Sapiens
ttttttttttttttttttgggtgaaatgagttactaaatgtagcatttatttataaggaatgcattgtgaatagtttctcagttttcattatggaaagatgatgatttcagcccacattcagtgtatgtttctaaataacacaatcgacaggactgtctgttcagtacaatggaggacagctttttcagggcaaatgggatttcttgataatgctaaatctgtcttgtcagctgaatttcttgggctttatgtggcagtgtggtaaaaatatatgatcagatttcactgttaagaaaattctttcagcaatacatgtagagtcaagtttcttgcatggataactgaacatgtgggttatgagattttaaaaaatgtctcgtgacaaactttacggaaatgcaacaatctggacatctagttttgtctgagagtggcgtggatatgaagaactgtgctgttggtgctgatgccacactaagttttggcagtcacactcttggttcttcatatttgaggagatgggatggtgaggaggcctgttggctttattttattaatgccaccatctagaatacagattcttggatatttcatcttcacaaggtgagctgcaaactcagctgtgtgttttgccacatgccccacgatgacaatgaccttccctttgaagttctggagcatagcagtgtaagggccctgggtaagctccccttctgcagtgaaggcagcactgaatggaatgttgatgcttcctgaaatgtgaccacgaataaagtcttcactattccggatgtcaaccaccaggagctttggtttactggactttgttttcttgctgggtgttttgaagtggcctgtcactgtgagctcacacaagtcaatcaggtcctctgctgaaatccgtggtgatacttctgacttcaggtcatttaatgggatggattctcttgacagatctgtctttggaggatctggacactcagcagagaaataaggtgc

SEQ ID NO: 343182 - DNA, 1000 bp, Homo Sapiens
ttttttttttttttttttttttagaaaaatgctcaattttttaatagatgttaatatttttagtttcctgatttaaataatattttgtgtatttgccttttgctctggcacactatagaatgtttctggagttacaaatccaaaccaaccagccaattagagcatcccagggttcaaatcacaatttgggatacaacgctatttattctggatgatgctcaattccatacatagtttagggaagaaacatccataagaacatccaaaaacattatgttaccaaatgctaacatgtgattgtgctccgttgaatagtaccattcacatctacaaagtacacaggcagacgattttaggtgtggagaccaatttgcttttgctgctacagtaattcacaaccatcatcttcgagatttccatgctgttctagaatatggagtagtcctttttttatctggtggcttaaagtaggaataaacaggcgctgctggatactctgcatcaggattttccgccatcattttcagttttgcttcaatggcttttatctttgcagtgacacttaggttagactgagtaggctcagtgcttgaggatggctcgagactgattggaagaatcttatcattcttgttatgatcatatctctttacttgagcatgtgcccatcgcaccaccagcttcttggacagggccaacttgccattgagacactggatggcttgctctgcttcctgcttagtttcaaagttaacaaaacagtagcctcgaggctgtccctccaaagcacctgacttgtggaagaggaagtcaaactgctttaccttgccaaacttctggaggagcttgaggaggtggtattcggtaattttggggtccaggttgccaatccataatcggtgtccttcctgcagagagccctctgaaaggatggatgcattctccaggggaagagttttggtttctgcttccatcaatgtctatgaaatactcgtggcct

SEQ ID NO: 343183 - DNA, 1000 bp, Homo Sapiens
ccacatccaacctgtacatttatttacaaggcacaagctgagagcagactggaggctgccccatggccttcctaattctcctgggcctgctgaccccatcatctgaggccatgggtgacccccaagatgggggccccgagtggttgggttgggccggcttggccctgaggcaagctcgggggtggtctcctgtgtcccttggcttctcccctccccctccaccaggcctgggctgggcgccctctctctcacacagagttcctgtgtgttggtggtcgcaaggaaggtgggtgggggccagcctgggccagatggtgtgggctcggccttatctgctggagtggggaggtggcgggggcatggaggtcctctctcacaaagcctgctctgtcttccctggcagctgggccttaggaatcagcgttgcagcctttctgccccaccaggagcctcccatccacaaccacagaagccctacatgctgagaccccccagccatggcactccagctaggaggaggcccaggctaaggactctcccagtggggcaaagcaggggtcaccacggcggcggcagttcaaagacgaggagctggggagggaaccgggagcggcttcaacgggggcctggagtctggggtgtggccgacaggctggagccctgtctggggaggtgctagcaggatggatccaggccacactccgaggcggctcacatcggggaagcggtcactgcatgggggcgtggggagccccgagcctcccagcctggcacagccttgtcctaacgaggctgccctggggatctggctgccttttctggccttctgggctgtgtggcttcagccccggccactgtgtggctgcgtccaggcttcagctgcgcccagggctcagacccccagagccatcagtgcccccgagctgctgatcttcttgaagcggttggcagcgctgacagcaatgaagtttttcttccagcgcctcttcatgaggtattt

SEQ ID NO: 343184 - DNA, 1000 bp, Homo Sapiens
ttttttttttttttttttaaagatacctgagagtgtatatttatagaaagatacatagaaatggacagatggcatctatctatagatacagaaagctctgttagagaaccgtgtaggtacgtatatatgtgccacatcctccaccacaaccaacagcacacaattgcctggatcttggaaaaccacgcttgtttaagtggttggttccctccctagcagtttccaaaatgagagggatggtctcagggatagtccttaaatacgtgtgtgtatcactgtaaagtagagagagaagaaggagaaggaagagaagtggattttcatgtcgtgcatggcagaagagatgggactcttggggaaaagggcttgatcccactggaaaagcatgaaagacaactccagaaaagacagctaaggtttctaggttgggacataaaaacacaacagcaagacgttcgcactctgcagtccactgaaatcccttgtagcatataacaatcagttaagggcaaaataaaatcagaataatactaagaggtagcagctgtttatcttctcggagatttcgagggtctctggaagccgggccaagtaagggtgctctcctggaagaggctggggtggggcagagttgaggctaagggctccctggctctgggaagggtgtgggctgatccacatagatgctgcagatcccgagccccgagggagcctctgcccattacaggccactcaaaaccagagtcatttcctgggctagttatgcagtccccacaacatataaataaaagtttagttctgtgtttccatagatcttctacatgtaggctagctaaatattagtggagtaacaataattattaataacaataatcatcataataacaataattaatagaataataatgccttgtggtgtcgggggtggggtccttcatatggcagggtggggccctggggaggggctctatgtctggtagaagtggtggtaatggtggtg

SEQ ID NO: 343185 - DNA, 1000 bp, Homo Sapiens; identical to SEQ ID NO: 160522

SEQ ID NO: 343186 - DNA, 1000 bp, Homo Sapiens
cattttggctgttttattgcgatgcatagctaatgatatgtcatttatcattagctgttatctgacgtaccaaacataaacaaacagtgaagcaggctcaaggctctcacccattctggaaaacagaggaatacgacgataacctttgttcatgcatagaagtggcaaagtatattgcccaagaaattcatttcctgctattaaaccttgaccttcaacaacaaaacgtatcaatgccaattctgggacatgaataataaatgtgaatgtttcattccatcttggactaaaagcattttttttaattacacgagtctgctgcttcatttgatcatttggaacaccaaaaacttctataattactaatgaatcacctttgttagatgatgaatgagtaagaggcaactggataccactgatgagccttattgtaagtgtaattggcataccctcttttatgttacttgggttaaagtatgatttactctctcttaagaaatgtggtttcaaaatatatccagaaccaccattatccaaaaatttcccattttgcagatccatgggcagaccaggggtctggaaatttaaagccaccatttgacaacctatattccaaaattcttggggattaaaattagaagagtctgctcttgttgctttgggatatattctggtaatgaacttcctggtgtgaaaaataaactcatggactcgcaattttgaaagttttcgggcttgtgtctccccaatagaattattttcattaaattgctgatataatcttgaatgttgaaagcttttgaatttctcagctttcgtataaatgacaagatcagataaggccagagcaatttttagcttcctggtcttctttttcttgaaaagcattactccaggtaacttttttacccctgtttccttgtcttgattgtctccacgcttatcagaaccttttctttcatgggtttcctttaaggttcctattttcttatttttaact

SEQ ID NO: 343187 - DNA, 1000 bp, Homo Sapiens
ttttttttttttttttcccaaactccatggaaatttttaatagcaacatccctacatttctcaaaaaaaaaaaaaaatctctaggagttgaaagatttttttccttagatcacaggttgtggaagatcatctgggctgcttcaattatattttaagtggttggatgttgtttatcacctggatgggctatacgtatggacaagggctggagtaagttgctttgatagttgactataaagagtgggttgagctggctcagcacttcgtcactcactgagatgccatccaagtactgcttcagcatctcccgcagcttcccattgatatctagcagctgggctcgtctatgttggaggctcagttgctccagtttcactttgttgtaccttttccagaaattctccattcctatgtagtccaccatcaccttggtgagctcctcagtaagctcttctagattattcttctgaatcccctcctgctccttaggagtcaatactgatgaataaaaaggcagcactttttcttcttcggtttcaaatttcctacatatttcagcaagtttaaggatcttttcacccttatcaacaatctttctcagggccttgagggtggcattactttccagggtgagtctgactaagttcttctgggatgctgcccgggcctgagttctttgggccttaagttttcgcagttgtacaaggaccaattccttgtcattacggatataccggttctcatcttcactctcacggctgtgtatcatgatcttgccttttgaaatagttatggcatcctgtagtttctgtatttttttcatctgtacttcaatctctttggagctcttctcatccttcacctgcagggtctcaaaggcagtctttcgatcctctgtggcatcagtgtaattcttgagtacatcctggaactttctccacagatcttctactctgttctccaggtgcagtcttagaaagtgcttctcttctaaattcat

SEQ ID NO: 343188 - DNA, 1000 bp, Homo Sapiens
ccatctgcatcattaggttcagtagttaccatgacaatatgatgcctacagcaatctaacttgatagccacatgccagaatgtgaaaaaataggaccagctaagaaagtgagagaaatataattaatctgaaccacattcaaaaaaatgtgcacaaaactaggaccaagagggaaactgctgaaatatcattgaagaggaaattataaagggcagcaataatcaagtttcagtataaaaactttgctaaatagagccatgtattggtctattactaagacaggaagtagtcaaagttgctctagaatattgttctgagcccctgcccctccccctgcttcccatttcttgctacagggccctgcggtatcatctttgattctagctgttagggccctaatttccccaaggctctcaagccaccaccataagtgccaccaccatgtcactctgctcatgtgcagtctgctattagacccagactttccacctgatgaaataatttccatcattgtgaagttaatcttaagagactgaattgtgctgtgtcttgagagatcctgtcctcttgccttctaagtgcccggtggaggcatcgggctagcacaaacctcttgaagggtcccaatatggtagagaggggctgggagattgagaaaaagagagcaagaaagtttcagtcctgggagatgagcctgggacgtgtgtttattctcagcatggctgggtgggatagcgacgctgagctaggcgatttggccgattcaggctagtggccgtgggcagctgaggcacctgagatgggttgtaaagaggaacagccccttttaaggcaggtggaggaagaagaacaccagggttggagcagagctcaaaggaaacactctctggtccagacaagcctccaaccccagcgcccgcagctgctcccccgctggatgcggatcctcggccttcacccccacctctgcccctggagaaggcactaacatccggcagag

SEQ ID NO: 343189 - DNA, 1000 bp, Homo Sapiens
gtgttttcaaaggcttttaataaggttaaaaaaaagataaaattcctcttagaaaataacacttagcagttaatgacatcaaagtcatattgactaaagaaggaaaatagcaaccaattgttaaagccaccttaacataaaccttattgcaagtatacacatcttttgaacacaatctatagaaaagagaataacttccaaggcattacaactttttctctggcatgttaaaaaacaactctgactaatggctaatgcattataaaatttcctatctgacaaatctttctagattatgcatagtattttacttttgaaaggtcataaaaaagatataaatcagtttccataagagctaatattggcccataacgaaagtttccttcaggttattttaatgtattaacgtaagaaaactccaggtgaagaagaatttcaagccaaaactaagcattaaaaaataggcgtttggttgaggttaatttttttttttttttttttttgagacagagtctctgttgcccaggctggagtgtggtggcgcaatcctggctcactgcaacctcagcctcctgggttcaagcaattttcctgtctcagccttccaagtagcagggactacaggcgtgcaccaccacgcgcagctaatttttttgtatttttagtagaggcgaggtttcgccatgttggccaggctggtctcgaaatcctgaccccagtgatccgcctacctcatcctctcaaagtgctgggattacaggtgtgagccaccgcgcccagccttaattttcaaaagacaaataagcaaaaagcttttcccgttcctctcccaaaacagcaatgagataactgccttgtaatgtttgtttgctttttacaaataccaatttaccacttgctggaatcccagcccaggaaccagcctgtgaatgtgggtggctcatggccctgttttatgatgacaattggtgtcctcttgtctcttccagaagggtctgtc

SEQ ID NO: 343190 - DNA, 1000 bp, Homo Sapiens
tttttttttttttttaaggtgaaagcaagtttattaagaaagtaaaggaacaaaagaatggctactccatagacaagagcagcgcctagagctgctggttgcccacttttatggttatttcttgcttatttgctaaacaaggggtggattattcattcctcccccttttgggacatatcgggtaacttcctgatgttgccatggcatttgtaaactgtcatggtgctgtcaggagtgtagcagtgaggacgaccagaggtcactctcgtggccaacttggttttggtgggatttggttggcttctttactgcaatctgttttatcagcaaagtctttatgacctgtatcttgtacggacctcctgtctcatcctgtgacttagaatgcctccactgtctgagaatgcagcccagtaggtctcagcctcattttattcagctcctattccagatggagttgctctggtttaaatgtctgacagctgggactacaggcacacaccaccaagcccagctatgttttgtattttttgtagagatggggtttcaccaagttggccaggctggtctcgaactcccgacctcaggcgatctgcccacctcaacctcccaaagtgctgggattacaggcgtgagccactgtgccctggccagatgtttttttaaaagagagagaaagagagagagagagagaaagagagagagagagggagagaaggaaactttgcactctgttatcttcaacctcttactctaccttcctccctagccgaagtcccagtcctaaagcctaagagaccctcattggaacttgacttctgcataatccgcctgggtgcccttgggcatccgggcctcaggcctgggtctgacgcctgggaagttgagcgtggcataatggagctcctcttggctctcctgggattctggggcttgagtggatgatttgggttctgggaaactgggcaactgatactgctttttctggttcttctttgat

SEQ ID NO: 343191 - DNA, 1000 bp, Homo Sapiens; identical to SEQ ID NO: 160523

SEQ ID NO: 343192 - DNA, 1000 bp, Homo Sapiens
ttttgagacagagtttctctcttgttgcccaggctggagtgcaatggcgcaatcttggctcactgcaacctccgcctcccaggttcaagcgattctcctgcctcagccttgcgagtagctgggattacaggcacgtgccaccatgcctggctaatttttttgtatttttagtagagacaggatatctccatgttggtcaggctggtctcgaactcccgacctcaggtgatccacctgcctctgcctcccaaagcgctgggattacaggcgtgagccaccgcgccctgtcagaacaaactttgtatgtacttctccccatcaagaatgaagaagaatcacttggttggctggaactgctggtaagattcacattttttcctcctagctcaggagtaggggaatggggacaaaaacagtatcttacatattggcttcactgaacaaagagaaggacacagaagagaagcaataacaaaaccttgggcaataaaaccagtagcgccttcccgtccaagacttggtgggccccttgaaccaaagtgctaatgggctcataaagcaaggaacaaggtcacccctttagtgaccccaaggcaggacatctatcccagttatagagaaagagcagtgaccaattcatcactgttgccagctgcacatccaggcagcaaatgcaaggaacctgctgagtgacctccaagacaaaagacagtggagcagcattcagagagtcttgagggaagaggggaatgaccttgagactctactcccaatcaagtcgtcattcccacataaagacaactgttcacacataacacaggaggcctcagagtagtggcatggagaagacatacacgagaaagctttagaggaagctcaacattcaagttaaggaaacaacttccaggaaggtcagggttggcctctgctatccttcctactcagctcatggtccagagcccagcatgaggggctacctgtgcacaggccttggtcagtt

SEQ ID NO: 343193 - DNA, 1000 bp, Homo Sapiens; identical to SEQ ID NO: 160524

SEQ ID NO: 343194 - DNA, 1000 bp, Homo Sapiens
gagttttccttagttttatattttacaaagtcagtacagcatttgcaacacttctaacacagatcagaaaactataagcttttaccttattataaaattattcagcatgtaagttaaaaggagaaccacatgatcactgaatcccatgtcttagatggttctggggttctaaggtcttgagagccatcaagtagcctattccagggtttccatccagcaatccccaccccccctacatttacccctgcttccaggagaagttctcatctccaaacaagaaggtcgcagactgtgggcctcgaagctgcacctgtgtgaacctctgagctcagctgccagcctccatgaagtctccacatctccttatctcagtgaagaagtggctgtggccatgagggctgcgaacaatgacccaggcttcttccgcagtacctccggccgatcaaattctaccaccttcccattgcccataaccaggatgtggtcacagttcagcacagtggtgacacggtgggcaatgacgagcacggtgcagccctggaaggcttcacggattgtgcgctggatcagggtgtctgtctccatgtcaatggaggctgtggcttcatcgataaggatgatcttggagttgcgaagcacagccctggcaatgcagagcagctgcctctcccccacagagaagtttccaccgttttccaccacatctgtatgcagctttttggggaactttgagatggccttggtcaggaatgtcctctccaaggcatcccagatctgctggtcagtgtgacggtcaaagggatctaggttgaatctgatggttcctgagagcagcactggatcttgagggatcactgagagcttggaccgcaagtcctccaggccgatgctgcaaatgtccacgccgtcaatgagaatccggcctgccatgggctccaccaggcggaagagagccatgcccaaggaggacttcccagagcccgtccttcccacgatgccc

SEQ ID NO: 343195 - DNA, 1000 bp, Homo Sapiens
ttttttttttttttttttttttttaaaccacaaatggttgatttatttctgactctcagcccgtctctcacgaagacagagcctattgaccaaaaacttcaggatctgcatctgagcagatcccaggaaggggaagtcaaagggcccaggtcagaggcccaagttcagacttcagcagcagactagggtcagactttaccaaagtcagaactcgaggttcatgtaagtccttagatcccgctcccaagccctgtctttctcctccctccttctctcctccctccagctcagtgtggccacccgagggggtctctccctcccagccacagctcgggtatcccaagctgggaaatgtgtcactcggggctggggtgctgatctgtagcctagtccttcctggtccctcttgaggacagtggggatgggattggcacggccctcaccccggggtcccagccccattcctggctcccagccccccctcagcagcagtttgaagcccgggctggagatgggcaccccaagtggaaggttgggaggctgaggaccctgcgacagtgacagcaggtgagcagtggatgtgcggtggttggaatcttggaagtgggtgtcacagttctcgcagtactggagggagggagtaggagaccggttttccgggctccttgtctctccatggctctccctgaccatgcgggctacctcagggaagccagcttcttcagcgagctgagccgcatccctgccactcagctcacagacccccacccaggcagccccacggcccaggagatagctcacagctgccccctggcccgctcgagcagcacacatcagtggggtccaccagaaggcatcccgggcgttgatattccccccagctcctcctgcctcatgcggttccagcagtctcctaagttctggcaggtccccctcctgggctgccctcagtatccggtgagtcatcttatcctcagcctcaagggatctcccttgtcca

SEQ ID NO: 343196 - DNA, 1000 bp, Homo Sapiens
ttttatgttcttcatggtaatctagaatttttatttgattccaggtaactttggacaatagacatgatgagatgttttctctttgaataagttaacagtttaattacattgaaataaaatatactgtgggcttaatacattgtaaatattacagaagaagtactactttgctatagtaatttaatgactgaagctacatttaataacaatcttaccagtacttgtatacaaagtattatacagattactaacgaagatattgcagtggttgcaacgatgttaccagctcaacaaacatctaacaatacaatattcttctaagaggaaaagtaataatgttagatttacagacaataaagagtcatgtttcccgcttgaaacattggaaataaatttgaatccagatacaagaaaaggtttcctttcttgggaactctgatccccagtaggcctagtacagtcaatttacatgaagatagcttttaagatgccacggcaatgtaaagaaactctcccatccgaaaattactgatttgtaggccactgctcaaacatctgactttttagaaacctatttacatacattcagcccaaatcagtagatagaatgtttttttctatattacaataggcattgttaacatttcatcagaaggccagtgcaagacaattaattgttaatagccattgcccagcatttaggagattttaaaatatcatacaaatatacagttagagtgtgagaaatctaattgtgtgcatgatatgggtggtctcttttatggacatgaaatggcagaaattaatcaacaggacagtaactatagcgctactcatccagggcctaattctcatctggtggttgggcctatttcctgcagagtggatttaggcagcaaaaggtccttggcatttaataccagatagacttaactcaaagtgccagagaggcttggaaatcatctcaagtgtaggacagatgtctacagcatctctcaga

SEQ ID NO: 343197 - DNA, 1000 bp, Homo Sapiens
ttttttttttttttgtatgtacatttatttttacattgtagaagaagctactacttttttacagcatataaatgaacataggtataaaccagcaagaatgaaagaaatagcatatatctaatgaaaagagtcggaatttctagaacacaataaatacctacatcctactttttgggaaccaaatgccaactacatatatataacatggcaagtgctgctacatcagaggtaccaaaaatacttaggaattgtaaataagtatcgtccagcacgtggatgctcaataaaagagctggaggactaaataaataggaaaatcactctacctactttcctgtttccatcttttaggaattcaagtttattcaaaatttcgttatataatcctgtatctatgatctcttcaataatttcggaatggtagttttaggcaactttaaagcttaagcttattctgaatttcccagagtgtttttgcactttttttcagatgggcctcttcttcaggggtcagctttatctttataaggttggtaataccgttctctcccaggatacaaggaatactgaggaatacttcttcatctattccatagaggcccttaattatggtggaaactggatgtattctcctaagattcttcaaaatactttctgttaaatcggccacagataggccaatggcccaagaagtataacctttcattttaataatctcataggcagttgcagtcacttctttgtggacatttttccattgctcaggatctttatcagttcctatatcagagttcagatccttcaaagggacaccagctatgttcactccactccacacaggaacacttgagtctccatgctctccgaggatccatccatggcagctttcagaatggataccaagcttttgtccaatcaagaaacgaaaacgagcagtatccagattacagccgcttccaataatacggtttttgggaaatgcactcaacttccaagctac

SEQ ID NO: 343198 - DNA, 1000 bp, Homo Sapiens
tttttttgcaggcatcacaggcaagtgtttattgattgcagagagggatggtctatagagctcacacccatactcccagctgggacccagccttccctgatggctgccatccaagtcttcactgggagacaggagagctgggtttccacaaggaggctggagtaagcacaagggcatccttggtcagtgaggactcagctgcctcgaatcccaaggccttcaccaatgacactgggaccccagatcttaatttgccattctggttcggcagcaggatggagtggatgatctcagtgatgatgtttttcagaacatcaggttggaaccagccaatcccagagttcatcagctggatccgatcagagctgatgttattcaagttgagtataagttggtcacctttggtgtaaaactgagcttccgagctggcttcgatgcccagggtgaacaaagggcggagggcttcactggagggaaacacttccagcacgatcagttgggccaccttggcatggccttggtctataaaaaactcgggagtgtcctgagttaggatcttcacgatctgggtagatcccagcttatctgcagccttttcattgatcagcccgatgcttgacttcagccgatgggcactctcaggaagcacagagtccaacaggaccatgaattcttctggagagagcacagcagccactgcagctttcaccacgtcctgactcacgatgaggctgaacgggatgttgtccagggtgggcattgtcagggaagctgcagagttattgaaccacttggtcacctttccctgtgagtccaacaacttggcccccaggtagagctgaatggtgtcacccttgatggcaggatacagaaggtcaaactccagacggtcaatgctgagggaaatgggcaccttcaccagctgcaggaggtctgcatacatgccattgaaggaagcctcgatcacgggacacagctggtttttcactagattgggcag

SEQ ID NO: 343199 - DNA, 1000 bp, Homo Sapiens
aagacaaacttcttcatactttttgtacttttaaaatgatttactatgtacatggattacttccataatcaagaaaaaaagtaaaaacttttaaaatgctgtgaacgtggtttccatttttattttctctgatgggtgactgcacatcagcatcttgagttatgctaactacttaggctggtcacgacacacacacacatacagagaagtcacacaggctgtaccgggctggctgttgcaaatgtacatgaattacacgggttgaagttgtttggcagctagttaacatatgccacccaatgacgggacacaatctggtcacacgctgcctctcctgcctgttgctgttctttacaaaggtccgtgtgtcgggctggcaaagtggcatcctgctggcatctctgtggtgccccggaatggtggagtgcccaggtcagcatctactctgggtcccattctcaactgctctggccttgacatcagagcttccggttccctgctggctcttctgcacactggatccatgccagtccaggccccctccaggcacacacctgaggcagactgagagcacaatggacgctgtcctgatgtgaactgtgcccagacacaggatggggggaagcgggagatgtgaccacgacaccacacacaagctcgatctttacagatgggccctctgggactgctatatgggtggtgcccgagagacacgggggccatgtggagccctccagggcacagttgctgggagaggacagacgggaggggacctgtgcccatgtgcctagctctgagagcagagctaggagggtggatggggaacgtgtccgacatggtgctagattgttgagaagtcacgactacacacagctggggagcatgcccctctcccagttcattcacacggtgggttagatacagctagagagaagtggagatatgcttttttgagggaggacctttcctggtgtttggataaacagtgagacagactcct

SEQ ID NO: 343200 - DNA, 1000 bp, Homo Sapiens
tttttttttttttttttttttttttttttttgagacagagtcttgctctatcgcccaggctggagtgcagtggcgcgacctcagctcactgcaagctctgcctcctgggttcacgccattctcctgcctcagactcccaagtggctgggaccacaggcacccgccaccatgcccagccaattgttttgtatttttttagtagagacggggtttcaccacattagccaggatggtctcgatctcctgacctcgtgatccacccacctcggccccccagagtgctgggattacagacatgagccaccgcacccagcctcgaagtaccttcttaaggggaggggagaatattacaaagtaccttctaaagttgtgggggagaatattacaaagtaccttcttaaggggaggggagaatattacaaagtaccttctaaagttgtgggggagaatattacaaagtaccttctaaagttgtgggggagaatattacaaagtaccttctaaagttgtgggggagaatattacaaagtaccttcttaaggcgggcgagcgggggcagggcggtggggggtaagggggcgaggaatattacaaagtaccttcttgggcggggcagaatatatggtatcagttagtggggcgggaacaagtcacagtggtggaatgtcatcagttaaggctattttcacttcttttgtgaatcttcagttgcttcaggccatctggatgtgtacgtgcaggtcacaggggataggatggcttagcttgggctcagaggcctgacagaggtgaccttctcaaagtttgggagaaaatctctatggcagaaatttgcatgaggataagaggtgataagacactccacaagagaactctgcttgttccccgcatttcgtaagataaagacatgtcaccattgatgtgaaatattatcgttttgttacattaggtctcttccaggagcctgcactgcatgagaaaataggctctgcatcttcaa

SEQ ID NO: 343201 - DNA, 1000 bp, Homo Sapiens; identical to SEQ ID NO: 246567

SEQ ID NO: 343202 - DNA, 1000 bp, Homo Sapiens
ttttttttttttttttttaaaagctacaaatttttatttagctattattaaggaacgtaggcacacggacagaacaggtctcataggtaaccagttgtgtttcctaatagggtgaatacatatcattgccatgaatacatcttttatcataaaatgccaatgagcatcaaaagtaaatggtttgattgttgttgtcactgttttgtttaagaaaaatagggccttaaaataagtgcttcagtggaattcttgaacagtaagtagcctgttgatagtggacctagtttaaagcaccacacaacaatgtgtgtttacatcacccctttatttcatagttagaaataatacagttccacagggtaaattgtcaataaataatggtgtttaatcattaaacataaaaatcccactctttggcatctgacaggattctatttcttgtcaaactaatgactgtatagatatagctaatcttagtgatcattcgtcaatacaatatgttacaaaggtgcaatttactttaaaatatacaacagcgaaacatttccagcccaacgagaaatctgatcaacttagtaagatatgggccaacttccccaaggctctttcacgtagtttgccttaatgaaagtgtaataaacgttgattaagagttcctagggttttctaatacttactttgctctaaatagagtttgccattcattctggctaaagaaaaatcacaattgcaccaggaatgacccactcattaattaaaaggtgttcttattttataagcaagattgctaatacctaagaaactcacagaccccaaaataaaaagcagttctgtgctgccagaaatcccaattcagtaataaattgcacctttaagagtcaaaaatgagggaaaaaagaaatggaacgtttacaaaaggtaagttacatacatttttttttcaaaatatattcaagaatagttgagctgtatttgttactaaacccagggcattatttct

SEQ ID NO: 343203 - DNA, 1000 bp, Homo Sapiens; identical to SEQ ID NO: 246568

SEQ ID NO: 343204 - DNA, 1000 bp, Homo Sapiens; identical to SEQ ID NO: 160528

SEQ ID NO: 343205 - DNA, 1000 bp, Homo Sapiens
ttttttttttttttttttgaaacggagtctcactctattgcccaggctggagtgcagtggtgtgatctcggctcactgcaacctccgctgcccgggttcaagtgattctccttcctcagcctcctgagtagcagggattacaggcacatgccatggtgcccggctaatttttgtattttttgcagagatggggtttcaccatcttggccaggctagtctcaaactcctgaccttgtgatccacccacatcggcctcccaaagcgctgggattacaggcgtgagccaccgcgcccagccaggaatgaactattgatgcgtgcagcagcctggatgcatctcaaggaaatgatgctgagtgagaaagcagcatatgcagaagggaacatactgtacgattctgcttccatgacattctggaggctgtcacgccggtcctggcccctagggcagccgggggatgctgatggccccctcccagagccgcagggccgggtagagcggctcctggaacgtggcgcggaaggtatgcaggtggctcatgccgcccgtcacgtcgtagaaggcgaggacgccggcctcgtagtccaggaagacgccgagccggtcgaggtcgtcgcggggccgcaggcggctgcgctggccgtcgtggaaggcccagtactcaaggtcgtagcgcttgaggcaccaggactggcggttgcagcccaggcgggcggcggccgaggccccgcggcgccgaagggaggcgtaggccgcgcccacccaccagccggcgcccgcctcctgcacgtcaacctcccagtagtggcggccggtggcgaagcagtcacgagccagcacttgccagagcgcgtcgaaccgcagcacgggcacgggccccaggctgcccagcaggccgcagcgcaccgtcaggcgatcggcggacaggcgcaggcgcgcgtgcatcgtgtcaggatccagcgtgggcgtgcgcgcgtatttcagcaatagcgatcgctc

SEQ ID NO: 343206 - DNA, 1000 bp, Homo Sapiens
aaaagggacattattcacattttattaaaccaaatattagaaaattgctgtcatttaaaaatatctgcaagcaatttgccatatcaataaagaaatgtctacagattcaagtctgaaagagaagaaggtaagtgatcagtaacccttacagacatggaaaccaaggaagcctcattcctgtgctgagaatattctagtagctcctgctgctgccacatggcagctgggaataccagtagtctcagcactcggtcagtaccgtgcaagctcccttgggaatgctgataaatcctggcatgatacagcagtatatatgttttttttgttttttttgagacaagagtcttgctctgtccccaggctggagtgcagtggtgcaatctcagctcactgcaatctccgcctcctgggttcaagcaactctcttgcctcagcctccctagtagctgggattacaggcatgcaccaccacgcccagctaatttttgtataggactatagttttaaggcaagtttataacctttggctcatttgagcctcacagcacttggtaggtagtgctattatccccattttatagatggcactgagaagtaaaaagtgactagccctggtcacacaattgatatggactgaaactgccgctttctggctatcacgggccttgacacagctagtttgtgacctttacagtctagctctgtctctgctacatgaatcccaaatttttgaatcaagttcccctctgggccataaggcctcatctcagacccccaaggaaggcagtccaaaggtagactcaagtctcgcagagtaaccaggcactaggaaagcatcatgggcagtagctccacgagaggggccagagcaccaggcactggccagagaccagctgcattcaccctgagcagtatggcctggtggccatgagcacagacctggaactcacagcctgggcccagactccagctccaccactagctgtgcgaccttgggcaa

SEQ ID NO: 343207 - DNA, 1000 bp, Homo Sapiens
ttttttttttttttttttttttgatagaaaaattctttaatgaaaacaagtttacacgttgaacttatggcttaactagaataaatctaagtaagttaaaactgtataaggaccaaacagataatgactggtatatatgcaggttctctcaaaacggtgattcctagttccattataagacctctttaaaagcaaaaatgcaattctgtagatgaaaacagttatctcagagggtcaaccacacaatgtcatacagagacgctggtcttaagccatttttttccatattcatataatttcaaaaacatgagaagtatcctacttgctgagaagtgccaaatgaccctaatattcaaaatatcttagaaatgctatcctttagttaacatacccttaaattttgtaacattgattttaccctggatttagtccatacacgtcaatgtacagacttatcaaagtacaatgctggaacaactagtgtttgtatttttggaatctagaaaataaaaacaatatagccatgatttcaaataggtgagtttccttatataacatttattcatatttattgtataagcatcatgattttttcttccaattaagttttagtgacttcctaaagacatttttaacaacattcctcaaaaataaacttacttagttttcagttttagttactagtgcctgcctataaaaggaccttaaatgatttaaccctaaagccagattcattcctatatatacccagtcagttgtctgcaaagaagtcctaagacttcactgaatgcccagccacaaaactaaattaccttcaaaaattaatgttttatagtttgtagaattctcagttcaatgtcagttgcttaattagttgtcataccaaaaaaaaccatacagagcacacattgttccaaagaagctggataatgtagcacaatgtagactgtgagattaaaattaacttttgataaaaagggagtgagtacttgtatagaag

SEQ ID NO: 343208 - DNA, 1000 bp, Homo Sapiens
tttttttgtcattcacttttctgcatactttatttgttacaaacatacaattttttttaaatatagactgtaaaactccatttgcaaaagtctattgtaaggagtgcacaccagcaggaaggattcttacattttttctctgtgagtttttctgtcagttttgctagttagtggtaaatacgggacccgccatttttacagaccagtctgaagcttctgactgtattcacattgctcttttgaagcagccctgctcctctcaaaattgatcagaatctgagcttcaacctacaggcagtgagatcaacagcccgtctggactctgcttttgaacggttttcaggaagtgtgatttctgaatgggtactgcacttcacagatttgtttgaattgcccatgcagctctatgtttgttaaagtgcattcttctttaaaaaataagaggaataatctttactctttaaccaaggtacttaaaaaaatgaactttttggtctctcagcagatattcccaaattgatcctatcactacaaattttagtgttttatttacagacatttatagggttacaggtggaggggaccttataaaattaaaggtgcagcttctcttgaagcagaaatcagttctacaaattcatacacaggaatacacacttggtttacaatgcataagcatgtgggtatttacacagagattgaagacatccccaaaaaacacattttaaagtaatttccaacctaaactctaattgtacatctagatcaggaagctgtctcctgctatcaagatttggttttaattcattcaaattatttctgtagattctctactggcaggacatcagtcccagctttggagtgaatagtctaagaaagccactggtagatactatgattggcagtgaagattcctatagaacggaaagtatgttatctggaaacagaagacaaatgaattttaaaaatgatcttggaaaaacatctggatggaggccca

SEQ ID NO: 343209 - DNA, 1000 bp, Homo Sapiens
aggcaacaagggtctattggaggaaatagtatggaaattggaatatcttcagtgaaataattgcaaggcgacatttcagggtaatttcctaccgcgttttaacgacgaataaagaagatataaaagtgtcatttatagagaaactccagcattttgttttcttggttattctaacagatcaattgaaacatataatatgatttttaaaaaaatttttggccaaacactgtattcagtctttcacgctacaaatctgtgtcattaccacttgtcacccagtcaagatggaagtgagtggggttaaacgagaagaaaattctgctctttttccttctgataatgggcaaggaaaccttgcaaactccatcctaaggcattttcccatgttgtttattgtggctgatttctaactgaaagttacaatattttcaatctcaggcactggggtggttttggtgaaaacacatgaggaacccttggggatttgggaggtgaagggcagttttttaatccattagctgggtctgccccggttcaccacccagaaccaaccccaagcccaccaagtggggtgacatggactgagtatggcagtggggacaacttcagccccagctcactccgtggatgggaggggctgaagaccagggctgcctgcggagaggacagcccctcctcctgaagactcctcctattcatctcacagagcctcttcctcctctagaatcagccgccaggacctctacaatctgacttctgctgctagtaacatcgcaaatgcagaatctggcttctctgcaaggacttcaggcttgtcaaactcaatcaccttcccattttccataaccaggacgtgatcgcagttgagaactgtgttgaggcggtgggcgatggtcagcacagtgcagcccttgaaggcatctttgatggtgttctgaaccagggtgtcagtcttggagtccatagaggcggtggcttcatcaaggagaatgatctttga

SEQ ID NO: 343210 - DNA, 1000 bp, Homo Sapiens
ttttttttttttttttcttaaaaatgatcttaacattttattgctgtctatacttatcatatatgtagtgcaaataatggcttctgatggttataaagcattcctgaattatagactacggctatacacttgacatacctgctttatataacatacagtaatatttagacctaatacagaaattcagctactaggaaaattctaatatactgtatataaaaaagctctcttcttagtttcccagggaagactagcacagtcttaactaatgattagtgaaataatacaaccacaaatagtaataggagcttgagaaaaatatttctttaaaaatgaatcacacacaaacacctaccattatacatacattataatcaggcacaatttttcaactgtgttcagttatatgctaagaatgtgcattacaaagtttagcaaaattagtgaaaagggaagcaagttcaccttagtgttacactttttcttcaattaactagtaaacagttcaagttctcacaagcaatacaacaccttttttatttttcacagttattgaaatcagtcaaatattaaataatttaattcggaagtattatttatgcacacaaactacacctgtaacagcatgaccttttaccctttctctgtgactacctctttcccagtatattggtcacatattatctgaaaaacagctacggccacagcataatttatggagactgagtagttcagtgatttcttctactgacagtgctccagcaacatcctgtttgttagcaaaaatcaggagcagagcatctcggagttctttttccgttaacaactttgcaagttcgctgtgtgcttcactaattctgtctctatgactgctatctacaacaaacacaacagcttgagtattgaggtaataatgtttccacaatggtcttaatttgtgttttccacctacatcccaaatagtgaattttagatttttatattctacagtttccacgtt

SEQ ID NO: 343211 - DNA, 1000 bp, Homo Sapiens
tttttttttttttttttttattttgaaacagtttaaacattttattttagatgtctttttcttttttttccccgaaagcccgctggctcctaggttggctgttgccctaggcacagccgaagccgtctgtggttctgcactctgaggtgcagagaaggccagagcgtcacagggaggctcaggacgtcagggagctgagggcctaagataaataaagtaaaaacaaccgctgttcgagactcaagtcccctgttctctcgcctcacgcgggcacagggagcccccgggccgcacactggccaggggcggagctggatcccggagagccgccgtctccgcttcgccgcccttcgcgcgccccacttcagcctttcagcgtaaggcaggaaccttttttccagacggcaaagaaagggaagactttgccggagaaagaggcagtgaaggtgaagatgggctcctgggtctgggcgttgtggagggtcacctgccccgcctcgtagtccagggcgactctcacgccgcgcgggatctcgctcagcggcaggtcggtgcccggggaggtgctggcccagcactgctggtgcgagatgatcacggcccagacgccgtcctcggcgctgagtcccatctctcccttcctcctcaccccctccccggccacccccaccgtgcagccgccgccgtcgcccagctgcaggtcaacctgccagcggtggcgcccggaggagaagcccgggaagcccagaaccgccgggaggccgtcgaagcgcagggggctgtctggcaggctcttcttctgccgggtgtacctcactgacttcctgtcttccgagagaaccaggctccggctggcggtctgagggtccagagtgatgacccctgaatctatttccagatgatgcgccaagttttctgagaacatcctcatcatctctgggagggtgagtattttcctgtggaaatcacggatcttcttgacaaggtcaggagaaatggc

SEQ ID NO: 343212 - DNA, 1000 bp, Homo Sapiens; identical to SEQ ID NO: 160530

SEQ ID NO: 343213 - DNA, 1000 bp, Homo Sapiens
ttttttttttttttttttttaaaaatacagtggctttatttccattgtttatagtccccagtatcccatctgataagaaccttcaattctataaacaaaaatatttcaagaaagtatgttacacaatagtacatataagtaatagtttggcagaattttaaactctagtagttcatacccccaaaaaacaaattttaaaattcaaaaataacagttttatttaacatatgttacaccttaacatttaaaatatcatgctctagttaaatatttcatcaacaacactgtatacaaataaaatattacataaaatatatttaagaaaatgttttggtctttgatctgaacaataaataaaaccacaggcacttctacatagacagggaagcagttactactcaataataatcttgtataagcagcatgtgaaaatatggcaataataaattctggaattttaaattgacaaaccatctatgcaaaagtctgtaacttcaaccttttcactcaagttcaaaatacatatgccttcctggtccatattgaaaattcactaacacgatatggttgttagcggcaattcaatcttcagttggccattaaggaatcacactgattttcaaatactaaaattacactatgataccaccaggaaaccaaatacaagaaaaattaaaccctctttctccttattatgaccataacatcacaacaagataaattagatgagtgtcacaccatgattctcattttgcaaaattaattaacacacaaaaatactgttggggtggcaggaaatttccacaattgaaaaactgaattccacaactgacaactgaaatttcagttttctagacaatttaaaatttacccaaatcccataaaaataaacataattccatttcacgaaaaataaatacctgaattacaaataaatcagtcattattatgggaagtaggaatattatagaagagggcaaacaaaatcacttaaaatggc

SEQ ID NO: 343214 - DNA, 1000 bp, Homo Sapiens
ttttttttttttttttttttttacagaaggagttcaaaatttatttataaatttgtgtaaaagaatataagacctttttcttttgtacatatttgtaccataaagaaagtagggattaaaatctaaaaagacccccaaagctttcaaaacctgatctgagaattagataagaatatgtcacttagaaagacaagcctgtagcacccatagctctgattaacctgaaagcatcaagtgactccctctttttctaccctaccaacatcactctaattatacttccaattagaaaaataatgtagcatttccctggcagtagagattaaatatgagttcaggaatcagctcctccaaacatgcataaatgaggacaaggagaagccagtcactcctgactgcacggtcaagtgtgtgggcagttgaaattaaggtaaaaacagtgaggctgaacaaaatcacattaagaaaaagcatctcatgaggcttttcgaggtcagttgatgaaggccagataggagtcaatattttctcatataccccagctgttaccgctattcatattccaacagcctccagattgctcgaggccacctggttgacttttgccttggagtcggtccagaaaagcattatttaccctcctgtgttcagtctggtggattttggctctttcttgctcttgctgctgccgtttcagttccagtaattcactcttttgatgttgttcatccttcatcttttgcaattttctgttttcttctgcctttagagaatctctgtaagcccagcttctggcccatgttgaggattgtgggccacaaacagcactttgacaggcacttctgtctggcgattctgtgttcagtttgctcaagaactcagcggttttgtattgctgatgctctctaaatgcttctcttctaaggttttcttgaagtctttttttctcctccagtttattgctcttctctctctgaattgccttcattttttggagttc

SEQ ID NO: 343215 - DNA, 1000 bp, Homo Sapiens
cagagggggtctgtgtttattcacacactcctggtacagtgaggatggaggaacatttacgaagggcacccctgggttgagaacatctccggggccacagatgtcatccaaaggttcagagcagtccccatttgggttcccaggggcaagacgcaggggtccaaggtaaaatcggatctgggcccttggaaggtgatgataccttggggagaaggggtctgccagaaagcctcctggggtcaggcctgggcagactggccatgtggttggtaaccgtgtcgggggcttgtctcatcccagcctcaacacccatcctatctgccaggcgcagaagagcgtggccgagactgaggggagggcaggaaccatgagcagagccagtaaacaaagagtcggatataaaaatacaaatgtgctgaggaagtcccttagaaagaggctgaggctggggtcacgccagacaggggtgggggcgaggaacggcccggaggactgggctcaagtgggtggaaagctcatgcaagtacgcagccaaacatccctggccgcgcgcggtccgacaccggcggccgcccggtctgcagaccagactggccggaggggggcggggcaggggagccgtgcgggagggggcgggccgggggctgggggccgcgggtctccgtgtccgttccggtgtgcggggtggggctgcggcccgaggttttaaagtgcatgagcgcggcggcgggttccgggcgggtccgcgccgccgctaccgcggccgccgtggtgctgaagcggacagctccggagtgcctggcggcggcggcggcacggccctgcagcccccgcccgcgggcgcctgggccggggcgggggggcgccggcagccgcatcgccggcccgcgctcctggccgctgcgaggctgggcccggagcccgccgcccgagccggcgcgtctacactccggacggcggcttctcccccatccccttcagcacgtcgtctatccggtca

SEQ ID NO: 343216 - DNA, 1000 bp, Homo Sapiens; identical to SEQ ID NO: 160533

SEQ ID NO: 343217 - DNA, 1000 bp, Homo Sapiens
gtatttcctgaggggtgccagggcctgggatccagcgaacatctctgcttcatcagccccaggctgcccagcctctgccagtcttgtgggggaaagggggtgacagtgtctctctgtggaccaggctggagtgcagtggcatgatcctggctcactgcagcctcgaactcctgggctcaagtgattctcccacctcagcctcccaagcagctgggactacaggcgtgcgccaccatgcctggctaattttacaaattttttgtagaaatggggtgttgccatgttggccaggctggtctcgaactcctgagctcaagtgatcctctcactcagcctcccaaaatgctgggattacaggtgtgagccactgcacccagcctgattctgaggccagccacaggctcagctcttcagtgagccagcacggagaccatctgtgtggcatccagcccacctcacctccctgtggccccagggcatggcctcctggcctctgagtctggcgggtagtagggcaggaagaggctctcagaggcgcagctcctcatggctcggtgcgtgtggaggagcagccgtgggaagcggtttgtgaagtactggacgaagccatcagggacttggccgagtgcctgtcgcacctcaactgggagctccctgtagtggtgcttcttgttcctcacagcacggagcaggtctcgcactgatgtccccttataggaccggaactttctcagatctgtctgcagcggcatggagatgtgctcgtgccagttgtcccggaccactgcgcagcctcccgcctccagtgccctcaccaggggctcctgctcggactccttctccagccagtcactgacgtcctggaagaactggagttgcttggctctgctccaaaagaaggggtgggccagcacctggggggcagaggggcgtggctgcggcagtgggctcaacatggctccaaccaggtcccgggcaaccaccttgtcgtggacctctt

SEQ ID NO: 343218 - DNA, 1000 bp, Homo Sapiens; identical to SEQ ID NO: 160535

SEQ ID NO: 343219 - DNA, 1000 bp, Homo Sapiens; identical to SEQ ID NO: 160536

SEQ ID NO: 343220 - DNA, 1000 bp, Homo Sapiens; identical to SEQ ID NO: 338771

SEQ ID NO: 343221 - DNA, 794 bp, Homo Sapiens; identical to SEQ ID NO: 160537

SEQ ID NO: 343222 - DNA, 1000 bp, Homo Sapiens
gaagttaaaggacactttatttactgacagattgaaaactgtaactccaggtagtgcaaaatgcaccacaacccaattacaaagaacaggtgttaacacacaatgtttaaacaatgctacactcatttttggcaaagtgctgtattgttcagtctgtgtacaaaactgaccatctatgaaccaatcagtataaaaaatttctataaaaacaaaatttagaccgtggctcaagaaaacaagctgccatttatgcatagattgatgtacagtaacctaaccaaatgtcccttttgaattttcaagttactgaaaaaaaatgtgtcgagaaacacattaagaaggcacatgtacagtctacaatactcttcagtctccctaactcatgccctgcccctataaaggaaatatgttcacaattttacttgagaaaaaaaaacaaagccacttaaaaaaaaaaaaaacacacacgcaattattaaagttcaaaatctctggaggaaaatacaagcaaaaccactcatacactccaagcctgaaacacacatctaacctccccaggtactggtttggttttcagaggtccacctagaaaacaaatactaaaacttcaggcaaaacagagcaaaactggacatttaacaattacacaatttttaaaagtgtcgtaaaattctcaactatatacaaaacattgtccacttaagctgcctgcctttcaagagtaactctcctcccatgcaaaggatactgttgcacataaaagatatcctcatctgcatgttttccagtacctctttctccaccctaaacagttgaaatttaattggtctcaaatttcaagtgaaactgatacatggcaaggctgacaccactgtatcatgtaggttttctaaataaagcattttatgtataattttaagcattaaagtaagtagatagggatgccatttctaatatatcagcatggctgatggcagtgaaaccatccaagatagaaggc

SEQ ID NO: 343223 - DNA, 1000 bp, Homo Sapiens
tcccagaagatcatggccaagatgatgtcctaagtagcttcctctgagattttatgcccaagagggagccatctggccacttgcttcttcttacatttctaatagctgctccatttccttaagggctgttgttaaatcatttacttgattgttacataaggtttgctgttctaggaatcggactctttcctctttcatctccagctttacctttaaggcctgtaactcctccatctgctttttggctgtttcgttaaaaagcttcagctcctcttgcaaagtttctaacagcaacatagagtccatgtgatcagtagtggattcttgtcgtgatgccagggtctcactgcctaaagctggatcaaggcccttgctctccaaaattgccaaacagttgtcccgaaacttctccagcagctctaccttctgggtcaggtccttcagctctccctgagtttcagtcaacttctggtgcaactgcttgttgacggcttctaacagctggttcttgtccttgagctcttcctctgatttttgcttactcagtggtttgtagccttttctgacattccttctggtggcagtgtcagtagctttcatttgcccattctctcgtctcagtttggtgatttttgtaacatcattctctggacctcctgaatgaagctgtttggaaacatcgacttctttggacctaacaggtaagagactcttagaagtggcccgagtttgtgtgtctgccggctggccgccgctcagcgcagaggggggctgcaggctatacactgtcttaaccacactggtcatcgtaacgaggcggcacggctgaaccccaggagcccgccggtcctgcccgcagtccttctcgctctcgtttaaaagattccctgcagcaactgtcgtgccaccggctaagtcggccgcctgggtttcaaatagaaacttccggtagctaggcggaagtgggtgggaatcgcactctgtagacagccatgttgta

SEQ ID NO: 343224 - DNA, 1000 bp, Homo Sapiens
ttttttttttttttttcctggctaatttttttttatttttagtagagacagggtttcaccatcttggccaggctaatctcaaactcctgacctcgtgatccacctgcctcggcctctcgaagtgctaggattacatacatgagccaccacgcctggccagctctgtcaaacattaatttgatcccaagcagagggacttttgatctcaatctgcatgagtctgtctctaggaaggaggctgatcattatgctgggggggtgatgagcaccctcccatcttcctctgtccagatctcaggggagagccagcagataggaccattcagcagccaatgtccaaataaggttttgttactcgaagcgctgccaacctactgtgggtcattttattcaggtccatcccaaataaccagaggactcggagtttgcagccaggatggctcagccgcttgcaaagcagtcggacacctgtgtcccctagggcgttgttggtcaggtaaaggtcggtcaaggtctggttgatccccagggtgaagtaaagattctcacaagccttggctgtgaggccacagctatccagccgcagggtctggagcttgcacgtgggatgcctgaggccctcacacagcagcagcaccccgaggtcccccagctcattcaggctcaggtccagctctctcaggctctggttcacactgagagttgaggccagctcgtcacaggcagcagcagtgaggcggcagatcttcagccacaaagtccgtagtctgcagactgggtgcctcagtccctggcatagtaacctcaggcccaaatcctccagtgcatttcctgtcaggtccaactcaaccagatgtgggttggtgccgagcacagaagccatctcctgacaagccccggactccagctgacacttcctcaactgaatcatctgcagcctgcactggggatgccgcaggccctcgcaaagcagcatcatgcctgggaatccaacgccgtt

SEQ ID NO: 343225 - DNA, 1000 bp, Homo Sapiens
acatatacccggagtttttccttttatttacaaagcagtaaaccaaattcctgtgtgaacataaatatccaatataatataatattgcgtatgccatttcccccctcaaatatgacttcaattttggccagttgttctgacttaagccaaaaattagtttcatctatatgaacatatgatggtaagtaacctatttattaccttaaaatgtttccccacataaaggaaatggtagagagtaaggggaaaagagaaataagagatgtgataaaacctattccaccatctttatcttcatccacagcatgtcctagacattcagtgcctgggccagtctctatagtaaacttgggctgatctggaaacgtctccacttagctctgtaaggatggcacccttcagggtgcttcagaggaaacttactgaattcaacccaagtgtcctgaaagaaattgaagaagttactcaaagagctgaactttaaaacaaggagtagctgagggtgaggcatatcctatcttgagtttctgagcactctggtaccatggaatgtctgtacactgaccttcgccaaagccaagaaagccctggtaggagtcacagcagccatgggtgagctgaaaggcttttcctgacttcctggggtctcaggaatagccagaggtgaaaagatttgccttttttactacataattgcacaaaccatggtatctattttctgatccagatttccaaaggcttttctgaaaactacaagatataccccttgtggactgtgtgaaaataaatttatctttatgtatttgaacagtagccatagatgtgcctcttctctacagatttttctgtcacacacatacacatataaacacacacatacacacacagagtctgtgtggtgggccaaacatgccaaaaataaatactctcacttctctaaattatttatagaactcatctgatttttaaaatatgttaataaataatctaaatgggggag

SEQ ID NO: 343226 - DNA, 1000 bp, Homo Sapiens
aaccaatggctatgggctgggtgtctatgggaaggtaagataactgccacagaagaatgtgtagtccagtggtgcttaaaccgtgctccatggtgtactatgtaccctctagaggcccctcaccagtcaccatggagagaatgtgtgtgtgtgttgggggggtggttctgagtggttggggtcttaccccactcccaacatccgtccagccctgctgtttttctttcttttgcatattgagcttctgagcaagatttcatccacagaaaggattgcactgttaaaaaagataaaaaaaaaaaatagttgggccgggcacggtggctcacgcctgtaatcccagcactttgggaggctgaggcaggcagatcatgaggtcaagagatcgagatcatcctggccaacatggtgaaaccccgtctctactaaaaatacaaaaattagctgggcctggtggcgtcggcctggtggcacatccctgtagtcccagctgcttgggaggctgaggcaggagaatctcttgaacccgggaggcggaggttgcagtgagccaagatcatgccactgcactccagcctggtgacagagcgagacttcgtccgggctgtggtacaggaggattggtctttggacactgtaatcctggcagatccacggggcatggaagagaaaaatttccattcacaaacgccatccgtcttggagatcctgtagaaggtctctcttgatcccacggggatgcgcaccatgtccttgtgttgcccttccacggcctggctgggcgggtgcagggtgtagcccagggcatgtttggaagactgctttctgcggagacactggattctcaagacattctgaaaggcctttttgaactcttggctggagcatgggtatatgatggggttgatgcagctgtttagatatccgagccaaaatactattttaaaaactgtttcagagggcttgaaatcagggaagaaagacccaatgggcatgacta

SEQ ID NO: 343227 - DNA, 1000 bp, Homo Sapiens
agagtgaaaaattgcctgcccaaccaaatagttcctaaaatgttctcactaccaggtcgtaaccatgaaacctactggtccagaaggttgggatatccagttttcacttaggaacaagcgatgtcacataatacatagccatagcttccagctgactcctcatttgcagactgcctaggtctccagctacctggagatcagcattctagaccctttctccacggtggcatcataaaattcacatgcttgatatgctctctgcaattcttggtgaaatatctacaatccattcccctccgggctgtggtacaggaggattggtctttggacactgtaatcctggcagatccacggggcatggaagagaaaaatttccattcacaaacgccatccgtcttggagatcctgtagaaggtctctcttgatcccacggggatgcgcaccatgtccttgtgttgcccttccacggcctggctgggcgggtgcagggtgtagcccagggcatgtttggaagactgctttctgcagagacactggattctcaagacattctgaaaggcctttttgaactcttggctggagcatgggtatatgatggggttgatgcagctgtttagatatccgagccaaaatactattttaaaaactgtttcagagggcttgaaatcagggaagaaagacccaatgggcatgactaagaaaaaaggcagccagcagaggacgaagcagccgaccacgatgcccagcgttttggccgctttcttctcccgggagaacttgaggagcctcactgagaagtgcgtcttggtcttggcgctggccatcccgctgcctcctgccggggcgtttttccgatggatgcggagcgtcacttgctccgagtccgacttgtcggtcttgaggccagacttgaggccccggctctccctcttggccaccacgtagacgcggcagtacatgaccaggatgatggccagaggcaggtagaaggagcccagcg

SEQ ID NO: 343228 - DNA, 1000 bp, Homo Sapiens
ttaagttcagcaaagaaaaaagcattttgggggaaactactgagaataaacaatgtgttttagtaatcagagagaaatcaatagcatttagtagatttggtcagcaagaaatacaattacaatatagcatgctgtttattttagcttttacaacaaagcgagggtttaaggagcctgagaagaatttcacaactattgactatacagagtcttcaattccaaaaacagttaatagtaacttggtggcacatacaacatgcattgaatactctgtattattcagtaactaaataggatcctgcatcattctcttcacagttcacaatcatacattcattctcttttacctgaaacagtccattaatattaaggtgcaaagatcttggacaaaaaccaagaaagaaaacctcatgtccttatttttactaatgtatagctgatgatttctgtgatgagctgtaaatttaaaagcgtgactctcatttgaataactgtagagtaagcaaaccagaaattctcaatctattggcaacgggacaggttattgggttagattttagggtacataaactttatatgagagggactgtctgttggaagcataatacactatctaagatgttgggaattgtgtttattccatgttaacagtgaatggaaagtaggcattgttaaggctttaaaaattctcctttgatattagcagtctattaaaaacatgacttgggtaaaccaagtagatctcatgaaataggcttgaggaaatatttcaaaggccctaaagttctgaaacagacttccttttttgagtaggatacttatttctttaaggtttcttaaggggaggcttcaatctatgttataaattatattttaaaagattgtttttaataatgctatgcattttaagtacaattcaaacctatcctttatattaaaaaggaaaataatatcaaaatatttatctggcaaaagaacttcatgattctgaagaaaccac

SEQ ID NO: 343229 - DNA, 1000 bp, Homo Sapiens; identical to SEQ ID NO: 160540

SEQ ID NO: 343230 - DNA, 1000 bp, Homo Sapiens; identical to SEQ ID NO: 160541

SEQ ID NO: 343231 - DNA, 1000 bp, Homo Sapiens
ttttttttttttttttttataattttatcccatttttaatattttggtctagcaacttgtgatacatagatgacaattttgtgagtttttcaaatgtgtgtacagatttttgtaaatatgactcttttgtaattaactcatgtacagcctcatcctgtatagtttaatgatgaatgtgcaggggacctgtctcaggctcctatatggttcctgggccttatagccaggtttgtgtggcgctcccgacttttgtgactgactggtgtcttcccatttggactgtggcctggccagagccccttgcatatccccactgtcaggggcagccaggactgttcccatcctcctggaatgggggaaccttccttatcccctgcccacatcccctctccaataaagcacctgtgccctcagcaatggcctgccatgtgctgttgctgggatgtttgtattaaggtaagtgtgggtattggttttttgagcaagggggtggttgaagcatatggggaaattaatagtggtggcatctcaggggaagacattccttggctcctctgaggggatacagcctccagtgggagactggcattgttgtgtgagttcaggaggtgaggaaagactaggtaggaccgtgcactcatttgtcccttatgtgtggctccatccctggtgctcagccacacctgggcccaggagaggttgtgggaagcataatatctgttttcagatgagctatggcaaagtgcctgccaggttcatgaattcaggctgtggcggccggagcccctccacctccctgtggggcctggccttgagagcctctgcatacgtccgcgtcagcctagggggttccaaatccagcagagtggtaggattccctaagtccctgccaccacaccagaacacacctctgtgctactaggaggaccagacatatccactgctctgggacctgttggacaagagatggtcatctaccacccagccttggctcgctcaa

SEQ ID NO: 343232 - DNA, 1000 bp, Homo Sapiens
ttttttttttttttttttttttcccacataacaatatttttatgaccttaagacaaggaggaaaaaaacctctacaaggaaataggaagaaaaaagataatttgtatggtcatgaaagctttcactgcaaagctattttaaaacaaaaccaaacacccgcaccagagtgatcgtttaggaaaactccctaaaggtcattgttaatggccacatggtagtttacagcactgttaatgattcagtgtagtcctacccccgcttcccaactttcctgtttttcggcggctgcaaaacctttggttagagctctggggcatcatttgccttcccacagacaaaggcatcatttaggtgcttccatcagccactcccgcttctcctcagccaagaacaatgaaagtcctgtcacttccctgctttagacatttatgccacttctaccccttggctcttaccaatctttctgtataaagtcacttaaaaaatgactcccttagattgcctcagattaccatcaacactttgaaaaagctgccaggtgcacgcctgtcatcccagctactcaggaggctgagatgcgaggatcagttgaggctgggggtttgagaccagcctgggcaacatggtgagacccccatcccaaaaaaaaccccaagtttgaaagagctgattcttaacccaacatatccctactctttgcccgttttccaaattctcctttgtcagactcgtcctggggcctgtgaacgggagcccatttccaggcttgcccagcactagagcgcatcgtcctacgtgcttcctcgtgtgcagggcactcgccttcttcctcctcagatctggtccatgtttgccttcgtgatggactttcatccgtgttctccagtaccgtgctgtgcttcacaaaagccacgtcccctgccccttccgccaggcaccggaaggccccgctgtagtcgtagtatctctccagggggctcttgtcacacaccccttcccc

SEQ ID NO: 343233 - DNA, 1000 bp, Homo Sapiens
ttttttttttttttttttttttttttttttttttttttttttttttttttttttttagggaaacaagattcatgttttatttccacagagaaactcaaaagtaggaagctcctccttcctggagaactgtcacagtgacttcaggtcaccaaagggaggaggtacagaaagatgctggtgtatgtgacgaggctggtggccactgaagcaccacagtgcagtgggaagaaacaaggagagacaagctgggtccccagcctaggaaacagaggtgtggcagccgggccagggctggcacaggctgggggccaaggggaggagctccctgacgaccagtgcttttcggggcctcggtggtggttgcaagaaattgcctaccaaaacttcacccactgcagcaggccaggttgcacccgggaagccgaggaagaaggtgagactcccccctttgcaggggtcttgactgagtacttcccaccataggcagtgggatacgcatgctggttgtaattgtagttctgatcggctctgcctgcacgtttctgcagtgatgacgcgtccgcaccctcaataattgctttccagttgaggaaaggagtgttctgtttgaaatcctcccagagtcggctgaagtagaggagggctcgggtgctggggggcgggacctggttcttgtttatggcatcccagttgatgaaacccagcttggatttaaaattcttccagaaagtgtcaaagttaaacatcccaggagacgtctcagagttctgaatcccagattccccgctcccgcgggcttcattccctggcttttcacacccgggtttatgtccatttcctccgccgctcccaccgtggttgccggaggaggagccggtgctggatccccaggaggactcactgccgctgtcacctctgctgccaccactgttgccactgctgccaccactgctgccgccactgctgccgccactgctgctgccactgctgctgccaccac

SEQ ID NO: 343234 - DNA, 1000 bp, Homo Sapiens
tttttttttttttttccgtttactggtttattataaaggatatcacaaaagatacagctgaagagatgcatagggtgaggtatagaaggggcgtggagcttccaagttctctccaggcgtgccactttgcaaagccaagtgttctgttctccgaaagctctctaaacctgtcttcttgggccttttatggagacctcattggatagggatgattgaagcatggacaacactggagaaatgggattggacaaaagaggcataatctaatacagatggagtggggaagtccaacaaggcctgtctacatttcttcctctcaggtatggggcagaatcccttctgaaatgggggtctcatgacctaaaatcagacaaggtaggtcagaggattctttttatggccaactggaagatgggcaaaggaagattatacttttagtttctatggcctgccttggggagaaaaagcagcaggtgaaaggaggtcaggagaagatctgagaaacagcctgctgttttctgaggcccgaagtgcccaacattataacaaaagcctaaaacaagggttttgggagttataagccaggaaatagatgaaaacctatctatatcctcatatcacagaacccgagttttgaatcattctagttatatttaagtagtatgctaacaagcagagctgtcatgactggcactgaacacagaatggcatgaggctttagttagcccatgaagctttcttaagggaaaatgcacagtttctgttgggcttttgtaaacaatgaaaatagttcccagggcccccagaatagttcaccaggctccactgcagcctggatagcctgggcctatgtttctcccataaataaaggacagcagagacaactgcaccaactagaacctagggatactgagaaactgcagccatcactcagtcacgcacggctgatatttattatgtttattcataatttgattgcttgtttgtgcagtgcttagtg

SEQ ID NO: 343235 - DNA, 1000 bp, Homo Sapiens
ttttttttagttaccaggagcaattctttatattatccagttgcacaacacacttcttgaataaatgacatatcctaatttaggatacatcaccagattcaagtcagagagtatcctgtgccagtcaataagagtgcgggtcactggaagatcccttcgtagaatttttctcagggcttcattggataactcctgtaattcttccaagactgcagcttgaaatttgttctcttgctcttccacaagccttgcaaaacttagagccagttgagcttggttaactatttccaagctttctttcaggtccttggatatttcaatatgaaggttgacacacctgaagaagtgagcttgcacaaatattcttcccgttacttgggttagaaatgggttaacttggaaaatccatttagatttccaaagtccgttccagcactctcctgtttcatagttgtgatcttcaatgcaagctatcaagtactccttacttttgacagtttttctcagcatgttgcaatttccttttggatagtggtcattcacatacagttttaaggcgcacagaagaacaactctcaggtattctgcctcattctgaatgataccatgactttggatgtctttcagctgattttgaagcaggtcatatttgaaagaaagtttgctttgatggtcaaaaaatcggtagtcgcccattacattgtggtgagacaagagtactggatttccatcgatgcagagtggtacagaatatttttggcagtgttggtggcctgcacactcaccttggtggtgcataagtttttcatcacggataagcagacagagatcatcaaaggcatttacaaattcccctggaggggcctgtaataacagtctgcgaattactctttccttgtccttcctgctcagcacgctaagtgtcatgtttggttgcaacagaagcaaagcttctgaaatgaggagtgttcaaaggataagaaaacattccatgagccac

SEQ ID NO: 343236 - DNA, 1000 bp, Homo Sapiens
cactctacgatctcactatatttggaacctaaaatagtcgacctcagagaagtagagaagagaatggtgggtaccagaggccgggggcggggagtgtggaccgattggatggagaaagggagagtttggtcatcaggcacgcattttcagtttgacaagaggaataagttctgatgtcctgttgcacagcatggagggctgttaattctaaaggaatcagtctcgggcttctttgctgcaggggtcgtgagccctcaaacaggcctgagtctctgcagtttctcacttggggatgttgatctcggagtactcatagccgatggcctcctgttcctgtgggtactgaggcctcgctttgtggaagctgagggatgcatactggatctctccttcctctggggagggggtggccagggctggcggagcatggtgtggggggctgtcatctgccggggattcaatcaggggtccctgagaggctgagcccctgacagcgtttgcgtcctccatgcctgtatcccccacgcccactgctggccttgccgatttcttcctgcaggacctcactacaacgaagatgatgcagaagtacaggaagaccagggctgtggctccagctcccccgaatgcccctagcgtcactcctgatataggcctcattttgcctgtgtactcgttttgcagggagaggctcagggaaatgtgctgggagcctagagggttctgagctcggcaggtgaattccccttcatccttcacatgcactcgaggcagctccagcaccccaaggttcgaggactgtgaggggctcagggtcaggctcccccaggtccagctcagcctggcagggggattgctgtcgacagcacagacaaggtgcagggactggccctccaggactgaaagggccgagccattcctcaaggttgtggatgctgtgccatctccttggaagacagtcatggtcaagttctgaggaggataggatatgttgagtcgg

SEQ ID NO: 343237 - DNA, 1000 bp, Homo Sapiens
ccgggaagcactggccacgccaggccattctgctctcacgaggcgctgctcctcaccaaattctacaaaaagctaagtccgtctatacttctaggaacccagttttgcagacgctcttcctccggactgtccctgacttttgataattttgagtccccagaaagcttcaagagcacctaaaaatattcacttccaattttaattccatcgcaaaccgtcccagtgtactttcagggctatttaaggctcttaggttaaggggatctctccatctgacacacagtttcatgttccatagcaacaaggtcttctataacaacgactctaagtcagaattccagaagattctggttgtttgtggtttcagttgggggtgaggggaagagtccactctcattcatagcaggaagaactttccatccctcagacccagagacttcctggatgctagagacagtcctcataagtgtaacactgcccttgctatgcacaccatcccaagtcatttggttattacaaggaatgcctcttcaccaaatcacaagttttctatgactaatttcagtgaaccagttaaatagaaagatttttagaaagagccacagtgatagcaattctaggtggaaacttgagcaggcaacatgaagaggcagtttataaaatgaaaaagggctgtggttccagtgacaccctttcttttcttggacgaaacaccaggaggctcattcaccgtgagggagacagtactcacaagagctgtggcgcctacgtttacttgttctgatgggatgaaaagccaaactaagaagggatcagatagaagcacgattttcacaactacctggattattattaatggaggggatggccttaaaaggggtaaggggaagaagaggtgccctgagaattcaatgctttatgcatggcacagtttgaatatttatattgtctcagctcaaaatagcaaaaggaatgttcctcctcccacccaaatcttatt

SEQ ID NO: 343238 - DNA, 1000 bp, Homo Sapiens
ttttttttaatggtgactgtgtttttattgaaggaatttcaaatgaagaataatgtttaaaatgtgtatatagagatagtatagactcctccgcggaagcatggagggaaaggaggttgtaaaatagactccatggagactcttaggaagcagtagattcccgggggctgtgcctttagcgttagaggaaacacatagagctggaactgttaatggaaagcagtcacagctgagttttcggagaccaagaaattaaaatacaattgcacttactgtttacttgtaaatgttatcttctctcctggaatattttgagttctggttttcacttaaccaatcatttaaaaatcgctattgtgtagccactggccaccactctgtgacacagaatcagagaaagcgttgatttttaatggtgatttaaactacctcgtggtttctgtgtgtgtgcacacacacatctagtgtttgggtggtttttaggaagaatattaagtatgtgacttcaaaaaccatgttatttaacctgccaatcaaatggaaagggatcatggcaaaagcaaataccgcatccttttcttccgcagaactagagtcagagttcggcagctgcgtacaaaggcctctgccctcggcttgagcaaaagttgtaaataactagtatttattaagcacttataagcagtttttctcacttagtcctggctccagttctagagttcctctttattgcttttggtgaaagtttggggttgggggtacacctcagaggttcagtaattcacctggagtcccaccctgaacagagctggacccagagccacacacgcccgggaacacacactgtgctggggaggaagtgggcctaggagggcctgcaggtccaggcagctgtagagctgctagaagctggggtgttgctctccccgctttctcatagacacagaggtactgtctgcctgttgtcacacagttcatatgctcgcttgagatggaatct

SEQ ID NO: 343239 - DNA, 1000 bp, Homo Sapiens; identical to SEQ ID NO: 336390

SEQ ID NO: 343240 - DNA, 1000 bp, Homo Sapiens; identical to SEQ ID NO: 246569

SEQ ID NO: 343241 - DNA, 1000 bp, Homo Sapiens
tttttttttttttttgtcactgtaactatttttattacattacaataattaggagtagtacagttcatgacaaaaatattacaaattttagatcacttcacagcacatactcctataaacatttaaaagttaatttcaattaaaagagtggtcatttttaatgtttgatatgaccaacattcctaggtcagcgcaaccaaatgatggaaaacaactggatcacactgcatatgtcccacaaaagaaagcacaatgtacaaaatgtgcatgtttcagtttacactatacaaaaatagttaaaatacattccaggtaaacatgttacattaagaaatagtactagtaagaaattggcactcaaaggaaaaatgcaaaagtattttcaacatgaaaacacaagacagtggaattggaaactttcggataaaacactgtaacccagttagctctgtgggggtgtggggggagagatgggccctcaacatatctgcagataacttttttttcccctaaattcatctaaattacctatcattatcccaaacaggcacttcaaactattaaactaaaacacagatcttaatctagttatgactattcttcaagaactcatgtgagtatctttctttagaaagaaagtttcattttatgacagctattcagtttctcaatgcagaattcatgctatccagtattaacacagaagttactaaatataaattcagctttaaggtaactgctgggttctaaaaaacattactacacaattatcaagaaatcattactttttgacaaatggaaatcttcagatagtttttgctgtctaaaaaaaaatcccctaaaaaaagttatatactgtttgaagaaaaaatgtttagaagaaaaaaaaaatcaatggaatacaaatgagatgaacttgtgcaaactgtaacttaacatgccccacaaagtttctatgtatatattaggacaaaattgtgcaatggtgacaacagttttg

SEQ ID NO: 343242 - DNA, 1000 bp, Homo Sapiens; identical to SEQ ID NO: 160543

SEQ ID NO: 343243 - DNA, 948 bp, Homo Sapiens
tttttttttttttttttttttcacatttacagaattatatttaaattcatatagaatatttacatttttaagttatatttttgaaattagaagacgaagtacagctgaagtttgataacaaagaaatatatataagacaaaaatagacaagagttaacaataaaaacacaactatctgttgacataacatatggaaactttttgtcagaaagctacatcttcttaatctgattgtccaaatcattaaaatatggatgattcagtgccattttgccagaaattcgtttggctggatcatagattaacattttcgagagcaaatccaagccattttcatccaagtttttgacatgggatgctaggcttcctggtttccatttgggaaatgtattcttatagtcctgtaaagattccacttctggccacacttcattattgggagtgcccaaagctctgaaaatcctgaagagttgatcaatttctgaatccccatggaaaagtggtttcttagttgctagttcagcaaatatggtgcctatactccaaatgtcaactggagttgagtaacgagctgaccccagcaatacttctggagatctgtaccagagtgttactaccttaacaagtgaagaatccatgtactgaccaggagggatagaatccaagtatttcttcagatccatggaaagaaactcaaagatgagatataacctggaatcctgcataagcacatcctgaagactgactatatttggatgacgaagttcctttaatagagaaatttcccgaattgcagtactaggaaccccttcctcttcactttctagtctgatttttttcatggctaccacttgacctgtagttttgtgtctacccttatacacaactccataggtaccttctccaattttctctattttggtataatcttccatagttagtcaatgg

SEQ ID NO: 343244 - DNA, 1000 bp, Homo Sapiens
atccttacaacatatatctttaattaaatttatattggtgggtttaaaaaacattaagtcaggagatgatagctagggaaataaggtatcctgtgagtatttataacaaaatatttaaaatttaaaaagaataagaaacatcaattggctttttgtaacttaaaagagactaaccaagtgttgtttcccagttctgtacaagcagaggccacaggaggattcttacataagaagcacagggaaaagaattgttaattctgcgtgtgtgtttttgtttctcagaattgtttggaagaactttgtccagtcagaaatgagtaaaaacaagatgtaagaaacattaaaacagggggcatatggtcttaagagataatcttggagaatatagcaaaagacaaattgctccattagatattataatttggtatgtaacatgaacatttaaaattctgattaaagtgactaaaagggtttgttttttaaaaaaaatcaaaacagaacttacgggataaaactcaaaataaatttactctcagtagtaacttgatgtaggaatataagtcctctcactttgataaacatgaatataaaatattgctgtctgtattctagggtttcctacattttctgtaaagagtgattcatgctatgtcatatgtaaatgactcaacattttgagctaaaaggctgttcacaatatacacattctttacttacaaagcaaaataagcttaacacctttatattaaaaacccgggatacagcaggattagtagcaccgtgaaaaataattcttcccacaaactgcagtcttttattttactcaatgtgactcttctcttaattgaatttttaatgtaccattttagtaactgggcaaaatatataattttcatcttataattcttggagaaagtcattctggacccaaaaagtaaattcacttccttatttctttagtagaaaaataatagagactttgctctggcgcattgctgag

SEQ ID NO: 343245 - DNA, 1000 bp, Homo Sapiens
tttttttttttttttttcagatatcatttttttctactttgggagaaaaagtgaggagatagagataaaaatacaaagaaaaactagcgtaatcccccaacccatacttcatttttaaacaaacaggccaggtcctgccaggccttcttccccattaaatcccaaggccagctccagtcccaaccccaacccctgcatggcgccgaaggaagcttcaggcttcgggcaagagctccagcccaggcaggcaggtcgtggccctactgccagagcacaaccttcctgccctggtccacgctcaccatgtggctcccggagtagcaccaggccacggcgttgacggcagcgcaatggggtccctgtagtctgctctccagtttcccggtgtccacatcccagatgtaaagggccccatcacaggagcctgccagtgcatagcttctgtccgggctgaacacagctttggtccagtcagaaccacacttgaagccatcggccctgaacacctggcggatgttgctgacacgcaggtcgatgaccttgagtgtgttgtctcgggaacagctgagcaggtgcagttggtcgtggctgaggctcagggaggtgacccggccctgcacagggatgacctgggtgcagtggggccccctgctgtcccagaaccggatcttctggtcattgtggccactaatgatgatatggtccccacacaccacgtcattacagtaggaaaggacattgatggtcctggagcaataggcacggccgaggtcccactccttcactgtccggtcgcggctcccagtcactgcctggtgcctcgttagcttgaatttggcagctgtcaccttatccttgtgtccagacagtgtctccttggactgtgcctcccccaccttccagagctgggcagcctggttgtaagttgctgctaaaacctggtagcccgaggggtcaaagtccacactggtgatgctgccaccagctccctccagggtct

SEQ ID NO: 343246 - DNA, 1000 bp, Homo Sapiens; identical to SEQ ID NO: 160544

SEQ ID NO: 343247 - DNA, 1000 bp, Homo Sapiens
gagatgaaacatgactctcataaacaggaactttattaaactacatgttacataaaagaacatataaatggaccattaaatacattcagtttattttaaacaaatttacatagatacttatttacatttctccattgtattcttaaattatttttccaagcttactaccgataaaaggtaatacaatgatcatctgctcacacagatgcatagagaagttgtccacagggctaagtaaagcaccacttcccaggaaacacagcttattagatcttccagcaacaactcatgctgaaggtgctctcttctgagcagcccttgaggtgaggcttttgctttagagatgctgggggttggttctgaggagctgacccagggcagagatgggtccttgctgattgacctgacttggactcacagaggtggaaagacctgtggagaccatcatcgaggccatggccccacatctgtgatatgggaaacaggcttgggaagaggtggtgacttcccaaagtcacccagcatccatgatagaggaagggcctgggagcttggtacccagggttcctccaagaggtcccgatccctctgctatccacaaatccacaaacttagaatcacttgcatccattttccaccaccatggaccttatgctttgaactgttttgtctacctgattaaatatataacttcttaggcttcttgagatggtgaaaagcagctcaggattcccataagcaactttgtggagccctggaaatacctactcagggctgtttttacaagaggttttgtggtcaggtgctttactacttcagccataacgtttacctttaaaactcagctgacttatggaagctcagcatttccaattcgcttagatgacaggcaacagtctgcagaagggaggttctaacgtcaaccacgtggattccccacaaacgcatcatatttgcctaaatccatctatctaccaatgtcagatctaaaatgaggttt

SEQ ID NO: 343248 - DNA, 1000 bp, Homo Sapiens
tttttttttttttttttttttttttttttttttttttttttttttttttttttttttttttttttttttttttttttttttttttttttttttttttttttttttttttttttttttttttttttttttttttttttttctattaatagtctttattccatatggaaaagtacagtagttgtgcagaaacaaaactaacaaaggagtaagactttcacaaatattaaagaaaataaataagccatagtagttacagcaaaactcatggaaagcctataaaaatgataaagctgttcatacaaagtacaattgtacacacaggaacaaacgttgaagaatgacatcagaggttcctatttgtacaaaaccataatgatgttcacaggaacttcattacaacaattcactttaaaacattctgcaaatatataacttccttctcctcaattttagaaaataaatttcacatcccaacatataaaacagatacactcctacttctctcaaattagcattttaacatcttccaataacacaccattttcatataaaaatacctttaaaccaaggttcattcctgtaccttatctttacaaatgaataatacatcagagcttggacttaagtagcacctcaaaggtgttcatataaatgagataaagtgctgttactggtatactgttaacatgccctaataatatatcattcagtgcaataaccagcatggatgaagcttacagagaacatgcaaatcgtgactggggttttcttttttgtttttagattaactacattgaaatagttctatttacaagtctgaataaaactgggctatttaatatatacaacatgtgactataaagtactaattgtacaacaaaacaaaagtaacaaccagtcttacctttagtatctgaattaaatattgtccttagaggagcttggaaggattgttccaggagcactaccattgttaaaagcagtttggaaaccaggtgag

SEQ ID NO: 343249 - DNA, 1000 bp, Homo Sapiens; identical to SEQ ID NO: 160546

SEQ ID NO: 343250 - DNA, 1000 bp, Homo Sapiens; identical to SEQ ID NO: 246570

SEQ ID NO: 343251 - DNA, 1000 bp, Homo Sapiens; identical to SEQ ID NO: 160547

SEQ ID NO: 343252 - DNA, 1000 bp, Homo Sapiens; identical to SEQ ID NO: 160548

SEQ ID NO: 343253 - DNA, 1000 bp, Homo Sapiens
ttttctttataatgatctttatggaatatttgtttatttgacattaaattggaagtttgagcaaaaacactgtaagaagttgttttcccagtcttaaagctgattctactggtctaatgtggtatttctcataatctacatttaggccactgaacagtgaaaaacaagttgaatctttaaaacagcagaaattctctggttagagactatggagcctcatttacttgtccatttctctcaacaaattcacatgacccccaagatactttctcaaaatctctagggttctctggaacactatttataaactaactatttgcctggcttatctgcagtgttaaccctacaaagtcatgtaaatcagcactagaggaaaatttaacttaccaatcgggctatagacaccctgaatgttggacatgccatatggaatcggggaatggcaacattaaagatcttgtctttaaagtaaagaaaatggaaggtataatatccttccatgtatcctgatgttgtagagaatgtggtacagcttgtgtattcatatacccgacctgggctgatgattggaaattcaccaactactccaggtccttgaacttcttccacgtcacccttagcatttgttattctccaatagcgactgtccaactgacaggccttctcaggaagtgcatcttttgacatttcaatcctgattcggtatgtgaagaaatagtggggtggatgtacagagctaagttctggcagaaacgatgtggaaactgacacagtaatatccccagttgttgctacacattctggatcgtgaacatatctgaaaatttggtctctgatgatggggaagccacctgatacaacatttttgacataagaggtaaaccagtcagtaaaagtagcacctataataaacatgtcaatagcagctggatttcgagccatttggtctggacattggtagaaaacttcatttttgtttcggccctctgcagcttccact

SEQ ID NO: 343254 - DNA, 1000 bp, Homo Sapiens
tttttttttttttggtgtaataagatttaatcaagttaaggtgttgtcactggtattagttatccccgtatttaaattattttacacaaaggttttactaagtaaagttctgcaattctaaattcctgttttgggtatgtaaatggaaaataactttgaaacagttaccaaactcattaatttggggctatctatgatttttattctgctaggtttggaactagttcttgagtcaaccctttaattgttctctgccattgtcaataataaaaattttgaagtcccactcggtaaaattagtgtaaacattcacatatttaatagtacctttaaaataagcattactacatttaaaatggttccaaaatgaatctataaatggtaatataaattaaaaaatacgaacttaaagtgaataaatttttaaccttagctatggtataaataatggtaaatgtatagtgtacctttgagtcattaaaatgtcttaaaagataacagcttgttaccagaacattagaaaccatagccatgattctcaagcgttaacaatctacatttgatattttcttggccactgcattcttcaatgaataataatttccagaattccattccatgttgttttccaatagatcttttcacactcgatgttgaatacatggctctttgcagatgaataaaacaagtgcattcagtttagagatccattttgcgaaggctcattcgactgaaggaatctctgtggcaggtgacaggcaatactgccttgtataactgagggatctttctgttgatcagtggctgtagggcctctttaaggcgatgatagtttctctccagttccctttgatactccttttgatccggcccaattaagctcttattttttcttaaggcatcttcacaccttttagtaaaatctttaaagcagagtcgcagtttattatgatgtctgaagagctttgggtcactaggtatttcagacagaaaaacctgg

SEQ ID NO: 343255 - DNA, 1000 bp, Homo Sapiens
ttttttttttttttttttttttaaaagcagggaatgcctttatttaaaaaaatgaaaaacagaaactaaaacaaaataacaatcacctctgttgcctccatttgagagaatacttccaggggctctgcatgtctggtccccaacctggtcggggagttcactttcagaggctcagggatgggccttccccagccccaccagcaaatcatctctccctgcttccaggagggtacttactctccaactagtgggctttatgggccaggaaggatgacaggaaggggtgtgtggggtactacgtccctccacactgagaatccgaaagccaagatgcccaagattctatcgttatctgcttgtcttgtagaagcccctctgtgagactgaggggcaaaggagagagggcaggggcgtgtctcaacccttctggccacttctaggttgtgcagactgccactcttgttactacgatggactgtcagatcagcaggtggcccaggagggcttgcttgatgcgggctgctttttccttttgcctccgtgccatgcctgtgaggtagttggtacttactggaatccccactgcatgcatgaagaaacaggcacagagaagccaaatgactttcccaaggtcacacagcctgaagggacagccggctgtcccagctgtttcccttctaacacccttgggcctgcctccagctagatgctgcaaatcagtcctctcttgagagtcaaagcaaaggagatctgagctggtcgtcacaggtagtgtgacacagagttggggatagagccgcaccttgcatttccaggtgccatcttccccacagtccccagtgggcacttgcgttcatgattcaattactcaggctctgtctctctgttcctgccccttgctctgtgacctggcctctctggaccccagttccgtccgtgagcgatgggggcggggtcggcggcctgcctaggctggacagtgcagattgcagaagtccgc

SEQ ID NO: 343256 - DNA, 1000 bp, Homo Sapiens
ttttttttttttttttttttttaaaataaaaccaacttttacttctctcttgccaccctttctctccaactccagaaaacctgagtgctacagaccactgtttgcaaactcaaatgaccataggaactcagcaagtcatataaatgagcgggaaatgccagatggaaaggcctatttggacagagacatgggtctaagaaatacttccctttcttcttcgctgtactttaagataaacaccaaaaacactaaaagcaagccatgatgaatggcacgtggtgcttggtcaggagcccacgggagtggtggggatgggtggccgggccacggtgaattgtgagttctggctccggctcagctcccaacaactgtggttttgtcggagcctaggtcgagttgccaaatctttggatttttcaaaagacaccagaaaacctgtatttggttgtaaaatatccttttcaattttcactactaactcatatcacttaaaaacactgcctggactcagatcaataaatatgacaaccgcaggccagatccagtacacagtcacaggattttaacttgggcagtaaaaagacaatggaggtggtgggtgcctgtagtcccagctacttgggaggctgaggaaggagaattgcttgaactctggaggcagaggttgcagtgagctgagattgcgctattgcactccagcctgggcaacaagagcaaaaccccatcacacacacacacacacaaagacaatggaagccaggcatggtggtagctcacgcctgtaatcccagcacttgcggaagccgagacgacaggatcacttcagccaaggagtttgagaccagcctggacaacagtgagaacctcatctctatgtaaaatttaaaaattagctggccgtagtgttgcccgcctgtagtctcagatatttggaaggctgatgggagaggattccttgagcactgcaggttgaggctgcagttagccctgttcacaccac

SEQ ID NO: 343257 - DNA, 1000 bp, Homo Sapiens
tttttttttttttttttttttttttttttcctattggaaccttttatcctattttgttgatgcttaaggaaaaaagctttgcccataactcactgtggcctggagttacgacaccaacttatatttggccaattaagaaagagattctcctgcctcagcctcccgagcagctaggactacaggaggctaaggcaggagaattgcccgaaccctggaggcggaggttgcagtgagccaagatcgcgccactgcactccagcctgggcaacagagcaagactctgcctcaaaaaaaaaaaaaagtataagcctaactttgtcactagtcctaaggagaaacttttaaccacaaagtttttatcattgaagacaatattgaacaaccccctattttgtgaggattgagaaggggtgaatagaggcttgagactttcctttgtgtggtaggacttggaggagaaatcccctggactttcactaaccctctgacctactccccacacccagttgatggctttccataataagattgggatttcctttaaaaaaaaaaaaaaaagaggccaaactgcattcttcttagaaggtctattcagttgataaatggcacttaactgatggttttttcatataacctttaacaagaactcataagttgcattgattatgccccaagagatgagggaccgatggtaattcagatgggcacctctgaaaagatttatcagttttctgtcccgttccagccagattttttggaaaaccttggggaaagactgaaattccccaccaatctgagactgtatgcgagtttttacaacattaattggaaaaaacaagaatcccaacatggcacccaatagacctccacagataaaatcattgaccagatgagcactgtgagtcgttgcggtaggcagatgctccttaatgggacctcgaaggccgaaaaacaagacattgctgagtccattccggaaaagaatgggcaccaagcctcg

SEQ ID NO: 343258 - DNA, 1000 bp, Homo Sapiens; identical to SEQ ID NO: 160551

SEQ ID NO: 343259 - DNA, 1000 bp, Homo Sapiens
tttttttttttttttttttttttttgccatgacacagacggtttattcagacctctccacccgccacagttccacatcccagttcagcaggccattctgtgacagttcctactggtgggtctgtctatgacagccccatcctgagttccaagtccatgtcctgactgagtggtgagtgtgctcactcggtgctcaggaagactctcttgcgtgcggtattggtgtaagggtgccagcgccactccacgtctgctgtggcctcctgctccagcgtgcccagacggatcatgtacagcttcagctcaaagcggggcccgacctcagtgagctccacgttgcggtggtctgtcttcttatacacatggtgccggaatgatatgtagtcgtcctggtttgcgaaggtgatgacccggtggctgtcatctttgggcacgggaaataggtatcggaggatgtcagagacccgcttgcccaggcgggaggagaagccgtgtgtgatgaggtggggcttggcctccgacatggtgcccaggtctgggatgtcatgccgcatgaccacattgcacagcgtgaagtaggcagtaggaccaaagggcaggtggctgacgatgagccccacaggtgtgccccgatgctcgtgaacgaccagcagatcggtgacgccgttggctttgcaggctcgcaccagtgcccccacttcatgtcgacctcggttcattcgctgggcgcccgggaacaccagcttcagctcctttgcaaacatcttgaggcgggaactggggtctcgggaggtagtgatcataaccttgggatcctcgactcctgcccatcggtattcatcatccacgtggctggtcacaccttcacctccagcatcatcaaactccagggacccctgtaaggccagagcctctcggcgtaactcagtgggaatcaggcggttttcttccagcgcgcgccgcagccgctccttcctctcctgggctgagcgctgcgcctc

SEQ ID NO: 343260 - DNA, 1000 bp, Homo Sapiens; identical to SEQ ID NO: 157540

SEQ ID NO: 343261 - DNA, 1000 bp, Homo Sapiens
tttttggtccttctgtttatttcattttggatactcagtgaatgttaattaaccaggaaacttaaaagttatttcaattatgaacctcttcaatccttcatcaattattttgagtattctggtcttaaaaacatctctttcttctacaaacttctgaaagagatgaacacctccacctacaccaaaataatgtgctttgctggccaaaagtacacgtccatttttacttaacagtctaaggaaagtctggtgcaaattactataataatctgggttgtaaatggtttctgaggtgagaatgagatcatattttacaaaaagtttttcactacttagtacaagcttacaaaactcagaccactcaccagaaaaaaatcggcatttatatagttgtgttacttttggtttcctgcatcttttcacatctggctcatttacatcattttcttcatcttccaaagtggagttagctactacattaggtaaggttacttcatcaatcaccatactgttataatcttgaaagtgaatttctttggaccctcccttgaatgcagttatacctagtaaacctgatccacaaccaagatccaagacttttttcccagcaaatttcactttggcctttgtgaaataagccaggaggtcaaaggtacattcccagatttttaagcctccctcataaacacctgtaatcagatcagagtgagaagaaaagctttttgaaactatgttttctccagggaagttctctttcaacaagatggttttcactactgataacttaacatgctggaaacctggtaatgtttctatgactttattttctaacatcttctttaaatctttaggcatagcatgctctttggcagctctcaaggagggctgttttccatgtggctccaagttccttgaactgctggctgcactgagtggactgtctgtgtcttgagagggagctgcattttccattgacttatgttcccacaagtgatcctga

SEQ ID NO: 343262 - DNA, 1000 bp, Homo Sapiens
ccagttcagattctttgtattacaataggcaaatcatatcttccatctgaacctcagtttcctcatctaaacaaagagggttacattacagcagtggtatccaaacccgcagtccatcagactgccatttggggatgccttttcaaaatagattctgattccaccctcaagattctcactcagtaggtcttggataaggtccaggaaactgtatttttaagttctctaagtgattctgattaacctgattgggatcggggcattcagtggtccctaagggcctgcttggaccttccttgcaggggagagaaacaagactcgttcatcaatgtctagcttcagaaccctgacctcctttccaagggagtacatttcaaatgaagaaaagctttgcttgataaaccaaggacaaaactcaaggattctttatactcagataaggggtattctcaagtaccaatagcatcacaatccaagattgataaccttgaagtgaggacatgggttcagatttggcttcatcatggggccaaattcctgaccctctctggatttcagtcctggtctggaaaactggacaacacataactgcttcatttggctactgtgagaactgagtgagctctgctatgtgtaagggaaaccagcaatcatcctcataaacatcaaacttgggcccaaagccagcaagggagaaagagtctccagatggggagggaagaggccagacctcatggcctcaagtcctctcttctgagtcctttcttccccttggtggtggtagtggggatatttttcatgaattaccacttggaggacctggcttgatttattatacagggagccgatagttttcctaacacaagtggtcagaggtacagcagttctgcttggccgaactgttgaaggagactgttctcagagctcctccctctgtgatctttttgaggaagcgaggagaggtgtgaaagtgcttttaaactgtcaactggggttcctg

SEQ ID NO: 343263 - DNA, 1000 bp, Homo Sapiens
tttttttttttttttttggagatggggtcctgctctgtagcctaggctagagtgcagtggcatgatcagctcactgcaacctcaaactcctgggctcaagcaatcttcccacctcaacctcctgagtagctgggactacaggtgtgtgtgccaccatccccagctacttttataataaaatttctatgtagagacagagtcttcctatgttgcccaggctggtcttgaactcctgggctcaagcagtcttcctgcctcggcctcccaaagtgctggaattacaggcatgagccaccacactcagccttaaatgaagattttgtaagaaattgagcattcaactaaactcgtttttgtgagatggtcattttgttttaacctaacatggtttagagattattttatgaactctaagcattctggttcctcagttttctcaaagaaagagaactttagcaagtagcaggacaagctacgccacaccaatgccaccaggcgacaatactatgaataagtcaggaggcctcctagaatgcagccaaataggaaactgttccaaacagaatcagtcttgcatacttctgctcagaaggctcctctcgctttggaaactggaatgaggatcaccaacaggatcctcattttacacaggagttatgagaggtacatcctctagcagagatgcttggtcattacctgtggtacatgagattaccgagctaaaagggaaaaaaaacgatcttaatgttctcccatgaactcaacttaagctttttatggaggcactgaggccatgcagctccttttccaaaagacacagataaaagccaaataaggtagaggactttggaaattttctctgaaaagttaaattccacataatagtaagactgtttgctgagagaaaactgacaagtaaaaactggtttaagagacagacattcaagacaaactgtattggaaatacaataatgaattttggcctgatagccctcatgct

SEQ ID NO: 343264 - DNA, 1000 bp, Homo Sapiens
ttttttttttttttttttttttttttttttttttttttttttttttttttaggtttcaagtaagtgacttttatttttctctgacatttcacagtcaatttctgcaaaacttcatactttctcaaaagaattcacatttgctaaataaatttctaccctaaagaattcatagctgaaaaaccacttcaatatatgcacaaaagttacttttctgctaaaggaaccatagtagaaaataaaaagtcagacaatactataatcaataaaaaccaatgagtgtaataaattacaaatgtcattaaattccattcccataaccattgcaatcagcaacttttctatatatatttcaataatgccaacaaaatctgccaaaagttctcttaagggttgctctgagctaaaaatggcttctcaccttcagaaaacagcagctctgccacagtacttcatagccaattacgttattcatcgctaaaaccatcactacttacagccttgggcaaccgatggagatctttctggtcacctccgaggttcctccatttgctgatctggcttctggactcaatggatctctccttccaagatctatcttctctacttgggttcatctgcttacagctccaacagagaacaaatgcccatggtaatagcctggagagacttctagcactaagttacaagattagaaaagagctgagagtggtgctgcttctccctgccactcagcagtgaggattgatagtggctttcatcatcttttactgaaacagggagggaaatgcaagccttaatctaggaagaagagtccaagaggcttatagctccacagagggtttttccaatggaataaatttggttctcagcaagtgttttcagatttttgacacagtaagactcatgactggtgcccaggatgttctgaatgcacctgtctctatagctttgctgccaaacatattctgccaaaaaggaagcttcctagcatggtgcacag

SEQ ID NO: 343265 - DNA, 1000 bp, Homo Sapiens
tttggcattattaatggtgagcaggcaggtttattcagaaaaagctcagattcatactcgtaaaagtctgagaaaaacattaaaatgctattacaatacagttgacccaaacaacacaggtttgaactgcgcaggtccacgtatctgtggattttcttccacctctgccactgggacagaaagaccaactcctcttgctcctcagactactcagcgtgaagatgaggatgaagacctttaggatgattcacttctacctaacgaatagtgaatatattacttccttaataacattttttttttctctagcttaccttcttgtaagaatacggaatataatacatacaacacaaaaaatgtgttaatcaactgctttatgttatcaataaggcttccagtcaattgtaaactaactactaattaagtttttgaggagtcaggttatatgcagattctccactgagcaaatgttcagcgctcttaactcctgtgttgtccaagggtcaactgtatatatatttaagagttattatttacccagtagatcaagccaagaccaagttaggtttatgtgtttttggtttaaccaaagaaaatgttcagggactaaagcagtccatcaatagaacagactgccttttaaaccagggaacaacttgtctttgtaggtattttaggtatatgaatgaccatatgtatctgctttgggtcatccatggtcccttccaacttaaaacttctctattcatgaacatagcataactgagctatggatttcatataaataatatcttgttgcgtactttaggtttgaaatgttttctttttcagttgcatagatatatgtagcaccatccccgctatgaactctgatgtagaaaatacaagattctaaagtcatctgtgaggctaaatagacttaggcacttccacataatgctgcaaaaagcaacagccgtaaaggtactacctgctcaacatgtcattccaaacaaataca

SEQ ID NO: 343266 - DNA, 1000 bp, Homo Sapiens
tgtttttttttttttttttttaatgttgaattctgttttttaattaaatacaaagcttagatttcagaaagagagggaaaatagctggtggtcccagagtgtgctgctgttaattgtttaacaaaggggaaaatgtacataaacagataaagttaccataaattccatgaacttaaatctgtgattcattgccttaaaactttctctcttagaatttccataccgcatgccaaaccagtaaaatggcttttaaaaatgtatagtagacaatgtcagtttgtataaaagtaccaagtgaaaatatttattacatgcattggaaaaaaattgtttacctattgaatgttacctgtttatgtagagctctttagatgtaataaaagaaaagccttcagttaatttgtcttctgtaaaataacactgctggatgttcaaggggacaatccctatgagacaagtgataatggtttgtgcttccaaagcacctttcatccagagatttcaaagcatgacaagtaactaactaattttcttgcagcatgctttgaggtaagtaatgaatatagccatcatttccctttcttgttgaaatatggctaactctttaataaatcacagcatctgtttagtatctgcagtttgaatgctaagagcaccgtggccttcttgtaaacaacactaggtgctagagaaaccagctggaatttcaggaatgagcttgaaaccaggaccaggagtaaggtaacagcccttcctcgggtagaggtttgaatcaaacacttaataggatcttagactctggaccactgaatcccttaatgagcagggagtccgtgaagaggagccccaggttctaatgaccattccacaccaactgtgtgtttttggcaagttatatttcagattcctgttaggcaaatgagattcataaaacttgctttaaaaccatactgggactattcagtgataaatatagacatagaaaagctttgacggaaag

SEQ ID NO: 343267 - DNA, 1000 bp, Homo Sapiens; identical to SEQ ID NO: 160553

SEQ ID NO: 343268 - DNA, 1000 bp, Homo Sapiens
tttttttttttttttttggtggtcacttaatttgactttattgccagccagtcttccctcagaagtatggctctctggatacccacccctgagcacctccttcccctggaaagaagagagctgaggaaggattctctgggtgctgggaagaaaccaagctcaggactggggttcccaaggagcagtcaggcagggctggagccaggctttgcctccttcctcaatttcattctgtttctcatgagtttcttcatccttggcattttgtgtcttttctggactcggatgacccagagtcccatggccagaattaccaagagcaagaagatgagcaatcccttggccaggaggcagaaggctgttgaaggcttctcagaagcatagttaggatctgcatagaagggcccatcagggatggggcaagaactgacgttgctgatggggttgttggctctgcaggtgtaggagagggcactgtcccccggcctccaggatgtgctgaggacagggccttcatggaatgtataagtgctatccccccgggagagccagctgtaggtcatatccatgcctgccttctccacagagcacaccagggacatactgcaggcaccttccccagaactctcaaagttcacagtgatctggggctctgacagccatcggtagacacatagattgtactgctgcatggtagagatctgggatgttctcaggttgacttgagcttggtaaagccctgaatcctcccagctcagattgctgatatgcagggaatagctggggtccaggaagctcacttggccctggtagtgtggattggtcaccatgatggtagctggatgtccctctttccctggcaccacagtggcaagacttttgtgagaggaccagatgatgttctcaacctcttcatctggtggtatttccagggggaggctgatggactcctgaaggaccgcaaccacttcctcggatccacaccatctccagagtctcc

SEQ ID NO: 343269 - DNA, 1000 bp, Homo Sapiens
acatttggaaaatatactttattcaataatataaacaatgtagtagatatatttgattatttaataatcattttaagtttattgtacagatgcacatgtcaataattagtgtttttcagatgggatgatatacattctgcttttatttttatctctttggtaacaattattgacagaacaatgaaacaaagataaattgttttacagttgtaatacccttgtatggtaattctcagcctcttttatcttatattctactagcacttacatctaataggtctcaataaagtagaaatgtaaaagtatgtattttcagaaaaggtcatatttcataaagattctgttactatgttagtcatttatcataagtgttaagtctaagaaaagttgtaatagaaattgctaagactttaaaataaaaactactcctttagtagttaaaaaatgttattatatggttgagtataaattttattgccctagtgacagtaaaaaacaaaaacgtttagcaaaaaaatattgccattaatagctttatctaaaattctacaacagacaaagcagaataaacgttttggcatccagaggtcaggtgatacagaaatgaagttcagcaggtgcaaaagatatatcaagggcatggtagttaaaagaaatgaaaagagacagatgtcaaatgaatattccacagtaagcagtgttatcaggaagctggaatacaaaaagacttgtgcacatgggaaataaggattagaagcaactttgcccaatgtgacagtgagtattaaaagacataggtccctggaagccagggtcagaagggatggtaggccatggacatgagggacagtcagttactgaaattttaatgttaattcggtgtctcatctaggctctggtaggttagaagatttctggccttaccatgatagttggattatatggtacttggatgctctaaaacatgttgtgactcagtactctttaaaaaaaaaaaagt

SEQ ID NO: 343270 - DNA, 979 bp, Homo Sapiens
ttttttttttttttttttttttttttttttatttttttttttttttttttttttttttttttttttgcatagttgtcactttattatattattttccttctgtgacctttccaagtctgaaacagtcccagggacttcttttggttagttatttgcaatcaccgaattgatccagtcgatgtaattggagacccgcgtgaagacggagggcttgtggtagtagttgcagccgaggcgagacccgaagctgacgatgccgtgcacctgccaccggccgtcagacgcctgacagttcagtggcccgccagagtctccgttgcagctggagatcacgccatcacccccagcacagatcatactggttttcacgctgctgccccaccaggcagagctggagcaggtggcatagtccacaaccagcaaccggccctgctgcaggacatcaggaacagccccgttggtctgcagccttccccagcccgtgacgtagcaggggtagttgttgggtagaatggtgccggcaggagggaggcaggccagctggatcttgtcggtgagggagacggggttagccagtttgagcagggcaatgtcgttccctttggagatttggttggagttccagtccttgtgcaccacaatcttagagacactgactgccagcgagccggactccgcaacgtagaggttgtgccggcccagccccacgcggtaggtcctggaggagctgatgcagtgggcagccgtcaggacccagctgttggctatcagggaccctccgcaggtgtggtaccacttgccattggagctgtactgcagggagacctgccagggccagctgttgggcctcgcttcttcaccgccaaccaccctagtcacataaggtgggtaagtggggtccccacaactgagggctccagccaccaaagtggacagcagcagcgtccttatcatggtgtgtccgtgggagttctgtaag

SEQ ID NO: 343271 - DNA, 1000 bp, Homo Sapiens
aaagaggttaaaacaaacgtttatttaacaaattatattaagaatacagacaatcacacagtggacttcccttgccaagtacaagagtcaccttgaataaatatgcagcggggacgtcatccctaagggtcttccttgtccaggcctgacacagtcacacagcagctccacggccttagctgggagaacaaagccgtctctggtggcaacccccggacatgtgctcagagtggcaggaggaggccgggccaccctgagggtgccaggcagcccaagcaggggctgtgggctcaggggtgagcgcctggcgtggcctccaggggcaaggcaggctgcgaaccaagttcatgagctcagccgctgcgtggctgccaggcctgggggctgcttcctcaaggccctcctttgctttcatccttaggttcacctgcttctccaagaacctgcaggctgggattccccacagatgcctgcaggctctggagggccctcatctgggtggaggagtacgggcaggccactcctgaccatgctctgcgcccactgcacagtggcctggtgaccggcagggcccagtggcggccgggaagtccgtaactggactggaaacagaaagggcagccccagcacgggcttgcgacaggatggctggccctgcctctgccgcttagcagtgggccaagtcagcctcttcaactctgacaaggagcaaagaacatctacttccaggtcactctgtttttagggggaatgaaaggagaaatgtgcttagagagcctggcctagagcctggccaggaacaggtgcttagaacatgggagtccctcttgtcctctcaccgacctgcaattcctttacgtgaccccactgggttctcatctctccaagtggcggaggacgtggctggcatttgttcttggacttggggtgggaagaaaggccttaattatacatttgcaagggagactgcagcaaagcacctgctccttatcacctttgt

SEQ ID NO: 343272 - DNA, 1000 bp, Homo Sapiens
ttttttttttttttaacatcttaatattgagtttattagataaagacaagaaaaaatggggcttggggaaattggggcttctggggttttaaggagcatgctgaaagaacgtaagaaacaaaacatgaagggaaatggaaatgttaccctcactcccctcctccctgctgtccagtgtggatgccacctccagcctgcaggacggagccccctcccatcatcacacagtgcacctgggctctgcagcaccttgcctccattgcagccgcagcaagaggcctccacttgtccgtcagggacgctccaaggaaggaaaaagccgcccccggacaggggagaccactgtgttctctgtgggcaggtggggcaggtgctccagggaaagcggggctgaggtagggggcccagtgatcaggcacctgatcccaaaagtgggccttggctctttcctcctggactgggagctccggcagaagtcaggctacacaatgtgccccacaatctgagaaggcctcccctaccttaggccagagggaagtagccaccaaactcaggatgtccctggtcagaggggagggccaagcagcctctgagttgtggtcctaaaccccagtgttccctcccctcccaggttccgggtgacacacattgagaagcgctatggactgcacgaacaccgtgatggctcccccacagacaggagctggggctctggtgggggacaggacccagggggtggtcaggggtctgggggagggcagcccaaggcagggatgcctgccatggagaggctgccccctgagaggccacagccccaggtcctagccagccccccagtacagaatggaggactcagggacagcagcctaacccctcgtgcacttgaagggaaccccagagcttctgcagagccaacactgagggccggagggaggggcccaagcccagggctgcccactcaagaggcaaatgggcagccaagcaaaccagacacttctga

SEQ ID NO: 343273 - DNA, 1000 bp, Homo Sapiens; identical to SEQ ID NO: 160556

SEQ ID NO: 343274 - DNA, 1000 bp, Homo Sapiens
ttttttttttttttaatttttagaagagatgaggtcttgctatgttgtccaggctggtctaaaactcctgacctcaagcaatcctcctgccttggcctcccaaagtattgggattataggtgtgagtcaccacacctggccaactctcttccttctgtatgcacatttcacctttaacataacgtgtactatcatcattatttttttgagatagggtctcactgtgttgctcaggctggagtggaatggcacgatcttggctcactgcaacttccacttcccaggctcaggcaattctcctgccccagcctcccaagtagctgcgactataggtgtgccccactgtacttggctaattttttttttttttttttttgtagagacggtgttttgccatgttgcccaggctggtcttggactcctgagctcaggtgatctgcctgtcttagcctcccaaagtgctgggattataggcatgagccaccacgcctggtctgtatgtgctttttaaaaagcctatcccatactgaattgtgggaacctatgaagtgtctcttaatgtcaattaaaagtaacagtggctgcagatattgatttctgaaagtacatgagaatttgtctctaactatggttgaaacaacaaaaccaaatctgaatcaggtagaggtctaccagacacaaactctgaaattaaacactaataggactgttactgggcaggggggactcctttgagtaaaaaggtaacatacagttttcctaggtggctggtgctctcccccaactttcatactggaacaagagttaggctcaggtttacatgatcctctactattcttttgtgaagaatgacaactgagtcagttggttgagcttgaagtgttccagtcctaagggattcactctcacttaatgtcatatattggtaaggtgcctacatgaggtcagtgtttgtggctacatataaagaccaatgatgaaatgaggaattatttttttt

SEQ ID NO: 343275 - DNA, 1000 bp, Homo Sapiens
ttttttttttttttttttgcttctaagttttctttttatagatagccctgtaataacagaaagtaattgcaactgctttcatgcctaacagatcacaggggaaaataaattgaatagaaattcaaaccagtgtattagagaactataatatatatacaatatattatgtatttatattctaccttgttcacaaaggatttgggaaagatattataatactagctcatggcccaatgatattttgatttcacacaaaaatagcattctgaatggcaattattcagaatatatgaatagtgttctcaactaatctacttaacaccctaccatcacatctctttactatttggataaaacaaagataaaatttttcatagttatttgcatagattatttgaataaagccagaagcagacaaaatgtcagtatcaaaaagatgcagaagcataaagcaaaaaaatattgtatagctctagtaccaaactttggaatgcatcagaattccctgggtgcttggaaaaaacagatgcccaaatctgattcacacaacccaaatctaggaataaaatccaccagggtaggaatcagcttgttaacatgtttaacaagcttcccaggtgatcctaatacacacaaaagtgtgagaacacactattaatagtaagggtcagaaaatcacattgataaaataagccatcatattcttaagaagccacagtaaagtctaaaaaggtattttccatttgctttgaaaagaacaatgtgcttaaaaatgtacatatgagtacttacttttatgagcttcagcatttgcaacatagatgaacccatctacaacttcacacactttttgaatctgtggaatcacactgtaccggcttccttgttgatcatcaccttcattgtgtcgactgaacatcttgttaactgcacttgtatgctcttcccttgctctatctctttcctttctggtagttgaatataagattagaatgttgaa

SEQ ID NO: 343276 - DNA, 1000 bp, Homo Sapiens
ccccatgacggggtccactctgaccttcagaacttgaggctgaagccggggcccgcggcagaggccccctggttcgtggtggtaaggtggaagcccgtctccttcaggtcgtcgtcacccagctggctgtagcccaggcctccctcagggggcctcgggctggtgccccgcttcacacgctgctgctcgctcttggcgggccacgtggggaacatggaggggtcgatggggaggggggtctcgcggaaatactcatgcttgaggccgtcctcagcgctgatcctcctcccggggaagtaggtcaggaacttgttcatgaggtcgaagccctggtctgagagcagagccccgaagcgcttgcggaggttgttgtaggggtgctcgctgaaggtcatcttcttgactgctgggagctcgctgtagccgggccagattttctcactaggggtccccagatccttgaacaccttgttgatctgatcgatttctgacttcccggggaacagaggcttctgagtcagcagctccccgaagatgcaacccactgaccacatgtccacggccgtggagtattccttggcaccaagcagcagctctggggcgcggtaccacagggtcaccacgaccggggtgtaggccttcagaggggatccgtactcccgcgccagcccgaagtcacccaccttgaggatgccggcgtggctcagcagcaggttggacgtcttgaggtcacggtgcaggatccagttgtcgtgcaggtgtttcaccccacgcagcagctggatcatcagggtcttcacctcccctggcaggaagggctgtttcatggtctccatcaggctcttgaggtcgtgctccacatagttcatcacgatgtagatcttgtccatgttgctgcccaccacaatctctctaacggtgacgatgttgggatgctgggccttgaggatggtgttgatctccctcagcgacgtgatcgggaagccctccttctccttct

SEQ ID NO: 343277 - DNA, 1000 bp, Homo Sapiens
tttttttttttttttttttgacattaaatgtttttattgaacaaaaaaagataaaacatggaagttgaatttactgagcaaaagcagctctccaggtgaagctgctatactttgtgctaaataaccttatgaactgagtatacagaatacatataatatgcaagttacctcaacagcaaaggagaaggagtagaatacagtttttgaagataaaatctggtcaagtgacaaattttgttgctcaaaatttctagcccttatccacctaaattctgtatggttctacatatatgcattcagtatgtgcatactgaattcccattttaatggaagctgctttttggaagaattctttttaatttcacatttctttgatgtgccactcaatttttaaaaaaattatatttgacatatgtgcatgtgtgtatgtgtatgtatgtatacacactttaaaaacaccaaacccttgtttataagtagagggttcatgctgctttttaaattaatattagtgaatttaagctacttctcctgtgtgtctaggaaactttgtgttctcaatgcacccacacagtcaagtgggttgacagatatgtcaaaaatactttatgaaaagagggaggtagctcatgcgagttggcaaccttttgtgtattgtttcctgttcaagcaggctgcctccctttgacatcttacagtcaaagatgaaaggaaaactttttacttgaagcctagtgagcacagttgtacatttactataatccaccttcaacttggcttattgggtttactaatgtaagatgacaaataccttacacccaatacacagcatttaaaaagtactgaagaaacattttatagacaatactttttttttcatatgttaaacatcagcttctatgggatacatttccagaatggttgtgttaccactttataaacattctaggccaaacaaagagcacaaataacatcaatgttgtcttttttccaatatctg

SEQ ID NO: 343278 - DNA, 1000 bp, Homo Sapiens; identical to SEQ ID NO: 335584

SEQ ID NO: 343279 - DNA, 1000 bp, Homo Sapiens
aaaaggatttaaaaattactcttttacttttattacaataaataattatcaataatagaattaaacaattttcaattaaaacctactgcattactttggggtttcacagcagcagaaacaaacataaatccagttgaaagggcaaggcttccagaatccagtgacaagaaacagtctggtcttgattattcgggctagcaatgggaaacactgatacagataatgcaaaaacaatgaaatgcatcggcatactctctttgtacatcacattatctgacactttaaaatattccagctaagtaatttaagcaagccatgaagctctgtttctgcaacagttagagttctcccccagcaagcccgcagcacaactgctcccagagccaccctctggccagaaacgggccccatcatcatgcagacctagaagcctccaccctggtggaagcagccatctttctcaaagctctttctggctcacacaacccatggttaaaggaaaatgggaaagtgacatatttaaagggcctttctcgaggactgagatgaactggaagacagacagactgtggctccagatcaggaagaggcttcagagtaagggccacatgcagatgaactccacatgaagaaactatctgataaaggctgaccattttgctgataatcaagcagactgcatgtatatatgaatatatcatacatacatatgtagtgaatatatgtgtacatattaaataggcatacacacacatcacacacaaccagataaaataaatggtacatacattgctactatgaacactgcacgtcccagacagaccaatgactaatatgttcaattaaactacttgaattaaactactcttcctctccccaaaatattctgcttgcagcaaacatattccagttgctcaagcggtgttgtttctaggttcctgagaaggaatggaatcgtcctcttgtttcagaacactacagaaagccaactgcaacagga

SEQ ID NO: 343280 - DNA, 1000 bp, Homo Sapiens
ttttttttttttttttataacagagatacaggtttttatttttccatcatgcatgcaaacttacaactatttatactgtttaagaacacagaaataattgcgttattaacagggtgtcaaattaccaagtagaacaaccagttactaattattttggggaggttattttcacagaacacagcaacaatttccaaattattcttccaaaaccagagttatgagaccagtacaagctgataacaatgctaatggtcacacaagtttccatgttacacagaaaaaaagattgacattctggtgaagggtctcaagtaccttaccatatcagaatttttgaaagagttttacaacagaacagtctctctcttgttttgtagatgcaagggaaaggaagcatccctctcatttctttttgagactccttgttaattcttaaaacacatttctaaggcccatctctggaacttcattagttaacattaaaagcaaaaagcagacctgatgtgattatgatagtgcaccccatcactatcaccatcaaaagagactaccaatctcccaaagtagtcacggttgcattggcatagtgtcttggattttcaataaacaatacaggtgaaaagagagagatacagatgaaaccaggttgaccatagctgataagtgatgcagctaggtgatggacacatggggtccaaggaccatcctctccacttctgtgcatgtctgaaaatgtccataacacagagcaaaaaaaaaaaaataataacaaaaaacaaaaaagcagacttgcacatctgtatcttcccattagactaaaatggggaaagtcgtaagactttaaaggcaaaatgtgcagcatatagcattcttctgcatgtacaaagccacacctagaacaaaaaaataaagcatccaaagtaacattattccgtttctggtttgtctctgtggcttataaaatctactaatgataagattggacaaaactttgggaaca

SEQ ID NO: 343281 - DNA, 1000 bp, Homo Sapiens
gttgttgttgttttgtttttgagacagggtctcactctgtcgcacagattggagtgcagtggctcaatctcggctcactgccacctctgcctcccgggttcaagttattctcctgccccagcctcccgagtagctgggatcacaggcgcctgccaccacagcccagctttttttttttttcgtatttttagtagagacagggtttcaccacgttggccaggctgatcctgaactcctgacctcaagtgatccgccgccccagcctcccaaagtgctggggtcacaggcgtgagccaccacgcccggctggattcgctcttgcagtctgagaagtgattctggttggtggtggtgggcactgggggataccggacgaccctccccaccggtggcgagtgggaggccctgtgcgttctggagcaggccgggcgcagatcccagctgagcccttgctgagggtgtaacctccgctgcctgggcctgggaatcaatcacatgaggcacttcagttcctgggaagtgttagggctgttgtctcaccaatgtcactaccatctgcccagctggcctcttcatttgacatctggggagactgaggctcagggaggatacctgggccgggcggggctggagggcccgggccctgcgttccagaagagccgcctgctctccggcttcaggctccgcagggccccgtggggcgtccccctccgctgctcccaccaggccgggtccaggggtcccggcgtttccggcctcgaatccagcctccagccgccgcggttccggggccgtgggtgacctgctggggaaaagcgtcttctgcgggcaccggggctgggaggcgggcgctcgcatacacaccagcgtcagcctcgcaacacattttattagcgtggggcaggggctcccgcgggggtggaggggcggccgcggcgctgtgtggggaccgggcgtccgcttcctgggagccccggcctcctccgcagggctgggcgcc

SEQ ID NO: 343282 - DNA, 1000 bp, Homo Sapiens
tttttaatttagaaaaaggcatttaattacaaaattttcttttaaataaaaaagcaatggcacgaatcaccacaaaatcatttaagtgatcatatccacaggctgttcttgtaattatatgctaaaaatttatgactgttctcattaacagcattcccccccttcattagagacatcaagagcttctgagaatgtgtagtttttcctaaagtactactaaaagtatcatgaacaccgtttgtgcagcattcatttacatcaccttttatttactatattctaaactcataaaatatttaacatttctctacttcatttcttatttacagtacagaggctcatctcttgtcacaatatggtttgtgcattaaaatccctgggaatagtactttcaagaacattttaataaattgactccgattatttaaaataagaacacaaacaaaagctttttcacccagaagaataattcttccagtagacttattcaggacttaaaaaaaaaaatccctctttaagtaaaatacattcttcaaccattactggattatactatcatgcatatttataatgctaataatgacaacacgtaaagccagctatgacttttaaaattccatttagaagagtacagtagacagaaagtgctttggctttcactctcttgttatccataatccaattattatttcacatgggtatattttatttattcttagtatataagtatttaatggttcagtaataactggcagcttctgacagtcctattttcttggtcgctgatacggttctgtgaacataagtcagatgaactgaaaaaaaatgcaaatcacttcctgtgatacagcaggaaaaggtggaatgttattatttgagcaaatgattcaaagagatgaatactaacattctgtcgtgacaggaatactgtgaaattaggtatgttttaatgtgctgtcttcacaacttgccatacctggtatttgttatctttttggtc

SEQ ID NO: 343283 - DNA, 712 bp, Homo Sapiens
ccccatgacggggtccactctgaccttcagaacttgaggctgaagccggggcccgcggcagaggccccctggttcgtggtggtaaggtggaagcccgtctccttcaggtcgtcgtcacccagctggctgtagcccaggcctccctcagggggcctcgggctggtgccccgcttcacacgctgctgctcgctcttggcgggccacgtggggaacatggaggggtcgatggggaggggggtctcgcggaaatactcatgcttgaggccgtcctcagcgctgatcctcctcccggggaagtaggtcaggaacttgttcatgaggtcgaagccctggtctgagagcagagccccgaagcgcttgcggaggttgttgtaggggtgctcgctgaaggtcatcttcttgactgctgctccttctgctgctcccgcatcttgcgctcccgctcccgcttcctttctaactgctccaagcggtccctttctctcctggaatgctcccttgccatttcccttctcttctgtctttcccattcccggcgagctttatcctgttcttctcgatgtcgtttccgacgttcgtgctctctttctttcactctagcatgcttccccccttctgctgaatggctatgatgcctacatttttcttttctcttttcatcttttctgtgatgaactttttctttccgagacatttgctggggtggtttgat

SEQ ID NO: 343284 - DNA, 1000 bp, Homo Sapiens; identical to SEQ ID NO: 160557

SEQ ID NO: 343285 - DNA, 1000 bp, Homo Sapiens
tttttttttaaaatggttaaaaacaatttttgttttttattgaacataaattttatgttcagtatattttaccacaataaaaaagaccccatgggtgggaaacatttgctaaaccacagacacacacatgcacaaatagaatttaactataaagaaaactactgataagcttattttatcaaaataagttgatacttgtaaagcactttgagccttacctggcatggagtaagcatcacctaagtattaaaattggtaataccaagagagactgaaacaaactacattgtagcagaagatactctgaatactaactctcaaaagacttgtatctgaaatatccaaaagaaaaatcactaaggaaaatacagaacattttaaaaggccagaaaacttgaacaggcacttgacaacagaaaaactccaagtggccaataaacatatgaactcttcgcctcaagcaatctccctgcttagcctcccaaagtgctgggactacaggtgtgagccaccatgcccagccatccaaaacaaatgaaaagctactcaacctcatcagtatccagggaaatgccaattaaaaccagtgtgcatctacctgacattttagccacagtagaccccaccctgctgggggcaacagttatctagtaaaattaaaggtatctcctgacttagcaattcaactcaatgttctgcaaaggaacttgtgcacatgtgcagaagactgcacaaagaattatgtggaatgaccaaaatcagaaacaataaaaatgaccatcaacaaggctgtatcacttgaggtattattcatacaacagaacaccatatagcattaaaaatgaactccaggacccaacaaggatggattatacaatgctgagtgacaaaaacgacacaaaagcacatacacaggattccatttatctaacactcaaaagcaaacacaactatgtcgtataaggctgcatacaagaatggtaaaattcaaacgaaagca

SEQ ID NO: 343286 - DNA, 1000 bp, Homo Sapiens
ttttttttttttaatttataaaggaaaagtttaataactcacagttcagcatggctggggatgcctcagaaaacttataatcatggcagatggggaaacaaacacacccttctccacgtggcagcaggaagtgccgaacaagagggaaaagccccttataaaaccatcagatctcgtgagaactcactcgctatcacgagaacagcacggaggtagccgccccgaggattaaattacctcccactgggtccctcccatgtcacgtggggattacgggaacaattcaagatgagatttggatggggacacagccaaaccctatcaactagggatttgttgacttaatgcacacgagccaaccataccccaacaaagcaggtactagccttatagtacacgtgaggaaactgaggaatgaggcatctcattcatgttgggaatattaattgaaaaacctgtcagctcctgtggcccttggagttccttgaaaataatgttatacgccaatacttattatagtactgtaaagatgcaccatatcccatatctcatttgtcagtggaaagaacacagatttggagccaggtaaaagtacctcttgctacctgtgacgtcttggacaagttcccaccttttggggccagtttctccatctataaaatggggataatgcctaacttaagagttattttagatccaatataaaaattcccagcccaatgcctggcatgcagtaagcaggcaattatattatttttcctctctactagtcacaactacccaggaagggaagttttcactcattcctggccatccgccccatgctgggcacttggggcatgctgactgtggtgaatgaaacagacagggtactggtcctactattatagaatgtttgcttcataagaacaggcactgactgtatcatctctgaacacaatggaatgaagctggcaataacaaaagaaaaattggaacatttacaaatgtgtggaaatta

SEQ ID NO: 343287 - DNA, 1000 bp, Homo Sapiens; identical to SEQ ID NO: 160559

SEQ ID NO: 343288 - DNA, 1000 bp, Homo Sapiens; identical to SEQ ID NO: 160560

SEQ ID NO: 343289 - DNA, 869 bp, Homo Sapiens
ttttttttttttttttttcaataaaaggctcattttggattttataaaatcaaaccctaaactctttacagaatcgaagtattaataagtacttataataacaatcaagtcattatcaaacatgtaccagatatatatcagagctcctggtaccaagagcatactatattagtgatcatatactgtaacttgagtagtatctagggatgtgctggtagtatttaacctccagctctctgggggaaaacaggattttgcagcatttgctgaggtgtaaatactctcaccataacaatctcaagatgccaagcagacgtcactggatgcaaaactggaaagagatgcacacaactggctctctcaagctgaggtgaggtagctccagcacaccaactttttctattggacagcgtcttttcatttttattactcaaaaaagtttcatttttttatttagctttctgactctgtgcttgtgccttcaacactttcacaacgattttctgctcctcgataaggaaagcacgcttgatcctgtcacgaacacatttagcacacatggaaccaccataggccctgctgacatgtttctttgttttggacaatctcataagaactttaggtcttacagcacgaacccctcgaagtctgcctgggcacacaccacatgcagattttggtgctttcccaaccttcttggtataaaggtaaacaattctattaccaggggttcgggacagcctagttttgttagaggctgtattgtaggaaagcctacgtcggtatgtcaaacgctggaccattctgagtgcccctacaccagctcaaaggactgcttctgagagctctaggcttcctcagctcctcgg

SEQ ID NO: 343290 - DNA, 1000 bp, Homo Sapiens; identical to SEQ ID NO: 160561

SEQ ID NO: 343291 - DNA, 1000 bp, Homo Sapiens; identical to SEQ ID NO: 335961

SEQ ID NO: 343292 - DNA, 1000 bp, Homo Sapiens
tctttgaatgaatataaagagtttattcggtgcgtatttgggtatacaacaacaaatattaaacaacttttttaaactttttgtgcacaggacagaaaactgcctgtacatgctatgtccacttttggaacacagatttttaacaattatgaatgcacaaaatcttacatatcatgcaactctatgccaagaacccaactttcttccatgcaacagatatgaagatctaaatggaaacctagctaagtcttaaacacttttccagtagcaagtataatatatgttgttgagggaaaaccagtcttaacaattccttgtacacaatattcatgtgccaaatacaatgacaggaagactcatacatatacagataagacatttcttattttaacaacacaaaagacaacatcacagttccacagttcctgtctttacacaagaagccacaacaatagtttaacatgatacacaaatggaattaagagaaatctacacttgaggataattttttgaagttctctttactgactggggttgacaatacaactcaatttctacgcacaaagtacagcacaataacttgaccagaataccacaaatctaaaaaaaaaaaaagaaagaaaaacaattggtcaaaccacaagaacactgttaccttgagcctgagaagccaattcagattcaaccctgaatttggttgatttggattaagtgacgcaaaaagtcaatagaaccattgaatttcagaaatcataaagttgcactatgccaaagaaaagagtacatgtgaatcaagcgtagatagaaaacatcaagccaagaaaacaacacaattcacataattttgtttgccccgacaaaacatttaagcagttaattttgttttgttttgttttgtttgtttttgaagaacaattgtggtcttttacattttcttggtgggagagcaaattttgatcagcattagtgctgtgaaatacttttggattatcatccccaa

SEQ ID NO: 343293 - DNA, 1000 bp, Homo Sapiens
ttttttttttttttttttttttttcagttaagctatttttttaataaattgaaaagatgttctgtacaacataatagagtcataggaaatcaaaagcatatcagtaacaacttttagaaaaagaaatgaatgataaagaaaaacagatatgacctctcaatatcttggggaagtaagttaggatgatgtttcattcacgtcttaatgatataaataaaggataactctgtgtaagaagtattgtttgtatctggtggtaaatttagttaaaaacataatcacaagttacaaaaactgtaattacaaattacaaagaaaaacaggcagacaatcttgtattgacatcctcttgcatcttgttacctaccaatgttctgttccattataaaattcaatactaaaatttcatagctaacattcaatattaatttcaacattaaaatgtatcaaaatcattaaaaacagtcaattagaaaaagcaatacaccaaaaataatggtagtgtttccaggcttcaactgtgttgtattaaccatcacacaggagaataaaagggctgtgaattttagataggccacttggctctggattccaggactatggaaatgccagtgaaggtagtccaagaagcatttcttgttttataaatatcagcagaggaccaaaaaaagggatcccagatatgttttcaagtaacaaaaaacattaaagtgcaattttgtcttttacatctgaacaaaagttctgtcatttttaaaaaataaagtagggccacagctttatagccattttctcatctaaaaccccacaattattaacacagatcaaactgcagttttggaagagagcctttggacggggaaactactgaacagtgatgaatggccatacctaattcattgtttggaaattgatgtggaggactgtgtttcaccgagggagaaagggacctcccagaggctccgaggctgcaggtcttcagccaggtgacagcactgca

SEQ ID NO: 343294 - DNA, 1000 bp, Homo Sapiens
ttttttttttttttttttaattagacttttttttaatttttaagctaccttatttacagattctgcacaatatttcatcatacaaaactgttttcctaaattcaaagtaaactgcatatggttactacagaagcattataaaattttcattggcatttttaaaattggagcatttaaaacagatttgagaatgagaaaagaatgtctgactcaaaatgaaaacatactagcctctttcataaactcctagaatcttgacattattggttgctgtggttggtggataaatcaaatccacaaagtgggtaaaccctctaggtgcaagttataagctccctcaagcaagccttttatcagaaaagacttgagatattctctcctctgtctgcccttcattgataagcaatgaaatgaccccaaaactcagaaagcaaataacatttatcaatgatcttcatccctcccaaagcagaagtttccaaaaacatcccataaactgaagtaccccaatggctgtagaataaaatggtttctgtaacttgctgtgtttttaaacagttccgttttctagggggagctggtaacactgcagtatggcagcatcaggtcaaaagaccatcagaaataattccatgaactagttcattagcttattcatttttagggttcatttactcaatgatgggcaccacacaactctgaatttttgttcttattctggaactacaactaatctagctcatcacaatacagttttctctcacccctagaaaaactcagatttgtgatggctattgcaatttttaataaaaatctcataaaagccttattttgaaatcctcgtgcagggactttatacttaactgcttaatttgctttttagaagcaataccttaagagcatttcacactaaatgcaggcagaatcagaagtaaatacttgttttcaatctaccctattactgtactactggaaagaaaccaggccacagacaatccaa

SEQ ID NO: 343295 - DNA, 1000 bp, Homo Sapiens; identical to SEQ ID NO: 160562

SEQ ID NO: 343296 - DNA, 1000 bp, Homo Sapiens
ttttttttttttttttttcctagtcaaaaatttactacacagactcagtagcggaaaaacatatcccataagcagaggacaaatcacagatgctcctcgacttacgatggagctacatccgaacaagctcatcgtcggccgacagatcgcacgcaagtggtccacggatcgcacataagtggtccacagtcgacagaaacagaccgccacgatcagcaacttagcgtcgcctcccccggtctcatcttcttggcatgcccgtcgggcccaggcgggggactccggcgccgctgcttcttctctagctgctgctgcagtctctcctctttcttcttcaggtaggaggtcacgttgtcgaacgtggccttgtagagactgctgaagctggcgtctgcgccggcagagccttccagcatggcccagttcccacgaagaacaccagagactttctttaacacggtgctctcaggaacagactgccactggtcgcccacaggcctgtagagcaccaggggggcttcctggcagtcctggagcacccacagcccctgggtctcctcgaaagccacgtcccacacttggtgctggaacgccagctgctgcctgtacaccaactgctgtctgcgggcgtccagctggaagatgtagaccacaggagtgccgtcgcacaggagcgccacgcagttctcctggcaccagaatgcaatcctggacgcggcaaacttctggggggcctgggggtccaccagctcctgcagactggccaggtgacagcagtgcagctggcggccgctcctgtactcccagagcctcagggtgccgtccccagaggaggacagaagcagcccgggctgagttggcaccacggagatacggctcacaaactctgtgtgccccaagcagaaggactcgatgctatggggcgccgcggcccagctgactcggatcttctcgtcccggtcggcagtgaggatgaagcggtcatcaggactcacagcca

SEQ ID NO: 343297 - DNA, 1000 bp, Homo Sapiens
cccttccccattacactctactaggtcaccccttttccataaggtttgtcatgcaattacaattaacaattgatcataagagtaaaatgatgtttgtgttactttctccatctgaactaagatctagaagtgttaaaactcttgttattttctccaagaggacatctaagccagaccaagttccctttgcaatagtaatccaaaccaaaaagctctgagcatcaggcaactcaagcagcagaacgttaaaacaagtccaacttgactactgatcacaaaaaatttatatgatattgcaattcttgatcaaaaactaatacagaggttgctctaaggtggtgagtaaaaagacgcagaggctttcaaacaggatggttttattcctttgtttttaaacgatctttctacagtagtgggacaggaagcagcagcaaagaagggaaggagaaaacagtttagaatatacagcacttccttttgggttgagtttccggaggctcgagggcagctaggatagcctcatcaaacacattcttcagacctctctgtgtaagtgcagaacactccacatacttgacagccttcaggtcacgggccagcttttcagcagtctctggagtgataggcttctgtttgttcttggcaagtttctcaatagtagaggggtcatctctgagatcaatttgagtcccaacaagcaagaaaggagtctttggacagtggtgagttatctcaggcacccacttttctttcacgttttcaaatgaagatggagagaccactgaaaaacagactagaaatacatctgtttgtggataactcagcggtcgtaatctgtcataatcctcttgccctgcagtatcaaaaagtccaagagtatatggttctccaccaatcataactgtgactgcatagttgtcaaaaacagtcggtacatattccgatggaaatttgtttgttgtgtaggatatcaggagacatgttttaccaacagcaccat

SEQ ID NO: 343298 - DNA, 1000 bp, Homo Sapiens; identical to SEQ ID NO: 339035

SEQ ID NO: 343299 - DNA, 1000 bp, Homo Sapiens; identical to SEQ ID NO: 160564

SEQ ID NO: 343300 - DNA, 1000 bp, Homo Sapiens
tttttttttttttttttttttttttttagtagagatggggtttcaccatgttggtcaggctggtctcgaactgctgacctcgtgatccaccagcctcggcctcccaacatgctggaattacaggcgtgagccactgcgcctggtgagactggtttcaaactcccgacctcaagcaatccgcccacctcagcctcccagagtgctgggattacaggcatgagccactgcgtctggcccagtcttcccctattctctggaccacagtttgaaaatcacagacaggtcaacctagatccttccagctctagttttctactgtgttctttcctcttgagaagttacagctcatcatgggcccttaataacagaattcaacagaaggcatcatctgaaaacaaagtcaattcagaaactgttgttgcaagaaggcaaacagaaaaacggcaccatgtcccactggaatctctttcagcgatggagagttttgttttctggtaaaaaatatagaaatagtggttgtccttgaggggacttgtggtttggttctaaacctccccatggagccgagtggtgtccctgagggtgaggagggcagaggtctctgctcagagctgctctgagcccatccgcaagtttttgatctccagttccaactgtttggcctggacctctcgctgggtcaacagctcccggagccttcggatctcctcctgttgccggtagaacatctgcagcaactcattctctgtctttggtggggggcattcgaaaacgtcaaagccatttgtcagccaggttttcttctcctccagcctgtgttctgctgcccaccttggcatcttctcctccaacagggaggaagacctccagccatcttctgcagccagcttttctgtctgattcaagagccggggtgaggctggggccatggaattgaagataggtctctctgcaggcagtgggtggggtctcagcagctcagagccaggcctaagggaca

SEQ ID NO: 343301 - DNA, 1000 bp, Homo Sapiens
ttttttttttttttttttttttttttttttcacttatgagcagttttatttctcagtgtaagacatataaattgttctcactgacatataactattaaaagaaaaataaaataaaacaatttaaaaagaagaaatataaattgtatttctgaatccaagtcacctgtgggggtgtagccagcattaaaataatcgccaggacccatgcaggcatctatctctgaatgaggcagtgcagcatagcagttaagagctcttgggtcagacatggatgaactggttgcatgatcttggctcgttaccaagataaagtgacacaaggtgtgtaaagctcccgagctgcaagccaggatcttcatacacatacattttagaggataatagtcctttcaaaagacacagctaaagccaataaaaataaacaaaaataggatctacttttctggaatcacaggtttgggtgctttggatatgttttatcattatataggcacttgtgtgtgtctgtatttttttgaatatacaacattttaatgagatactgcacactcccagggaaagcaattcaatctctaatccctggcttctgatctccacctcttttctacctgctgaggtaaggatgaacaacagaacttctcaattgaattctaagcttgggcctaagcacgctgtgccctctgcctttgagtttgcaccctggatggctcccctcctcccaggagacccagtagggagatgacagagcattgtagtttacactgagcagagtaaacagatgatgttaaggagactgtcagtgaagggcatgattatgcaaaataaaatacaatagtgacaagaacaagaaaataaaacatggtcactcttccatcccatttctcagatgtcactacagtagtctcaattacggtagtctcaattctttagactaaagttcataggtcatccaacttatgccctggcctccttctggaattcttttacctagcagtttctg

SEQ ID NO: 343302 - DNA, 1000 bp, Homo Sapiens; identical to SEQ ID NO: 160565

SEQ ID NO: 343303 - DNA, 1000 bp, Homo Sapiens
gagaaaaacagtcttcaatacaattgttttatttaacacacatatgtacacaggaacattcagcacacatagagtctattaagtggaatcattaagaaatgtctggagaggcagacattttaattcactcgctgtacacagggagttcaatcatcacattttcatacaggtgtcacgtcatgtcatcttttgcttgtaaattaccaatgaagccacatatgtctctacatatacaaggacaggtccaaatacagtgccagtgaaatcaataaaacattaaaggtgtacgctgggatgacaatgcagagtttacctcagtgctgagaaatctaagctgggatgaagtttgggactgtggctattaaaatagccaaggagagatttatgttaacaagaatgcagatattagtttagtagttagagatgaccgtctaatcatcaaacatcgtccaccccagggttttgcagccatagctttctactggccttggttgcctgtgcagacggaatacgtgaaaggcctacccacgcttgtggcccagggctattgctcctctgggccccctggctttgttctcaaccttcgtggcggggggagccatccgtgtgtttgcggcaggctgcctaccactctcacacctctttcctgacacacagaacatttttgttaaagaaaatgctaaggtatacatttacctcatcattccaaatagagatgtagtctacaataaattaatttccatttaagttcataaagtaaacatatgttgggtatagagaagactctggacccactggaaaacaaagtgagccttttaccttacatttctctagctatgccaaacacaacagcacgttcaccaaacaaataaagtctaaactgtataggtctttgtttcttccttggaaactacatatataatctttataaatacaatgtacatgcatgtgcctaaattcacttttgaaagaatacccaactctaaaaccaaggaacagt

SEQ ID NO: 343304 - DNA, 1000 bp, Homo Sapiens
tttttttttttttttcagttccagttccactttctttttatttaaataaccgaagcaacagccgtggcacagcagagggaagctgggttggggcgtgtgagaggtggcagcagtgtggcctgatggggggactaggtcacagtgaactccccacacgcctgtcaggttcagcagtcatggccataggattgggagcactacggaggagccatcagttagtgatgtctctccaagtcccagagaccttagggacgggagctaagtcagctccctcaagtagcagggccagggcatcccagtcaggggtcacggggcccggaaggcattttcagcagccccagcggctgcattggcagctgcggttcgcaccgcagggttggagaagacaccagcagcaaattcttgctgggccttctgaaagctggcacctgtgcggcggtataaggagtggatccgtttcagcatgacaattcctagcacagcaatgccagtgaagagcagggcgaccagcagcatgagcacggatactgctgtgttgcccttcggcaccaccagagcagagatccagccactgaatccccaacctgggataccaatggcctggaggacaaagagcacatcctggacgaagaaaatgaagaagaaaacgaagaaattgaatgaactgtcactccggaaagccttatacatggggcggtaccagcagacaaaggagcagggagtgaaaaggaggacccagaggatagaaagcccaaagcctgcgccattgttggtttccacacagaagctggccaggcaggcgaggaagttcaggagaagagccagcgtgctgcacatccagaggtagtacatggtggatacagtcttctgaaattcttgggggatctccatggagatgtcctggaaaaagcagggctgaactggacaaaaagaaggtagagggggccaattgttctgtcgagtagctgtgccccccagggcagcatgctgcagctctcgc

SEQ ID NO: 343305 - DNA, 1000 bp, Homo Sapiens
tttttttttttttttttttttttttttttttttttttttttttttggccgcgggaagctcagtttttattgaagacagagtctgggagaagaagggggactccggaagacagtgatgcggtcggagattgtgcaggccccgggccgggaagtgggcggtgtctgggtgggcgggaccagcgccggggcggggctacggactcaggctgggagaacctccccctagcccgcgcgagggcggcacccgcggaggtcccggggggcgctgggcagtgtggggcgcggggattggacaagaggccgactgaaggcggagccgaggtaaggccgggcggggcgtggcctcagagggcgtctgactgctcgccctgggcctggctctgctgcatttgggcctgcatcttctccagcatctcttgcatgcggcgcagctcttcgtctttctcgcggatcagcttctcggtgtccgccagaggcagcatgggcagcgggatctctgtggcgctctggcgggaaagcttactgcggctggctcgatcgcgagccccaggccgggccaggctctgtaggcagcgggcccggtagccctcgtagagcagatcgtgcgtcacctctttcaggtcctgcaggtgtgtctgcaccagcatccgtcgcaggttcaggaaatcgcagtgatgtgggttctccacctccacggtcccccaggagtagcggcgtcccctcaccggccggttcccgccatccctcaccacctcgcatgatcccacgactgcaaaagggatgctttccttcatctctgcatcctgcctcttgaagtcttcatcttcatcagagtcacattcggggaactggtagatgtggatctcctcttccttcaactgatcccggatcttctgcttgagggcctgggtttcctggggcatcagagcatccgctttgccaatgactgggatgatgttgactttctcgtgtactgcccggaggaaggccacatctagggg

SEQ ID NO: 343306 - DNA, 1000 bp, Homo Sapiens
ttttttttttttttttttatcagaataatatttattgatatgctcggtgctaccttgttaattctgcatgacatggtctccatggctgaggtatttggggtgggaccagccgggtgccggccggggctcccacaggaagccatgtggcctcagccgcggcggggggcccgggtgggggacgtggttattgcgttgggccccttcactcctcatacatgggccacgcgctggcgtgcactcacgcactcgcccgcctgctcacactcacacactcccactcaagctggcaccacaccctctgtgcacacgcacacacgtgcacactcgtacatacacacccgctcgctcacgctcacctctgctcatgcccgttcacacacacaccatcctgctttaaacccatcctgtctcctgatgataaatatgcttgttcggtacagcagtcttagtaaaataaaatgtctgtcaggcgacaaggagaaagtgcacgttgacctttgacccgagggtggacctcggtccctcccacccgagggcatcaggtccctgcagggggtgacccctgagcatgtgaccccatgggcgtggccaccccactggtgggactggccccaccttcctcttccctggctctgggctgggggagctgggctgggggagttgggctgtctcgccacagcccggggccaggacgaaacggactaaaaaaataaactcttcacctcagggcccccacccacggctgggcacctgatgcaggagcatgggaagcgggcttcagccttcctggccaccggctccactgggccacctttccccaccccagccagtgcctggcgatgccgtccgggcgggttcccctgtcgagcacgtgggggcgaaggccccaggcatgcggacagaggttggggatgcgcgcagtgcgggcgaagcacaggccacgtccacgcagggctggtgtccaccgggaggctggccaggccacacgacacaggcagag

SEQ ID NO: 343307 - DNA, 1000 bp, Homo Sapiens
ttttttttttttttttttacaggtgggaacaagttttcttagaaactgttatgaaggaggagccctccacccccacccccacatcttttactatctgacatgttatcagatcagaggccttcagcctcagcaacatctggggattagagggaccccacacagctggggcctcagaccaagctgatccatgcctgtggggtggaggggaaatcctcctgggaaaaatatgtgcaaggccctacaggcccaggaaaggctgaccaaggcaaggtgagtcatggtgttctaagctgaatcttttgcccatctcacagaagcaggcaggaagcaccaccattgatcagctttatatggcacccactgtatacaacagacagacaaagacagacagacagagcacacaccacttctaagctcaacactgctcaccaactagaagcacctcggttaagcacatgtgagacactcttgcataggaaagatgtagtttttaaaggaatgaagaagtattttggcaaaacatctacttccctcccaggtctggggtaaagagggacctctaattctgaagcttctacatattgaaaaatttccccttctcaatggcagtatatacagtagcaaaccttccaagtctgttgtcacagccctctacagatatcctgaatctactttacaggtgggcaaacttagactaagagacagaaggtagcctggagcaaggggacactgggactggttcaaggggaagggaaacaggaggtgtctcagctcagccaaaggcagggcctctgtctacctggattggcaagggaaaggctcaggtggccagaactccctctttcttcccgcctggggaagcagtggttccacaggaaaggcaatcccactcttgctggctagggggcctcccgggatggcaaaggccagggccaacctgagctctgcctggggcctcttctgggatgcactctgagtttggggattgtggattgtgggt

SEQ ID NO: 343308 - DNA, 1000 bp, Homo Sapiens
tttttttttttttttttagaagcgggtttttgggtttgctttctccccctactttattggagagcacttgccattgcttttatcaagtgcttgctagccatggatgccaactaacttcttcaattgaaggccggaggatcatatcgggttccaggagcctcttgagcaggtcctggcaatcggccgagatgctcagatgagtggggaaggacacccccttctgctgctgccacagcatcttggggatgtctgtgtcgtcaaaaggtaggctggcacagagcatgacatacaggaccacacccatgctccagacatcaccttttttgctatcgtggggaatgccctgcagcacctcgggggcagcataggctgtactgccgcagaaggtctggctcagctcccggtgtgacttgggcaacaccttggcaaagccaaagtcagtcagcttcaggttgaagccctgcaacaaggcgttctcacatttgaggtcccggtgggccacaccacagccatggcagtagcggatggcctcaaccatctgacggaagagggccttggcccggctttcaggcagtggccccccattcagcacgcagtcaaagacatcccctccctcagcgagctccatcaccaggcagattttcccgtcggcagactccagcatctcatacacctggatgatgttcttgtggtccagggtacggacgatttggagctcccgagggaggaatctctggataaactcttctggccctcccatcttgtctataactttaattgccacttttctttggtgttttttggaaaatgcttctttgacttttgagtaggtcccttccccaatggtcttgcccagctggtacccattggagagcagaaagtcctccatgctgtctagcgccgccttcctatcaccctctcagctcatgctgcctctgagaggcagctctactccaccatcgcccttggcctgctccttttctccccaaggacttcatcc

SEQ ID NO: 343309 - DNA, 1000 bp, Homo Sapiens
ttttttttttttttttttttttttttttttgcacaggaagctgctttattcttgctgagagacaggggctgctgcccacacacagaccctgtgtccaccctgcagaaaaggccaggagggcctgcagagctgggaagcgccacccaagggtctcagtcaccaagactgcaggagaggcaaggccatgtcaggcctggcagctgtggctggggccaggagggagggaccaggcccatgtgggaacaggacaaatgcccaaggccacatccttcgtccacagtcctgaggctcctgccaggctgacaggaaacagcccagagctgaggtctttgagccggtcattccaacattgcaagcaccacccagtcctcctggctgaagttgagtgaggtaagaagggcccgtggccagggacagggagggccctcaggaggctcccagggctgctgctgaggccgggcagcgtcctaggcctcaaggacactcctttctccccgctgccccaagccaccatggcagcagcatcagggctgtgccgcctcatccccatccctgtctgggcagatgtgaagggtgaccgtctcccccactgtcccgaagttgacggtctgggtggaaagctctgtggtgaagctgctctggccactgtccgcagaacgccggatgcgggtgcagaaagactgcgtccagggagcactgcccacaggccgagccggggcctcccgcaagaggaaggaggtgccctcaaggctacggacctggggtcccggtggtgacgccccacggggctcaggcctaaagaggccgagagggcctcggggacccagtgcatgccccacgctgagcagcacaggctgccccaccgtgggctccccgatctctctctggatcaccgagacctcgcagggagggtcatcaggggcgccaggcccagggccaccacagtggaaggtctccccttccccaggcacgtaatcttccaggtcagccagtgtcagca

SEQ ID NO: 343310 - DNA, 1000 bp, Homo Sapiens
gaccggctaaaagctttaatccagagcctgccctactctgatagtaccagagtggagggcagaataccaaatgtccaggaaccaaaggcagggctgtggggacctgaagagcagcacagtggggcccgtgctgctgtgggggaaactgaggctgggagcctcagcagagaccggtgtcaagagtctctgggaactgcataggcctgaggaacatgcattttcaagttgtccattgatggtttcgtacctgaatttctcaccttttgtgaacatcttgggagggtgggggttttgcaggggtgttaaaagcaaggcttggagcccctttcctccagctggtggctccttctcagggcctggcctcattcaggccactttgtagagaaatgccctgacctcgcaggaaggatttccccacccccaagtggaaggaagaggacagtgtgggcaccagagggccctggaaacatcttaggggaaggaaaggaaaaggataaatttggagtggggggtctctaaacagattgcctggattccgttctttcctggggttctacagctgcctaagccctcaccttgggggaggatcaaagggaataaagagaactcttggctgagtctttgtgcttctgttctgtcctgaaggacacgtgaggagccagaaacatctggcagcctctggtccttagttcagatacaacatccatgaagctgccaggtgtgaggagagttccagtgggcatcaccttcctgcacaaacctagtcctgatggctgcgaagagaagccgaggggacaaggaacagaagccaccaagggctgtggactgttgcttgtgggcacagggcaatgcggacaggccactggctgtgggcctgtaggtctctgcacagttgctgaggctggtgctgactgcctgcagggtcctctcaaggccttacatacggacactgatcaaggccagtttgccacagcagctgcccctgccagccatgctcagg

SEQ ID NO: 343311 - DNA, 1000 bp, Homo Sapiens; identical to SEQ ID NO: 160569

SEQ ID NO: 343312 - DNA, 1000 bp, Homo Sapiens
tttttttttttttttttttttccgttgagaaaagttttatatggaaacacatactgatcatgaacacaataaacagggagggaagctcgggctcagccaggaaacctgccacaaggaagatgtttggaactatccaggagtagtgtcaaacactaacaccatatttacaagtctaatttggaacctggccctttttaagtgcaggaggaagttggaggagaagccatgcatgaagtaaaaaatacatatacacagacataaacacccacattttcacacttcttttgcccatttgttccacaaggaacaaatgagagaaagaagcccagcctctctccctggagtccgtatacttactacagatttgttagagaagccccagatggggcttggattcaaggagcagacttcactcttactggccccactcacgtgacaattcaccaagggaatgcttgggacacaagcatgaatgtccggaagaggcaagaaaatatatggctcacttaacttacacattacacataagaggcctcagtttctccaagtactttcacatttgatctttagcagacttctaacctgcagagacagagctcagccaagctgtgagacacagaggaaagcagcattttgatccagtgtgcactgggtcagtcacttcatccgagacagtcacacatgccagccccaggtaagtccctgggggcttgcagctgttttctttgtggagtggaaatttgggttttttccttcagtggatttctccctgctgctgtcactgagctccacgctgctcgctctggacccgagacagctgctcggcgtgtgtgtgtgtgtgtgtgtgtgtgtgtgtgtgtgtgtgtgtgtgtgtgtgtgtgtgtgtgtaatttactgttctgctgctgctggcttgtccccggctgctggctcgtcctcggccactggcttctcaacctgtgactctggaggaatcagatactggacctcctctgtgctg

SEQ ID NO: 343313 - DNA, 744 bp, Homo Sapiens
ttcttcaggggtactgccaggtagcaggctttattgggaagggacaaagcctcaggagctgggtgccccagaggctgctgggtcttgagccacagctgcagccaatgcagcagctcgcgcctccttcttccgtttctgtttttcctccttgaggcgcttgcgctccttcttctctaggtcctggagcagctcctggaagcgggcactccttgggtccacctggtagcccaggagctcctgggcctcagcctgcagtcgggccctcctctccttgtcagcctgggccttctcccagttctcccgctgctgctgctgccagttcacaatcatctgtggcatcttggccatgcactctgcgatgtgctgctccctctcccgacgcttctgctcttcggccagctgcttcacccgcagcgactcctgcatggtcgccaggctcgggtaccattcgcgttcttcggcctccagctcccgcagctgctccggcgacggccataacgaaccggggaccaccccggaggcggcgccgtaacgcgcgaactgcttagccgcgtagcgcggtcccagctgccaccgcggggtcaggaggtcctcggggtctggccaccggggtcccggcctgcggcgcgggggcggccgcgcccggtagccacgggaacccggggccagggtcgccgccacacctagtaggctgcgtgcctgtcgcacggacgccgccatcttggctgtgcggggtcctcacag

SEQ ID NO: 343314 - DNA, 1000 bp, Homo Sapiens
aaatttatttgccttggcaattatttatttacaattgatgattgatatcaacaattgaggtaaaaatatacatgaggtataaatataatatttaaatgcaatatcatactttatttccattggcaagataacaatgaataaaatactgtggtatttgacaaacaagcttgatgcatcgttttttctcctttttttcccttttccttgttttaaaaagatgcactgtgttgttatgcagcggtgatatgattactatgtgcacaaaaacaaaaaagtcagataattcgaagagagggagaatcagaaatacaatcacatttgttcttattctgttttagggatcttctaggtcctcgtttctgagtgtggttttaggccagcagcataggcatccctgagactccttagaaatgcagaatctcaggcccagcccagattacttggagcagagtctgcagtttcacaagatccccaggcaattcatgtgcatgtgaaatctggacaagcacctctctgggcgatacaaagccactcatcctcgtgtgcctatcacgttttccaaacacataggatcccatctcaggagcaggaccagtgtttagctagattaaacttcactggtgatcttgttgatgcatataaagtaatctggcatatatggttacattcaagatgttatggcagaagtgactttgttttgctcacaaagcattgcccaaaaggtaaattatggatttactgcttccttcttaggtagacatgggaatgaaaaatttctaggtcataattcaaactgtaagattttcctcgcaccataccaaactcatagaaagcttttttattcctctcaataaaataattgcacattgctgataacagaaacattacataaatgcatataatgcaaaaaaacctgaaaacactcatttgcttttctttttttctccaacaccagttgctaaatcttatcaatctctattatggatgaccaaagaaaatc

SEQ ID NO: 343315 - DNA, 1000 bp, Homo Sapiens
ttttttttttttaaaacaaaataaatttattcgtcctcctccacataacattttccctgaaggagagtgtccctggcacctggcccagcttccacaatggaatggataggccccttccctccttttactccctaattggcccaaagcttttgaacagaccctcaaaccaagcagaggaagccatggtgtgccttccaccactggagggttacatttgaaattggtgtcccaattttaaaacgtcccagctgccataggagaggctcttgggagtggcctccagctcttgacaagggcccacagaggccactgccccatcacggggggcacactgggcccgtgaggaggaagggcctcgctgcctccaggatgtccagtttggggtccagtgagcggccaagcccctccaacaccatgatggcaaacacaatggaggcaaagttgctctcaagctttaccttgtgagtcatcagcaacttaaagacactagagagaaggctggacacatgaagcttctccagggtgatggtgttcttcctggcctgggtcaccagcatggccatctcggttttgaacccctccacgtccctgcactcgctggcccgggcatgatgcaggatcagctcagccactctctggccctgccccatcaccacagccatgaaaactgcccggaaattcctcaggtcaggggcctgcagctccgccacaatgccagcatccagcagcaccagtcgcagcgggcagagggaagatggcacggccaccaccagagtgtcacagatgtccgcctgctgcagctgcgcctcctgactcgaggacaggccgttggcaccctgaaccaggatgtttccagggtgaaggtctgcatggacaaagttatccacaaatatcatcttcaggagcatgttgatccccagccgtgcaatcttccttttcaagtccacgggaattcctgcctgctggtaactggacacaggcacactctcttcatacgttt

SEQ ID NO: 343316 - DNA, 1000 bp, Homo Sapiens
tttttttttttttttttttttttttttttttagcagtcatgagtgtttacaaaggaaaaagtgagggagggaaagctcttttggttaacagcatatttacaattagttaactgtattcttaaatacttttaacctgagtaacatttataaatatgttataggaaacctcacagtcacaagtcacactagaatccatctgtccagtatctgtgctttccccacaccagaatccatctgtccagtatctgtgctttcccgagtcttcctctctcataagttcccaatgtcagcagagttgtgagcatgcaacaccaagaaaaacgcatcccagcccttcaggtgcactgtcaacaggagtggctagaaataggctccgctctctctcagctgctgcttagacaactctcttacattctggacataaaacacactggatatagaaccttcagcttctgcctctccagaccacttctcagctgttcaaagcttcaagcaataggtttactgtgcaccaagaggcttggaagagtggcaccactgcttgggggtcaggggcttcctaccttggcagaatgatgttagtatatactatgcagtggcaccagaggccctcccgggcatctgaggcatttagatcaatggcttgtccttggcccagaggtgatgcacactgtcataatactcagtgataaaagtccctgctgcattagtaagtcagttttgaagctctcctgttatagcaaggcctttcagtcagtgtggatgcagcatttctgaacagaaaattattttcacttatcatcagaaccagttccagctcctggaaatcttggagtcgagcaacatccttgtccttccttaacagagtattgggtaactttctgatcttctccacttgatctggattaacacccagctcacagcaacacactctgagcaactcttggtaggtgagctcctgtcggtccagttcaatttcaatgaaatcattttctcgaag

SEQ ID NO: 343317 - DNA, 1000 bp, Homo Sapiens; identical to SEQ ID NO: 160571

SEQ ID NO: 343318 - DNA, 1000 bp, Homo Sapiens
tttttttttttttttttttttttttttttccaaaacactgctcatgatttcacctgcagtgtgcaggctgcaaggtgcagaacacctgggctcacactgtagcctggagtaccaggcccccatgcctgccactcttgtcctggggctggaatttggttgtattgatcaatgctggaattaatgggtcaacgggagggacctgactcagtaatactagccatatagagtttgccttgtcttattctgaggataaaaaagtacatctgttaaaccttatctgtcaccagtgcaattcccatgtgagaagttacagaaagctgcaaagcagcattcccctcagggacaaagtggctcaactggatcacagttttcttcaaagtccgcctcttgcaggtggccaggccaggagtctccagccagctttcacccacccttcaatcaacaaatcctgagagcccactctgggtcaagtatgtgctgacctggggcggcggggaacagtgtgatcacgacagccaagattctcccgaactcactctgggaaatgtgatctgaaaaccttcctggtttcatttcttggatttctcactgagtagcatttttccttctctaaaaactcagaccacagttttgacacaaagaaagccacaacttcagggccacactctgtttccatgtggtgcatgaaagagagaggtttctctctctcttttacagaagaagttcaatattcctgtgaagggtaaaatcactgcatctctttttctgggccagataattattaacagttaacaattaagatatagtttgttggagcatgtagctccaaaggccaatcatacgcaaaaggaatgagtatattagtaaaagagaaaatgctgattactataaaatgataaaaaactattatttttaaagggcttttggtcttcacttaaaaatgaaactccccccccgcatttcagacttcgaatggtcacaggtgtctcatgcagtggca

SEQ ID NO: 343319 - DNA, 1000 bp, Homo Sapiens; identical to SEQ ID NO: 160572

SEQ ID NO: 343320 - DNA, 1000 bp, Homo Sapiens
ttttttttttttttttttttttcccaaattctgctaatatccaaagtttatcatagctatgacaatatcagtcccaaccaggttacaagtttgttacaaattacaaactacttaaaaacagttttgaaaaaaaatatatcccaaatattaacactaaacactaccctggagttagaaaaactgtaaatgggatgaggaaactgaggtaccagtggtgacataaggcctttttgtctgacagactgttttctgaagtcagtgtaggatgtagtctaacagacctccagaagaataattcttccaactaccaaatcagcacactgagacattaaaatactcaaatcagaataaggaccgaccctaagtttaaatgtgtatttggattaacatttttcagcaggagtgtatgaagaggggagaggatacaagtcaaagactgggtagtcaggccccctgtcccttgcagaatcccttacactcaccaaacagaatattaaagcaagagctacccaataagaagagactaaagaccccaactcactccttttgtgttgggcagaagaacctgggctgtgagtcaagaaaagcttcccagggaaactaagaaaaatgttttaattatgtagcttgcacataatggtactcaaggcacctcccaggaaacatctaatccatgctcaaggattctggaaatgcaaattcatcctcacaggatcaatcggagagccagcattattcaggtatcactgcttttctttcaggaggagatgcaacgcgggacatgaaacctcctgccattctgcctctccatgggagttctccacattctcaagggtgggagaagggagtgagccgagccagcgacctcccatggtggtcaccaactggaaaaccacaggacaggaaaagctcctgcgaatggagcactttttttttttaaatgtttcaatcattatctcttctagtccagtgttttaaagactggttggccagttcaaat

SEQ ID NO: 343321 - DNA, 1000 bp, Homo Sapiens
tagaaaacggtttccaccactagaaattcatctacattgacatccacctaaatatccagaaggtcatccccactttcgtcgctctccacagtcagctgccgggtccaccacttcttaacttcagaaccgcaggaagccgcgtcagtcatggggttcattttgcacacgacagatttcatggttgtccttcctccaaaccgtaagttgactgaggacactgaatggcttattggttttggggctgagggcagacgccactgcccaaatttcctctggggtttccctgcgtcggctgcatcttgccgacttcctcctcgatccgacagcgtggggctcaggagctgctgctggctgcttgtctcaggttgcatgctgttgtcctgactgttggcattcgtgtcctcactgggctgggtggtctcgatgctgggcgggttcagaaaccggctcagctcttgctgctgactctctctcaggctgtggatgatactgcacgactgctgctgtttagctctgatgcgcttcaggcacttcttgagccacatgcggatggtctgcttggccacctcctcctctatggtgtactccagctgctccctcgccaggagttcctccagctgcaagctcttccggatgtccacggaccggtatgaaagcatgctcaggacatcatggaaggtgacgtcgccgccattgtggagcctctccatttcgtagcacatgtgcttaaacaggagcttgtccttgtccaggtccacctccagcctcccacgcagtagccgcagcaggaacttgacgcggaacgtggggatcaccccctctcttttatcatccaccatgttccatattatttgaaagtggcgaagatcattgtaacttaaaagctggtcctcctcagtggaataaaacaaggagaaattctccacaattatggctacaagcagatttagcatgatgtaggcaatgatgacataaaatgaacagaaatacataagtgccc

SEQ ID NO: 343322 - DNA, 1000 bp, Homo Sapiens; identical to SEQ ID NO: 160574

SEQ ID NO: 343323 - DNA, 1000 bp, Homo Sapiens
ggctctatctgagaagacctatcaatacttcaggcacatcctggacacacacacacacacacacacacacatgcacaccctcctgggacatgccacagcccctggggtaacaaagacatggggtgtctgccatggcctgtgtgtacctgggcctccctggatcctctgagaatgtgagtgtgagtccacacacaccacctgcctggtttgtagcagacacaaagggctcaggtatcagtggctttgttgctgttgcattaggttcaaacactgaaacacaaaattccacgtacacaaatggtgtgtccacagatctgtggtctcacgcacgcacacacactgttcacagaggacagagagggcgtgatggactgctgtgttacacttggctgcagtctacacaacagccccggtgaagggggaagctcagaccacgcacacacacccaaggtgggggtggagggggtgctctggtgcatcacacacatcacacgcacacgcacgctggggtgtccacacgtctcgagcatgtgccggcggcatgcatgttggtgtgcatgtgtaatcacgcctgctgcgatctacgtgcggggacgggggggggtccatggcccggtgaggtccagggacaccagggtctgccgtgggggtggaggaggggtggggctgcctgggtctgttttgggagtgagcctggagcaggggatggagtgaaaggggtggtgggggtattgctcccgatgtggtgggggaagggtctgggagagagaagggtggggggggcctacaagcccagcgtccccccaatggatgacgccaagaccacccccagcaccacacagcaaatgatgatcatgattttcttcctccgggccttgctctgatatttcactgctttcttggtgtcagacacagctcgctccacgtagtccacagaatgttccacgttgtactcgatgcggtcaatcatctctccctggctctctacgagcatggccat

SEQ ID NO: 343324 - DNA, 1000 bp, Homo Sapiens
ttttttttttttttttttttttttttttttttttttttttttttttttttttttttttttttttttgttacaaaggcgtttagtttattctcatcagtatcactgatattctcatggttcacatttgccaacgccgctcctctccttacagtagttaaatgtgcaatctcacttgggggcccagggaggggtgggggctcggcccagggtggggagggcgttggcacttcacgtggacagggtgggcagcctgtcctgcgtgaaagaggtgtgggttgagtgggcggccagggaaggggagttggcaggggagggccccacagtcttttttctctggtggttggtgattctccattcagattccttcctggctgcccagggtgggggaaccatgcagctcagggcaggggaggaagagaaggaaaaagcagcaggccgcccaggggtaggggtggagggtgaatggcagggcaaggggggtacaggggtggctcctggggtaaggcacaaccctgtctttggctctcctggtgaggagtttcctcccctgcaccccctgcccgacccttctccccacccccccaccccccggacccacacacagtcctgggagccagggggcacctcctggggtccctgaaacaagtgggctctgccacccaagccaatgccacaggggctcgaggagggacacccgaggaaaaggcagagaggggcaggcaggggcctacccaggacaagggggtgggggtgagaagaccccaggcccaggagctggcccccccaccccaactaaggcctggaagtgggggagcaccttcctttcaggggtctggctggagccccggtctgcccctcggcctccgtcaggcccagccgcttgccaagtgaccagggcattgtgctttggggtaaacgctggggtggggtggcaggccaggaggcggggggagaggaggggtgactaaggtgcttgtgctttagctgggggtgtcaatat

SEQ ID NO: 343325 - DNA, 1000 bp, Homo Sapiens
ttttttttttttttttcaatttaaataactttattcagaggaatcctttggtccacttctgctgactcaacccctgcccatgccaacaaaggagtactaagaaaggcaggttagcctgaatgtctaaattcaatttgttcaactttataaaagcaggcaaagctactgggggttgccccctcccaccatcattctggtccaccatttgggccacaggcttagggaaatgaaggaaagtcgttttctttgaaggaaatcctggccaaagtcgagaaagtgggcaccattatgaggtcaactaaaccctgatggcagtgtgaagtgcaattcccttctccctccaaaataagaaacatgaatccaggggaaggggctttttcgtgtgctaaggaaaaaccctttcccacatagtcctgcctggcagagccacttcctgagaaagcctcgtgtgtataaggtggggtaaaggataggggactttatgactatttgacaggtaaaagccaagttggctccttagaggatggaaaggagagcaggcccaagcttcaccagagctgcaggtgggcatttttttttccttcctggcccagaagcttcttcaccttgcgccttagagggatagccagaatgaaacccaggcaggagggccgctggtagggatgcatggaagccgacttgatgttggtttttattccacttggcattttccctggttgacctgcctgagccatttgtaccccactgagcattggctgctgctggcttggagctcctgccatctgcacctgctgtaatcctgaggttcctgcaaggatcgtcccagctcctggctggcctgcctggccaggaccactgctgcctgaaggtctccaattagatagtcctttcccaaaggcaacagctgccaccaaggcattagtgtctgtagggttaaaggtctgcttgttcggccggagacctccactctctgattctcgctcctctttgctgattttct

SEQ ID NO: 343326 - DNA, 1000 bp, Homo Sapiens
ttttttttttttttttttttcgtttatttatttagaaacagagtctcactctgttgcccaggctggagtgcagtgggacgatctcggctcactgcaacctccacctcccgggttcaaccaattctctgcctagtctcccgagtagctgggattttaggcgcccgccaccatgcccggctaacctttgcatttccagtagagatggggtttcaccatcttgcccaggctggtctcgaactcctgacttgtgatccacccacttcagcctcccaaagtgctgagaccacaggcgtgagccaccatgcccagccttttttttttttttaaatgttcaaatgggaaccacttggacttggtcctctcactctccctcttctgaaggaagagcatggtcatcaacggggaatggcagttgcagcaaacaactccaggagctggcttctcgttctggagagcaccctgtgcctcctctgcctggtttcctgtgctttacacatccagagaagcttctgtagtaatgaaccatagacacgatgcctcaaagtgtcatcttcaaactcgctctgaattgaaagtataatcttcagccagctgtggtggctcacgtctgcaatcccagcaccttgggaggcagaggcgggcagattgcttgagcccaggagtccgagaccagccagggaaacatggcaaaaccctgtctctaccaaaaatacaacaatgagcctggcatggtggctcacaattgtagtcccagccacttgggaggctgaaatgggaggctcacttcaacctggcaggttgaggctacagtgagccgagattgcaccactggactccggcctggaggacagagtcagaccctgtctcaaaaaaagtataatcttcaaactcaagctcttcattggggatggggctgaaatctgagtccagttctggccgtcacaccagtgcgactcccacacacttgctggtgtcctgttgccatggagacctcttcact

SEQ ID NO: 343327 - DNA, 1000 bp, Homo Sapiens
taagaaaaacacagagacaaatctatgtatctttttttttctggtaaattctcaggaaaatgagaaaagtgtgcaaaataaaaacgagtttatgctcttaaagtaaaaaaagacaagtacaattaaataataatatgtgacatttcccttaggaagagctaataaaaagttaagaaaaaagtcccattatttttattaaacaaacaccaataacagcaggattatttctgccactgatttccttcctcttttttgtttcaaaaattattgtttgaataaaagaaaggggaaaaatggtttgcttgcagctatgtatgtaacacaaatgaaggcacaaaatagtaggactccaaggccaatgaggaaggtgtagtgatttgggcatgaacaaaaactgaccctgatatacagttaaagatctggcactattttgcatttataattgcatacctaagtgactaaccaatttggaacccataaaaacctttaatctgttactttctgaacataaaaggtacttctcaaaacttcctagctcatctgcgcaaatgtatgccttatcactgatgcaaaaaaaggaagtatgaaaacaacccgacagattatattttcataatgttcaaaagatagtgtgcagagtcagtatctgaagaactcccaatatctgaattggagagaaacaaaaatatggaatccaaaggagatacggacagctgtgcccttgtaggaggcactttggaatttgttgatgaaagcttacatggaatttagtttgtaacagctgatcagagataagccactactctgtaggaaaactgagggccaataggccatcttttgacacagaacacccttggaccatctcccagaatcctttataaatatattatacatatgtaatttggctagattagcactgactctgttgccactaataattataaatggtcttaggaaaaaaggataccactgaagtcactgggtacaatattcattttag

SEQ ID NO: 343328 - DNA, 1000 bp, Homo Sapiens
ttttttttttttttttttgaaaagatagaaagctttactgaaatacacttaaagacataagtaaatggagacatactatttttatgaataggaagactcataaaaatatctgttttttcaaaatctacaaattccatgtaagtccaatgaaaatactaacaggctttttcctggaacctgatggttgaataaacaatttatatggaagagtaaaggaacaagaaaagttaaagtgatttttgatggataagaagagcaggaagaattgacatacaaatggtgcaggcttattaaaaacatcagtgaacgaggcagtgtggcaccagcacagggatacacaaacagataaagtaaagggaggagactggagaacccagtaacagccccccacgtatgacaatatgtgacagcagtgacatcataatcagtaggggtggggtaaggatggactagtcagtcaatgatggttatttaaatagaaaaaagaattggatctttgactaaagaacaacaaaaacccaaacaaaaaatccaggtggattaaagacctaaatatgaaaagaaatacagaagaaaacagatgtaggggaggacttcctgagtaaaacacaaaaagcacaaagtaaaaggtaaaatattatttcaggctgggcgtggtgcttcacgcctgtaatcccagcactttggggtgaatcgatgtctctgggaagaggaacagagtagtgtgagtgtgaaggactggattcttgttgctttctcctgatgcccattccagggtttccccaggcaactaggaagaccatccatggtgaggcctgcaatctaggcttcttgctgatcagtcaggtgagtcacttctttaggagggataccagtgtacgccagtgcccagttccaggggaagacagaagtgggtgccaggcttcctgtccagttaggcaggagatgagtcctgctggccatcattgatcagtaccacttcctaccacctccaatttct

SEQ ID NO: 343329 - DNA, 758 bp, Homo Sapiens
gggttatacaagcagacaaaatggcttgtttgtgtcagtgggaaataaattctaagagacagactgggtgaagactatgataatttatgagttccagtttgcaactctttacctaaacctgggattctaggatatagagatcctttatgcaaggggagcagaagtatgttcctccagaaccgctcaataaaattggttctaagaaaaagccactgcatttcaaaactgcctgaagtatatctttcactccactttattattgtattctgaacatggcacctctgcaacttttgtttccatatcctttgagcgtcttctagaaagcaaagcttgattctgccttctgggcttgagcatgtgggcatagctgggttgtcctgcactgcctgaagagctgggaaggaagaaaatagtaattgggagtcttgtgtactaagctaatttccaggtatcggacctgctgagagtcccagcgtctctgccaggtaactgtcttcttcacaaatgtatgtgatgcaaatttggcatgcctgtgcccctttcggaataacggagtcaatcaaagctcgggtcttatccataactgtagcattttcacgttttactttctccatctcttcctggttcagcacccttgtctgtaataattcatccagtaagccatttattgtaccttcacccatggaatggataaacagctttctcttctccttcaggaccttgtcggccatggcttttctctcctacccttcttgtgt

SEQ ID NO: 343330 - DNA, 1000 bp, Homo Sapiens
ccatgctgtctttattggaggtctgtggctggcagggtccttgggggtggctccctcctggatctcttagagacactcctggcaggtcttggcttaacagtctggaaaaagacaagggagtgtgaggcttgggggtggttgtggtatgtggctgggtctgccctcctggtggtggaaccctggatcagggaggggacagtggcccaaagtgagagagtgaggacaaagccaactataggccgagatggatgtgctagtcaatagcttaatgaaatggagtggcagtatgtaggtagcacgagattgtccaggtgtgattctaaaattgttttagtgatggcgatcaagggctgggatgaggtcatcaggtcaaagttgtgctggcataagagttgtcatcaggggttaaggagtcagggacgaaacaagcaacctcagagttgagattgtctggacagagaattgcaacacaggattaaggactggacagaggttgtgaaggcaaaaggtcacagcctaggttcatgttgtgtggacagagggccttcgggtaggggcaggggtgaggtcaaggttcggcgggccaggatgaggtggtgcagcctgacaggttgtgacttgggtagagaagtcatgaaggccaggctgaggttgtgagggcagaggggctgttggcaggtgtcagggtccatgccttggctggaaaggtagaggtattaggagctggggaaaggacaggctggctgggtctggggctgagctgaggctgcataggcagaagtcacaggatcagggatgttgcccgcagagtgacccgcaaaggctgggcctaggtttcctgaatagacgtgccgccgggaagttgggggcctggctgaggctgtgcgggcacagctgttacaggcagggggcaggggcctcgtggagcttgtgtagacggaggggcggcgggccgtgtagtgcaggctgcgaagactcaccgcggtgaagtgcggccagg

SEQ ID NO: 343331 - DNA, 1000 bp, Homo Sapiens
ttttttttttttttttttttttttttttttttttttttttttttttttttttttttttttttttcagagtttcaaaatattctcatctgttaaattaagagtgtctcccatagaaaagcagtggaggccccacagggcaagtacaaaacagaattaaaactcccaagggtcttgtctttacaaaagaaaaggcaggaggcagcccctggacagctggtcatgctggccgctccggttggaccacgttgcataatcctcagtcgcatcatcacaacgtctctgagcgttttgatggggggagaaggggcagtgtagtgtgtatgggaggagaggcccagagggctctctttgcccccttacccccttttttatatcccagaggaaagtcgggggaacctggctacaccttgaaatgaggctatgtgtttcaaacctggggacggggtaagagaggatctgtgctttgagcaacctgagccagaggcagaggggtgttggaggggtaaggggaggatgcatgatgcttattgctttgtacctttcactgggaaggagggcagcagccaacagtagctcacaggtttgtaaactgagcctgttggctttaagaagggaggcaatgaaatcgaattaaatataaaagagtcatttgtgcaaaaataacttaaacaaataaaagacctggggaagggggtgttccccttagcgcctggtggggaaagggccatataccatcccccccaggccttttcagtgacatggcttcgggggggcgggggggtggtgggggggggtgaacttccctgccccctgcaatggctcaggatgggattgtaggggaaggagttgcatttgtgctctgagtggggagtagtgcccccacccactgtccacaggtgcaggtggctggcaggggctcccaaggctcagcactcagctctccccaatcagggtcagatccagctccaggtatggctgctatggggccagtttcctcctc

SEQ ID NO: 343332 - DNA, 1000 bp, Homo Sapiens; identical to SEQ ID NO: 160577

SEQ ID NO: 343333 - DNA, 1000 bp, Homo Sapiens; identical to SEQ ID NO: 160578

SEQ ID NO: 343334 - DNA, 1000 bp, Homo Sapiens
aacaaagtggaaaaacttttattagaactgccaattctaggttcaaatttatgtcaaagcactttatggtaccataattagtacaactaaattattttttagctttaaatgtcatttttcactaaatgattttaaataagacatctgagagttacttgaggcaagtttagatacctgtacaagtttagattttgagaaactccctatttcctcattgtgtgtctctttcacatgctttttagaatcatttattccacaacatgtttccaaattctatctagtaatttttaaacttcaaaaataatctccctgttcaattacaaggttctaaagacaataaaataccttataatttcagtaacaacatttttctttttcttgggcaaagtattacaaagtgttcgcctaatcctcataatgttcttttaaattaacgtggaaatcagtaattatcctccttaaaaggtgggaaaactgaagcactgtaaagttaggttctgacccaaggtcagagtaaccaaggtgaaaaatctgggtatttcaacaactgctgttccagtgtatgtctattattattcgtatcaccttgaataaaatatggcatttaaaaatttatgatgtcataatgctgagtgagtctctactgagcagggctgcataatgttaaattttaaaaagaaaaattacaagcccggctttaaataataaagggattaagtacagaatatatatttttttaagatcatcgatgccattgtgtccaataaattgccttactaacagtgttgtgttgtcttaagacagtgctgattagaaaaagtgtacaaagaatgctctaaagacccatggaacacaatataccttaaattggcactaagctataccacaataaaagtcatacatattgaatgttgacatacactgagaagggtgacgagttttcaataacgtattttagaaaattgttcattttttgcttaaatttatccgaatataagac

SEQ ID NO: 343335 - DNA, 1000 bp, Homo Sapiens
ttttttttttttttttggtttataataaagattttattaaaaaagtgttaaaataaataatacatattccagaacatcactgttctgagaaatcacttccctttagaatatgagttctagatggcagatctacttacaactgctctgaggtctttcactagctgatttataatcctatattaaaaaaaaatctatagtctgcagtcttttgacatacttctcaagggtggatatgtggtggaatgcagactccatcaatatgtgtggttttgtttgctttttgtagcttaactgctgtttagaaatcccagaggaatatgattgaggccagagttacattggttcataaaattcgaacagttgaagctgtttttgttaattgctgggccacaaccagaaatccggatgatgggagagaaacacttctttaggataatgattaatttccataaagatgagtgctttaacaaatttcaatatgcagttgctggggcggggagggtgggtgggcactaattagttttaccgttttcagcagatgttgaattcaaaatgccagcagcatctcaaatgccagtcattaggtctgtctttcattgaggagtgctgaccaatgaaatctccactctgtttaatgagacctatctaggcagagtcaattaaatcaaatctctcctaacatccttaatatatctgcagtgtgggcagcaccaacaaaagcagcagagagggatttccagtattaataaagggattcactgctgcatttggagaggggaaaaaaagaaggggtgagtgttggggcaagacctttatggactggggaaagccggtaaagtctgagcgaaggtgggggtggggtagagggtgggggcgagggaagaggagctacttaaagggtaaaaagctaagtaaggcgattagagaaagagccttaatgtagctcaggaagggatctaaccccaaccgtttccctcccctgtctcttccaccgcaaatc

SEQ ID NO: 343336 - DNA, 1000 bp, Homo Sapiens
tttttttttttttttttttttttctgatgaaaacatccattttaatatttattatcttcagtgactaagaaacacaatcctaaacaacatgtattataccgtaagaaagtctttggagttatcataaggctctccagcacaaggtaaacttcaaggcaatttatcaagaactaaatttttttgaactaccgagatagtggcatatgaaggtaaaaagaaatgtcaaggttagccgattgttttccaaatactaggatctaaagaataccgggggaaaatagaatgtgggaatgaggtgctattggacagtaacagatggctaaaaacaggtactgagactagttagcattaactagtatataatgtatcttaattcattagtcaacattgtcttcatgtatataattatttcaggatagcatttctacaaattttattggttcatttagtttatcaagtcagcttgcaaataaattttgattccgagtatctaacgttatagcaactataattgcattttgatgtttatccctaagtatatctggcactgtcagccatggctcttgaatacgttgtttcttgatataatatcactaaaaacagaagtgatattgaaaaaaataactacttatctaaaactcaagattcacaatgaacttaaccaattaacattactgagctcacactaaaactagatctttttcattttaaataatgtaaccaaatcctacaaagaacaattattcagaaaatcacatcctaaggtttgcactcatagtcatctataatacgtattgagtattgggactgaatttgtactcctggtccacactttggtaccctatgttttccatactggacatttcattttatgaatagggcaatcaaagaacttaaaagtaaagaaaataagctttaatttggatgcaagcattttgcattcatattaataaaagagatcatgctttcaaaggaagagaaaaataaaatcatgtgtggt

SEQ ID NO: 343337 - DNA, 1000 bp, Homo Sapiens
gtttgagacagagtttcgatcttttcaatcttgtagcccaggctggagtgcagtggcacgatcttggctcaccgcaacctccacctcctgagttcaagcgattctcctgcctcagcctcccgagtagctggggagggcccttgaagtgaaggccctgagccctgattccaacctctgctcccagcacactgctgctggccacatgctgctgcctgaacttagctcaaggctctccatcacttcctttggggacctgggcaccaaactgagaatcactggtccacatttctctcaaccattaacaaaagggggtagagatgggggcaacagggacaagaatgccacctcccaattgagtgaggatgaattatggtaatatacgaccactcctcacccagtgcttggcacacagaggtggtcaacacatgtgtttcttgaaatgtcaccttaggatggagttgcaggcctccctgaatgcacctgatcaggagaaatgctccttaagggaaatcatcttaactgggggattctcagattcaagggctccttcttttttttttttttttctctgtcgcccaggctggagtgcattggcgcgatctcggctcactgcaagctccgcctcccgggttcaggccattctcctgcctcagcctcccaagtagctgggactacaggcgcctgcaaccatgcccagctaattttttgtatttttagtagagacggggtttcgccgtgttagccaggatggtctcgatctcctgatctcatgatccacccgcctcggcctcccaaagtgctgagattacaggcgtgagccaccgcgcccggccaagagctccttcttaaccgcacaggcatgtgaggcccagaagactggctctgccaccagaaggaaggattgtttccttcaaccaaccttttggttgctaccatttcttgtccttgagaaaggtgctcctagtgcttgtagagggaaacgctacgtccgtgcagtatg

SEQ ID NO: 343338 - DNA, 1000 bp, Homo Sapiens; identical to SEQ ID NO: 160581

SEQ ID NO: 343339 - DNA, 1000 bp, Homo Sapiens
cagagtgaatgttcttggaagagggtcacgggtcaacaaggcccagccaaaggatgcagtagaaccattttccttagaaatctttgggagtgaagtaggcttcagccactcccatccctgcccttgcagctaccactgcgccattagtttagacagggttagggatagagggggaggggtccagatgtggagaaaaaatcagattgcctgtggggacatccgggtagctgaaggaaatccacacacccagactctcagacctgaggtaggctccccaggggctgggataggagttggacggaatggaggatggaggacagcgagaagaagaaaggaagagaaatgcaacgtgtgggcacccgccaagagtgaaaatagagggaagtgccatgcaagtgctggacagaagggggcaggtaagacaagccccacagccccctcaaaaacgaccacctccaggaatcagtgctccctggggagcaggctccgccagccctcagccacacgtggctccggcacccatggtcccaatgccttggatggaggcggccaggtctgatgctctggactccagtcccatttccttcccggccacgcccgtccagcagcctctttggctgcattcagcccctactcacttggagaccccgcgtggggcatgagcgcacttggcggggtaggggctgaagggatcaggggaagcctctagcctggagggtacggggcacgcttccccaagggcggacctggcaagaggaagcccaagagctgggccccgccacccaggccgggctagggacatggtggggtctgggcatcctggggctggacttgggcgacctgcaaggcatagggaggggagagatgggtggctctgcccccctgaggccccgccccggccacacccatgcacggaagctccctccctgccgtgccccgaggcagtcgcccaagcttaagcccagaccccagtggtgagaacatcccagctccaccccgc

SEQ ID NO: 343340 - DNA, 1000 bp, Homo Sapiens
tcacggccaccctgggtgcttcaaggatgagggcggagctggcttcactggggcacagggctgggggcagcctccagtcttgccctgctgggcctttcggctccagttgaggaggggccggggactggcccacgtggatgccggggtcttgcaaccatgctccctctggctccttagaagccccctggggcccagcaggacgggccggcggtcccccaagctgggcagtctagagctgggcagcagcgacaccacctgcaggctggcgcccgcctctcccgcagccttcagctccgtcaccacctccgcgtgtctccaccacctgcatggctgcccattcactgacacaatgtagtcgccctccttcaggccagccgccgcggcctggctccctggaatgacggcagcgatgaggacaggcgagtctccccgaagcgtgaggccaaagccgccctctcctcgggtcaggtggacgggccccaccagccgccaccggttcttggctgagaacacagacaggggccccagccgatggaagatgtcaggccccttcccctgggacaggcgtggcatcctggcctctggcttctggtgggtcttaggctggatgtccggggcctcggcagcctcacagaagtcatcctcacggtcgagctccgcatacttggccagtgagcgctgcagcgtctgggagatcacagcccgaagcaggtccacctcgcgcaggacgcggcacagggcgtgcagccgcagcgcctcctcctgccccaggatggcacgcttcaggtgtgccttgccaagctgcctgcgctcctccagctcctgcggcagcacagggcctcggggcttagaggaggtggggggctgcaggaagacctgctcgtgcgtggggagctctccctcggtcgctgctgggggacagagaggctgtgagcctgcgcgggggggccttggcagtaccatgggcaagtgtggtgggcactcacgggagccgtcgcag

SEQ ID NO: 343341 - DNA, 1000 bp, Homo Sapiens
ttttttttttttttttttttttttttttttttttttttttttttttttttttttttttttttttttttttttttctctctctttctctctttaattttggtttctctcaagcttccaaatggtgctcagtgctccaaggaaaggaaggaaggaaggaaaaggaggggagaggaggggaaggggaggcagaggaggaacatctggaaaaaaagcagcctgacagtccagctgtttgcaaactcatagcacatcctccagttacatggcagaagagggagggagggagggccaaaaagaaaagggagaggaggaagaaaaataacttaaataaacacacacacaaagaaaagagaaggcaacatgacgtgagctggtgatccatgaaggcagggagggaggggaaccgttttacctgtgctgaaccaagggaagaatgcggagagggagggagggaaaggggaaaaaaaaatcagaagaaacactgggggcagagggaggaggggacacggagacaactttatacaacttgagacgaggcggcccggccggcgtgtcctcagtgcggtgtggcggcggaggatctggtgctggtggtgctggcacttcagggtggggggccgaggacgggcacagtctctaagcagctcccccaccccaaacacggaggccccaaggggctgggaacaagagtctgtggcgaagcaggtgaggcagcgggcggtgggcgggcttgctgggtgcccccgccgcaggcgggcacgggctggacggcctgtcttctttccactggccccccggcatgggatgggccagggcgccgggtcgggtaccggagtgcaagctcgaaagagagagagagaaaacactgagacagcattagtggagtgaaaggcggacacagatgagcctgcagaccatgcccccaaccctccgctgcccatcccctcctccccaatcccatccctctgaggcaaaaaataaaaacgtagaaaaatctctg

SEQ ID NO: 343342 - DNA, 1000 bp, Homo Sapiens
aacactgaacaaaatttactgaagagaaacatgaactgaaactgctgaagaaaagggaatctaacacagagagaaactgcaaacagccactacaggtcacaagtccccggcccctccctcagtgtggccccccccaccacatccctccttccatagggccccaggatccacctcttgccaggatggtgggctctggcaatgtgtactcgcttcagggaaccccctcctgagcccacccgctggggcagggccctgccctatagactgcacaggacagtcacaggatgctggaaaacatagcagggaacaccccaccaagttgaggaaactgagtcacgagtaacagcaggggtggaacgccaaagcacaaagcttcctggggagcctcaggcagccctgctccttcccgtgtctggttggtcctcctgcagtcgaggtcacagtcacaaggtgagcgtctgccatgcctccttcccaccgtctcctggaactgcgctggggtactctggaaaggagctgctcagataaaaacacacacatccccaagagaacaagcagccactggccgagatctacaccggcaaagcagaggtggagttcttgacacggaacagcagtgagcagagcccgggcctgatgatgacgcaaaccaaaaacaactacccacccccaacacatcctctcttctcttcttacacttcttcctcctccttcccctcttcctcctccccctcttcctccttctcctccccctcttcctcctgctcctccttattctcctcttcctcctcccgatcatcctcttcttaattctcctcctctttctcttcctcactggtgcaggggcttatgaatgctgccttcctggggctcccctcatgcagtgtagatgatcctaaagacaggctggaccctgtggcctcccctgcggggcttcacttctgccccacagctcttcctcagcagccctggctccttctggcagaggcaggccccaggc

SEQ ID NO: 343343 - DNA, 1000 bp, Homo Sapiens
ttttttttttttttttcttttttttttttttttttactacaactttgattttattagtggttggttactgactctgccaagagtacagaatgaagggcagagagtaaggactggaaaactggcaggaaacacactgacagccgtcatccctggaggaaactgctcaataaaactgctccatatttacttctctggtcacggttcatactccacgattttaacaaaggagtcgaggaagctagatactgtaagtggaacggtgtgtctctggaggtaagcaggcttgctgatttcttgttttataattcttttttaattacaatgtaactactaagagcttcagttcccactggagtggtgcacacatctcattactactaaaaccacaggaatgttccagggaaacagactatcatcactgagcgaggtggaatccagccaaaaccccaggctaacatccagatgcctgcagatcagctaaaatccttttaaaggacttggaatctccagatactagttttaagtcttttctgggaactgggagtttgtactggaggccacttaactatttcaaaaaatattcaccaaaataggtgtctctctgactgcaacggtttgagtcctcctcagccctcatatcctaggcttcggactgttgggaaagtcttatcttcctgacgaaagctcagcagcaacagaacctgttatttttttgttgagacagggtcttactctgtcacccaggctggagtgcagtagtgcgatcttggctcactgcagcctcagcctaccaggctcaggtgaccctatctcagcttctcgagtaggtgggactacaggcatgtgccaccatgctcggtgaactaaaaaaacttttttgtagtgatacggtctcactatattgcccaggctggttttgaactcctgggctcaagtgatccccccacctcagcgtctcaaagtactgggattacaggtgtgagcctctacactgggcctg

SEQ ID NO: 343344 - DNA, 1000 bp, Homo Sapiens
tttttttttttttttttttttttttttttttttttttttttttataagatctatttcattttattttatttatttattttttgagacagagtctcactctgtcacccagactggaatacattggcatgattttggctcactggaacctccacctcctgggttcaagcgattctcctgcctcagtctctcaagtagctgggattttaggggtgcaccaccacgcctggctaatttttttgtatttttagtaaagacggggtttcaccaagttggccaggctggtcttgaactcctgacctcaagtgatctccccccttggcctcccaaagtacagggattacaggtgtgagccaccatgcccagcctagaagattcattttagaaagagtggtctgggaaggtttctcttaggaggtgacatatttaaaattaaacctaaagaataggaggaccccagcaggcagaggaagggcctgcaggaagatgtaaataattaacataaagaacttttcctttaatagaggagctgaaagaagatcagggaggctacatagagagtgtcagaagggtaatgctagctgaggctggaggtgggccagaccatccagggccatggaaactggatttctttctgagtgcattgggaaacctgcagggttttaagcaggaaactgaaggatccaatttatattaaaaacattactctggccatcttgtggagagtgggttggagagggacaagaacaaaagtgaggacaactgttctgatcttaaggtaggattcaggttagaggtggtgatggttggatacaggatggtggtcaaggagttggaggagaagtggaaggtccaagaaatatttctgaggtagagtccaaagggcctggtgacaaagacactggagtcagggatgacttagattcttggctcaaacaatggagctgatgtaataccatcctcttcctttttcagtctgggagactaaggctccaaaaggtta

SEQ ID NO: 343345 - DNA, 1000 bp, Homo Sapiens
tttttttttttttttttttttttttttttttttttttttttttttttttcttgtcgaattttttaatcatcttggacgacttcccagcgcccagacccaccgcaaccgtcccaggcgccgcagccggcgagcggaagaggctgcaggaaggccggccccgcgctctcacgccggttgggccgccgcgccttcactcggggccaaggcccgccctccccggccgccctcggcccccgggacgcagccacgcccccttctcctcttgcggcccgccggagacttcggctcgaccctcccggcttgcgacccgggagcccacgcccgcagcagcaggaatgtggttttatttgggtggcgacttctgcggacccctcagtctcaagagagcgaggcgggaggactgaggggtctgtgttcacccgatgaccgtggcctttttgataatccactgcggggccctcccgttgcggaaggcgctctccccgggcgcggttctggtgggcatgtcttccaagagcgatgcgagtgtcagtggttcccgaatcactttggaaattggcctttcactcgctgacttcttggaagcatctttcctcatatctctctcatggactggagcaaaggtgagctgagggtacattttcttctgtgtcctcaaagcgtagacttttgaatacttcccttcgctcttgaaatcattgtcagtggaaaacctaaaccattgttctcgcttggatgtgggatcatccgacagtatcaaagggaagattggtttcagcttagatcttaacttttttttctgaggcatgcggggcagccagaggttctcagtgggtttgtgctgatgatgactttccatgaccttgagcagtaactccttggaaaaatattttgatgcactctccttgtcttgctgggtgattgagcagggaggtgggttgttggtcataatcagtaacgtcttatcctggtcatactgtgttacttttaacatgaagct

SEQ ID NO: 343346 - DNA, 1000 bp, Homo Sapiens
tttttttttttttttttttgttcacaattcaaatccagtttattaccaaaatgaacaaaaggagaatgaggcttaaattaaataaattatgcaaatatctcaagagataaggttcccagtcctccctgggaattatattatcacaggtcagtatcactaagaacattcaaaagcattgaaattctggattatttcactactttgcctccatctttcctgcttcaaccaggtccagaagagtgttcttttccaaatattccagcagagatgttttcttcaatgtcttccctctgcctcatgtgtttccaatcttacctccacagcgggctctgcaaccctcagacatgtggcagatctctccctgagcctcaactccaggtcactgggtcaacaatctccttcagttctgaggctggtctgggggttaatgattacttgggggttaaggatcacttcatcaagtcctcaggggatctagatacttggttcaaaggggactctgacttggaaattcctgaggctctgtgaccttctcccacctcctgggcctgagctggacttggaaggaggtggagtaggggagagtgagttgtcattggctaaggctcttgtcctcctggaatttggcacttcgggtgctgggcacggtgaatcccagataacattgtccttcgccttccaagttttgagttccattggcagccagatggcataatgaattcacagaaaagcaatgctcctgggccaagaatgtgttggctcttggccagcaccccctcctttaactctaagaagacttgttagctgaccagctcactcaacacacagacacacaacgcaggtctggctgaagttagaaatggggatgttttcctaggctgggccagcccaacctgttagggaaggggttgttaagctgaagaagcttgagaaaagcagtgatgagaggccagaagattttctgtgcatttccactgaaattttacaaaacacttacaca

SEQ ID NO: 343347 - DNA, 1000 bp, Homo Sapiens; identical to SEQ ID NO: 160583

SEQ ID NO: 343348 - DNA, 1000 bp, Homo Sapiens
tttttttttttttttttttttttttttttttttttttttaaaatagtataatagatctatttacagatttgaaagtatttcataatagtttgttagataggtacacttctaaatgtttatatacttacatgtatgcataagtatacatacaaaaatagaaaaatatctagagagctacctgtaaagtttttaacaatagttaacatttgtgttaacttacaggaaagactttaactttttactttatatacctccaaatgtttattaattcataagagtgagtgcctggttattttaaaattcaatacattgcttgagcccaggagtttgagaccagcctgggcaaaacggtgaaatcttgtctctacgtaagacaaaaaatggccaagtttggtggcatgtgcctgtagtcccagctactcagcaggctgaggtgagaggtttgcttgagcctgagaggcaggcgttgcagtgaggcaagattgtgccactgcattccagattgagtgacagagtgagaccctgtctcaatttaaaaaaaaaataattaagatacaggtttcaaaccatattaccacgatttcaaaaattttgtgaataaaagaagacacactgtatttataaagcttctaggggctgtaatagatacataattttggatgtggtataggttggcctatatatacaaaaatacgtcactaaaattaagtggagtcacaataactttttatgtaactttgttttagttctaatttggtaacagtgactcaaaataaatagaatcatattttaggtggaaactcgatgatccatgtaagtagcggggctggagttctgtgctgtctgggcagagaaagcacttggactgaatgatgggcacagctctctctgtgaagtcctgcagagtcactaaccttgagttcatgtgctctaagcttcactgtccctccaacccaagatcccaatttcttttattccatcttgtttcctcttgtaaaca

SEQ ID NO: 343349 - DNA, 1000 bp, Homo Sapiens
tttttttttcctttgaacaacttttattgttaagtaaaaattcaaacatttttaatctcatatttttgtctatttaaaaaatgtggcgttaataacattaagccaagagccaaatcaggaatgcaatcccattcacaattgccacaagaagactaaaatacctaaaaatacagctaaccaaggaagcaaaagatatatataatgagaattacaagatacccctgaaagaaataagagatgtcacaaacaaatggaaaaacattccatgctcatgaataggagcacagctttgtaaataaaggacatagggtgaggaagccgggttgttttaagaagcctgtgtcccctgtgaaaaggcccatggcatatcttgtagaattacaaggagttcattctgtagcaggatgagctgcagacaaaacttctcagacaccgagtcggagaaggaagggcttttttcagctggtggcatcagcaagctgctgccttaaaatccaagctccttgaatgcacaatttctgtcccttttaagggctcacaacactaaagatttcacatgaaagggtcatgattgatttgagcaaacaggcggtacatgacaggggctgcatgcactggtggtcagagagaaacagaacaaggcagtgagtttccaaatgttcttctatacaatgtctggaatctatgaataacatccggtttctaagttatgagttgatttttttttttttttttgagacggagtttcgctccgtcgcccaggctggagtgcagtggcgcgatctcgactcactgcaagctccgcctcctgggctcacgccattctcctgcctcagcctcccgtgtagctgggactacaggcgcgtgccaccatgcccggctaatttttgtatttttagtagagacggggtttcaccgtgttagccaggatggtctcgatctcctgacctcgtgatccacccgtctcggcctcccaaagtgctgggattacaggcaatga

SEQ ID NO: 343350 - DNA, 1000 bp, Homo Sapiens
tttttttttttttttttttcagtgtagaccgtctttattggcaggtgttaagagtgcaaaatatcaacaaacccaggggaatacgcaagggggtgggagtatggctcccctaccccatgtgagagccctgtaaccaagccagtggggtgggaacgttgacttgactgtggcaaattcaggctcagcaccttccaaagaacaagctcccaggcaggagggctccttgcaacacaagggggaaaggagtggcaccctggaaggggcctgggctgcgacccaccctgggctgcttggctcctgtatactgcccacctcaacccctcaagaggaaggcttcacagctgggggtatgtagttcagagaaccgggctaaacccagccctccccaaacccaggtatctgcctcgggcctcagtttccctcctcccagtgattacccaagttggcccatcaggccctgtagtggcccagcctgatccaaagtgacaagtccctgtaacataccatgtatcagtcagtgtgtgggctgcaggccctccaaagctgctgggatcaccacaggctggccttagtcaaaaagaccctcttagaccatgggaatcaatccaaggtgctgggcattaaggctaccaccccaaacttgctttgtctcctgaaggaaattgacttccaagacaaatggcgcctgcaccccaccggcatgctggtccaaaagtgtgatgcaataaccaaagggtcctcctgctgagagccccaggctggcattaagcccacaggggcctcgtgctcgggaaagtctggtctgttcaatcaaaggcccaaccctgcagtgctgggcctcctggcacattctgcgcctctggtcatgtcctccacacactcttggaggccccaccccaccccgtgaggcccagtcccttcccttctggccagggtctgagtcagttacaaggcagccaggtgggataggcgtgagccaggagaggttgcacgggggtca

SEQ ID NO: 343351 - DNA, 1000 bp, Homo Sapiens
tttttttttttttttttttttttttttttttttttggtaaacaaaagctttattattttttctttcattaaaaaaatggagcactgaagagaaacagagtttggacccctgggttcaccccacactaagcaaaatagccccagataaagatggcgcagctcacgcagaaaatgaggttgacgtccaggagggtcttcaccaaggggttttcttccagggaaactatgatggcttctgctctggccgggagctcttccttgcccttctcctgtattccacagagccacaggatggccttcaccactttggactgctttggggtcatgtcacagctgtgggttttagacgtgttttcttgaaccatctcgaactggacgctgctgctgctgctggcctctggcatcccgttctgagagagggtaagagacaagggagctgctggtggtgcttgttccttctggaccacggggtcgtgacgagtaaaccaggtcaggtggctgaccatctccttggagggtggctctgtgaaccagctcacggtggagacagtgatgagggtgaccgtggacaggatcatggagaagtagaggtagtgaatgctcttcaccaggaccgggcgctcatctggctggtcgcatcgaggctgcacgtaaataaagtccaggaccagcctaaccaagcccaggagcaggcccgagatcaggccccagaaggcacccttttcattggtcctcttccagaaacatcccatgatgaagaccaccgccacaggcggctgcaggtaggagctgatggactggatatagatgaagagctggccgccctggctggcctggaccacagggatccagaggatggagaccaggaccagcagcagcacaaacaccctgcccacaatcatgagctccttctcagatgcccgaggccggaggtgattccagaggtccatggtgaagatggtgctggcactgttaaagatggaggtgagggaggacatgag

SEQ ID NO: 343352 - DNA, 1000 bp, Homo Sapiens
cacattttcaccattttattcattaatgttgtcagatggtttagtggggcatgtggggaaagaagggtaggagttgtccccccatccccgtgcacaggtcaggacatgctgggggctcctggagggagaggaggatggggtcagcctagcccctcccaccccagatttgtgcgagggcccccaggatggagggtggtggggggatgggcagacccttcagtccagggtagggaagctgagattataggttagggacccacatcagaagcaagttacaaagttagaaacctggggtagtggtcggggttcaagaaaatacaaaacaagggatttggttgggccaagatccagtgagggtgaagggaaggaaggacggcccctcccagctggtgctcagcagtagcttcgggtctggccctcagagtggagggaccagctgggagtggggtaagggggtgggggaccagccccctcccctctttgccctccatttctgtacaaggaccctcggtggagctcgcccccccttccgtaggctggcggggctgccctgtagagcaggagaggctcaggagggccccagggacccggcaccctatgaggggtacggggtccccagggtgcccgttgtttctggggaaggcgggggactgggggaccgggatctgaacggcttcgggggtgggcaggaggggaagaggaggaggaagaggcaggtgagggacccctgggccctagagctaggttgacgtagaggggctcaggcggtgtagggcgccgagcagggtgctggggggctgagtagccaaggtggtcagggggaaagcaggagggggctggcgggtagctgagcaggaagtcgggggacctgtggagtgggggtgattggccaagcatgccgtaggaggcattgagcctgtcggggggcatggagcgaaagggactccaggagcgggtggggccagaatagggggacccctcacttgccccgatctcatag

SEQ ID NO: 343353 - DNA, 1000 bp, Homo Sapiens
tttttttttttttttttttttttttttttcaccatctgtgtttactacaaactgtttaattgtttcttatcccaataactttacaaatatagaaccacatgctagtctgggggtgctgtgcagtgagtcactacaaactcgctcaggcacagcttaatgccgctgagatccatctaggagcagtcccagcggtggcctcagccacgtgaggaagagggctttggaggagggctgccaagtgtggccaggggacccggcctcaggtctgtggaggtgcttcaacagcacgatgctcattctctgtccgtagtgtctccatatactttctcatcttctccaccatccaggagggtaggacaaaggatttcaattcctctagcttcagatccaggcatcctctgtaatcatcactggccgcaaggtcccggatgtcctcctcgatgaggaggtaggccatcttgccccctgttgcccgcatgtgatgctgctcagccagccagtgcttatcctgggggtcagctgcatacttaaagaggtgtgggtgcttgatgtagattcttcctctggtgccccccatccccagggctttgttggctcgagatcccaacacaaaggtggtagattcattcaggcgagctgggtcccacttggggccttcccggcgaattggttcacaggattttggtttccataccatgccggcggctgcccggtcgcttgacaggatgtgtccaggaggccgtcctttcctctttttaggaagggggcttcctcgatgggcacattcttcttctgcctgacggccacgctttattcctggaagctcatgggtcaatctgggtattactttttctccatctgaaaagagcagtttagcctgctccaggcagctccgacaggcttcctggatcagctgctctgcgtccacctcctccccaacattgtctcgcacgttcagtgctgccttctggaagaacttcatgtacttgttgaagacagt

SEQ ID NO: 343354 - DNA, 1000 bp, Homo Sapiens
gcattagtctgttttcacactctataaagatctacctgagactggataatttatgaataaaaaggcttaattgactcacaattccacaggcttaataagaagcatgactgggaggcctcaggaaacttacaatcatggcagaaggggaagcaaggaacttcacatggtgactggagagaaagtgcaagaggggaggtgcacacacttttaatccatcagatattgtgagaactcactcactatcatgagaacagcaagggggaaatccgctcctatgatccaatcacctcccaccaggcccctcctccaatttgccataagatttgggcagggacacaaatccaaaccgtatcaatatgtattgcaaatatttacccaaccttttcacttgttttttaatttgctctacagcatatattgtcacacagatatttttattttaatgcaggctaacgtaactaccttgtttcttgaatttacattttgagggttacttgatattgtcttcagttctacaaatcaaaattatgattacattcctcagttatacatataacatgatataggtttttaaaagtaaatgttttggtcttactgaaatttctttttattttgtttatattttagtgtagagatttaactttatattttttcctagatgaaagtcagtcaaatatttcaacatgatttaatgtcttttccagtttttctctgaaagaaattcagaacagttaaggagtacattatggaatggacttatctaagaatcaaggaaaatcgttattgaatgaagggaaaaaaacacaacctcttttgagtatgagtacaaacgaataaagggagatgagcagcagcagggcattgtaattaggtaaggcttagttggtttaatattttccaccccctcaatgagttaagacactttagcctcacagtattcaattcagacctagaagaaagttgatcctttgttattggtttataaaagcatgtgtctgag

SEQ ID NO: 343355 - DNA, 1000 bp, Homo Sapiens
tttttttttttttttttttttttttttttccatggttcaaagttaaccttttattcgcttttaaattaaaaaaataaatttcattattaaatagtgagatggatctaactaatgttcaaatagtagcttactcaaaaatataccatcgggggtacaattaaggggtggatcacctaaactcaaattatttatgttgtagtgtttgttaaaagttcagcagtggcataattcaaaagaaactgaaatacaaagtttcaaatgtttacaatggatgggagaagtaaaccacttatttctactgcaatcgcaaactactttctttctttctcaatgacagtcagtttggacactataccacagtgctaatatcatcaggttcatctgctttcttctgcctgcttggcagggatttcaagtattcgaggtgtctccgggcatcctcctgattttgcctcacataatataccacatatgagatcaccatagtgaaccagccaaacatggtgaccagcatggcataatcggtagtttttttagggaggttacaaaggtcagcgtcgttggcagcattgaggaatggtctgccagcatgttcatccaacacggacgttttacagatcacgttgtgggctgtctcatgattggacgccatgctcctcagaacttgctgtagagtacagtcgcagtgccaggggttgttggcaattctggccctggccttcaggttattgaaggcatttttgtgcacactttgaatccgattgtcggacaagtccagagtctgcaaggtttcagctactcctttgaaggcatgctcatcgataaactcaatgccatttttggacaggttgagaactctcagttgatggaggtccttaaaaatttcattgggaatagatgtgatctgattggagtccagatacagtaagactgtttcaggaggaagatctctaggtatttccttgagatttgcattgctacaggtgacatttaaaccccc

SEQ ID NO: 343356 - DNA, 1000 bp, Homo Sapiens
ttttttttttttttttataatctgtgttataataggttctttcactttattgcttattgtaaacactttggccatagcaaatgttagtttttaaataaccgtaattcaaaactttcacatcctatactatttttccccaagaagcatcatctatgaaaacaatcagtgaactccaacagtctatactggtaatgtgcacattgatgctattatgacacttaatacaaatagtaaaaatactcatctattgtaggcttatgggtttgtaaaatgccttaagggaggccataaacaactcaaagaagagatggtgtggactgaactggcttctatttggggaaaatttgcagaatataggaggtacgcaataaatgtttattgatggtgaagatgagaaaaccctatttctgctgatctttcctttccgttttccttaaagaatataaggtatatttgtattcagcattctcagaatcatcacagaaaccctggcactttgagagtcttagccacagtgtaattgggtctgaccacacgcagaagaaaaataaattaaagcatatgtactattaaaattgcactgaaaactttatgtaagtcagggagcccctcaccagaacaggctgaaactcttgaatgctttgcatcctcatatataagaaaatcatcagtgcttaaagatcaaggaactcattcaaaacaaattcagcctttggaccttactggcaggtaggttatatttcagtcagatcaatatctttctaatataggtatttgaaagtaatatatgctacttataataatgatatagtaagcttcttatctgcaagtacaggtactataacttacaccttaaaatgctttgtttgattgtttcattcagcaaaattcttggcactgttttgggatttcactgaattttgatgatgatattggattaagcattttagatttaattgtaaaatgacacaaaaatctaatcatctatttccaatgttca

SEQ ID NO: 343357 - DNA, 1000 bp, Homo Sapiens; identical to SEQ ID NO: 160584

SEQ ID NO: 343358 - DNA, 1000 bp, Homo Sapiens
tttttttttttttttttattgtacaaaattccccagtactgctttaatagtgaaaaaaacacacacacatacaaaagaagtttcaacacggctcgtcgttagaattcaaagtcttctcctgccatggcgagagcccaggcgaacctctcccgctgtgttttgctgtagatcttctccactggcaccctgaaccgcttgcaccaggcaatgctgatcctggggtccaggtagttgagcttggacgtgcccagggccacctgcttgttctcctccttgtccgtggcctgcacactcagctgcgccagctgctcctgcagcttctccaggagccgcctcttcttctccaggacactcctggacttgccatccccttgggctttgtgctcagccctcgccctcctcagctctgccctggcctcagccacctgctccttctttgcctggatcttcgtctggagattctgcatcgacttctcgaacgtactgggggttgctcgctgatggttgcagagaatggccacgactcggttggctcggttgtaggataagatcttagctgctatgctgtcctcggcgcgcgtcagggcccgcagctgctcctgcagagtgatggaggcgttgtaggtccggaacaccttggccgtcagcccgtccatcagctcctggaggtgcttgttcaggctggtcgtggtcagcctgtcgaagaggtcgtcccgggggtccttgttctccataaagagctgtaagttcttgtacaccggcttctccaccggcactctgttgtagtagcggatgcagtccttccccaggaagtcaaattccaccacgtgttggcagccatcggcctccgggtgcagctggacgtgctccacgcggagggaacagcagcccacggtgtcggccgcctcaccgtcctccttctcatttcctgctctcagtgccagcttatcgatgaaatacagggccaccgcccgctgtctcgtcttcatttcccgagact

SEQ ID NO: 343359 - DNA, 1000 bp, Homo Sapiens
ttttttttttttttttaattttaaaacatttttattataaaatacaaataaaaacattgagaaaagacaaagtcatccattttctgcctcctatcccactataaccagttagtaatttgatttactttgttatctttttatcatatgcttggtctgttatttcagccatgattacacccacttatacacttttccgtcttgcaatttttacttaaggtaatattttcatgtttttaataatattcattactaatttttaataagtacattatgtatcatttgtatatatctgtttattgactatttcctagacccagggatgacaaactatggcaccacatttgtaaacaaagttttactggaacaaagccacgcccgtattgtttatgtattgtctatggctgcttttgtgcttcatacagcagtgttgacaagttatgacagagacagtaggtttaaaaacctaaaatagttactttctggccctttatagaaaaagtttgccaatctttaccccaaactttaaagtggtttataatttgggctactaaaagtaatgtcacttggaacatctttgtgcatataattttttatactttgtacaatttgagagacattaacaaaagtggaataactgggtctaattaatgaagacatttttacggttgattctctcccacactgttgtaatattcaagctatgatatgtgataagaatgaaaaggatagcccagaactcttgtaggtaacatgtctctggtccctgttacttaagacacgtaagttacttaagacacactctggatgaacatattttgagttttgatttaaagttaaccaaaaaagagaaataacagtaactgcaatgggaagaccaattgaaagaaatcttttactttttactggagaggaaaaagtaaacagaagtgggtgacaaggtacatataaaatgccattctacggtagctgcagtggccaaaaggcactggggagagctgag

SEQ ID NO: 343360 - DNA, 1000 bp, Homo Sapiens
caaggatgaacattttattggaatataggcacctggcagagtaaatacatggttacaaagtgttttaagtttatttgctttatatagtgaccgggaaagtcaatccacagtgtcgattttttttcttgaagttgcagactttagaaggcaaaccctcaaacccgtctctttatggtaaagtgtgaaggcacatgttgccaactgttgcaccgactgatactattattaagtcaatgatgtccttcccttcttcacatcaaaattgttatgaatcacatatcacttaaccttattataatgaacgaaaatcacttttgtcttggggaattgtgaaaccttttgaaatcactagctctgacatagaagattaccagacttgagaatttttataataaaatatgtaaggccagaaagcttttggacaagttggaatcttaccctggtagtctccaaaatcttttttttttttttttaaagaaagtttactatgtgtaatgcaaggcacttatgtctctgcttaaagctacaagggaaaaaatgacaagcccagtttttttcaagggaaatattttttctctgtgaaaggtcagtagtaaaagagctagtttaaagtcatggagtttttgccaaaaaccatgtctcgaggttttatgcatttctaatggctttgccataggagacgatacccagagtggcaaacagaggctaaggaaaaaaatgctgttcatttagatcagaataacctcgctccaatctggaaaccactcaaatgacacatacaagtctgtatgaaaagcaaaacaaactcatggtgatatgcagttattccattcaacatgttaaaatgaagacagagtattttaaatgcactctagtttcctgttccatcttcaaattaaacaatcatcctgcttattctagaaaactttttttttttttgagacagggtctcactccgtcgcccaagctggagtgcagtggtaaaatcatagttcactgc

SEQ ID NO: 343361 - DNA, 1000 bp, Homo Sapiens
tttttttttttttttttttttttatcataaacatctatttcatttgagccagaagtctaggcttcaacttgggaacccagagggaggggctggagatggggagagcacacagtatgctccccagagggtttaaggagctcccacagttgggagggttcagtcccttatttaggtgtagagctatgtcaggaaacatgggctctgccctctcctatcacagcccacacctttcgtacccaccagcatcagagccagcagggatattcacacaccatcacatgttctccccatgatattctctttctcccttctattcccctgatagctgccatggcagccctggggagacaagtgctcctctctgtggaccagctgtagcagtggccaccaggcagccagaagtgactagagccaaactccaggatgtagtggcacaggcttccagcatcacggcaaacaggcttgcagataatcacccacatgcatggtgcctctccctccctactccctcacccttgaatggagtaactcatgagcattcccaaatgagcactgggaggctgggtttgcaaagcctggtgaatgtaatgcatccagattggggagtcgcaggaggctggatatgcaggagacagcagcccctttggtggcctccctgtcctgcacaggaccttccaccctccacccaacaggccactttcaaggactgaaccatgctagaggctcagagccaaggctccccagacaaggagctgggaatgggcctgggcaggtagatcctcaggggtcccccagatggctgtggccctggtcatgaaggctgtgagtgatgtcttcccacaggtcatccagacgggcctgcagcttgctcagaaccttgccactgtctgtttgttgaaactctggggcgaaggcactgtggcctggtggaggtggcgccagctgctgctggacctcctcagtctcctggtcgatggcgcgagtgaaggcagctatctgc

SEQ ID NO: 343362 - DNA, 735 bp, Homo Sapiens
tttttttttttttttttttttttttttttttggaaacaaaagctttcacatatttattactgaatccaccctactagcacagagcatacagaaaaacagaaaaaaatattcccagtaaaacatgtgcaactgtccaggtagtggtgacattttcagcttgatatcgtaagatgatcgtgaacttgatacagcataaatatgtgtgccatctcatgtgcaattccttatagacccagcttggttcttctccaatgcctccttttggagttgtacctgattttactaccaggtttcatctgaatccactgggggatgggacgattttgcttttgtttcttggccaggaatcgcttaatggtgaaagtcttgtgagaagacatggcgagaaacagagtcaaccacacaccactttttcaagtctgaatttcctactccaaagaggcaaagatgcttgcttctctccaaataaaatcggcgccctggcctctgcttttttcccactctaggacgcaaatctcgatctgcaagggcctggggcgcgggcggaaaaggcgggcccagctccctcaggtctgcgtgtcaccgacccgaacccgctccgtcgtcctgacgcccccggcctagctgcagccaccttgtcgcaggggccttggtgtctctgagactccgagacgcctcgcccccacctggcgttcggaggcggttgcctcgctgggcgcagcaattcaaccgccg

SEQ ID NO: 343363 - DNA, 1000 bp, Homo Sapiens; identical to SEQ ID NO: 246572

SEQ ID NO: 343364 - DNA, 1000 bp, Homo Sapiens
tttttttttttttttttttttttttttttttttttttttttttggagaaagtatgtgtgtgaactttatttcatcatgagaaaattacttctgtgcagtaacagagaatactgatatctatatgatgataggcttttctttgtattcagatacataccttatatttgtacacaatatataaaattcatggaggaaattaatttctacagtacagtttctttgttggaagagaacttgttccgtttgtttcatctagaaaatgacccccagttctgtgactgtggtaccaaggatcgcagttccaatcctgtaatttattaaattagacaccataatcttatgaacattaaaataaactgaggcgctacatcctcctgcaggatgaaacgagagacataagtgctcaggctgttatgctaataactgatttttaccagaatagtatgattcccatgatgtattatgaatagaaatagttttcccgcagatctgataacacatattagcaacattgctacaaatttctctctgctctgcaggcatgcacttcactcttcaatcaaaccaccttgtacacacatgggaaatgaggccatcaccagcaagggccttctgcgttgcatctaggaaagactcttggagggctttagcagttagtatggtattttgagaaaagaggcaactgctctcaaactgataggtcatccctgagagaaggtgctaaaatgataattctgggggaagctgtagctaccacatcactgtactccaaatgggaacaggtcatgtgggcattttccctcagcatatccttctcttggaatagcatcacttagactgacaactgctccccaaagcactgttttcacggctaggggcctttcatccttgctgtaggattcaaaattgtgcttgtttttaaccatgtgaagcattttagggtgactggcacatgttgaggtttgtgggaagtgggaaaaaaaacaccaccatagttctt

SEQ ID NO: 343365 - DNA, 1000 bp, Homo Sapiens
ttttttttttttttttttttctgttaaaaaagcttttatccaacaagagcctatagcttcgctcagcatcagagccacggcctcctgttgggtcctccatgtggggagcagggatgcagctcagcctccagcccagggctctcctggtagtctcggggtatcctcaattgtggctcccaccccataccttgtccctcttgtcctcatctggagtcctgccaggcccacctggggtccccacagccaacccatgcacgggacagccccgggcgactgagaggggatacgaaggtcttctgggccctctcatcccaggccagcgtccaccacaactcaaagacagcggggggactgcacccaccactcctcccaagaagcagtggttgcacatttccaacatagcgaggaggaccacatgagacccctgcagccacggatggagccgccagacctgcccttccagggtgcacgggctgggagccccccggtgtcacccggcctttttctgggggcagcagtgggttcagggcagacagtgggaggaagtcagtggaggatgttcccagccaaggggatgagctggatcccgggcgcctggtcagcctggctcgcggcacccttcacagacaccactgatcggaagacgtaggggcttctccttgaaataggagctctccaggcagtccccggccgtcgcccttttcttagggtcgtacatgaacaggaagtgcagcaggcgcagcccggcctccgacagccatgggaacttgtgcttcaggttgttgtagggctgcttccggaggctgtactggccgaccagtggcagcttggaaaagcccggccagatgttctcactgggcgtgcccagcagctgcacgatcaagtcgatctggtggatctcggaagtgccggggagaagaggcctgtgcgccagcagctcggccagtatgcagcccacagcccacatgtcgatgctggtggtctgcgtggtggttcccaa

SEQ ID NO: 343366 - DNA, 1000 bp, Homo Sapiens; identical to SEQ ID NO: 160586

SEQ ID NO: 343367 - DNA, 1000 bp, Homo Sapiens
tggtgggtttgcctcttagttcctcattagatttttcagcagctgctccaggttttctttctctttctacggaacagagaacgattggagacttgttttctaaagaaaaaagcctggtgttcgaaggagtttttcaaaactccaagaagacagagaggaatccaataagagtgcagggggtacctggccttggggacctccaaccaactcctcacgcaggagacggtccttgtcctcctagcccactcatttccagtgcttttgtactggaccatttcagctaaagacttacagaaccgggctctagcctgttaccaaaaaaaaaaaatcccctttgtggctagactgaattgtagtcttctagaaattgtccaggtgtatttcctgatttaaggggaaaaaccagcatctggaaactcggtgtgttctgatgtctgctggcgaatagcgaattgacaccagagcaagttatttctcaggtatacggttgtttcatccttgtaaatagttccaaagggaaacagtgttttattttaaggagtactttcaaacctattatatgagggctgctgagtactcagcacctgtggtcagaggcctagtgatctgtttgctgtcattctctgctttttccttggtgctttctggaggacagcaggttgaggatgaaggaagggtcagttccaggctcagctgtggcctttagtcagccagaatgaggtggtatatttttcactttgcgttttgtagacataagtcccttctttataatttgcaattttttctgagaggtgatggattttcacttcagaggcaaacaatatcatgacaagacagccacaggagcctgaaatgaagctcaaaaggtacagccctaggggaccatgcagagtttcaaaaggttttccaaaagcattgtacatgaagaaggctgtccccaccatggttaacacaataaggatggcagagaagagaatgacattgacgtggatgctcactg

SEQ ID NO: 343368 - DNA, 1000 bp, Homo Sapiens
tttccgaggtggagtctcactctgtcacctaggctggagtgcagagcgagattctggttggattgaatgatgtctgctgcatcatcagggtagatgggaatcctgtgcagctttatgcaattcgtgaacaagtaattcttcacactgttattttatgtctgtaggcttcaggaagaaatcatgaatttttcttctaaaataagtattctgttgacacagactattggtaagattttcaacataaggtgatgctaggactggcctcctagcatgagttgtgagtaaagatctggtctgttgtttctccaaaagaagtttcttactgcttgtctctcatgagttttctgtttctgctttctctttttcatattgatatatacggttttttaaatggttattgtaattaaatatctcctcatttttctcttttaggagatgatgttgcattttcctctcaagaaaatgaatatcaattgttatcttgcttttgttgtcagctttcttatgtgcatgaactaattgctgttgaagccacatatttttgctttgtagttgaaataatttctgatctagagactcctgctgttcagtgtgtttgttcacattatcttgttcgttttgatacatgtgttcagcttccttcatttgacactgtgtttcacgttggtctctttgtgcatgttctgaaaccaatgtattttctcttagagcatctcctgcataattgagattaatttttaggcttttggatttcctttgagcttcagaaagtggttgatggagcacctcattgttatatatcgtactactcacatcaacattcatttttctttgcaaacaagcatctcctgcaatgtggaaagcaggttcttgactttttcttgatgtcacaatttgatcatggtcttgtacagcagaagccagtctaggatggtgtgattcaatttctgcctctagtatttctttgtcttgtttttccttcaatttagaagtgagcatt

SEQ ID NO: 343369 - DNA, 1000 bp, Homo Sapiens; identical to SEQ ID NO: 160587

SEQ ID NO: 343370 - DNA, 1000 bp, Homo Sapiens; identical to SEQ ID NO: 160588

SEQ ID NO: 343371 - DNA, 1000 bp, Homo Sapiens; identical to SEQ ID NO: 160589

SEQ ID NO: 343372 - DNA, 1000 bp, Homo Sapiens
ttttttttttttttttttgaacaaacagcatgcactgtggtatcctttatttaaaaattgtgagctgactacagttgtagtgttctcatttaccattctgatggcataataaaccaagagaacattaacacaattccaagaaggcattaacctgtaacacacatatacgccacacatgcacacacacaacatacacgcacacaaaggttatattctgaacacaaaagtgatagaaaaaagctttgaatgcgctaaatcaaataaaaaccctttattataataaactgtggcaatactgtggctatcatgaaaaatattgtaactattttaaaagcaaaaggaaaaatactggcagtttgaaactagcagcaaaaagcagataaaaatagaatggaagataacataagactaatatcaaaattctaatgttgatactgtgtaggattgcactgaagtaattttaaattggttcttaaggaactcttaaaaagtcccttaaaaatattaaattgttgcaccttacaaacagtggaaaagaaaaaaaaagtatttggaatgttacacacacacacagaggaaatgtattaggtctatcatcaattatggtctttgtttatgaccttcaaaaagctttataaagaaaaaatttaagtgccaatgtagtgaaagaaagttaaaaattcctaaagacgcaagtctgagtgcatttaccaggtctaagaatatatttaaaggttgggggcaaggcatgattgatgcacatttaagaagaaaaatatggaacccataaggtaggtcaagttctttggagagtgttgagaatgaagatgtattaaactctggctatcttggaggagattccaaagtacatggagttctccagctctttatcagttgaaatctgtttcatcgtggccaatagataattaagactaacttttcagcaaactgatttctcctatattcaaacacaaaaatctttaccacacgttcagagctg

SEQ ID NO: 343373 - DNA, 1000 bp, Homo Sapiens
tcaaagggcaaagaaaatttttgttgctttatttaacaaaatttatgccaactcctgtatctatatacaaacatgtttcaaaaccagagcagcagacacacaaactgttaacacaggaattacaataatgcttaaaacatgttacacaatgttttgtttctgctcatatagacatttacagatttaaaaattattccaaaggccgagcaacatcacatcttcaacttctgagatggattatatataacatgtcctaaagaaaaagggatggagcttgtgagaaaatatattttgttcagtctagttcaacagacagcaggtggcccttaatgaaggcttacaagatgttctcgactggggatacaaaattgaatataatatagtctatcagagtatactttgggtcaggttttttttttttaacttttactgtatttgcctatatcctaaatataacaatctctcacttctggtccaccaaagtaagaaaacctactttaaaaaataagttgaaaatgattttattggcagtattaacaaaatgtagtgattggaggtccttcaaaattaagaacccacacaaatactcaacacaggtctgcccctactcccttgtattgttagaaatgtgtttatttcataacatgtacctacaggttaagctatcttctaaagctctttagggaggacagctactttttgctttcccatttttgacttccagaaacacttttaattccttaaaaagtattctagttctgaaaatcctaaaaagctttgctacatattctactcacacaattaagctccatcaaagtatgcaagttgtgtttttacttatgcttgaaagttgatgctgcgaagtgaaaatacttcatgttgacagttaacactctgacctgattcaaggccaattctcagtccagcttttcaggaaaaagcactatgtggtgaggaataggagataaaaaagtggcaaacaaaacaaaacaaaaaaaaa

SEQ ID NO: 343374 - DNA, 1000 bp, Homo Sapiens
ttttttttttttttttttttttttacaagactataacagaggtaacttttaattctttcttcaaaaacattctctgcaaatgaggacattctatgtgatacacagactcaaagaggctctcataaaacttgtcaacttaccccacctgacagcttaatcaccctgaccttggagctgatgtggggcccgtctccaccaccactgtttgtcctgtgcgtgacagtccttttcacgccaggctttgtgtcctggggccggccctggatggacgccactcgaggagtctgggggacagctggctcctccacatctgcaggtttgatcgggagcactttatgcagcggctgagtctgactttgaggaactgttctggtctgtctcaaatgtttcagtgctttcatctgttgtccttgatactgcatgttggcactggatggtacaaaattggatgttttgggctgaacgtttgaaatactgacatcctggtttttaacaagaagtctgttcttcacattttgtctgacctgtgcacctggaaagggcaacagtgggttaccgttggtgggtgatggtgacagtgcctgctcttcctgctctgctgggggtgggggagcgtacagctgctgctgttgctgcgcgagtctctccagcagctccttcttcctggcaccagcctgctgctgccgccgtaactccttctgtttcaggatttcttctcttaggcgtttctgttcttctatctttaagcgatataaccttgtttcctcatcttcatcaggaaactctgtttctgtttttgcctcttctttaggttgagccacagggctagctggcttgactttcacttccgtctttccctgtgagcttctggaacccgccacggcccgcgagggtggtgacgcgctgacgataggtttcacttgtgctgagggcgtggcagagcagcggctgctgctcatttctatcacgtgtgacggcgctatgggtaattcacgcaaat

SEQ ID NO: 343375 - DNA, 1000 bp, Homo Sapiens
ttttttttttttttttttttttcaggaaaacattctcttactttatttgcatctcagcaaaggttctcatgtggcacctgactggcatcaaaccaaagttcgtaggccaacaaagatgggccactcacaagcttcccatttgtagatctcagtgcctatgagtatctgacacctgttcctctcttcagtctcttagggaggcttaaatctgtctcaggtgtgctaagagtgccagcccaaggtggtcaaaagtccacaaaactgcagtctttgctgggatagtaagccaagcagtgcctggacagcagagttcttttcttgggcaacagataaccagacaggactctaatcgtgctcttattcaacattcttctgtctctgcctagactggaataaaaagccaatctctctcgtggcacagggaaggagatacaagctcgtttacatgtgatagatctaacaaaggcatctaccgaagtctggtctggatagacggcacagggagctcttaggtcagcgctgctggttggaggacattcctgagtccagctttgcagcctttgtgcaacagtactttcccaggatccacaggaaatactcagagtccacctggacattttacttatattcagtttccaagtgtcagaggggttcaggactgtctggcctggggggcctcctcatgacctcaattcaggattatctactcaaagcattaaacaaaaggaaatacattttcaggatgaaggctgctcttttaagccctgctgaagaaaccatttcaaacaggattggaatagggaaacccggcactcagctcggcgcaagccggcggtgccttcagactagagagcctctcctccggtgcgctgcaagtagggcctcggctcgaggtcaacattctagttgtccagcgctccctctccggcacctcggtgaggctagttgacccgacaggcgcggatcatgagcagctgcaggagaatgaagagcggggacg

SEQ ID NO: 343376 - DNA, 1000 bp, Homo Sapiens
tttttttttttttttttttttttgcagctctgaggtaaacttttatttcttggctgacaggacttccacacccatgctcctcctggcaccttttactctgcccaagcagtggcagcccagtccaaaaggtgcctgccatggccaaaggggttggggagtcacttcacattccaggctggaggagtgagaggacttgggggtactcctcccaccccattgccagcaagaggccatgactcacctcaaccccaagtcctgcatcctggtgggaagtgacaatgcctcctcccagctctccatacctaatggggtcatgaccagacagggtaggacccaggcccccagcttcagttggtaacggtggcctccacggctgccccctgtccaggtgacaaccccagcccccatgatggggcagcaaaggtctcttctcctccttggtcctcagcaacagacagagccctccacaccaggcaggacagaggcaaagtcagaagcagcagcggtggcagggaaggagcagccagcacaggcccagggctctcctgaagtcatttaagctgtctgccatgcggctctgggactggccactaggtgggcgtaggcggctgtgatacaggtacttggacacctttctgtcctgatgctagctgatacttgtctttggctgctgcccgctccttggcatcaaaataccagacagtgatggcgtacctggtggcataggctggcttcacctcgtgggggttccgccggtcagaccagaaaatgagcaaccggtcaaagagtggctcgatgttggctaccacgggccggccctcagggaagatctgcagcaggccgccatgcaccttaacgtcccagttctgattcaggtaatagatacaggtgatgcagcgcccatcgccgtggggattgtcaacgtgccttacgtacccgagcccgttgcctgggtaacacgccaccatggccttggtgcgcccgttgatgacatagctgc

SEQ ID NO: 343377 - DNA, 632 bp, Homo Sapiens
ttttttttttttttttttgtggtagcagggttttaaactttattttgcgctccgtgacccttcagatagtgatttgaatgattaagtgaaactcttcttaggttaagtgtcctagtccacgctaaaatcatcttgttggtctctttggcgctgtcagcgaccagtatcagcgcccggcttgtccccgctgcccgccgcgtccctggcccggatgtgggaggcgaaggcggtgagcatttccagagcggtgagatgagcgccgcgcataatcaggcgatgcccgtctccgaacagcacgtccacgcagggctcggagccgtcatgcctcacgtccgcaatcactgagcagttgagattagtggagcggaccttctcactgctcaccgtctgcaggaaggtcctcgtcgattccacgtttttctcgaagggacagaactgaacccgaacctgtttgacaggccgcagaccaagccgagccaaggcagctgccatggtgacctccgccccggaagaactcgtgcaggcggaagtgtcgcattgcgtgaggccgtgaatggctgcgcttctgcgggatagacttccggccgccggctgcttagcaggcctgcgaaccgcagctctgggcttcctag

SEQ ID NO: 343378 - DNA, 1000 bp, Homo Sapiens; identical to SEQ ID NO: 160590

SEQ ID NO: 343379 - DNA, 1000 bp, Homo Sapiens
ttttttttttttttttttttttttttttttttttttttttgaagccagcatttccctttatgtctggatggaaacggggccctaaaagcagaaatcaatatttttgtttgaaagatgcagtcatgctaatttcacttttggctaaaaccgagacgataaaagaacagttgggtgtttataggatgccctcaaagtgagctggctaagtgagctgggctctaacttcactcacaaatttatagtacagctaagaaggccagtctgtccatgaaagggagccgagacaagacgagggcggcctcttccaggcctgtgccaagtgtccttggggtcccgccatggtccacacttctgcagcatccgcagaacatgtggccgggtcctgcccagcagcagggacagccaagtgggaggcaggcatggtgcacacctggggaggcccctggtgcagaagcagccccacagtagcagccccatccagaggaagaccactccggagggccacaggcctctgcagccctggcactgccgcccagccctccatctcagcgggatgtgcagggtgagacaggaatgcagggacgttctgcccctaggtcagcctcttcatccgcctgttgtgcttgtcgatggtcaaggttgccctgtccacagctgctgcaacgccatccagggcttcgtcttgtctctccagctcactctcggcctccagggccagccccttcatcctcctcaggatctgggttagttcctgggtatctgcctcagaaagggctggcaggcttgtctgcaggtgcagtgctgtgccctcctggtctcctgcgggtggctcacggtgcagggtacggcccatcagcccagatgctgcatgccagactgagcagctcttctctgcgggggaagaggttcttgcgcttctgagcaccaatgcatcttctaacagctccatcttcttgctgaactgcacttctaaaatggggataacctctggcatcttggc

SEQ ID NO: 343380 - DNA, 1000 bp, Homo Sapiens
tttttttttttttttttttttttttttttttctcccaaaaggtttatttgtcacatttaaagtacaaaatcaaatacacagatccagcagatccagatatgtgaaccatatatacatatctatacaaccattatttagactttcacaaacctatctatacattctaatttatctatcaacactatcccttaagtaaaaagcaacatatctcttaagtaggtttgttatcagtaacactatcgaatgtaaattattttcacttcatcacttgaaacggtagaaataggtacctcctagaaactggagaattaccaagcatatatccaatttgtatagatttcttaaaatacattctataggaataattaaccgaagaaactgccaatcaaagtttttgggcatatttaacaaaacttgagtcatgggaagacataaagttaattaattgcattacaagagttttgttttgactttggttttaaatgcaaagaggggctttattttgtttagtacacagagcacttccaagtcatatttcctgtggagttatagtgataaatttctcaggggctacctatcgctattaaaatttgaactggtcactaaaggaggtatctgatttttaacactgtgtaggttatttcaaccaaaatgcaagaacacattctttaggagaaaggcagaaattttagacttctagatacagaatgtatgatgtcactgaacacacagatatcctgctgatcagggggattaagttaaaacagcttctttgttctaggatgtcatctatcttacatgcagaccacaggacactaagcctcaggtacctaaatatctccattccaggcacaggatttcattagtgcctgctcccacaactgggaacacatacatatagagatatgggtcattaccaaagatttatattaatggcttcacaacagcaacacaaaatgtactcaatgtcacatttccataggaaaggttatatatacac

SEQ ID NO: 343381 - DNA, 1000 bp, Homo Sapiens; identical to SEQ ID NO: 160591

SEQ ID NO: 343382 - DNA, 1000 bp, Homo Sapiens; identical to SEQ ID NO: 160592

SEQ ID NO: 343383 - DNA, 1000 bp, Homo Sapiens
ttttttttttttttttttttttttttttttttttttttttttttaatgcttttattctacataaattactaccataggctaatgtttaaaaagcaaataaactggacagatgcaggacaaaatctggtcacccaactataaaaggtgatgtttttaaaaaattacaataaatgcagaagtgatgcatgcagtagccttaattcccactgttccagaaaagaaaaatacagaaaaacccacacatcttactgtactccaccttaaaatgcatcatattgggtttgtttataacagcacagaattccaagagtcaaaatgaaataaagcaggtattttaaagtttaagagccgttatcaaaaataaattacattttttcaagatacagaaatgctgctatgatggctgggagcccagtaacctttcaatagctgcattgatatcacctcctgttgctattagagcttgcaagtttgcttcacggttcaaaaatcccattgcactgagttgttccagttgttgctgaaatctgacttctggattctgtagctgaggatttactccagcaagagcctgcagcatctgctgaataaactgctgatgtccaggttcagtggttcctgctgtgggacttgtgttttcactaggtgtggcgttagatccattagttcccgaagagcctccagtgcttcctaatgcccccaagccaggagtaaaccctgggatgaggcccggggcttccgttgctaatgtctgtaaaccctgctgaatctgtaacaaggcctgcattgctctagggtttgacattgctgatagtgtatcaggattctgcatctgtgcagcaaggtcaggattctggcttagtgactgcatcatgcttctcatgtagggggcagacaacatgttttgcatcagttgtgggttttcagttatttgttgcaacaagctctgcattcctggtgtgttgaacatactagctcctactccaggcaccaaatttgg

SEQ ID NO: 343384 - DNA, 1000 bp, Homo Sapiens; identical to SEQ ID NO: 160593

SEQ ID NO: 343385 - DNA, 1000 bp, Homo Sapiens
ccatttaaacatttttataatttgtttcattttcaaggcacaaagagtttatgtcaatcattttaatgtctaagaatacaaagttagcactagtaacatctggtagtctaatcatttatcatgcttaaatgtaacattacaaaactacattttaaaatctgccccctaaccagatgtgaaacaacgtggacaagggtgacatgtgctagacccaatctccaaaaacgtatggttgacaaagacagctgactgctggggtaaaactgcagcagtcataatcgaagagcgaaagaggccactctattaaagactttgtttcttttgctagacatttttcacctaatcccaggatagtttctgttaatgcatcttactctctttcaaacgaatcgtccctagagcaggtgtacacattaaaaatgagctttatagcatcaaacacataccacaaccaactctacaaggagggttttctgtaagatgtgtacgactgtccgaagaacacattctggctgataagtctcagctcctgtgaggtcctgatgagtatctaaacaacctcacattttctcttccacgcctagggttaaggccagcactcagcccacacacaaagctgtgatgagaggttggttagggatggtggaggcaaagccacagatcagccagaaactcttttgagtcaatagtttctactccctccctaactggaccgtttaccagaactgcccaggacttgtcaccatgaatttaatctccctggattttccctgcttgatgtctagatgagacaatgaagggcagagaagtattgctatccccacacgataccaccagcactgagggactgcagccttgggtctcagagagagccgcccggagaaggaaccaaagtgtgcttggttcacatttcagggcagggaggttctccaagttgcagcagatattaagagtcctgctgaaggcacagtctctaagagaggggagggagcaaagacag

SEQ ID NO: 343386 - DNA, 1000 bp, Homo Sapiens
tttatttacgctgaagtttagcaagtacatttttaacaaagaaggtgtactttaacgttatgtatagtagaacagggaaaccatacatataactttctagtctctaacacactactgcattttttaaaaatttaaaagacaaaaagccaagttgaaatgagcatagaaaagcatcaaatatggtcaagttactttagccattaggttttagttcatatttttaaactggtcagtctaatgcaagaacaaagtttacatcattgcttttaaaatgtacacgcgtttcttttttaatgtaacatagattaaatagctccttcagtaaacaaagctttgctgataaacaaaactgaaataactccatgttgaatagtttcagagataaactggaatcacaagcatcttcatttatgtaaagccagcgaggacctttcaggctgaatacaactgttgtgccatttctaaacagtaatagttacctccttgcatagcagcactatcatgaggagtcccattgttttctatttcaatatctggaattccagtatcttttaacatcctcaggccactgtcactagtggtggcttgcttaagtgcctgctccacttgctcccggcgctttgattcaaattccaaggcttcctgcaattttctcttggtttttttctccttcttcaggcgcttttgcatagtagttctgctttgaagctcaactgcaagttgtctttcaaggttttctctaatttctctctctctatagagctccagtcgcagctccttcttttcttgttgaatctgcttctcctggatgcgagcattatccaaagcaactttcagcagaccctgaatgttggtcaacagagtctccacggaggacagactatcagcaaaaatgaatggtccagggaatccagcgggcaatgcctgcccaggagtcagctgtatcttgtccaagggtgacttcattattggaatttgaactggtacctcttccattctt

SEQ ID NO: 343387 - DNA, 1000 bp, Homo Sapiens
tttttttttttttttttttttttttttttttttttttttttttttttttaacaataatcatcatttattggggttgtttttctagcattttaacttctgaaagtattttccgatttcttgatttcacagcagtccctggaggaggattgtgtgtccattttacagctggagaagccgagatccagaaaggacccccaagttgtgggcagaataaatctacagcagcttttaactattaaaccaacttagattttggtagtctttcagaggcactgaatctcaaatcttagtttcctgggtccctcctgggttcctaccacccttagggcttattcaacagctttctggggatcctgtaatgctgacagagagcctggagacggcttctttgacccaggtcatgagtcaatggctagatgggcacttcccctctgaggattgttcctgcctgagagtgggctgtggggtgggagctggggcaagcacctgggaggaggcttccctgggaaaggcctgtctggctcaaacctcccttcctctatcccacctctctacgagcctgagaaaatgttcttctctgtgtcagttcttctcaagggtgggggcctctccagagcatttggaggattgaggaataaagacctattgggagaggccgggcacggtggctcacgcctgtaatcccagcactttgggaggccgaggtgggcagatcgcctcaggtcaggagtttgagaccaccctgaccaatatgatgaaaccccatctctactaaaaatacaaaaaattagctgggcgtggtggcaggcgcctgtaatcccagctacttgggaggctgaggcaggagaatcccttgaacccaggaggtagaggttgcagtgagccgagatcatgccactgcactccagcctgggtaacagatcaagattctgtctcaaaacaaacaaagatctattggtagagcagtctctgtcctcaggaagcccccagtctgaaggag

SEQ ID NO: 343388 - DNA, 1000 bp, Homo Sapiens
ccttcattttgtttttattatagcatgtttgcttaatttacagcaagcagaaaataagctgggtcttgttttgatccaaacattgatgttttaaaggttgtacacaatatttgttaaaaagaacatataaaaatacctttttagaagcctctataagaaagaaaatacaaagtttaaccccacaactttcctctttgctagaactgtaaactactgctacagttttaaatagactttttgttgtttaaactatacatccaggaaaatctaaaaaaattaaagaaacgtgcatataaacgattgcatagcagaacatgaacattaactgcaaacagtaaagaaatgaaagttagaaatactatcaaatatacaaaggttctagaatcaatcctttaaacacattccacaaacagtatttaaaatccatcgttgtattctttacaggcaaagcctagattactaaaaccgaaattgaaaaaagtaatcctctaaaaggaatcgtttgtccataattcgtacttgtatctgtaagcaagcaatctgagatttttaaagatgctagctttttattctgaaatgaaattggacatgtcaagtcacttttgtccccaaaacgatctttcagagaaatactagaaattataaatggtttaagggtattacttcatttttagtcaggtactacactgataatcgaaagctcaaaagatgtgactcttgcttaaaactgactaatccttttccccaaattaccttaaatttcatggcaccacagaatcacctagaatgagtgttgtcttacaacttgcctcgtattaaataaactgaggtgtgaaaagcaggcctccctcataaagaggcaggcaaattttgatacaaatgcacgagccaagtgctgtaagcatcaaaatttcagttcttttacactaggcacacacacacaaaacctactttgaaacaatttacttacttaacagcagtaagaaaactaagcaatatt

SEQ ID NO: 343389 - DNA, 1000 bp, Homo Sapiens; identical to SEQ ID NO: 160594

SEQ ID NO: 343390 - DNA, 1000 bp, Homo Sapiens
gagatggagttttgctcttgtcacccaggctggagtgcgatggcgcgatctcggctcactacaacctctgcctcccaggatcaagcaaattctcctgcctcagcctcctgagtagctgggattacaggtatgtgctaccacccccagctaatttttatgtttttagtagagacagggttttgccatgttggccaggctggtctcaaactcctgaccttaagtgatccaccctccttggcctcccaaagtgttgggattacaggcatgagccaccatgcccggcctgctttctcagtttggatctttaagctccaaccccagaagcatgaaagtcacacatgttaaaaaatactgtttaattttctagtaatgtcctttaaaaaaagctgatacattgagatttttttttaatcttctcagatctgcctctgaaaccactgcaaagcagctatgcaacttaatttttcagtactcatatatgtattaatggaggaaaagccactctgaggaagcacgccaaggacatgtccccacgtgggcacaccccatcagcactgggtacccaggaatgtgaatgcaaccctggcatgttcacagctaacattatgcccttgcattcttttttgctgtgaggaacaatatgatcacacagcactgaaaacggtagacacaaagggcctgcctttttctttctcatttttgcctttccagcttgcacttctattcctactccagtgacccatttattccccagttacccataatgaaaaatagttctgtcatttactgagccttacattcaaatgcaaatgacggactttataaaactgctgccaataaggtacaatgttcattgatacaatacgtttcaactgcaggtatgttgagcacacaagcaatcaccgtattgtattagagacattttattgaaaatgcgaaaataggaaatgtattatagcctaaaataaattacataacatatacagcatatatttatatc

SEQ ID NO: 343391 - DNA, 1000 bp, Homo Sapiens
ttttttttttttttttttttttttttttttttttttttttttttttttttttttttttttgtggacagcaactccttttattacaatgaaaagtgcagaaaaagtgttcagtaggaaagattcagtgcaagataacagggaaaatgtgttggtaatatcaaggagaatccaaacattgtactgtcagactaatgctttccatgggtgaaaactgcaactgtcaggttagataaacatctattcgaagaccttgagggaccactgagacatttctgaggcagaaggctaagaaaaatgcatataattgtcaagggtggcagggcagcattgctctcaaagtcctgtctgacagggcagaggttcttcctcactgctccaatctgcttcccgacagctccagggtttcctgaggaagctgccctccaccttcatccacctcaggcgtgtcctgcagagccctctggagaaccagcttcaggttctgcctattttgacgctgcctaaaggagcccacgaagaagtaaatgatggggttggcactgctgttaagagcggacaggaaaatggaaactagatgcacatgacaaaataagactttccaatccaggtggatcctggaaaacagggcccactgaatgccaaagggcaggccacagaggaggaagaccagcactgtgaggaggatggtcacgtacagcctggtcagcggcatcttccgggatccacagagaatcctgaccagcaggaccaggctggacccacagagaaccacacataaaaaaaccagccacgcgattgtaatgaaatctgacgtttcacaccaaacagaatcagcaccactaaacaggaagtcacagaacatccactccaggatactccgcagcagggacagggcccagagcaggacacacatgaccgatgacaggtatctggggcggcggcagtggtaccagatgggccacaggatggacaggcagcgctcggtgctgatggcgctcag

SEQ ID NO: 343392 - DNA, 972 bp, Homo Sapiens; identical to SEQ ID NO: 160595

SEQ ID NO: 343393 - DNA, 1000 bp, Homo Sapiens
tttttttttttttttttgagatggagtctcactctgtcacccaggttggagtgcaatggcatgatctcagctcactgcaacctctgcctcctgggttcaagcgattctcttgcctcagcctcccaagtagctgggattacaggtatgcgccaccatgcccagctaatttttgtatttttagtagagacaaggttttgcaatgttgaccaggctggtctcaaacccctgacatcaggtgatcctcccaactctgcctcccaaagtgctggaattacaggcatgagccaccgcgcccggcaggagagtttctcaactgtgaacacctttgttaatgggaatgctcaaattgtgctggtacttctaacaccaacgactaaagagaaatcgattgcaagggaatctggttatggttatggttaaccaagttagagaagagctagggcagggggaatagaggtagattctcagtaggaaggaaattctctacaatggtggaaattctcattaacatgaaaatgtcttttcctagatctcttgaagcttttcagctgctgggttgagctggagaattgggccaaagtgctcttgcatcttctctgcaatcctaaacctcctttctgtagctccctttccttcttctgagatatggctcaacaaatgaacacaacatttgtgctaataaacccaattcagagtttttggaatgtcaggccattacatctgcttcactctttaattttcatggttggccaaacagacaatccaagttaaggccatttgaagacaaataaattgatccattgaatttatgtatcctggaggtgctgccagagaatgtccaggccagagagaaagcaattgttaagtgctcagtggagaaaaacaaagaatcttctgtactatgtaataatcatttcccagtgatgaagacaacggtacaatggatccttttttttttttttaaagcagccagcagtcaatgaaataaggtgtgaaaagg

SEQ ID NO: 343394 - DNA, 714 bp, Homo Sapiens; identical to SEQ ID NO: 160596

SEQ ID NO: 343395 - DNA, 1000 bp, Homo Sapiens; identical to SEQ ID NO: 160597

SEQ ID NO: 343396 - DNA, 1000 bp, Homo Sapiens
ttttttttttttttttgatatgacaatcctttattcactcggcacatttggtttctttgcattttcttccattttacattgcaggtgtggctaccaagagctggataacgagtccctcaaacaaagtttggaattgcgagatatattggggtaccttgattcttgagacagttgaattcttctagttgatcttgttgtattaaaaagtcactctcaactgaagtgaccactgcatttcttttgtaaaaaggtcatttgactggcttttcctcacaactgccacccatgcagtacaaaagcaggaaatcccttttcatgaaaggtgtaagtacaagatgacatttcacatttttttaaaaaaagaatccttcatgggaatatatcctaataatcaattatatggagacagttttatgtacaccaaatttctgcaactttataataatgaaaattagaaacaacctaaatagttaacaacatgggaatggttaaataaactgagttgcatccattaaatggaatataatatagccattaaaattatgtttttgtaaaatttttaatgccataagaaaatgtggcaattttgcaatgaaaaagatctacttataaaactgtttacagtatgactccaattatgtaaaaaaagtatacaatacacatataggcatacatgggggttgctttttaaaggtggttacttctgggttgtgatattatcagtaatcatttttgcttttttatacatttctgcatttttcaagttttctatgatgagtatattattttacaaagactacgaaaattttcctctgatatactggtaattagaatgtacttgggtattttaaatatatgggaacaatattatagtgcttcatcttctatgacttttttggaatacatatcactttggtaataaacttacattccctgttttatacttgttacaacattttaattaaacagttaatattgtgattagagcattgtttgcttc

SEQ ID NO: 343397 - DNA, 1000 bp, Homo Sapiens
tttggagattttaattaatttttataaaatctgagctggctgaacttcagagtacagcgacagctcaaggaagggtgggatttatctgctggtccccacctccccaagacggggagaaggaggtctcatgccaacagctgcaactcctttcagctcccagtcaaggctcaaggctcaagcagaggggaggggataggcaaagggggagggggaagctcctgaggctcagacactgcttgcttctcccttctccccattcccttcccttcccagcagaacctggctggccctgggcagagctgaggcccaggagcagctgaaaggaggtggatggggacagagcaccaaggggaaggggccctcggcccaaggggggaggaacctagcccccaccccgctacagctccccactgaattcacagcacagagaacacctctcgcccaacaactccacatggaggtataccaagtccaggggtcaaaggagcaggtgggtgacagatgggcaggggcagtgaagatgacagcaggctcaggaggggaggtggcagaaacttcctcctacccatgggaggagacgatggggcgactgatattgctgttggtggtcatggcattcagctcccacctgatatcatgaggcaaacaggactggtctaggttatactgaatcacggccagtttgcacagagtcttcagactagggctaaagtccaaaatgtgtaagtcagaatgatctataaggtcaaattcatctcccaggccttcctcaggagatggactggtacccccaaagaggacaatcttgtcaccaacaatacagcagcactggcgccggcggggacatggccccttccccttcggttcaatctttttccaggtaaaggacacaggattaaacttccagaggtcatggaagtgccggttcagccttgcattataaccaccaaagatgtacagctccccattgtagccaaaggccgagtggctccggcgcccc

SEQ ID NO: 343398 - DNA, 1000 bp, Homo Sapiens
cacttgtagagcctgtttattgcataactagcaggcacaaattccaaaacgattttacaacacttaaagggcacaataattacaggaatagaatgtacaataaaaagtacagaataatgagtgacagggatcaaacacgttggaataaaaggcatctcagttttcctatgcagcattttcttttctaggaacacgttaccttcaaccaggacaaggaaagaaagaaaactatactattggaaagctcatgggtgccattgaggacaaaaacaggcgagttttgctcttggttctgcaactgaatcacttgagaagccgtgcacagctcccgagttgtgcgtttagaattctgattacatgaaatgctgtgtttgatctttgggcccaattcactgttctttggcaaataagaactatttgcattccaaggcagatgacgatttctgtgaaaggagcttagaggtacagctgtttccttctgttcagtcaagtgccagtttcataaagtgcacctctgccctatcagctttgggggaagggtggcatatggggaggaagggatcattgagaatacagggtgaaaaagaacgacgttactgaaggtagacattgctagtgcaaggtacggaatccatgtgcaaaaggtggctggaacaaatgttcagataaggtgcgatttgccaacaggagcagagaactctgacaccagatctcagatgaggccaaggaaatgcgcggggcacatacagagaggacgacctgcagccctccaatggccacgtcattccaccggggaacttgtttggagttttggcaccgtgggctaaccgagcactcttctgacatattcttacaactggaaatgctttgttggtccccatgttccttgactttctctagggccataaaggcaacatcttctattgcaggtcctcaaacattccaaggaaaacactgcttcacctcctgcagacagctcatttcccagaagcctctacag

SEQ ID NO: 343399 - DNA, 1000 bp, Homo Sapiens
agagatcacactttatttttgtgcataataaatacgatacagaaaaatgttgaaaatatatgactcaactatctaattaaagctgagtaaactaacctagtcagattttagtttttcaacgagaaatgacaagagtagctgaatataaagaaaaacaaaaagaactttactttcctatgttaatacaggtcaagagaccctttcttctcaaaagggttggtaacaccagttcttagcaataaacataaggcacttgtttagattacaacatcactccattttttccacttgtttttctaaccctgtttttcccccacagtatcatttgaaattaataggatgaatgaggcaaatatgagacgatccagttgatactactcagagcaagatagtacagtacagtgtttcaggggtgatgtctggacataaaatgaacccagtcaaggtcctctgacaccaatgtatccactatcaagtaaacctgaaagaaaataaaagatttattcaatagttccagtaaaattgggttggaatacaatacacattaggaatttagctcctcacgggtggcatctgcatcttaagagttctgagtacttatgaatattcattctaagacaatctacatcatttgaacattgtcaagacaaataaatgaatttcatttcaatatacagtagagtttaaacaaaattcacacatacaccccctattatatggctggtacctcctccaaacacctcattagtggcagaggtaggactagtgttctttcccaacaataagaacttcagttgccactcataggagttgaaaaaaagtttttgtttttttgccatctgttaagatgttcctgagacagggccagttaataaaacataacaaagcactggagttcggtttgtacttctctttacatcactactaaactgttagactgagatgtggaatgcaggtcatgtactatgaaaagttgattgtagcacaactgttcaatcag

SEQ ID NO: 343400 - DNA, 1000 bp, Homo Sapiens
ttttttttttttttttttttttttttttttgtccatggctgcgcggacgtctttatttttcctgggtggggagcaggatacacagccacactgcagtcacttagcttgtaaaaatatctcaataaataaaacaaacaagcaacatatacactgaacagagaatattttttttaaaatggctagccaagcaatcacggagaaaggaaaagaatagcggcgtgaaagtaagaattccaggctgacttgaaacaatcatgcagaggctcgggggaggggaaggaactcgggggtcctcttctgagagccttggtccagtttcaacagaattgtacaagaatgcatttctgttttattaaaaaaatagacattaaaaaaggcacttagagggaaatacaaattcaaaatccaaatcctcataaatgtgttcctgaatctagacattttcagaaagaataaacctccccccaaacataagacccagaagaaaaatccaaacagaaacaagatgaccatgacaatgtcaccagcaagagggctgggagtgcccttcctatgtggggaccgtcctgggggaggacgggagcccgggtcttctgtccgatgtcactgctgtcccttctctcgacgctggtggagggcagaggtgggggcctcctgaggttgttcaggtttcagaagttacagactcgaatgcatcccaattccacttgcgccgccgacgcgacggacagccctggcgcgccggtccggaggtgggtggcgcggcgctagtgggaggcggacatggaccacgcgccctccatgcgccacacggagaaggcgtagctgaggcgctcgtgggccacgtagctgcagctggtcatcttattgtccatctcgtcgctctgcaggacctggtagaggaagtctatgtacctggcggccagcttgagcgtctggatcttgctcagcttgtcagagggcagcgtggggatgatcttgcgcagcgccgcgaaggcct

SEQ ID NO: 343401 - DNA, 1000 bp, Homo Sapiens
tttttttttttttttttttacttttaagcagttaaatttttttaacttttattttttaaacaatgggctaaaaataaacagtattaaaaggttaagtttatataatacatatgtacacaattagtggtgttttcttttcagacaaaatactgaaacaaatattagtttaaaaacaaactatacagaagacttcataccgtaacaataaatgtatagtttcttcaaagggagaagagattcacatatctgataacaaaataaactagcaatctagttttctaatctactttatgaggctggattttttttttagaaaagctaatttaaaatatttagaaatagctagcctatgtacagcaagttttcatgtctttttttaataaatagatttctaggagtcagtatatatttaatactcttcttccttaagaaaatagaagtttaggtcaagtgttaagctttatcactttgacactgtccttatctcacaatggaggaatttagaaaggaccttaacagtttcacaaacataaataaagccttagtcacactaaattaaaaaaaaaaattccttagggatatcttagagtagtaaagtgacttcctcatataaatagtttgaaagggtacttaagtttttcacccaaattgtgatatacaaaaaggttattaccaagcaacctacatgtcaagaaagccccagttaggaaggagccacagcatttatcttgtttataatttctttggtactcccactgtttagagcacaggttgaacaccatgttcatctaagccttattagttaaaaaatgtgttatggcaaggcaaataaactagtttaaaaaacattaaatttcaccatttgtagaaattcaagttttataatagcttgctatagcagctatagataaattagtcaccttattacaaaactaaacctttgtaaacaagtttaaatttaattttcaagaaccaaattgcactagtcaagagtgtagga

SEQ ID NO: 343402 - DNA, 1000 bp, Homo Sapiens; identical to SEQ ID NO: 160599

SEQ ID NO: 343403 - DNA, 1000 bp, Homo Sapiens
ttttttttttttttttttttttttttttttaagcagtaaggtattatttattaagatcttaagcctcacccctgaactcaaatgggatgggataaggagtaaggaaagaggttagaggagacagaaaacaaagcccagctcttccaagctcaccacctagccaaggtcttcgaattcctgagggaacccaggactggaggctgggctgaaggaaggcagcattcctgggaggttccaagttctgggcaggggtacagagctgttgcgtgtgtgtggggtggggtaagggagaggctccagagctactttcattcacattttcaactattctctcttccacttgcatgttcatctcaccattcctgacccagccagccccctatcactgagtactgctgctgctgctgatcctctcctccccaaatccacctgcccactgtccaccggcatctagctcctcctccagccacacccacactcactcatccccttcctcacaatgaccgcacccaaaagacactgtactggggaacccggcttcgtcactcggatgttaactaaaggcccaggggaatatgctggaaaaggtccccccacccccaagaccaaggaccctaggttttccttgccctggagggagccagacagaggaacaggggagagggtggagatggggtaaccagtccacaggtctgcaatcctcaaaaaaaaaacccctacagacaactcttagaacagcaaataagggcccaaagccatttccaatcatccccactcatttttttctccggacaatggtccagccatcttccactatatcctcttccttaatagtctgagcgtctggatcagagggttcaggctgggggcagaccccatctgtagcagccccatcattcgtagctgtgacctccatctcttccacactgtccacatcatcttcatcctcatcagtctctctagctgtcttaagtgcagtggctgtgaccttgcattttct

SEQ ID NO: 343404 - DNA, 1000 bp, Homo Sapiens
aacaggtaaaatgaataacatactttatttaatccaatagagccaacatattatcattgcaatacacaaaggaaaagttattagtgagatattttacattattttttgaagtaggtatttgaaatctggtatatattttatacattgagcacatctcaattcagactaggcatgtatgaagtactcaacagacattggtggctcctggataccatatgggacagccagtgccattctcatccttgatatttgtttctaccctcacatgtacctcttaatttcttttatagctggttcaaaaaacatattgcacctctctaccaaagtcatagcagctcactcaacagctgtttgttcctgcgcataaagagagtgtggaaaagctggaagaaatcatcctcttcctttaagtgctttatattgttcatattttctctttgtgttttctttctattctgagagaaaaatatgtattggattgtttttctctccccactactcttttgtttttactgcaattaatttgaaagacgtatttttttttattgttctattgctactcttaaatgtagagaggaaggccaaaggttgtagtgaagattgtagtgaagactctcttcaatttgagtttgaagctacccaaattatcattataatggtttggttttagagctcaatcctatacatacttatacaaaaacaaagtaatttatttgcttattattgcattttatagaacctggcaaagatattacaagaatgtaaaaatacaggccaatttctttcattaacatagatgagaacaaaatctaaacaatacgttatcaaaataaatccagtattgcatacaacaaataataatggtgtatttcagcaagttgtggtaacaaattgaagtaaatcaatgtactaagccacattaacagaacaaaaatgatacacaattgtctcaataatttacagaaaagacataggtagaatacgagttttcattttatac

SEQ ID NO: 343405 - DNA, 1000 bp, Homo Sapiens
tttttttttttttttttcataggtaaaatttttatttatgaatgtgtggacacatgactttggatccagccagccagtgacataaataaacttgagcaaaagtttcaagctagaggatatatatgtatagaaaattatatatttgtgtgtgtgtgtaaggcctcttggaacagtgccacaaacctggacaccaaccaacagaatactcccgtcctttgaaatttccattaagagcacaatgggggtaattataccaggatgctccaatcgctctttccatcttgtgcactcacatgcccgccaaacatgaaatgttcgccttctcccttccaatgtgatggttgttgaacttatttttagtgtcatttgataagcctttgtgctcacagagagacatcccactgacccagccactggtcattgtctataccagttcacatcaaagcaggcgcactttgtcaggtttccactcgaatatccatttcgcatctgaagtacagtatcgaaagtgactagatcatttgagcttttttcttcagctgctgccttcctcccccacggtgtttctgctcacgctaacataatttggcatcgtcgacgtgacacgatggtggtttttctaaaaaattataatacatacatcgtcaatgttttgtgatagcgaccctccagaagatttaatttgtaaattgaagaaaggtggtctttttcctctactgaatcataaccaaggtagagtgcccctcaaaatccaagtaatgcgcatacagtaataggtcattcaatgtcaaaaggcataaaaaagatgagcaaaatcttcacaggctgctgcttgctgttgcttttaattatattaattaaactttgaaattttaatgcaaagagagttgctggcttgtgacgctgaagagcccttggagacttgaagaaagaaaaaaccctgagcggaagctttgtggttactgcttcctttaaattaaaagcaaaacaaacttctagg

SEQ ID NO: 343406 - DNA, 1000 bp, Homo Sapiens
tcatgcaatgcaattacctgaaagatacaaataaaagtggggctctaaagaaataaaccgaacctcatttggggctccactgccagggaaaaagttcccttcatcatagcgatggagtgaaatgtacaggatgctggggtcagcataaaaggcctgctgggtaccgtttccatggtgaacatccagatctacaatcaatatcttgcttatatttagttggtctctcaagtatttggcggtaattgcaactgaattaaaaaagcagaaccccatggctgtggattcttcagcgtgatggccagggggcctcacaacagcaaacccattcttcagctctcctgaggccactttggaagccagctcgatgacacagccaacagccatgcgtgcagcaccggacgagtgtagctcattccaaatggtgtcactgtccaccccaagtccaccacaaggtaatgaggaaaaaaacttttgagagtcatcacctaggagtatcctggggtccagcttctgtccgtccagggggttggtgccatacaacagtgagtgatgttcagaatgaacaagctgtatttcctccaggctggcttttcgaccttgaattcgctcacatttatttagcagcccagtttcttgcagtcgtgaccagatactctgtattcgtccagcatgctcagggtgggtggtggaattgccacaaacgcactggtgtttcagcatcaaggggtcataggcaattccagttgcagagccaggctggagggggcggtccattgctgggtgaggtaaaacagaggcagcaggggaagagtgagtcctggagacgagacggtgtttctctaatccatccatgccaaccgcagccagcggagcttggcgcacagagagcgcacgtgtgtgcgtgggttccaggaaaggctgttgcataaaagcagcctgctccccagattccatttcctggatctgagcatcttcatcactgtccactggttcctccttg

SEQ ID NO: 343407 - DNA, 1000 bp, Homo Sapiens
ttttttttttttttttttttcttctttcacttttttattttattttttgagacaggggcctgctctgtggtccaggctatagtgcagtggttccatcagagctcactgcagcttctaactcctgggctcaagcaatcctcccacctcagcccccagagctgctgagataacaggcgcatatcaccacacctggctagttttttaaatttattttttgtagagacggggtcttgctatgtgacccaggctggtctcgaattcctgagctcaagtgatcctcctgcctcagcctcttaaagtgctgggattacaggcatgagccatgcacccctacttctttagtgggagtctgtgccacagctgtggcacacaggtgtccctagttattaaattagactttgtggtattttccccatcaggatgttcacacttccatgtggctaaagctattgatcttttctgttctggctcctgagctgagattttcttaaactctttctggatgaaatctttatttcatcaggctggtggcgtccacggcctcaactttacctccgtgatggaagagggggatctgaggctcccaggtgggccggcgccgccctacaggaaaggaggggtccctgggaggggctgttgccctggtggggttcacaggcccctcactgcaggggacccggagcaagggatgccccctggaatggccccgtgaccagaaagcgagcctgcccagcttccccaggaggagcctgcagtccacactcgcgtagccactccgggtggtggcagggtctctccctgctcccttccatagtcccgccacagcccacagccctgaggaagcctgggggtggagggtgccccggccagggtctctgtgactcacactcagggtgggccaggcgtccacaggctgggggcgggctggaggacagtggcagccccaggtggccacacagcatggtggtggtggtggtggtggtgcacggcaggcagcctt

SEQ ID NO: 343408 - DNA, 1000 bp, Homo Sapiens
cacccagagttgtggaatgaatgaatacattcacaggcccacaggaggagttcaagagctcaagttgagttgaacaaggacataacataagccccctgaactgctgctaattctcccagcagaaggagatgactgtcggaaactaggaggtgcttggtgataatggaataaaggttttctctctgcagggctgtctggaccacacaggggtcacacttcgatctgatcataacatagctccacctggacaagctgtttctcccaaccctctttccagcttgaatcacatcattccctttaagaatttccattcattttagtttcctgctaattgacatcttcactacataaaatactggtataaaaatactgcgtaccaagatttgatacaactagcaaatgttcattggtttacaacaaacccaaaatactcatcaaatatgggctgttggatttagaaaaataagattcttgagcgattccagctgcatttgtttatacagaacacatttactcaggaccctgcagtgtcagcttcgttctttgggtatgcagccttctatctggatctctgcaggccagccagaatatctgttgttcttagcatcagagtggttgatcttttctctctgaatttcggaagggagttccaagccttttgctgcaataaatacccagctagacctgaatttcatgttcctgatttctttacttccaagtgcttctatggcattcttggcatcgttattcagtcttgtgcttccgtcgtcataggtcaccatgaagagcagggattttggagcagcactctgaataaactttgtcatcggtccagagttatcaccttcatacatatcaaaacatcgtgttgctgtcacattcccagttacatagttgacaatggcaatgtttattcctctggcaacatttcccagctgttctcccataagtaggttatcctcaaagcagattttggcgtacttgcttctgccacctccgc

SEQ ID NO: 343409 - DNA, 1000 bp, Homo Sapiens
ttatagcagcttcctgaactgaacagacttttcactgaaacactcaagcaagtcttggacataccctcgcatttcttgcaaaaatttataccgttcaccaatacccccagaagacccttctaatctttcaatagccctggtagagtccactcggctttgcagatgtttctcatgctgctgtcgatttgttttgtgcaattctttcatggagtccaacctgtctttaagctgtttctttaccaaatcaatagtaacgggagtcatctcattactgggagttttgaaagggactgtattatctgttttttgagatttggcatctgatgatccataggccgtataactataaggaatgccataggatgagccgtaaggcattgtctggtaagtgttctggtagtacatattcacttctgcgggttgactggcttgaacctgagggatattaattcctttccttatctgctcctgttcccatcggctgagctcttcatcctgttctccagttactaaagcatcatcatcactcccctcaattcctatttcctcagcaattttttgtctttgtgacttttctttcacagaaaaaactatccggcgtttctcatcgtcatcttcatcatcactggcatcattctcatcttctctaacaaggcggcctttaccaggctcattatcatgaggagtgaaatctcccaattctcgggccatttggcgctttttccttgcagcatgtataaaagctgcatctggaatttctcctggacgaagaacattcaatgaagataaagcatttgaaaaagctccaccagtctttggcttttcttcctctttttcactttccatatccatttcatcttcaccatgttcactgatgataactccatcttcttgatttgtatccttaacatgtcctgttttgtccaaaggttgttcactttcagctgatgagttgagttctgtcttaatcttcgatttttcaagatcttctttatattcc

SEQ ID NO: 343410 - DNA, 1000 bp, Homo Sapiens
ttttttttttttttttttccttggagccagtcactgaacatttatttggagtccctggagccctgctgtagccaggagcccaggttgtggcatgggggacagaggaggtgggacctggcagacccacagctcccaagctggggtcccggaggcagagtgacaatgcatggctgtgtgggagccaggcaggcggtgacgtggcagagctgccagcaggggcccaagagactgcagcaggttggtgctcacagtggatctgagggatgggcgtgcgtggcagggccttggccatggcccctgaccaacccctgtgcaccaaacaccacactgagctcagaatccgggcagagagggaaccactggtacagtgaggccaaggcacacgcagccgggcctgcagactcgagcccagcagggaccattaggtctcgggaggaggcagctgagggcgacaggatctgcacagagcagtgaggggcagaggacgcagggaccagatgggtctcccaggccaggtgagcccagaacggcccttcccagcccctctagagggtaggttgggggcagtagctcaccaggcccaggagcagcccatcctggaggcaaagcctatcccaaaacctggccctgcctcttcctgaggtgaccttgagtccgtaaaactgacgcccctggggtgacgcttgagagccggaagctgttccaggaggagggaggggcctcggtttctcccggggcatgtgggcaggaaggccctcgggatcccgcatcagtcccacggccgcggtgcggtcgtcacctgtgatcacggctgcctggcgccccctgccggccccacctcagcccttcctcgcaggcctggccggggcaacccagtgggcctgatgctgcctggcacctcgaggccccagagccagtgagcagacgctcgctcgcccatctccctagagtcccgctgtgcagctgacaccccctgccccagccccacggctctcagctg

SEQ ID NO: 343411 - DNA, 1000 bp, Homo Sapiens
gacagaccaatggtttattccaaaggggaaagcccaagctggatgtctccctccccaacccctgcaagctggcccatccttccagagcccccataggcctggggctgttgagacgggagatgtccccactgtgctgctcctggttttgtctcctctccaatccttgagcacccttccgccaggagctcatggggcttcgttggacccaatcccgttgcctttgttgacgtagaatggccggtagtgagactcaagggtacactgcctttggccctgtctctcagggaactgacacctcctggtcagctccttgcctttgtgtggtccacagcaggacttgagggatgctcagaccttgcttaaaccaccagcatagtctgcttgccagatttccaagtctggggctgggccttggggctttggctccgcatgagggagggatagcctttcagggagaaggaggagctgccttggacgacgggcaggtcattgtcagagttctgaatgctggaggagtactcccagacccgggaggtgtagttacctttggtgccatagagattgttgaaattcttctgggtggtctccttggtgaagcggccaggagacgagggctggtatgatgtccggaccccacctttgggtgtcaggtacatggagtatctcttcatggtgtccggtgcactccactcacccccgaagctgttcgtgtagttgttcacatagcgatggtcaccaccgttctccatgtggttcctctcaatgaagttacggctcaggtccgccttgcacatcttctcaacgtggcgcatgcatacattgagcaggtcgtccttgaagttgcctagtgactgtcccaggccctccccctccagcaggacatgataggtgggcaggggtggggggagagagtaattgctcatcaatgcaccaaattcctgcagaaacaacacagagtcgctgatgctatgcagctgctcccgggtctgcttgtcctcat

SEQ ID NO: 343412 - DNA, 444 bp, Homo Sapiens
taaggaagttaaaaaaatgtcttttatcagctcttcacctttggtgctaaattcattcaacaaatatttattgaacacctactataagccacacattcctttaagcccttgggatacttcaacatccctgccttccgggagcttatattttagatcccagatctgccatccatctctggtttctcttttccttcttcatctgtatttgatacgcaacacctattccagggatcagagcaaatgtcacgctttttctcaccagaatggcagaaaaaaagtctgcagatcccttgctgcatacggcagatggtatttctaattcccggtggaacatcccctgagtttgtttggaccaaacaaaagagaacagcaaacagaaaaaagaccttcatgttttaaggtccgttgaacctccctgccctcccgtgaaggagcacaaatatg

SEQ ID NO: 343413 - DNA, 1000 bp, Homo Sapiens
ttttttttttttttttttcatgccatagtgtgtttatttatactttaaggtaacaagtccacttgtacacattgatttcacaacatcaataaatttgtacactttgagatttgtttctgggttataattcttcctctgggtctcgtgaccgtttccgggtgctcaaggaaccttctgtttgcaatgaacatgcagaagtaacaacagtatctctaaatccctgaggtttgatttgaaacagtactgtgcattccttctggctgggtgacttgtacaatgttgccaacctttgctttcggtcccaatgaaagattagccgtattgtagcagcatgtccccaactttcccctaatgcaggaacaagcaaggcctgatttctatcaatctttgttgtcatctgattggttaaaattacagctaatctgtgattatttgcaaggctgatcatttgctgggctaggccatttaataaccgagtacgaagagacaggtcatctaggtcatgacgaaatggaaaagcaataccatccactatcactagtcgaacctttgagtgttctgaaaggaaatctggaagaagataaacttgtgccagtaactctgtgtagtcacgacagcgaaaataataaatatgagaaagaatattatcaagagtgaaatcctccaaagcttttcggtgttcataattgtgtttttccaacacctggtgcaccacaaatttctgttgttttcattaagggcactccacccccaagaatatcatctagtgctgaacagaaggtgattatgaagccctgggtatgctcctgctcaagaagttccagtgctgtacacttcttgtgtgactcagatgtaccagcatatcttggtttatttgtgagacattctcttctgataatttgcagagtttctaaggcttctgctttagatatcccaacttctttgctaagctcggagggtttcacctctaggagttcctcagcagtctggaaccccgcag

SEQ ID NO: 343414 - DNA, 1000 bp, Homo Sapiens; identical to SEQ ID NO: 160602

SEQ ID NO: 343415 - DNA, 1000 bp, Homo Sapiens
acatagctaaagtttttcttaaaacttagtatctgatgagaactaagagttttctcatattcattatatttaataaatcactctcaagcatgtattctctgatgagttttggtttaaggctttcacacatgcaaatcggcttttaaggagtcctcttcaatgtgaattttataatgattagtaagggatgacctctggctaaagagtttcccacatgcattacattcatagggtttctctccagtatgaattctttgatgtgcaataagtgatgagctttgtctaaaagtttttccacatgtattacatttaaagggtttttctcctgtatgaatcctctgatgttgtataagagctgcactttggccaaaagacatcccacattctaaacatcgatatggtttctctccagtatgaattctctggtgattactaagcgatgagttacacctgaatgttttgtcacattcgttacacttatagggtctttctccagtatgcattctctgatgttgaatgagagcggaactctgtctgaaggcttttccacatactttacatttacatggtttttctccagtatgaattcgctcatgaataataagtgttgagtgggagcttaaggctttaccacattcattacaattatacaatttctctccagtatgaattattcggtgtctattaagtcgtgaaatagaagtaaagcctttcccacattcattgcatctatagggcttttctccggtgtgaattctttcatgttgaataagagaggcactctggctgaaggctctcccacattcactacatttaaaaggcttctctccagtgtgaattctctgatgataacgaagggatgagctagacttaaaggtgttgccacattcattacataagtaggacttctttctgagatgaattttctgacttccagaaagggaagtgctgtaactggatgccttcctgcctggattgtatttatggggattttcttgag

SEQ ID NO: 343416 - DNA, 1000 bp, Homo Sapiens
tttttttttttttttttttttacaaatgacaactggctgccctttaataaataaagtcattgtaaagaattacatttacagagtgaaaagtgaatacatagcatttcaaattcaattttggaagtactaataagtactgacccataacaatatacactagctatctttttaactgtccatcattagcaccaatgaagattcaataaaattacctttattcacacatctcaaaacaattctgcaaattcttagtgaagtttaactatagtcacagaccttaaatattcacattgttttctatgtctactgaaaataagttcactacttttctggatattctttacaaaatcttattaaaattcctggtattatcacccccaattatacagtagcacaaccaccttatgtagtttttacatgatagctctgtagaggtttcacatctaaattaccaagaaagcccttccctccctcatcttgcactcagcttaattctatactagtccttggattatgtaccactgtaaaagtataactgtatcaaaattaccatgtttatggatacaatattatgccatacagagcaacaaagttacatataatgacaaagattactgaagttatgcaagaccagaacaaatgttaggacatgctacctaggcacagtccctacaaagaggctcctaagtaccccaagttcaaataacattgacaaaataatgaacaattatctttaaaaattataaagctactggcaaattaggtaattgctaaataaaggtagagcatgagattaaactctaatatttacaactgcaacatacttaattacaattgtgcacgtatcagtggctttgtaacaaaaatacagagaaaaaattaagttttcagttcaacaagaggtcgaatccaatcaatctcaaatatactcaacaactcaaaagatttaccacagaataaattcaagattagctgataaacaagagccatattactggtg

SEQ ID NO: 343417 - DNA, 1000 bp, Homo Sapiens
tttatttagcaattgcaaagagtgaagagcacagaaatcatcacagagatacaggctttgtacatcataggactagtcacttgtgctttcatggatactgcctgggtgggggttcacaacacttataagttagagagtttgagagccagtggaaagtaagtggaagttgttctgaaataagcccctggcaattttctgcaatgaaaaggagcagaggtcattttcttataatgctcagcctcagagatagaacactggaggcaagaaattaataatttagtaacagtgaagctccagtggtgattacatcatgatgtaaaatcagaggttgatctgatggtgagcaatgggtgctcagatggtatagagagagagagaagaagtgagggcactaagcattcatccccagctctacctgggacagcaggggagactggaggccaggagaggacaggcaacctgaggagagggctctgcagccagagaggggcctgaggactgtgggaccgagagctagcagacgcacttagtgcttatagctcttcctgctggaggaggaggtggtggtgtacttgatggtggaactgccgcctccaacagagctgaggccacccccaatggctctgccactgctggaactgaagccacctccaacgccaagaccactgccataggagtagctgcttcctccacccaggcctaagccactgccgacaccactggcaccgccatagccactggagacggtggactgcaccacagagatgttgacttgtccaacgccttcgccattcagcctgcactcctcaccctccagcagcttgcggtaggtggcgatctccacgtccagggccagcttgacattcatcagctcctggtactccttcagcagccgggccaggtcctgcttggccttctgcagggcatcctccagcccttccagcttgttcttggcatccttgagggccatctccccacgctgctcagcatcagcaatggc

SEQ ID NO: 343418 - DNA, 1000 bp, Homo Sapiens
tttttttttttttttttttgtattcaatatgcttatgttttatttatgtaggtggcatttaaaatacatgatgtgtttagggttacattgtccacagaaagcatcaaataccactcctctccccgccaaaaccaaataaacaaagccaactctttggcaacagttgtgttaaataaaatcccaggtcacacttgtttctggctcccaagcctgggtcactgctacatggattgcgccaaaaaattcccagcttcaacactgctagattaaaattgctggcatttttaaatcacagcaaagcttttcacaatgccctcaagtccaagaggacaaaggagaaagcaacatgaacggcagatcctcatgtgaaagggaaggaaagtcactgggagggagcatgcagggaagaagtcaaggcagccctggaattctactccgtgctcaataaaaacaaaacgtgaagaagcaatacatcatgcaaacgaaataatgaccggaagtgggcgcatctagttagaatgaagtgactttcgtaaggagtcaatgttcgcgaactgaaacatgagttcaacctccttgtgccgtctctgggtgttttgcgcgtgtgtaaataccggcccgttttccccagcatggccctaacccatggacactagggagagtgccactgagcaaaaattttttgctaaaaataattagcaaaaatccaagaaaaaaatatggaatctagcaaaacctacaccatatttgaagttgaatttgcactacctgcaaaggatgaaaattaaaagagtaaacagaaggaatgattttacatctgatgtgattcacgacagccttctattcgtgtggccggattgctctgaggaaaaggtgccctgacgggcaggattcaatgtgtcacttgcaatattctctaagttacactctactgaattaccttctaattccaaacactacgccgccacagaaagcctcatttcatgaatgttactcagtt

SEQ ID NO: 343419 - DNA, 1000 bp, Homo Sapiens
ttttttttttttttttagaaagaaaagaggtttatttggctcactgttctgcatagaactgtataggaagcatggcgctggcatctgcttctggtgagggcctcacgaagcttacaatcatggcagaaggtgaaggggagccagtgtgtcacatggtgagagagagcaagcgagagaggaggaagttccaggctcttttaaacaaccagctcttgcataaacaaccagagtgagaactcactcattactatggggatggcacaaagtcatacataagggatccgcccccatgacccaaatacctcctactaggcccacctctaacactgaatgtcacactttgaacatgagatttggaggggacaaaacatccaaaccatatcaccacctgagaatggtacactacaggtcacagaaacttacagagtactggagttgaaagagaactgagatcacctagttcagagactaacgggaaacgttaggtcatttatggctctcagacacgttaagcctgcataacattttttaaaatcttgaaattagttcccaacacttaattgagagctttcacagaaaaatctagatatgtggcttatttttaaaaaacagaagatttgctgacttaaacactgcaaaattaaacatttatatctgaatccagcatctctttttgctttgtaaatgaggtcaaggatgaaatccagatgttcttcctttgtatttgtattgtcactgtatggaatctaggtatatccaaggaaaaataaacttaagataagcttattttccttatttcaaaaagcaaaacaaaaacccagaagatctaacaaccctggacctgtagagtggcagcaacagaccagaactcagcagtatagtccgagctggggcacctgctcgccagtgttactgtctccatcagcctgaccccagtgagcatttgatttggtctaccctactcttgccttctacagaactaaaactaacttcctgcaac

SEQ ID NO: 343420 - DNA, 1000 bp, Homo Sapiens
ttttttttttttttttttcttaacttgcaattttattaatttttcagtactcttaccttttatatactactaagaaaatttaaaccataactagacataaacattctgcagtttaattcaaattttcatatatacagaccagactacatatgtattacactgcaaaacttacacatgactgaagctgagcctaataacttcaattagccaacaacagaaacactcccacttcctgcagtcacagcaattagctaacaataaaaacactcccacttcctgcagtcacagctgaaagacttttcaaggcagactacatttgggctggagatacaagtgatgtagtttgacttgggcaatacaaaacaaaagtcataggaattaaatggattttcaatcactgtataattcattctcctggcttaagtacgttttaattttttcacagaaaaaaatatatttcaggcaaataaaaacaaattccagattagcatagttcagcgtttcatttatcttacctttatcaaggcaaacaaagtacagatgctgtacattaaaaacatagaaatatatcactcacaccacatcaactcctacggacaaaagggctttttctaagccctgctcctttctgaagcacacaccacagctaaatgtacaaagagccatctgctggtccaacatagccaactccaatgagcaggacgtctatcagcgtccatattcccaggccaccgaagctgaagagcttgccgaggccttcccgccactggcccaggtagaaacggtctgctccaaacccaccgagggtgatgcttagagccagagccgtagaccacttatagcctccagtccaattgcaatatagcattttgggaaaagtacggttacccaagcagtggacgtggtcccgcaccgtgcagttggcagggtagcgctgccgaggacaggacaccgtcatgcagctggtggagttggtacactcgtaatctgtttcaggaag

SEQ ID NO: 343421 - DNA, 1000 bp, Homo Sapiens; identical to SEQ ID NO: 160605

SEQ ID NO: 343422 - DNA, 1000 bp, Homo Sapiens; identical to SEQ ID NO: 336633

SEQ ID NO: 343423 - DNA, 1000 bp, Homo Sapiens
tttttttttttttttttttttttttttttttttttttttttttttttttcaaaaataaaaataaaattcatttattgaaaagaaaaagcttaacatacgatccatgtgcaaaccccaaaacaggatctacgaactctggcatgatccacatcgctacacataccatgctggaagtgcacatccacacaggcacgtaacatacacagtactgtctagttatcaacacctacagattggttgatttttcttcacacaccattgacatgttttacaatagagttaccaattttattatccactgaaagagcatagcttcccccagaatcactttgatttaaaccaaataacacagtgaatgacaggcaccctgcacctatatctgctaccttccttactctgataacctcctaccagcaccatttatgtcctctggccagggaacgactcagtggcacaaaggaaagagaagaaatgttacaggctgatgctgtcggggcaaatagccctgcaaccagccggacttactgtctaaaagtattaaccgtaatttcaaagacaaaccacaccccttccttttcccctaatggcctcagagatttgtaatgtactttggaaaattaacttctaaggcagagtggaagccaacctcaagtcctgccacttggactctgtgtcttctcttcgaggaagcagcattgtgcacccagcaggggcagatgctgaggcttgccttaacatctcagcagctacaaaatgaaatccactgatacagaaccccttgctgtgagcagtgaggagagagagctgtaaacagacacaaattgagatttttgcacttccaaaaaatacgaggtgaacattagtgctaaacagagagaatgttctaggaagggagaaatctgagaagaaaaagtaagatgagagagaagaaacatgatttttctaatgtacttgtttgagatcaacactttaagactactgataaaactaaatttcgtgg

SEQ ID NO: 343424 - DNA, 1000 bp, Homo Sapiens; identical to SEQ ID NO: 160607

SEQ ID NO: 343425 - DNA, 1000 bp, Homo Sapiens
ttttttttttttttttttcctgttttgaaagtgttttaattagacaaaagcatcaggacaaaccattttaaaaacaaagtcttcaacttgggtgttgagattggcaaaaggggaagcaagggaaaagccaaggaaagataaaatattcagaagaaagtcaaagttatctgcaattacatgttagaacagattttgcaggttaaaaagatgttgcttaaatatattcataaacctgttgtaagattttcacttatgcagtttcagaaaatttagctgcttaacatatgacagaactgtattttaacaaatgacattaaaagtcaggagagctactcagttaattgataaagtagaggcaacgtgggggagccctccccacgtttattgaagatttgtggctcccccagccccgtttgcctgcatcaggctaacaacctcattcctcccatagagcctggccaaatcacaggcggtgtcccccttatggttccgatgccccacattgctggccgtgtgcttcaccaggaactccaccacccggaggtggccttctttggcagccaagtgcaagggcaggttcccttcattatcctcgatgttaacatcagcttgaaactccagcaaagtctgtaaagtgtccaggaaacctgctctggccgcatcatgaatgacagcgaaaccagttcggtctttcaaatcgggattagcacctctaagtagcagtctcctggcaatctcgggatttccaagtttcataacctgcagcgcagtccttccaaatccattttgtgcattgacgtttacattattttgcaacaaactagtaagttgctctaggtcccccctggcagctgcggacgccaactcgttcccccaaggctcggccattctttagggtcctgacgatcaggaaaagatgaattagtcgtttttctttttcccctttcctttgctcctaaccaggctgcatgatggcatcggagactgacagaaggactgg

SEQ ID NO: 343426 - DNA, 1000 bp, Homo Sapiens
ttttttttttttttttttttttttttttttttttttttttaacagaaaaagatagcactttattttgtagcacctttttaaaaacagtctttttaaaaattttcccagctgacccttttcaatcttcaatcaaccaatccttattaaccacttacatacagatgattccatttatatgaaatgccccaaactggcaaatctatagagacaaatagattagtggttgtcaggggacatagggagaagcaaatgagtaactgctagtcgatgtggggtttcttttttggagtggtgaaaatgtctgaaactgatttcagtgatggttgcccaactctttaattttgcccaactaaaactattttgttagttatctatcagacagggtggtctctttgtgtcgcccaggctcgactgcagtggcccaatgagagctcactgcagtcttagactctgggcctcaagcgatccgccagcttcagccacagccacagctgcagcctcccaagtagctgggactataggtgcacatcatcacacctggctaactttttctttaagagatggggtttcactatattgcccaggctgatcttgaactcctggcctcaagtgatcctcctgccccagtctcacaggcatgaaccactgtgtctggagacactaaaaactttaaatgtgtgaattttaaggtatgtggattatatctcaatcaagctgttttaaaaaagcacctgattttgttttagcacttgattattcaaagggcttctcttaaaggtatgccttcttcaactctgcccttctgagccttcccaatcttcaaagaatcagcaaatactttcacgcacctggaactatgccaccaacactgagctgtgatggggtgacacaatcaacaagtcagacctttctctcaggagcttatggatgtggcagggacaggatgtacacaaggaaatgggcacctgaacacagaatggcactgggatgacttttggga

SEQ ID NO: 343427 - DNA, 1000 bp, Homo Sapiens
cagactgaccaaaattgtttattgatttattgttttaagaatgtttcgttgattcatggtagataataaagaatggtgcttggatttgagattgtcaatattttattcttctcatctagagcagcagacactttgtttgtgtggtatgaattcaattcagagaaaaactgaagatgtataaaaattcagggagttgctcagtcttgaaccgtccagattgctttgttttcctgaatgatggtaaacagatctggagagtttgtcatgggtgtgattaaaataagtttccagccagtcttcctaaacaatgcttgttcttgagagctccattcagatagacatgatgtgcttgacaaaagcttcgtagttgatgcagccattggagtcttcttgacctgccatcagggcttccacttcttcctctttcatcttttcacccagggtggctagaacatggcggagttcagcacccatgactgtgccattgccttccttgtcaaagacacgcagaccctcaacaaagtcttcataggtggcctggtccttgttgttggaaatggcttgcatcataggcagaaattgttcaaactcaattttcttggcattcagctcttcattgctggggtttcccagaactttcctgacctctgcattggtgggatttgtgcccagagctcgaaggacatcaccgacctggcttaaggtgatcttggaatcacctgttctgtcaaacaggagaaatgcctccttgaattcatcctgctgttccttagagaactcgatcttaatggcagagaggtcaattttttcttctttgggtttggctggggcaggggcaggtgcaggtgccggtgccggggctggggcagccgcagccgcagccacaggtttcttcacgtctttctttggtgccatttttttttttaaaagggtgggttaaaaagagaaggagttcctccaaaagaacctgtcaaaatgattcttggaagaggatggtggt

SEQ ID NO: 343428 - DNA, 651 bp, Homo Sapiens
tttttcccagagagcaagtttatttggtgaatgctgacggcaaacatcatccaagagagacaagatgggaaagttgctgagacaagaaagcctagggaaactttaggctagatacaaaattcacacagggaaaggcacggactctggggagactgggaaggtcctcagccattcagcaccatgcggacgagctcttcatagttgatacaaccattgctgtcctcatgccctgccaccagcatctctacttcttcctctgtcatcttctcacccagtgtgacaagaacatgccggatttcagcacccatgacggtgccatttccttccttgtcaaacacccgaagtccttcgacataatcctcataggtgccctggtccttgttcttggccactgtctgcagcatgggcagaaagtgctcaaagtccagcaccttcacattcatctcatcactcttggggttccccaggaccttgagcacctcggcgttggtagggttctggcccagggccctcatcacatccccacactggctgtacaggatcttgccatcacctgttcggtcaaacagctggaaggcctccttgaactctgcggtctggtcttcggtgaagtcacacatcttgactgctcagctctccgggaccttttcc

SEQ ID NO: 343429 - DNA, 1000 bp, Homo Sapiens; identical to SEQ ID NO: 160609

SEQ ID NO: 343430 - DNA, 1000 bp, Homo Sapiens; identical to SEQ ID NO: 160610

SEQ ID NO: 343431 - DNA, 1000 bp, Homo Sapiens
tttttttttttttttttgaaagtccatcaaagttttatttctaagaaataaacttgcatataacccgaacgtaacaactctggtattacatcaatacagctataacattaatgcagcaattatataacacaaaagtgctataatgacatgggaaatgttcatgaactgtgaggtgaaaagatacagaaaatgactatgcctactgatactacctttgaaaaaggatccataaaaaatacattgaatataagttggctaaagaaaatattaactgcggtactttcttacagattatggctatcttcttccatataacttcaatatgtactaaaattcacatgcatttattttataatcagaatgtcattataattaaatgttatgctgtgccatttcatcagtttatcagaccttcttatagtcaatgtcacattaaattagaatccgagtaaataatgtttaaaaatagctgatacatttgaagttcaggctaaaaacctcatatttttatttgtaaaatgttctcagtgttagctttattgataataaccgataaccaacctaatattgtatgatttttaaattatttttaagcacaaaatagacccatgttggggatgaataacatgtctgattttgttaattttgtctactacttttccctatatttccttgtttccttcatcctaaatttttaaaaatgaaaactgtaatcattattgaatgtttattaaatgttttcttttgttaactgaagtaaaaggaaacattcttgtagaattatggaaactaacaatgtagtaggacctaaaattgaatgttaggaggttcttcattttaagggtcttcctgtgggagaagtttccattcaactgttgtatcaattttatcatcaacatttcccagctcctgctctttacagagttctaagaatacctgctccaaggtagcctgagagaggctgtattcctccaggttgaaggtctgtttcatcgcctct

SEQ ID NO: 343432 - DNA, 1000 bp, Homo Sapiens
ttttttttttttttttgcctgttcaaacttgtatttattttctaagaggtcgggatgagggcatggggatggggatgcataacttgggtttcgggaggagccacagaccttggggagaaggatggagcctcctgccctcagtcgtgctgctagtaggggtgattcagggtgtgctccatgatggtccgaagcgccatccacgtctcctgggccgtggggatgatctgtgtggccggcagcaggaagccatactgcccagtgtcccggagctcaaagctgaaggcgtacttgatgccactgtcgtaggcccagtcgacggtgatcccactggccacatagagggtggtgctgatgctgccaaaaatgtactcgatcccatggaccttatacaaggcctccaccgcatccttggcaagatcgtacaactccctctgatttgaaacgggatccagcgatcggccgtaagggtacataagcatctgagagtagctgtggatggagatcagagccttgaagttgccatgggctgtgatgaagttcactatggcagccacctccggctccgactgaggggagggcccgtgataagtttctgagcaggggttgctgttagaaccatttcctccaaaacccgacttccagttcctgttgagatccacgccgatgcagaagattccaggtctgatggacttgttcttccgccataagcggttcatgctgtgggtaaaagcaaacccatcagggtttgtgacgagctctatgaagatgtccatggcattcagtatgtctgtcaggacacggtctttgccataatcactgacaatcttattggcagtccagatgccggtggcatgggtgatccactcccgggagtgaattccagtgtcaatccagatggctgggtgccgagaacctccagtgctgaacttcaggacaagaatggactggttttcaaagctgttgccaatctgaatttttgagacaatatcggaatgctcca

SEQ ID NO: 343433 - DNA, 1000 bp, Homo Sapiens; identical to SEQ ID NO: 160611

SEQ ID NO: 343434 - DNA, 1000 bp, Homo Sapiens
tttttttttttttttatttaacaaaaatatttaatgctgccaaaaagtataaaaatacagtaggaatggcagtacaatacaaagtaatctctcctaatttatttcttgtacatctttctacatttcatacactcattaaaaacacttaacacatccaattaaaggttctgcaaagtcttctgctggtgggtgctcttcatcccctggatgtaaagtttactttgtaaacaaacaactgtgaggcaatctagagggttagcgagcctcactttagtttccggagtgggcttcaggtcttgctttgcacatcaatggttcaaaatttatagctgcagaatattctcaagtcatgaatattaggtgtctgtcaatcttggcctttttctttttcgttcattctcatttagcctctgtttcatctgctgcaccttctgagctgtggtggcctttctgtcctctcgaatacgtttccgtagagcactctcactgttctcctccattgtatcttgcattttagaggaaagtcctgtacatcggtcacctgtcagtttttcttcttctagacctattctgttcccattgtatttttcagtcattattttgtttggtgaatgatcaaaggcaggagataagtcttccttagaaagttctttccatcgtttctgtatactagaatctccctttatacattttgctccttctattatagccatgtatgagaatctcagttgatctggggtctgaataagacccattcggtattttctcatgttcagtaacacttgttttatgttaatatcatctcctttttccatcaaaacaagacaagtgtctaccagagagaaggtgccagagcgcccaatgcctgcactacagtggatcaccgcaggcccatggtcagggttcaaggagccagattctctcactttaaacaagaaattgagaaatgaagctggtgattcagggactccaaaatctggccaggtagtataatgaaagt

SEQ ID NO: 343435 - DNA, 1000 bp, Homo Sapiens
tagatatagacttttaaaggtaaaaagaaagaataaagatggagggtgtgataatcctatgaagtgtctgggtttgggtcctgagggcagccaattacatcccagactcactggcaatcaacagtccaagccagggtcccatcagctgaatcctgaggtggggatgcttcagtctttacagaacagggtcaaggaagagtccagaaaccgccgtcattggcttcatgaaaaccgagcacgtctttgagatctttttcaaattctgcctctaagtcaagtcctacctggccaaagtcagaagccttgtaaaatgttttatggttgcgaaacatcaggcgcatgtctcgcacaaaccatgccaccgtgtacatttccgtaatcagcctttccttaaccaggtccaaccacattgcttcctgaaagggctcaccgtaatctcgaatattaaatgggatgcccgtaaaaaaggagctttgtggatgacagtaggccttcaagaggaggaactcacatttcagctggtcctgaggctgcatctgcctctccagggtcttagatacatgatggcactgttggcttcctgaagacctcttcatcctgcagaaggtgcaactccacagcatcctcttggcttccacaggggggatgtgacagtcctcatggaagactcgtggacaagtaccgcagcagagaagttgtcccccttgacagcacacctcgcattcatccgagtttttccgcttcagcagctctcctagggtcattccttcacaacgtatattccgtttccagttctttgcgttccttccttttccttcgacttcaaattcatttggtgttaaccaagttccatcctcattccgaatgcacttcactgaggatccgtgtttcattttcttcttatataaaatccctttcgcctcaccacaggtcacggggagcttagaacagtgaaaatccacagtgtcacttttgggttttcctcttcggtgaatatttt

SEQ ID NO: 343436 - DNA, 1000 bp, Homo Sapiens
ttttcgctctgagggggtatttttaattcggaagaagggaatagaggaacactgccttctctgcaaaacgagcatcctctgcagggagcggcaggagagctgtagaagtggtgaataaccagaattttccctggcgccaggttgccctcagcccgactctcgctcctcggagccgcccgccctccgttccttcaccctccctcctcgccctggctcatttcactgtatctcaactctccttgaatgaacgacacagcaccgagatgtctaggaacggtgcctcagtttcacagccttgctctctgtctctgtgccccgccgccctccttccctccgcccccaccacgccccctgggtggaggcggcttccccacccctaactaccctcttggggaggcatccccgagagggtgaaggtgggaggcgccgaggcgatgagagctaggagtcggcagtcgggacaggctatggagggcagtccccagggttgtgccctacactggatggtggccccctccaccctgcagatgcccgcagccgtccccatccagcatccaggtgcgcaccctctagcggttacctcgagcaactacattccgagaggccctgagggtcagaaaaccgctttgcgggaggaggggatgagaagcctgagtcctggtaccttatcctcctccacttctccctgtccaggatccttcttagtttaggaggaagggatgccaaacagataaacagagaagcctcccaggttctggcacattaacaaagaggaagaatgactgttgttcccaggcggggtcagtggctggctccagggtccatgagtgaagtgagggttgtcctaatcatagcttacactccagcatctgagctgaggcaggagtttccaactctgaggctttgtgttgagcagacaccagatcctgagctggctctgggccctcagggtggtgcagagccaccaacagctggtaagtggctgtgccaacggtggccc

SEQ ID NO: 343437 - DNA, 1000 bp, Homo Sapiens
ttttttttttttttttccggcattggtcctttattgaacatcctcccaaagctggggctagggttcaccccccacggtacccaacgagaagcggccttcagaagcatcttctctgcaccacggaggtcccaaactccttgaagtctgcggcggtgacccacatctgcttgaagctactcagagaggtgacgatggaggctccaatccaggtggagaaccaccggtcggggggagccgtgatcttgatgggggtgtccttggaggccagctgctccagctccttgagaagccggtcatccagcccgtggaacagggtagtgccccccgacagcacaatctccccaaagaggatcttctggatgtcggtatcacacttggtgatgctgctggagaccatattcgagagcccggggctctggctgcccagctgctggggcacgaacagggcctcgggcgcctggtgcagcgggtccccgaggctgatgatgttcccgtcgggcagcttgtactccctcaggacctcctccggcctccgggaaagctccttctcgggctccaaggccacgtagcacagcttctttttgatgtcgtccacgagacccttgtccagctggcaggggaaggtgtggccgctggccaggagcagctgcatgaggagctccgtgatgtccctgcccgccacgtggagcttggtgactgcgtggggcagggagtaaccctcaaagatggggacagtgcaggtgaccgcatccccgctgtccaccaccaggcccgtgacacaggcagaggcgtagagagccagcaccgcctggtccgacaggtagaaagcgggcacgccgaagttctcgaacatgacttctgccatcttctcacggttctccctggggttcagggagggctccgttgcaagcaggggctggtcgctgggtttcacgcctagctcccactcaaagaggtgcttccagagtctctccacgtcatcccaccctgtgatcaggcc

SEQ ID NO: 343438 - DNA, 1000 bp, Homo Sapiens
tttttttttttttttttttttttttttttttttttgaggttcaaggctttatttcactttccctgtggcttcatttgtctcttttagaaaagatgacatcgcatagaagtggggctggaagaacctctggagggacagtttcagaatgaccggacccgctcctgaagctgatgccagacaactgtttttcaatatggggtggtgcactgggggtctagctggctcacaatgttaaaaatatttttgaatcaaattggaagacttaaaatccaggtttctggcattgctggaaaaatcagggcttgttgttgaagggcagcagccggacggaggcgaggatgtgctccccgcagggcccctgtggctgcctgccccgctcctccgctccctgtggcctcctgacatacatcaccggccattcacagctgcgtcgggtagggtgcctctcgccagcgtcactcattaaggtatcatccaacccagtgtggagggggcttgcaagagaaagaggggtcactaacaattctcctgggacaagagactaaactgcgtggccccagatatgccaggacatgtgaccacgtcaccaccagccccaacagcgcttggatgggtcaggacagggctaccagacaattcattctgcctgtcagaaatggtcatgatacacagattcagctagaacaaggccctttcccatcccctctggaaaaactgtccaaacaagtgcgtaagtctgtgatgactgcaatgtgagcggcttcccctcggcggaatcctggcaccgtgcgcggcccgcactccgatccctggcagtcctgcacctgttgcgggaaaagttctctgcaccacagctccgtctatccatgtgggcaatgaaggacagccccgaggcctcaggaggcccatgtccagctgctcccctcattcctctcccctgcttggcctcaggtgcttcactgggaatcttggttttacactgggaggttgactgttttcc

SEQ ID NO: 343439 - DNA, 1000 bp, Homo Sapiens; identical to SEQ ID NO: 160612

SEQ ID NO: 343440 - DNA, 1000 bp, Homo Sapiens
tttttttggggaaatgaactgcctttatttttttatttcccatccagaaaccccagtgtgatggtggaagcagcatgaaaacaacatctccccaggcctcgcagtagaggcgaagggaacagagctgcccatgtgcctgtctctaaagacgccaccctcaggttgatgtcacctgtgggagaccgggtccacctacagacaccaggtgatggtccaccaggccccaagctccagcctgctgagtccccaagacacaggctcattaaatagcttcgtacaaaaacccaagggtgtccctccagctggtaaaaattgggcaatttctacttgaggtctgctgtgggggtggacctcaccttggagatgtctttccagaataaaactaagccctactcaggaaaaatggtgatgaaaggcagctcacagacatgcacgactaataatcttattgaaaagggaggagctcaggcacacaggaggacaaggctatgcaatatgcagacatgaaagaaatgccacgggacgctgtcaggggtcagcaggaggcaaagaggtagagctctggccaggaacgctctgcctagagagagccctctgcagctggccctagatcggggactcaggggagtatctgcctaaggaccaaggagacaccaacagcctgcccaggtgtgggcttgtgcaggtcacacagtcctcatgagtctcctggacaggaaatggacatgagggacatttttgagacagggggcaaagtgcagagagagccaagaggtcaagatggtgccagagattttgaaaccacaagagccgcccctttgggaaacactgagaagaggagcctcttctctagcctctgcttggggcaagcctgggtcaggtgggttctcagtactttttcacagttaagtcttttcctgggcagccacatccacgtcaggctgggctgggctgtggccagtcgaggggtcctttggcaggttcaaagctgtgagccacc

SEQ ID NO: 343441 - DNA, 1000 bp, Homo Sapiens
ttttttggctttcctcacttctcaggctttattgggctttatttgtgggagaagggggctggtccccagtttttgcagtgcaaagccagagcgccacctgctggtagccctcaggtgtaggttcgaagctgctggggccccctggggtttgggacacaggagaatttcaggctgtgagtggagacagttactgccacgattccacaggcaagttgttcacctcaaagatctcctgcaccgactggtgaaagtggtcgtaggtgaggcgcagctttagccgcaggggggccttgttaggattgaggattctgaagagctgggtgataggaaggccaccccgagctggaactgtgttcccactgggggcctgcagctgcagctggagactcttgggcacagcagcctggcagatgaaatgggtgacatcaccctctgagaagttggtggcagtgatggtgattaacagcaaagcagggttttcagggggtcgaatgaaagacagattcagctgtactccctcacgctcaaacactttgagatctgggatgggagctgggggtggaggtacacagggaaggtcaagcaggtgtaccagggcacctcctggggaggggtccagatggggaggatgctggacatccccagaagccccatccaggagatctagcagatccaggagctgtgaggcctggggctctgtgggcactggggctgcttctgaaagctgggctgcttctttgctttcctttgcttcctcatcagcctgagggccatctcgctccacaagaggcattttttccaggatggcagccctcatgtggtcgtatttccggaagagtgtgtcatactccacagcccgctgctgcagctccacgtccaagcagctcccgtagatggacaccacctggcggatgcggttgttgtccccacagaggcgagtgctgagcttcatgagggctgtgagggcatatcctcgagtggctggcagggacatgtggga

SEQ ID NO: 343442 - DNA, 1000 bp, Homo Sapiens
tttttttttttttttttttttttagtaaaacaaaatttatttgtaaaacaggacctgttatataaaatggcacacaatcaagttatacaaaaatacaaaatttctttctgattacagttctagttgcaaatgataattagaaagcattcctggtagcttccaaatagctgagattgcgagcatatggaacagggagcagcaacagtccatgatgcagggatgtccaagtgagtagaacctaatttccaagttcaggacttccatcaggtcactttggagggacacctcttaaaattgctagctcctggaatgtcttctgttttgatacccatcttctagacttttgccaattctaaatttagttcccaatgtttgtgaaagtccaaaatctgtgcggctatgaaacagatggtattctgaattttctcacatgatttgctctctcatctatttggacaattgttagttatataattatattcatttcaaatgaataaaagagaacagcgatactgtttggtgatactagatattagatgttaacttctggagaattattctttcaaaatagctactctcgcaatgttggtttcccagatcttgctaagacatgagctcttaattgtgtgtatgcatgtgttttttaaaatccagactcttattgcaaatattctgaaaaatcagaaatattacatgaacttttaaaagaaaccaaggcatttagcaaattttagcctagctagagtaaagaacaccaatacttaaaaaaaaatacaatttaccttttgcagcaatttaaaggtccaaccctttgaaaggaagcacattagcaaacggctgcttattaagccctagtgacattacttgtatgcatttccataataccgatctaattcactgtctagttctggtaggaggcaatgctttctttcaaaagattctccttccatggaatgataaaatgctgaggcttttttttttttttttttgtacagagcct

SEQ ID NO: 343443 - DNA, 1000 bp, Homo Sapiens; identical to SEQ ID NO: 158049

SEQ ID NO: 343444 - DNA, 1000 bp, Homo Sapiens
ttttttttttttttttggtttttcccctaattttatgcattcacattaaatggcaaagacaattccctactccaggaagcatgagccttttctatctaaaattcagtactgtttctggacaattttcttctacttcttctaagtcatgtatctatcccataaatatacatcttgatactttacactaggccgagagctccacattttcaccctgaattaattttcaggtttttctcacagatactgcaaagtcaggcagtgttggtccctatgcagtcatctttggaaatttggagagaggccactgcaaagagatttcattccactgcctttccaaatcttgtctgagaaaactccatggtcacagtctttgcatgcggcagaacaggtttgcagcgaaggctcccggggggaaggatattatcctaatacacaggatttgggcctctgtcaaaatgagcattcttcacggctgcagagtgcccaggcatgttttgggaaaaagtcttgagagtggacagaagtgaagggaaggagtagagaactggttcagttgtgacaaccaagtgggtaaaatctgccctcacctgcctgctactgtccaggggagatgggcagaatcttctccataaaaagcagaacatcagtttaatcgcaatttcctctttttattcatttcagacattaacaaactaaatgcagataaatgtattctacttcacaggacagtaagtgtcctagataaaaacaagcactggctccaagcagtcgcccattctagtcccgcaacggtaatctatttttcttcaaatgtcagttcttcacagtttcaatactgcagcagcaagttcttccttagatcaagaaagccgtggtccgtatttcagaaaatcttaagtagagataagtgagcaagcttctggtgccacgtgcagtttgggtgggacaattttacctgaagtcctgcagactggccgtggggatgacgggggccccgtcc

SEQ ID NO: 343445 - DNA, 1000 bp, Homo Sapiens
gtcagtcatccaagaagtctttattttcccacttggttactgttctggagcttgtaccctctgagctctgagatggggttggggggacagtgccagggagggcctgtggggctgtgcagttgcttccctctgggctggctctgagcccagggcaggatcaggcacttgagagccccccaccgagcctcattggcatagacagtcgtgcctctcacagggctcaggggaggtggaggtgtgggcaagtccatccccaaggctgtaaggaaggagcagctcctccataaggccaagcagaagcattagggaaatcatcctcagttttagcactgcgtgttcttcaggagagaagtcctgagtgaggaggcccagctgttctccagatccaactcctcgggggtttccacagagagctggtatcaaggcagctgtcaggggcggcgtgcctggtgatgcggcatcttaccttcatccccatctcagaatgggcagccagtctcagattcaaggaggaggaatcctgaggtgtggcgttcagtcctgaggtagacctgaggtcccctggaaattgtgttgatgctgagatggatgaggggtgctcattctctcaggtagacagtgaggagtcctggttcagccgagcctccatgtctgcatggatggttatgaccctgattgtttttggaaacagccaagctctctaggtgtactcagcaaatgcaaggtatagtgggtcctgcatacccagggtattatttgagccatggaagcaaaacagagactgcttagcctccctaagagtagttggtgggagtggccagcaaccatggaggcaggagcagctcctctttgcctctgagtagtccccacatgttccctcttccagagatttcaactgccaggcctggtcacctctgtagcctactcttatgacacatgggtggaggcaagggtaaccagagtccttgttctttcttttgattggggtcatccagccctt

SEQ ID NO: 343446 - DNA, 1000 bp, Homo Sapiens
ggctgtatatagctttatttttagaaattaattcacacaattgttggggttggcaaacttcaaatccatagggcagactagcaggctggaaactcaggcaggagtcgatggctatagtcttgaggcaaagtttcttcttttccaggaaactgcagtgtttgttcttgaggcctttcaactaatcaggtgcagctcacccaaattatttaagtaatctctttcacttaaagtcaactgattgtagatgttaatcacatctacaaaataccttcacagccacacctagattactgtttgattaaataactgtgtgctatagcccaaccaaactgacaaataaaaccaaccatcacatccaccaaatcaaaactccaggaacaaatgtttaaattacaagcattaagattcttcactctgaagaagctttcttggtgcatttagcctgtttccctttgcaaaactttcatgtgcagttgtcaatactaagcaaagtctacctaatctaggcacttgcatttaagagaggaatacctctggaacccatcccatccttccaccctcaaagcccttcccctagccccagctgccatcagctcctggttggaccacggctgcagcctcctccgttctgccagcttcctgtccttcctgctctgccctgtcatccacccttctcgagggtgctctttccaaaacacttgtctgattgcatcttcactgattaaaagtccctccaggccattaaagtgcttgtgtcactcagcccagcagccataaaggcttgattacaagcaacagacacaaactccaactgatttaagcaaaagaggaattcctggaataggccaccggatggaaggaaaagctaaagtcttgagaagggcagggatccaggctgccctggggatctcggaagcaggaacaaatggaccatcttgtcagagccagctgtggggatgagtcagagtcagtgatctcagtctccacgggccagttttta

SEQ ID NO: 343447 - DNA, 1000 bp, Homo Sapiens
aaattacaacactttattgcagcatcggcaaaggtcagatttctgaagctggtgaagattgggcagcatttccatgtgaaatgttacaactttacaagttttgttttttatttaaatctacatgcagaaactgaaacatggtaaaagaaaaaatgcaaaatagctagaaaaaaagatgtaatcaagttgtcgcatacagatgtgctctccgactaaatatactacgcctgctggaaagcaaaccaaagacagctgtcctaagaaattaacagattgtcagaaacagactaaggaccctcatttctatttagtgggggaaaacaaaaaaaaaaacaaaacaaaaacaaaagcaaaataaaagctctacttgtttccatactttgtttagagacagaggctgtaaacccatgaaggtcaacaaaatattctcatccacttcttgttgtccttcgttcgttttctgtgacatgttgacgggcatgttttgttttcaatgatacttacaatgggctcacctagatccctgttcttgggctggtatcacttttctaagccatctgaattaatgctctctgtatagtaaaatagtctccacatttttcttttaccttaataggcaattttatagcactgactctgatggataaaacggatttttctccctcatcccttgttcctcttgaaacaaattcctaaacaaaagccttcctggtggattatctggtatttggatatctttcatcattttgttgtcctgcatgtaagttttactagaagattttcctgcttgctctatacttttctactgtagtcctggagcccccaaatgtatcttcttccaacgtgggatgttcaattcagagacactgaaactcaaatcaagtttaaagctcaagttcatttcccccacaccattaccatcacaacccgtttcttctctggctcaatcatctccttcacgctctccttggtgtaactgctcagtagtcaagtgaaccat

SEQ ID NO: 343448 - DNA, 1000 bp, Homo Sapiens; identical to SEQ ID NO: 160614

SEQ ID NO: 343449 - DNA, 1000 bp, Homo Sapiens
ttttttttttttttttttttttttttttttttttttttagaatatgcaacattcagttttattgaccccaggatgggacaaggaaaaaagttcagggagcctggctgagtcagctccccagaggggcctcttcccctgtaggaagcctcccagcccagctcacttaaaggagacgggttaagtgagtcatctcatgactggggcaactgctaccaagccccaaacctcaacctcaccacctgatgttttatctcttatcttagaccaggggttgccatttattttattttttttagatggagtctcaccctcccaggctggagacagactccctctcaaaaaaaaaaaaaaaaaaaaaaagaaaaaaaatattaaaacaaaaccaagaatatacaacagagactgtatgtggccacctgagtaaactaaacagattaagatttgctgactcctgtctcattgagctagacacatgctaggtagcaggccatggtagatgagaagacccttcaaccttgtccttgttgtccttgttctggaaggagggcccacggaagtacaacagtgtaagggagtgtgtgtgtgtgtgtgtgtgtgtgtgtgtgtgtgtgtatgggtggatgtgagtgtgcacaggtgcatgagcatctctgggcatcgagaataatcagagttggacctgctcataaggcccaatccagctgtcggccagttcccgcagggtgctatacctccgctcaaactcctccttggtgcagtgctgcaacagctgacccacctcctcggtgaggtgagtcactgccaggtgcttatccagggtctcactccacttgctgcccaggatgctgtctagactggtagcacagcctgccgtccactgagccggcagcatgtcgggctggagcacctggcggcgggcactgagcatggctaggatgtggcggcagggcaggtggaaggcctggttaaagtagcagctgcagctggcagggggctgggg

SEQ ID NO: 343450 - DNA, 1000 bp, Homo Sapiens; identical to SEQ ID NO: 160615

SEQ ID NO: 343451 - DNA, 1000 bp, Homo Sapiens
ttttttttttttttccttataagacttttattaatgccagaaatgaaacagcaaaaacaaaatgaatttgaaaaatcagtgtgattgtgggtgcagagatggtatgaacagggactgaggaaaaagccaggtctgaggagagccttcagtttcaactcggaacttttaaaggtcatgattcagctgatcctgtgaagtggactgtacagtgggtaggtcgcttcgtgtctttatagccaggctgtgtgctggacatcaaggctcttccctccccaaggaaagcttaactcccagtgctcctgggtttgtcaccttctggacttgcaggcttgagacccttgggtcccccgtcctgcactggacgacccctgactgggaggaattttctaacgaggtgagacagaagaaaatgaaacaaaaaggaactacagaaaacgatgtggggttaattgctgcattgccctgttatgctgattcccacatcttgtaggtctctgggatcatttctgtaacaaacattaggcccttggttagaaacatagctctctctcacacacacacatcgatcatctccaccaaaaccaatattttgacttatggtgcctttgctgctgtcagctcaaaaactacctgtactttgtttccttgaatcgttatgcttttgcatagccatcctctagcagttttatcaaagcaggacataattgcctacactctggaaatgaggggtgagtcacctttttcaaaattaaatttttaaaattctgacccctatcgccttccatacctttaatgtagagagtgcctattcagagcattccatttttaagtaatcacatccaaacaggtcacactacccatgtgtgtttcttcatgctataaatacgtttctggaaatgtttggtagaaacagatttcttttcttttttcggtgggtcaatggagtgacatttcaccactgacataatttcagctattcttttctatctccaatctggtg

SEQ ID NO: 343452 - DNA, 1000 bp, Homo Sapiens
ttttttttttttttttctttttttttttttttttttttttttttttttttttttttttttttttttaacatatattaatctttattctataacagacataaataattttatgaattcatatgacctatacaaaagacaagatattgcactaaatttagatatgggatatttgaatttaatattagctaaacagataaatatatacaatttaaagagttaaggcaaaaccagatgatacttcaaatacaacagaagccttgaaaaataggtataattagaaacaacagcatcccaccaccagttaataaagtggtcatgtctacggaaaaaaaaaaaaccttaggtttttaataaagtggttattatcaatcattttaattaaagttgagcaataaagtataagatttccctcggaggggagctgttttgctgaggctcagggattgagcacttagattttgggtaagcaactttttccttgtcagatttatgatctattcttcttcttagaaaatataacttggaaaatatgactctttcacatatacaattaaaatacaactatgaagcattctttttttttgagagaagtcatgtcgatgatatcgtagtcaaggtaaatttgtgggcaagccattcattaccttattttaagagaaaacataataccagttactgaaaaaaaaaatccaagttttttacaagaaccaaacaaactaattccaaaggaataaaaacaaatataatcaatatattaacacagtatacagttctttggcagtatcacactaaccgttgattgaagtcagaactttagagttttctaatccttagacctggttgccagtcttttaaaactaaacaaataaaattccacatctgtaactaattcagtaatcccaggaaatgaaattcagaataagtcttgcagacagcttttgactgttacatttaagcataggtattatctgcttagagtcccaatccaaatatactgaaa

SEQ ID NO: 343453 - DNA, 1000 bp, Homo Sapiens
ttttttttttttttttttttttttttcacttgggaaccagctttatttctgattttttttttttgtcagagtataaaaaagtgagtgcagcaaaacaaggaagacgagacaggcgtgcgtgggccagggcaagacagaggagaagggagggaagcagaggcagaagggccccttgggcgaaggctgatggtgggaggcgggcagaatacttgcgcagccacacaggggcagggatgagggtctccccgtggtgggggcttacaggatgggagcggccaggccagttgtccaaattccacctgggacctgcagtgaccagcctcgagtctggaggctcaaagcacacagaggggactaggggctcagcctcatctgtccctgagattttcagaagccacagggggactgggagagggcagaggcgcaagagggtggaggcggctagggccgccctcactgtccttccgccaggcagcaccagccccaaaccacccagagaggggttgctcaggcctctgggagggtgtaaggggagtggccctgggaaggcctctcccctgaatccaggccttcttgggaaagcagcaatgggaaggcccacgcacaaggcccttgttcttgagggcgagaggggggaagaccataaaagcaagattttcccaaagatagggcagggagcactgctaagcctgggccctgggcgcggagccacctggacagggctggggttctcgttgtgccacattttgtctctggcgcttggtcaatctggtcctttctcagctttacttctcatgaatagagggggtgtggtgacgatgtataaataatgatgaaagtgcttggcatggtgcccgttaggcgggtgctgatggccactactctagatgatgggttggcctgctgggccctggcaggtgcatgggcacaagccacagggagccgaggcagcttatggtacctgtgtgggccaacctggaggtgctggggaacgacctag

SEQ ID NO: 343454 - DNA, 1000 bp, Homo Sapiens
tttttttttttttttttttttttttttttttttttttttttttttgatgtggaaaggaacaacatttattgagctcttatcgggtgctagacccagttctaaggtcttaaccctcagtaatccctgtggccaccctgttaggtggatgggggctgagctcactggacagatggggtaacgggaggcacacagaggttacgacactaaccagatagaggctccagatcctggagctgaaaaaaacccttgtttggggtcttaagaccagaatgggacccagatcatccccctgagtcaaccctgggtggaggaaaccgtctactccacactgactgtacaagtcaggcatcaggggatgggagaccctgacatttagagccttaaaaagaccttctacactgtttagtatggtcagtttgaggtcatataaggagaatcaggagattccctcaagccccgtcctctcttcttgaaccatagtttctcaatctgtaaaataggaccgagttctggaaattcttttctcagtcggccagcaggtggagcccactcttcatgccttcctcagcctccagaaagctgcggcgtcccggggaggagggtgtgttctggggctgatccctctggacttctgggacaaagcaggatcgctgctcagccccagcccggcagagcggcccaggagccccgggtgactgccccggacttcagggcccggcttcgctttccccctgcaggacactccaggtactgcatggccccgggccccaagggcagggagcgagaccctggagtgaagaccccccggccccgccaggtgtgatgggggggccctggggatagggtccccgaagcaaagctgagactcagaggtgggctgctgagccacgccgtccgcaggggcggtggctacaggtagttgtcttctgcggcgtcgctcccgcccctggagccccggggctcatcctcgtcgtcgtcgtcgtcatcgggggccagcgcc

SEQ ID NO: 343455 - DNA, 1000 bp, Homo Sapiens; identical to SEQ ID NO: 160618

SEQ ID NO: 343456 - DNA, 1000 bp, Homo Sapiens
aatgagaagagctaacatttattcaatcaacaaatgctgagtgtccgccatggccagatactctttgacagtcgtcacagcacacagaacatgtgattagtaaacataatggtgcaggacatcagcctgctaatgttattcccaggtgtcatcaaatgagtgacaatttgtacaatgtttcattaaatgcctatttagaggataaccatagttgatgacacagaaaaaagccaaacccagaatgcaagaatcgtagccagcagagcacgtggaaacaacgtccaagttgcaggtagcagcttgcaggataaccacagttggcgacgctttcaggcagctgggagaattctcagttgtccattttatggttaaatggttttactaaggtctaaaaaattcatttctaactcctagacttatgtttccattactatataaagaatgagccaaacaaataaataacaaaatattcactatggaccccaaaatttcaaggcatgaagagagccccaaattctctgtgaactgcaaagagaaaccattagtacaggaatagatgaagaaattgtttttgagtataatataaacataaacaaatctcttaacagcacgagtgtcaacaaatgcttttgttgttgcaaaaacagtctcaaaaagagtggtgacaaggagactgacaaggagaaatgagctattttttcatctccaaaattgcacttcctggtccacggttcttagcactgcagatgttgcagaactgtgcagcagagttcatgctgggcatgggcaggcactccttgtggaacatgtgccggcaatggaagaccaccacgctgaagggcttagctgcatctgatggaagaataggggaaaggcacgactcacagatgttctcctcatcaacaagaacacctttcatttgagttcggtgcattttcttcagtaaggacaaagagtcagctacgagaatcttcttgcagccttcacgaagcagaatttg

SEQ ID NO: 343457 - DNA, 1000 bp, Homo Sapiens; identical to SEQ ID NO: 160619

SEQ ID NO: 343458 - DNA, 1000 bp, Homo Sapiens
catggatgtttatagtcgctttattcataatcgccaaaacatggaagcaactgagatgttcttcaataggtgcatggacaaatgaaatgtggtagaaccagacaataaaattttattctacactaaaaaaaaaatgagctacatatacatgacaagatacagagaaacctaaatgcatattaatacatgaaagaagccaatctgaaaagctatatactgcatgaaaagctatatactgtatgatttcaactacattacattctggtaaaagcaaaactatgtacacagtgaaaagatcagttgctaagggttaaaggagagggagggatgaataagtaaaacacagaggattttttaaggcagtgaaattattctgtataatactataacggttgacaaatgtcattacacatttgtcaaaacccatattatgtacaacaccaagagtgaaccctcacgtaaactatggactttgggtgataataatgtgtcaatgtaggttcatcagttgtaacaaatgtaccactctattataagacattgacggtaggggaggctgtgaatgtgtggaggtagagggtatatgggaaatctctgcattttctgctccatttttgctgtgaacctaaaactgttctaaaacataaagtctattttttgtaaaagttttctaaggtcaacatagttaatactgaaaaacagcattttaaaaatcagttataaaataacttgtaagagttaaggacattcttcctaattgtccaataacgttgaaacacttcaaccatgaatatatttaaaataaaaatgataaatcgctttggcgacacccagtagaataagcttgactggctaaataaagtgaccatcttttcatcttcattttcaaatgcctctgcatcatgacattattggtagggattggagcaagaaagagagaaggaggaaaagaaactagtgtgataaaaaaagaaatgctacagaaatggggtttatagat

SEQ ID NO: 343459 - DNA, 1000 bp, Homo Sapiens
tttttttttttttttttcttgtatgaattctaattaagagacattatattcagaattatagcactcatagtgataattttcagaagactataacagcttctttgccacttaaggggtacagagggtgcagctgtttacctgaatgaattcttaaataagtgactactaccactctaattttcctagttgtagctctgttacaggttactgaccgccaagtccatgttccagacattctttgccaacacagattaattacaagagagccacccccaaagtcttagggcgaattgggaaagggccggttaaatgaggaaacaggccattccttggtaaaagtttgtagttttctttcccaatacatcttctttttattgagaacttccatttttatcctgtgttcctcctctgccatctcacactctcgctctatctgctggattttggccacatgcacctcattcatttgtatcagttgcagttgtaagatggacatttgttgatggtgttcttcctcatgcatcttttttaaagcaccttcctgagaggttttgctcctgtagtttttattggctgttattctgacagctgaacacgagggttcaggttgagaggtcccctcacatactggaaaatgtatgaactctttctcatcatcgcacagttctctatttgaaacagcaaatgattcttgggctgaggcgtcggggtggtattcgggctcctcctccggggggctctgcaggaagtagagctgctccggcagcatgctggcgatcttctccttccctaggacgtgggtactcaggagagggctgacgctccgtttcactttctctctcctttcatgggccataatttttttggtccgagccttgatgttctcccagcacttcttcagctgtttgaaatcccgcagggacacgctgggctgagagttgtattcgtgggccagcgcctgccaggtacgctgcttaagggcaatagttcgcgcatcact

SEQ ID NO: 343460 - DNA, 1000 bp, Homo Sapiens
tttttttttttttttttttttgagacggagttttgctcttattgcctaggctggagtgcaatggcacgatcttggcttactgcaacctccacctcccaggttcaagcagttcttctgcttcagcctcctgagtagctgggattacagatgtccgccaccatgcccagctaattttgtttgtatttttagtagagacggggtttcatcgtgttggccaggctggtctcaaactcctaacctcaggtgatctgctcacctcggcctcccaaagtgctgggattattatgggcataagccactgtgcccagcccaaaaaggcattttaaacaaaaattctgacgtttaaaaactgaaaatatatcgcgccactgcactactgcctgggcaacagagcaagactctgtctcaaaaaaacaaaacaaaaaacaaaaaaccctgaaaatatgagcccaggagttcgaggctgcaatgagccaatactgcacctttgtgcttctgcctgggcgacagagtgagaccttgtcgataagaaaaaaaaaaacctgaaaacagaaaagagggcttttacaatgttgatgaactcatcttagagtgcatgatttataaatacataaatatccatgcatacttttacagtgataactcctgggaaaatgagaatgttaaaaaagccaatctagacagagtccttctcattccacctgcctctttatgttggtaataccaggagtcttaagagagctgctgtggtctatgtcacattcatcccagcctcctttctaatcctgtagctgatgatgaaaatgtgataaatcttctggcttagctttgatgctttttcattaattcacttctggtagtaaattgtggcaggtcttccacttcaatcccatcggccatttccatcaccttgtctaaaaggtctttattgtaactgcagcctaggaagagatggttggcccagaccatggagagggagagcagctggtccaggcggcca

SEQ ID NO: 343461 - DNA, 1000 bp, Homo Sapiens
gacctcgtgatccaccccacattgtcctccccaagtgctgggattacaggcgtgagccactgtgccatgaggattagtaaagtgcactcatgttaagtaaaaaatttgttttatgtttatgctgattatatgaaggtcatcatagcttagacacaatcaaaacccatggggaacatctttagaattcattcttctcttttcttacaaaaaaagtaaataggtaaaatggaaaatagaagacaacctatcctatcctggatgagacacacacatatttaaattgaattatagacttaaaatttaagtaggaatattttttttccttggccttttttttttttttttttttttttttttttttaaattaaaatgaccttttatttgcctggacaacaaaaattttccatgattttgcttttttgaaacaatgataagaaatttttttttaggcaataagatactaagttgtatcaacaaactgcatgggatatttccacaaggagaggattttgttccctgatctagtttacgtgacattttcccttatgcttgctttctctgagctgactcttcttaaactgacctagatggtaccctatttcaactgactcagagttcattcaaaaatatgatatggtgacatggcttcactgacatgaaatccaggcactctctctactcttgctcacattcttccttgcccaaggttccagcgtgattttaggatatcttatgccaacccagtgtaacgtcacttctcagaaatgtagggccaaccagctactcaactacactcctattcttttgcttgacagcctcatgtggccagatgataggcgaacaaagcaatgcaagcactgcctccatgtcaactccatcatcaaatggaaagcgtatctttgttttgctcagggatctttgaagagaaagggacacaacaggtaccacacacataggtagccagcattcatggaacaggcaccgtgggctgggctgcacc

SEQ ID NO: 343462 - DNA, 1000 bp, Homo Sapiens
ttttttttttttttttttctggacatcttccattttatagaaagggaaattgaggccaggggttggggaggcctggcaaggaacatggtgcatggtaggtggcagaagggacctctgtgctcagagctgtgcctcaggacccatcgttcagatgggaagactgaggttggggaggtgtgtcttgggttaggaagctgggctcggggcaggggtcagcgcgggcatggcaggcacggtgaatgtgaacttctcagtctggacaaaggcaacgcccttctcatagtaggcagcctcgttaatgaacacggggtacaccgtggactctccctcatagagcaggtcctccccactgaacatctggaagatgggagcaccaggctgcagtggctggaagtctcggtcctgcagctgaggatgcacagtgcctgccaggtgcccggcctcggtgcgggggaagtccacgacgcccacgggtctataggcttccatctcaaaggcaggaaaggccgtaccctggttgaagagttcgatgaagtccagaactgtggccaccagggtcctcatccttgagaaaatgtcagcccgcagcacaccctgtggctgggggcccagctccagacccagtccatttttggccacagagtccaggttgtagctctcctccccagaccgctggtacaggaagacctggcaggacagctcggggtactgcagctgcagatggcggcacaggtgcatggcaaagacttcgtgggaggacttcgcgattaagcaggtgcccatgttggccgtggtgttgtgcaggtcaaggacaaagtcaaaggcctggcccgaggccttgggccccagcagctggttcagctctcgggctcttgtcacctcatatgggtcgtccggggtgggcctggaattgaggaagctgctggtgaaggtgcggttgaggtcatggtccacgtagcggcggcagccggatgtggctgccgggttggccagcacaggc

SEQ ID NO: 343463 - DNA, 1000 bp, Homo Sapiens
tttttttttttttttttttttttttttttttttttttttttttttttttaactattcactcatacatatatttttaaaaatgcaaatgacagtatcctttagcatctataagctaagcaaaagtaaaaaatagctggaaaaattcaatattctgcagattttaagacaggagttatattcaaaatttgttaagaggctgggtgcagtggctcatgcctgtaatcctagcactctgggaggctgaagcaggcagatcgcttgagcccaggagttcaagactagcctgggcaacatggcaaaataccctctctacaaaaaaaaaatacaaaaaattagctggtcgtggtgcatacctgtagtcccagctactcaggaggctgaggtgggatgatcacttgagcccaggaagtcaaggctgcagtgagccgagatcacgtcactgcactccagcctgggcaacagagcaagaccatctcaaaaaaaaaaactgttagaaaaagccaagtagttaaacaaactatgataatattaatgtatctgtgcaaaaacatgattatgtacgatgtgaacaaatatagaaagatgcttatgagacaatattaagtgaaaaaaaaaaatgagtgcaaagtactctaggattgccacaatataaattgatagaaaaacaatggtggaccacagaagtcagcagagctccatctacccagcctgaggaaagcacctaggagctgcagatagcagctgccatcttcagcacttgccctggactagccccatctgcactcaattttagcctctctttgcctgttcaatgtcccaccccatccccaaccacccatgcccaaatgtattcttccaaaaggacattttctccttttccatcttctttacttctcgcaagacactgggcagggcttcttggccgactgagcagggacagaagccagaggaccagcttctgcagctccagctgcgtgcactccttgcttctcaaggcctt

SEQ ID NO: 343464 - DNA, 1000 bp, Homo Sapiens
attttgctatagctgcaatgttcacagtaatccaagttccaatggcagggtggcagagtggaaccaaaagaggccaagttttgttggtgaagtataattattttttaagatcagggattcagaattgtagtatcagtgttcagttaggaagttcttatgatagtgcatggcacatgtcctttccatcatctgcattttctgctttttttgtctggctcacttctactcactctctaatcctcaccttagtggtcacttctccccggaatgtccctgaccccttatgatagcagtagtgcaaacaccaaaggctgaacttacaaccagactcgcaggcaacaccttgccttgtgccatgcttcaatcatgaagaggatgtgagaaagagtaggagaaaggagacacaaaaaatggcatttccatagcagagacccccaaggccagtccatttgattctctggatttcttttctgtacaacagtgatggaaggtagcctgggaaagccattcgtctcaggcttcaccttggatacctttctactcactgaactgattccattctttagtgtaccattgcctcataaatccagaaatagcagggacattcatttttgataaagtatccatacagattaggtttattctattgaaaattttattaaaatccttcatttatcttccagatagtagattctattaaccaagttgcataaagagttctgattcccagaggtaagaactgagcctggctttctagttacatgtttactggtaaccccgtctttccctataacacttaagcatatttaaagaatataccctcccctgcctccagccaggattgtaagctcctcaagagcatggctgtgtcttttaacatcaaggctccaggtgagaagagttcctgctgtattataagtgcccaatatgcatttgtaagtgaagaaatctattctgtggtgtctgctttaatattaagagatggcttggcagagattac

SEQ ID NO: 343465 - DNA, 1000 bp, Homo Sapiens
tttttttttttttttttttttttttttttttttttttttttttttttttttttttttttttttttttttttttttttttttgccagcaccacaatgtttaattgattcccgttccagctttctcaaggcacgacaggccccctcttcctcatcttgatttggatacaagacgccagctggcaggcaggaggtgctgctgaagccctgcacggcccctgaaaactgtcacggctcaggagctccaggctgaggcctgggggacctcgcatcagtccctccacccaccctgcccatgggtttcaccacaggcagctccatgagagccccggcccctgccctggcggcttctgctttgcgggaagggccctccgtgggctctggctgtgtccctgtgctcttccggcagtgtcagggggtagtggcctcggcctggccgccggcccgggccgcctggtacatgctgaggattgaggagatggtgcccatgaggcccactagccacggcgggaagcggccggcccacagcacgccccggggcagccagtgcacggcgttggccaggtcggccaggttgctgagaagtgacagcgcctccgactgcatctgcgcctccatggccctccgcttgccccggggcagcgggctggtgaagggcgccgtggggctccgcagcctctgtctcagtttcagcagcatccacagggacctggcaacccccaggagcagagagagggcccacagggttgtactcagcgtccaccaccgagaagagtccacgtggaggacccgggcatcagccgcccaggccacgtgctcacaggggtagtagagctggtcagccaggttccctaggacggagacacagcggacaaaggcgtcctcctcctgtgcccccaggccatattgcttagtgtagacaaacatggccaggtcatcaaagagtcgcaagatggtcctgcagtggctgagttgggtggacaccaccaacagacgtgtcccc

SEQ ID NO: 343466 - DNA, 1000 bp, Homo Sapiens
tttttttttttttttttttttttttgaatgggcaataacattttatttacagaaacaagaggcaagtcagattttgccagtaggctgtagtgtgttggcccatcagtacccatggcttttactaacatgtattgtattaacatactcatttttaaaaaatcacattttaaagcatccataggggagggaaggggaaaattcttccttatccatgattgcaagatcacacagactccttactctgctggaggtatgataaaaatctcaagttttaaaaatgcttcaatccttctttatcatagaataaaaagctaggaaagcagctattataaatgggcctttgatgacaaagtttagttttgattctagaaagcacctaaaaggatagagaaagtgatggcttttaccctgtaattcaagctaagccactggcacctgattcatgacatgaagaggttcaagtggagagcttctcaaaatttttcagtggtaacagtctgtgatgctgtgtttaacatgcagtcattgtagtttttcctttgcagacatgccagtgacagccacaccattgtcaaccagagaatattccccttttcctgtttactcatattgggcttctgaagtaaggttctgtaggttccacagccaaattcttgcttaagaaaagcatgctggtcccctgaggccagatcactgttccaggtccacgaaggcaagaggaagggacccttgttcaacgaccttgtaattttcattacacaaccatctctgatcattttccaagcaagaagggcagtattccgagaatcgtccaacccagaatgttctcgtcctgagaattctattcctacttcctgcaaggcaccacttagtccttttggttttctcctatagaaaagcttgtaagttgctctgagatcaatccaagaatttaaaaacacaggttttaacagctgttttcttttacactcatactccaggcaaacccccaagtcccagt

SEQ ID NO: 343467 - DNA, 1000 bp, Homo Sapiens
tttttttttttttttttttttttttttttttttttttttaacccatttatatagtatgtttaataaaaacaacttttaaacccttatactttgttcttatatcaagtaaagattcttaaagtaatgtaaaacatttgaatgtccctggaaagtaatataacacacaataacccttctatattacatatatatctatatgtatatgtatatgttagagactgggtcttgctattctgcccaggctggtcgcaaactcctgggctcaagtgatcctcccacctcggcctcccaaagtgctgaagtttacctaattttaatacaaatagttatttttattacatgctacacaaattttggtataagaaatgtgtttttcttgtttgcatgaatttctttattgcaaaatacttaaaatgtacataatttttaaaaaacaactaagaggccgggcacggtggctcatgcctgtagtcccagctacttgggaggctgaggcaggagaatcgcttgaatccaggaggtggaggttgcagtgagccgagattgcgccactgcactccagtctggcgacagagcaagactccatctcaaaaaaaaaacaaaaacaaaaaaacaattaagaacatttccttaatgactatgaagtgaatagacagcatatttcaaattttcaagtagaagggtagaggaatgtaggacaaaaggtgactgagatccagagtttaggtgacttggcaaagtcatccaattagcaggtgcagagttatatatgaaacccaagattttcctgtctaaaaatgctgaagattagtatattcaagattaaggggaagaaaatctaattatactttagatcatttcataccagaaaacagctatagaaactagtttttcattttcaaaactcaattaagtgtgtgaatggtccgttggtgtccagctttaacacctgcctgttcccataagtgccatgttccactacaaccctagcttcagcaca

SEQ ID NO: 343468 - DNA, 1000 bp, Homo Sapiens
gagacagggcctcaccagagcggggtcctctgggtccgacaggaagcacagcgccggggctccagggcctcgctgcctgctgagtgggcctcggtgcctcctgggtgggctgcagggcccccaacagcatctgcaggggattcctgagaacggctactgcagggcaggctgtacgtggggatgatctgcaggctggagtccggctttatctgaaacttcagagtcaccccctcgaacccagggtccactctctcggtgccccggcaggggttcagctgtttccggggccttctctggggtggggccgagggagtccccgggggctgcagacggcggcccttttggctgatcctggtctgtgtgtccttggaatccccagcctctccactgtctcttggaggaagcacagggcggtgaccgactcctggcatgcaggccagagggacctctcactgattctgcagcatcctggggtcctcggcttctcctgggagggggatcctcccagccgctccaggttcagacagggcggcgccagaagctttgctgggaggggcgggacctgtgtggtgggagcgctcttggtagaggatgcgatgagccccagctgagagcgaccagcctcggcggcacctttcctctttctggcttttttcaggtcatccgcgcacccctgcgtggcaagggcggcctggaccccaccaaatccctccgcagctgccggggcggggccttccacgctagccctccccctcggaaatgggggctcccaggcctctgccttggatccccagcggcatcttagatcccagagggaaaagagaaccgggggcccagcacagcagatgcaggtgtggtttgtttttgtttttgtttttttttttttttgagacagggcctcactctgtcacccaggctggagtggaatggcctgatcaccgctccactgcagcctaaatcccctgggctcaagtgatcctcccacctcagtctcccgagt

SEQ ID NO: 343469 - DNA, 1000 bp, Homo Sapiens
tttttttttttttttaatttataaaggaaagtgtttaattgactgaagagttcagcatggccagggaggcctcaagaaacttacaatcatgggggaacgcaaaggggaagcaaagcaccttcttcacaaggcttcaggagaaagagtgaggagttaaaggggcagagccctttataaaaccatcagatcttgtgagaactcacccactatcaggagaacatcgtaggggaaaccacccccatgatccaatcacctcccaccaggtctctccctagacacatggggattatggggattacaattcgagatgaaatttgggtgaggacacagacaaaccataccagccatttatgttatttctaataacccactgcccccatttcttttttaacttttttcactttctaaaactgttagtctggttttgacccctgtatttatcttctgtggctttcatcttttctctttgtctctttcagttctactttcaggaatattttctcacctacatcttccaacactattaattacttttgaattttaaatatttttaattttaaaaagccctattgttttaatagtttcacttccaattgttttatgaatgcgatttctccagatatctttcaaactaatttttttattcactagatagcactgtcttatattttaaagattctgaaaaacacaatttttaacgcttatgtagtccgccatcaaaacatcaatgtactgaagattttaagcagcatgaggcaccatcacgtttttgtttcttccccctcatttccccgcccctaccagatctgtttttgatgtttagcctagaagtagcaagaaggatgaactgaagcagattagagatcgagctggtaatccagatgagaaataatgaaagtcttctctagggtaatagtggtgaggtaaaggcaaaaggatagctgacagacgttaggaggtgaaatggcacaggacttggtgaaaaactggttaggagaag

SEQ ID NO: 343470 - DNA, 1000 bp, Homo Sapiens
cagtgtaaggactaaataatttatttttaagacaatttgaacttccattttgttaaattgttcttaattattacttattaataacttcttctttgagtttctctgcaagcaatctcctctttagtaatgtttgcttctcctctgctgtcatttctggtttctctgtcatttcctctacctccccagtgggttttcctttctgctccatattttgtatctgtttagtcctcatatcctttctcatggacatcaacttatctctcttctgcttgagatagtgttctcgttgccgaagttcttctgttccaagtactgataagtttgctattggtccttcaatgctcgcatgctctaagccaggaatcttcaggcctttttgtgggagggaggaagtttcagacctttccacttttcttcccaaaggttctattgactgattagcaaaatgcattttaacttctgagggtgggtgtgcaaaatgttcaccatccccttgggaattattcattattgcagcttcactggaatgcactgtgggctcttctgttttagcctctgataactgttttttcctcttcctttcttcttcctggtcatattcctcttttgattttctaagaacttccctcaggattttcatctcttcgtgttcaaggtcactgaccacatcagagccatcggttaagcagtcaggtaatacaccatttctctcttgaattattcgaatggcttgcagctgcatttcaatgtttttctggaccatcattgctttaaagatagtaaaatcttctgctgccaacacaggttgcaaaatggcctgtgatgtatgggtctttgcaagaggagaagtgcatgcttcttgaaattgatcttcattaattccaatttctttgaggtaaccttctaacagcttttcaactagttctttgtattcctgatgaatctctgtataggtcaatttgctttcttcttcatcatcaaaaacaaggggaacacaggc

SEQ ID NO: 343471 - DNA, 1000 bp, Homo Sapiens; identical to SEQ ID NO: 160621

SEQ ID NO: 343472 - DNA, 1000 bp, Homo Sapiens; identical to SEQ ID NO: 160622

SEQ ID NO: 343473 - DNA, 1000 bp, Homo Sapiens
tttttttttttttttttttttttttttttttttttagtgtgcaaatgggctgggttcagatctccagctttctcccatcaaaaatccccctctaatccaaaagaagcttgtaacccactgtgaaggaatgccacaggtacacagtagagatacttacagccaatcagatctagaaggacaaagctctaggcaaaatagcaaatcacaactagtctctcagcgtgtcctaagcattcggcagccctgggaacaggcagaccctgcaggagctacccagggcatccagtgagaaaatggcaagcatatcatcccgccaaattctgatcagaaccccaacacccaggccccaaagtcagtgtacgcgctgcgcatctccgcggctttttcagtggtgggtgcaaaccacaggcacctcccggactccttggaggtgctggttccggctgagcctagtcccccaccccaccccgaatcaggggtttaccaagggtctcttcaaagtggcagccgcactgtgaaagtgaaaccagacacttgaaaactgtctttcctctctctaaggttgctggctgatggagccacccgcaggggtcccgggggtgctaggaattctgatggatgttctccgaggacccttcgctgctctcgttgaggggcgtctccgaggtctcctccagctcctcgtctgccccctcctcctgaatggtgaggtgcacgtccggggaggaggactcggagctcacgctgtccccttccatggaacagagggtgcaggacagcgcgggcgccacgctctcctgcagcatgttcagcatcaggggcacctgcaccgacctcaggcccgacaccacgggcagcggcttcatggcctccccccagagccgctcctcgtctttgtacagcagcaggaggctggacttcttctcccgcctcttggatttcatgtagcccagcatgattccgatcaagaaaatgccgtagaaggacatgacaaccagaa

SEQ ID NO: 343474 - DNA, 735 bp, Homo Sapiens
tttttttttttttttttttttttttttttttgaggtttggttttgtttactgcgacatacacatgaaatcgagtatacagtccatgcagtagcacagccattggagaggacatcctgatgctggctccagtgcaaaacagtcccagcaacgccgcctgcttgccatcgctgccgccgccactgacaccttcaccatggccacctagcctgacttgaagaggaggattgcaacttgacccaagtaaaaatagatgaagtgctttgtctcgtgtgtgacgtagctgccaaaatttcggcccacgatacaatgccaggtagggttatatttcttgtcaaattccttcttgatataggcagcaatgtccttctctatattgtacttctccatggcctgcgtggcgcagtcaacggcatcctgttgcatgtcctcagacatgtctgcgttcttgatcactgccttccggtcagacatggtgtgacacttcacggaggcgagtccgcactgggccctggggaggagcgatggcccgaggcagagcacaggcaggggcggtgttccctgggctcctcctgcagctgcagcagccgccgccgccgcggtctccggctcccgcagcccgaggccgatcgctccctgccgcggtccgcccttggagtttcgccggccgcccgcgctccgcctcgcgccgcccgcccgcccgcccgcccgcccgctccgcactggcgcctcacagc

SEQ ID NO: 343475 - DNA, 1000 bp, Homo Sapiens
ttttttttttttttttctttgtatttctcttcaatagttgcttgacccaacatctttctgtctgctctatacaatgaaaatacaaactaaatgagaatagaaaaaataattaaagcattgaattgtacaaattacaaatctgttccaaaatatacttacattaaataaaatacgcatttcaataagagatctacagtgaatgactctatgcattctgggaggcttcacaacatctaggcagggccaacattcgtgaaagaagctaagagattttgcatccaatcacagtttgtagcgggtatcttattgccaatctgcgagttacactgaacacatcattagcatcgcttgtgcagaaaaccaattttgtttgggaaaagggaaagcaagctctggcctcaattttgagttcattacaacttcttaagaatttcaccaacagcctatacagtacaagttcaaaaaagtaaacatgttaaggtaagcagacaactcttcagaagcccaaacacattttcttgctgtatttatgttgaattctccatctacaatgagcagtcatgaagatggtcttcttcagggcaacatggtcacaggactggggcaatccaggggactgagagggagcatgaggacgggagagggggctacctcttgctgtttcatgttagagacaaactgtaacacagtccatgggcctgcaatcgtccccttttatcatctggcataacgtttgatgtagtcatccactttattccggaagtcctccttgtcccgcaaatgatgttctgcagcttcaatattcagtggatcatcaaaattcaaaagatcagtaaacaaagagtttaatccccaaacgacatcctttaatgttcttgtgggagcccagccagtgccatcaattgaatgttctctcaataaactcagacatatttcccctgtctctgtgatgttggggtgccagatcttggtcaggcatttcactttgggaggcaccatg

SEQ ID NO: 343476 - DNA, 1000 bp, Homo Sapiens
cctgggaggagacaatcacattatttaaccatcagtcagcatggaagctgggcacagggtcctgggagtcccttccatatgccacacattaaccctttaattgcaggatcagggaaagtgaggggtgcccaggggaggacaggggtggcaatgaacatactcagtggctcagggccatggcaatttaccagccaatatagaagaattttaatattccagccatctgcggatgcagccctgcacacaccccacactattccgtttcttccctgggggagcatcctggccctcaagtagcagcagtgcctgccaaacccagaccaagtggaagagacagtgggcacatgggccaggcagccaacacctgtgggttagagagccccaccctggcagagtcagagccctgaggccagggagaccacatattccaactttcacagtgggtgcgacaggtgaggtgggaggaaggtgggagggaggtgggttcagccctgaacccccctacacacagtcactgaggaaagtcctgactcagatgtgggtgccggagcccacccccgagacccctgtcttcaacatctgctgattttttgttggcgtttctcttttttgttattttgctttccacactttaaataattaatacaattacttttaaatacaaaatacgccatgtcctttctcttctcttccatttgtttggggtgattgggaggtgagttttaaataagggctctcagctctctaacgggtaacaggctccaggtgggagggccaagagcccagatgccactcctcccgtggggtgtccaggcaaccacttcacccctcccctggcctgccccgactgagggctctccagccctggcccagggctccctagatagtgaggagccctcttgggaggtggcacagagctgatgttgtgggattccaggtgggcctggtaccgaatggacaggatcagacagagacggtcctatcccatgaagcagacagg

SEQ ID NO: 343477 - DNA, 1000 bp, Homo Sapiens; identical to SEQ ID NO: 337927

SEQ ID NO: 343478 - DNA, 1000 bp, Homo Sapiens
atatgtatacatatctgtttatttgaggatgccagtatggatggagtggaagcatgtgccattgcggagaagcaggactggggttcctagaaatggaagatctttcaaacattcttaccaggtacctttgggatgtggttctgtagttttaacctgcacagcaattgagctgatcttctggagactgtgattgatcgtaaggaaggatgaagaaggcactgctgcaacagcttgattctgccagagctgggagtgggacagcctcccccatcttctccagggaggaaacaccaacacccccaaaccacccgggcaggtaagaggagcaagcacggcacagagaggaagggcctctgcattttccatcaaaggaagagtttgttcccaaaggtgttttcctgggcttcatttacttttgctcctaataatataaaatcaaagaaggccgagcgcagcggctcacacctgtaatcccagcactttgggaggccaaggcgggcagatcacctgaggtcaagagttcgagaccagcctggccaacatggtgaaaccccgtctctattaaaaatacaaaaattagccgggcgtggtagtgctcacctgtaatccaagctacttgggagactgaagcagaagaatcgcttgaacccgggaggcagaggttgcagtgagccaagatcacaccactgcactccagcctgggcaacaagagtgaaactctgtctcacagaaaaaaaaaaaaagaataaaatcaaagaaaacagccaggtgtggaggctcacacctgtaatcccagcactttgggaggccgaggtgggcggatcacctgaggtcaggagttcgagaccagcctggccaacatggcgaaaccccatatctattaaaaaaatacaaaaaattagccagacatggtggcacgtgcctgtaatcccagctacttgggaagccgaggcaggagaattgctggaatccaggaggcggaggttgcagggagccaaaa

SEQ ID NO: 343479 - DNA, 539 bp, Homo Sapiens
ttttttttttttttttttttttttccttgaaacattttattgacagaattaatgaaggcccaagactttggggcctgggttgtggggggagggtgtttaaggccgggggttcaggccgggggatttggggccgggtgggtggacgagtggacctgtcaggtcccaggggccgggtgtcagaagctagtcctcgccaggggccacttgagagatggtggtcgtgttgaaaagggtgctcagtagcctgtcgttgtgaaccaccatgtccagcagcaggggagtgatgttccgctctccgctgttctgggcctcgttgcccgccagctccaggaccttggccgtcaggtactcaataaccgcagcgaggtagaccggcgccgtgcgactcaggcgctgagcgtagtggccctcccgtagactgcgctccacctggctcactgaaaacgaaagctccgctcggacggtgcgagagcaggtccgcccccggccgccagcaccggaggaccctcggcgtctcctcctcctcggcatgctgggcg

SEQ ID NO: 343480 - DNA, 1000 bp, Homo Sapiens
cacttgttcacatattttatttatccagtgaaggaagaaaaaaaaaagggggggggctttaaggtggcacaattttaagaaaataccatccatttttctcagtctaatctgaatccatacattaaaacaaaagtgcaagtgatgagacgaacatcttgttggagaacaaagcatcttgtttgagaatgaaaaccctttttaaggttaatatctaccaaggggttccttatttgaggatggcttacttttgtttttttaaaaatatgacagcgttgtataaattgctggggttggatatttaagggtagatggtgtgaaggctgctgactcagtgaatttccaggagtctcattctgaaagaatcccaccatggtgacagccacaaaaacatcacaaacatctgttggggagcgactcgatgacacatggcaaaaatggaatctcagatgtttgggtaatgagagcccagacatattgtgatccagaactcccattatacagaaggggaaaattaggactgagaggttaaataatttccccaagatcacacaggtagtagaaggaactaaaacttcctggtttctaattcagtacttttgaacactgcataaatagatgctcctaaaattaattttttttggtcaagattctaaagttggcaattttagctttttaaaaaaaattggacagcaagatcctgcctctaaaaaaaattaaaaaaaatattaactgggggtggtggcaggtgcctgtagtcccagctacttgggaggctgaggtgggaggatcgcttgagcccaggagttcaaggctgcagtgcgctatgatttcaccgctgtactccaacctaggcaaaagaacagcacttcatctcaaagggaaaaaaaatggagaaaacaaaaagatttgtgaatgctgataactttgtatccaatgtcaggaacctcatgtcaagatacagtctaaaaactcatgttcggctcaaaatcagagaattcca

SEQ ID NO: 343481 - DNA, 1000 bp, Homo Sapiens; identical to SEQ ID NO: 160623

SEQ ID NO: 343482 - DNA, 1000 bp, Homo Sapiens; identical to SEQ ID NO: 160624

SEQ ID NO: 343483 - DNA, 1000 bp, Homo Sapiens
ttttttttttttttttttttttttttttttgacaagtgagaaagctttattaaagcacacatacatgtcaggggggtgggaaacaaaagagcaagttacagcccgggatcccaagttatgccttccattacaattgcaatccacaccaaatcaatctttgaaaacattcctccattcggttcatacatacagtagaaaccactgtggctgcccttaatccagtgtgcttataggaaatcagttagcagctgactctgttgaaagggatttcctctctgctatacactccttccacacacaactttgggtagaaacgcttatgagaatagaaaggtcagtttgatcaatgagtaccagaagatgaaacttagctcactagacccttctttgaaaagcctcaacacactacacccatgtaatatgtaggtcaaatttaggaaacaatagcaaaaacaggaactgaaagctcatcaagcaggaagtcagaataacagggagactctgtctacattcccttagagcccttaacagtccccagcctggagaaacactgggccaattgagataacacttggctcttctggttgacacagtgggatgtagaccatgctctgtttgataacacaccccagacgcaaacactaagacagatgtggtacatgaggatgaatatatctcatctttcattcgagaaatgaggagctctctctccaatgactgcagtatcagtttaaaatgcagaaaattcagcatgggctgtgagacactttaccctcagtcactctggtcctctgagatcagctagaagctctcactgggcatcctcgtgatttagtcaaaatacattatctaattaaagtgcttttcaaaagcagctccattataagagtcccccaaaggtctagtaaagatatctagaactggaaaaagcttgggaattctgttagcatttcaaagaaaagcattagaccaaagcaaggtggaaactgcttaaaaacta

SEQ ID NO: 343484 - DNA, 1000 bp, Homo Sapiens
tttttttttttttttttttttttttcacaagcacgattcctttatttcgagccagaaagcagccagtaaacaagtgctgccacccacaacaccctgggctacctgcggtcccgcgcctggccctgcagcctcggaagggagctgtgggggtcacccagggcccacttcgtgcccccaccctgcccccaccctgccctgctcactcccagccgctgctccccttcctaaagagcagtccctgcttgagagctctgaggagcaacttgtttctaatccacaggatcttgcactaagagccccccccacagctatcgtggggcaccccaacgtattccacccctctgccccaggcacccaaggggcatgggcacggccagaaggcctgtcaggagggccagcagcacccccgaggcttgtccccaaggttgggcggcttggggctggcgggcacgttctccaggacctcacgcagggagaatgtacaaaaggaaatctcatcataggaggtcctggccccgctctcgtacaggcaggcaaaaaccaggcccccctcaggagccggcccgatggacgccaggtcggagtagccgctggggccctcgtagatcacccagggctctgtccagctgcgcgggtccagcggggactggctcaggcggatacccatgtgtagccgagccctgcgccccactgggtgggagtacagcagccacgtggggctctggggcggggcagcaaagggcatggggagtgccagggtccaggaccccacatccccactgaccccaggcctggggccaggctgcctggggccatccccccgaggctgcagacggctgaagggcccaccaggcacctggcctccacgggggtctacagcagcctcctctgggggttcgtggactccaggaccgaggagtggaggctggaggggactcccggggcccactgaccaactgtcatcccgtggcctgttgggggcgggggctgggaagcccac

SEQ ID NO: 343485 - DNA, 1000 bp, Homo Sapiens
tttttttttttttttgccttaaagaatttttatttaacataatgagagtttaataacttatattaaagacggcgtggtgctctttctgttgctgttcaccaactgtttttatgacgataacttcgagatctggaatgtgaccgaaaatgagaatgctttgctgtttgtactttagtttcagaattggtataccctttgggagatttacacggggatcttgctattgagtcagaatgtcttccatgtgatcttgattttgttcctgagctagtctgcttttgaggtgaacttgactgtgattttcctattgacttggacctcttttgtaaggacttggaccttgaccgtcctctagagccaaaattccttcttggagttcttgactgccttgctgaggtagaccgccttggtaatgatttggaacgagatttagacttgctataagaaaatcgcctgtgtcgagactctttaaggctgtctgaccgcctcctatttcttccccatgaagaacttctacttcgagttcttctttggctggggcttcttgatctcctgtgatcacttggagaacaaggatgacgttcttttgatttcatttggcctggtgttttgcgatcaccttgtgcaaactgtatttcaatctgacggccacatacccactttctattgaggttataaagagcatcttcagcacctcgaacatcttcaaattgaacataagcaaatcctcttgggcggcgagtgtagaagtcaagtggaatgtaaacgtctactatagggccatatcgaccaaactcacggcgcaagtcctcaggcctggtggcgtccgcgacgttcctgatgaacagggaggtgttggggggcctcgtgtagcgagacatgaccgcttcctccgttccctccgggtctgcccgcggccgctggactcgctccgtctcccgctaccgctgctaccaccacaggagctccgccggcccccggcgcgacccccacccctcgg

SEQ ID NO: 343486 - DNA, 1000 bp, Homo Sapiens
tgcagttataagagacgggggacaatgctttattgacttggcacctatgaactggtggctacaggcccccagggttcttcactcctgcaaagtggaggctctgtggtggagacggcataaatcagagatgctggttccagctgcagggaggggccactgtccctgctttggcccctcccccagtccccttgtccagccgagcaccatctgagttagtccaggccctcgcggagcagggcaggacagggacccaggttcctctgcagcccctgagggcccaaggtaggagctgtaggcccctcctgccttccctcttcttggggatcccaagatgggttgggggaagaggagataccccatttaaagagcccctgagcctcctggatctaggtcaaggaaggcagagtctggtgctataaaaagagccccaccaaacagaagagttaggaatcatcctcttcccctcgttttggttttggctgagcaaaaccacaggagctttcactgaattgggctcacaacagtcgatgacaggctgaggtcacgcagtaagtggacgggggtacagccaggctcccccaagcaggactgcactgtctaggtaggctctctcccaggcaagggaaggaggggcaaagtgaactgtagtcatcacaagaggagggcttcctggaggaggaagggaggtcacagctcccagaagaagaggtggtctgcagagcgggctgggtcatgaaggctggcacaggacactggcatcctcgctgtggtcacagttgtgggcatcccagcggatatgagagcagagcagcagagcactttcttccccacggcacttgacattgtccaggagaatggggcctcggcctgggccaaagtgagcctcgccaggggctgcgagggcctggccacagcccagctggcggcacaggacaccggctgcccgcaggtcccaagcatcatcacagacagtgccccaccgttgccctaggtagagctc

SEQ ID NO: 343487 - DNA, 838 bp, Homo Sapiens
tttttttttttttttttttttttttttttttgccagtaaacagaatttattagtaagcataagtcagaccagcatggcccaaggagacagtactgccaaaaccttcatgagtgcagaacccgccacttgtccaaggggccatgactgggaacgtacttgactccacaaccatcagggatgaggcacttcttggccaccatgtcttcaaattcgtcagcattaaacttcgtgaagccccacttcttggagatatgaatcttctggcgtccagggaacttgaacttggccctgcgcaaggcttcaatcacatgctcctcgttctgaagcttggtgcggatggacatgatgacttgaccaatgtggacccgggctacagtaccctggggttttccaaaggcacctcgcatacctgtctggagcctgtcagccccagcacaggacaacatcttgttgatgcggatgacatggaagggatggagccgcactcgcatgtgaaagccatctctgccacaacttttcaccatgtatttgttggcacaaatacgggcggcctccagggcttcagaagacagctgctcatattcatcagacaccatgtggccaccgagtgggaactcatccacttttgccttctttctacccaggtcaaagatgcggatcttggcatcaggaacccctcggcagaaacgagattttgggtacggcttgttcttacaataccggtaacagcgagctggacggcgccccatggcgacacagtaacgtcggcggtgcctcgaagtcaaaatgcgctctcttaactacgcctgcgcgcatttatatacgttgcccctcgtcc

SEQ ID NO: 343488 - DNA, 1000 bp, Homo Sapiens
cagatttaatcatttattgcagaagaagcagaggactggacacaatcccaatcagaagatgaagagagtcccttggtagtgaaggcccaagaaaggcatgggggcagaggggcttgtagctggccttggggaaacatcctgggtaagtgttgtctttgcatttcaggcaatgacccaacgaaacgggaccaagaaggaggccactgagagagctcctgactggactccttgcatcgaagcatcacaccttgaggacaacagggagaggaaatggggttgggactgtagtgacagacaaagcatttcttgacttggaaagggagcccagggaaggagagggaggagacgggtgagttgggaagccttctgctcacagagccaaccacttgtccatcatctggaggcctttttggtggcacagctgctccccgaggttttggcaaggggatccttgagctcactgccacagctgcctttggtcttgacgtctgcagctgcagttttgtagctataactgcttgaggcgccaaagcccatgctgaagccagcccctcctgccccagcattggtgctgctgatgacggagatgctcacagaatttggatattcgccagacatcctgcactcctcgctctccagcagcttgcggtaggtggcgatctccatatccagggccagcttcaggctcacgagctcctggtactcacgcagcatccgtgccagctcctccttggcctggtgcagggcgccctccagctcatccagcttggcccgggcatctttcagggcgcagtccccccgctgttcagcgtcggcgatggccgtctccagatcggcacactgcttcttcacattccctatctctgagcggatcctctggatcaggcggttgagctcagagatttcagccttggtgagcttgaggtcatccccatgctggcctgctgtgacctgcagctcctggatcttggtctggtacagggtctcagcctcggccttg

SEQ ID NO: 343489 - DNA, 1000 bp, Homo Sapiens
tttttttttttttttttcagtgatcaagatgtcagcatcggctgtttatttctggtcttggctggcagcaatgtggccaacttcggaccagccagccacaggtctggggctccaggatgcagctgtgctctggtgcactgtgggtcttcactcatacttgcagaaatccttaagttctttgggcaggtggagcccatcaatggccagccggtgcaccatgctcctttgtatcactaggcggcacagagtctgcagggatggcaagccatactcgagctggacaaggcgcacgctctttgtggaagcaaacacgtccaccaccgcgtagaggggctgcgcagctggcagtccccgggcgctcgggcccatgtcctcgccgttgatgatgatgtgcatgtcggccgtgccatcggggcgcgggcaaaagaggacacccaggcggctacggcgcgcggtcggaggcagcacgttcagctcatagagctggtccaagagatggctgtagagccctggccggctgcggcccaccaggcggtcccggggaatgcgaaactgctcaatgcgcagatatggttccacgaggagggttggaggtcggctgggggccgctgcctccgcctccgggcggccctcccggggcacgcggttgtggtggcgcgtgatggcgaagacccaggtgtggcccaggttgaccagatcgggcagagaaaactcgggaacgggggccagactggcggggtccagcgcggtcagaccgagacgcagatgtccgcaccagcccagctctttctcctcgatctcgaccaggaagacctggcccggggccagcggctcgcggctgaagcacacgccgtgggcgaagctctccacgcgtgtggcccgcgtcccagaggggtccacgcggatgttggcaccgtgcacccgatggaagcgggtgggagggggctccgggcgctcgagtccccagagtgcacccgaatccacgggctcggaggcagca

SEQ ID NO: 343490 - DNA, 1000 bp, Homo Sapiens
gagacagagttttcttttctttctttttttttttttttttgagaggaagttttgctcgtgttgcctaggctggaatgcaatggcatgatctcgactcactgcaacctccacctcctgggttcaagagattctcctgcctcagcctcccaagtagttgggattacaggcgtttgccaccatgcctggctaatttttgtatttttagcagagacagggtttcaccatgttggcaggctggtctcgaactcctggcctcaggtgatctgcccgcctcagcctcccagagtgctgggattacatgcgtgagccaccacacctggtctctcttctctttagaatggcttcctaacagatgacattttatttatttctcttgtctgcttgtctactctccccactagaaatcagctgcatgagggccggggctttggtttgctttgtttgttttatctccagtgcctggaactgtccctggcacatagcaggtactatataagtatttgctgagtcagtgaatgaatgttttcacttaccactgcatttctgatgtccagcacggtgcctggcacacagtgagtgattaataaacatttgttgaatgcatgaacaaatgaatgaacaactcccacctcttacagtttctgccgttctcccggaagcctttggcaaagggattggctgcaatcttcagttgtgtgatctgtgggttctggtaggctgtcacggagatgaatgtggtctcggggaagcggaaggaggccatgcccccccagtgctggctgcagagctgggctgcccgaactaggtgtatgcggggttggtacttgtgcatggagtgcaggatcaggtggccgtgggggtccagcgtgctgttggtgagcttgacacgatggaaagacacaggctgccgcatccaatgtgcaccagtggcaggagagtcggggtgaatgtagacacggtcaggcaggcggggctctgccttgccgctgggctcccagcg

SEQ ID NO: 343491 - DNA, 1000 bp, Homo Sapiens
tttttttgagatttcagacagttttattaggagattgttgaaaaggaaaagaaaattaaatacaataacagtaaacgtggttctcacattgaaaccaggctcaaataactaggctaccatagaaaaatttccaattcttgcattatgatgtaaaaacagatttttgtacagattttgtacaacaaaattcgtaataaccttttatcatttttagaaaactttaaatatatagataaaaatagacaattttcataggtcctacatgaagatgagtatgttctgttccaagggcttgcatagagcgcaaatgtggttataatatagaacaactagacattaatatttttaggattacaaaagcatggaaaccataaaatgggcacattttacttgtttatgccaaaacacaaatttccaaaccaacctgtataactaaaacagggaaaaaattaagttacagacttacaataacatttcatgaattgtaatatttacaacatgttagtaagagtctctcttaacatacagctgatagcttttttctttaatccttgctaaaatttccttttatttcaaatcaaacactaaagcattctcaaaggtcttcaaatatgtattttaaaactatttaatccacataacaaacaggtgactctatgccaggagcagagcaatggctgattctactacatatgtaagttgtaggcttttttaaaaatctttcaaaaaatgtatgatgcaaaaagcttgacacaagtccattcaattttaagtgttgtaatcctttaaagactgcatatagggaaacaaacacatagaactaggaaaagaatcccttgtgctcaaacaacaaaaggtggttatggaagaactatgcttagaaaaccaagtttctacaaatcatttactagcaatactttaaataaaaataatgctccctttgtaagcaagctaaaataggaactgtacatataacctttttatggtattaaaaagatga

SEQ ID NO: 343492 - DNA, 1000 bp, Homo Sapiens
tttttttcacaaaacattttattactataattgatattttacttataatttttggcaacattaataaaataataaatttcacctgaaagaacaagcgagcaaaatagacaaggaaattcacaaagggcaataacaaaatagtaatcttgacatattcaatatatttgtaaacaaaacaaagtgacattgccttaaaaatatatagaggtatcaatagaaaaacagagaaagctcctgaaagaactcactatattaattttcatttggttgcaggcacagaaattgactcaagctagctcaattctaagacagaagcaaagcccttgatgctgatcgctttccagctttttcatgaaaacctaggaaatttaaatactttgaagaggaagaaaagagtggggagagagtaaagtgcctttaagaggaaaagtagaagtttttttttttttttaaagggagatctcattgtcagtggcattttaagagccttgaagctcaatgaaccaaaggaagtgtcaaacaattaagtgaggtagcaagccatgcaggcctaggggaagggcattctaagaaagacaacagcatgtgcaaagtctttggattgggaagaatgtgatttgcttaaggaatagcaaggccagtgtgtcaaaatagtgcgtcattggggaaaacagtggagaagcatgacagagaatgaaaaagagaggaaggaggtaggcaggggccagatcactggaatctacagttggcaattaatgaccatatgtactccttaagagcatgctttaatgaaactgcaaacaacagtgttgataataccaaccaatcactcaacatacaactaaaacacttcatatttttaccacagaaacagaatacgggaggtaagtatgaaaagtctgtagatctatttatacacagtgggagtatctacctgagacaagaaaaactggcacacacacacccacttgcacacacataccctttcttcaactaaaga

SEQ ID NO: 343493 - DNA, 1000 bp, Homo Sapiens
gcagctactgagcatacatgttggggtccagtgtcagctgggggtagggaagccctggtttctggctcacacggggccccccaaggcccgcaggcaccctggtctccaggccagcaggcccagccccaagctgagtgccaccagcacagctacagctccggccagcaggggcaccactggagctggggggatggcagcctcataggggccatggcaggagaccccatgggcgggaggccgggccggggcagtcagctggtagaagcggcctagtggacagggggccgggcacccggggaggctgagaggcaggggcaggtgggcggagtcattgcggtagaagagggagacggtgacattccctccatctttggcgggattccccaggtgcttccggaactcaaagccgaggcaggcagcatatggcggggtgtgtccatcatagaggcccagggccccctggagggccagcagggtgctgtcatgagctgagtacatgaccatcttgaggggcagccccaggcgctggacccgggagaagtttgcaaggatagcattcagcaggatccctggcacatgagggtgtccagaaccttccatgccctgcgcagtggctctccaaccagcgacagtcccgtgaagttctccaggcgactcaggaagcccgtccagccctccagggcctcctggtactcggcggcctcggtggcctcccgcagcagctcgtggtatcggggacagctgcgcatggggaacctcagcagcttatcctcagccacgggcaccgtgtgcaccgggatcggcctccagcgggcctcggggctccctggagcagcctcgggaaacagcccggcaaggttggcctgggcactctccagcgtgcggtcaaagtccgtgctgcggatgtacacctcctcccgccggtactccggactcaggaaggcctcgtagcggctcctcaggaagcggcccagctccagctgctggcggaccccctccg

SEQ ID NO: 343494 - DNA, 1000 bp, Homo Sapiens
tttttttttttttttttttttttttttttttttatatttaaaacatttattttattatacatatttaaattttagaaagttattaggtagatgtacattcctctgttgctttactttgatcttcagttactctgagactgttccatggaggaggtacgactcaggcgaggtagtgaagaatgactgcgtagtaaatagaaggagaatgggaaatggagtcattttccgagatctttccaatagcttatcccatattgtaaaatgtgctcttaagtgaacaggtaaagacacaccctggaatcttcgtatgagacttggctgggtgggttgaagattgtgaactgctgacacttcatactggaaacaaatacttgttcttggaataagagggccctcactcacatcaatgaagtcacctattctgtgtagcttgactattctctcagggttctgagatgccttctcttctatgaaatctactttgtacttgctgtgttgaaatatttccaatgccacttttgcttcaacttccagagtttcaaatggaagatctttataaattaaagcatgagcatcctttgtgaaggaacgtaagttctcttttgttggcatccactcatcaagtttgctatccaaaactacgtcataacagaaggcaccagaaattacaggaacttctggagctctgaccaaattgaccatatattcatctttgaatgccctctctatcacacagcccatcatcatagcacaggaacgccaatatgccttattcacttctcctggatcacaatctttgaaagtaagaaatttaatttcacaggactttgttaaaggcttatacatgtcccaaggctgtccatccaccagagccagaatggacttcctgcaataccactcgcttaaatgcatggcacaactgtagggagttgaaatgtttttattcatcacgaagacagtaccggggtcagttttcccaacatgcttaacttctatcttc

SEQ ID NO: 343495 - DNA, 1000 bp, Homo Sapiens
ccatgaaagatgtttattgatttaggaggagaaggcagtacattccattcaatactgtatttgactctgattacaatttccatgcaaagctactgttacatacacacatgaaaactgaagaaatgcttacctgacaatatttcaagtcagaatttctcagctaatttagaaagcaattaaaagtgaatacagaaagacactatggattcaaacattcttcccagaagagctttctaatgtataaagacctcagagaaaagagccctttccattcgagcagctacagagggcggtgtttcctcctgccctgtacttggggagaacagactgtgcacccatgtttatggaccgaggttactccacaggcatttcagaccaaggctccgaggcctgcggcttcacgcggaaatgacgggggctgggcatggttaacaggcaggcatcttggctgcggtccagtcctgtaagggccctgcacagaaccctacacgatgagctttcaacctgactcatctcccttccatgaacaaggccctgagacaggccgggactctgcgaccccaagtccctgcggggggccctgttggtaaagctggaactgagtggggtgaacatctaggtggagaaggtcacctggaaccaggcctcccagctgccccccaccgtgatgctgagttacagagagtgcccccactgcggggcagaggggcagaggaagacaacccggtgtttctgtggacaaatcattaagatatgcaaggacaaatgtcctcagggagatccagctactgctgtgaactgcatggctcctgagggtgctgcgggggcagctccactctcactgcccgacaagggccaagtgctgacagggcgggtgacttaagtttcccctgagggcacagctgggcaccttcaggccttcacttgcttaagtgtgaacagcaagcactgagggggctaggactggacaccacgctgtcaaaacccactaggtccccat

SEQ ID NO: 343496 - DNA, 1000 bp, Homo Sapiens; identical to SEQ ID NO: 160626

SEQ ID NO: 343497 - DNA, 1000 bp, Homo Sapiens
ctttttttgagacagagtcttactttcgcccaggctgaaatgtagtggtgccatcttggctcactgcaacctccgcctcccgggtccgagtgattctcctgcctcagcctcctgagtagctgagattacaggctcttgccaccatgcccagctaatttttgtatttttagtagagacggggtttcatcatgttggccaggctggtcttgaactcctgacctcaggtaatccgcctgcctcggcctcccaaagtgttgggattacaggcgtgagccactgtgcctggcctcaaagaacttctactatatacttggtgattatttttaaggtttaaaaaataatactaaaagctggttccttggagcagaaggctcaggggcaggctggggtgatctcacccacttcgtggtctctgaggaccggctctgaggcaagtgggggatgtgcggggatggcatggggaagggtgcacgatagagtgacaagagctgagccaaggacagtgggagaaacagacggggaggctggcaggaaacgtggagctcgggtcacccggtgggagtggtggccactgggtcactgctggaaggaggtgcactcaccggagaccctgggagcccccaaacagggacagctcatccggggcgaagtcggcattgaggaaggcgaagctctccaggatgcactctatcaggctctcggccgaggtgagctcctgccgtgctctgcagggcttcagccggtcccggaagccgaggacctggtactccagctcccggagctggggctgggtggagtccgtgggcctcagcaactccaggacctcctgcagaggcccctcgagggccacgccaggcccgtcctctctgtccccggttgccccttcctcgtggccgttctggctactcgaggctgtgccgctgtggaacagggagccctgtggcaggctggggctctcccctcctaagttcctccagccaggctgctctgcaaacgggcc

SEQ ID NO: 343498 - DNA, 1000 bp, Homo Sapiens
ttttttttttttttttttttttttttttttttttttttttttttttttttttttttttttttttttttttttttttgatgatagagattgatatttattgtcaggaaaagatgattattgttcagtttaaaattaaaaatacagaacagtacatatagtgtggatttttggtcaaaatgtttgtgtatacgtaggaaaaaatatgaaaagatatttacacattgaaaatattaattgtggtatttctgaactgtggaaattttacttccttctgccttgtgtacattttttacaatgagcatgtcttatgtttataatcaatataaacagtgatttccattttgaaaatatttgcaaatggataaacctgtaatttgtagataaacaaatacatagaaacagcttattgtcattattttatggtcaaagagctaacaaaagtgttaacaaagttatatatttacattgtactatgtatgaaaatgaagatttgtatataaggtaataaaactgacagtagagataaaacatattctaatgttgaatctgtggcataagtgaatcatattataaaaaagtaattatttaaattttacataaattaggtattttcttcttcctaaaaggacttgaactggtatatatttttaaaaaggtaatacaaaaaatagaaaaataagtgtaatatgaatggaaggcaggcaatgaggagaacaggaaactgcaagtgaaatgtagagaatctccaatttagaaattacaggctaataaatgtaacggcaatattgaacaaaccttttttttttttaattttcaagcagccaagacataaagaaaaccatattggtttcacagttctcatataatggctggaggcatatgacttaatccaagagacaacctattccttacctttgaaacacctgtgaatattatcaaaaggacacacacaataatttacaagagataacaagtttaatagaaggtgttcttcgaagaa

SEQ ID NO: 343499 - DNA, 1000 bp, Homo Sapiens
cacggttcttcaagtgtttactctccgtcactcaggggacccggtcttcgagggtgctgccgcccactgtctccctccaccctcactgccagacatctgtttgctgtcagcccacgagggggcgtccaagattgtgcttggagcttggcgggcaggggtgggggtccgagtggtccgttgcctcccagagcgtgggcactgcctgggaacggctgcagtgcacagcaggggtagggctgggctggagcctgagtgatcccgcctccagtccccacacccctcagggagcaggtgctgggctgtgggaggggccgcagagcatttcccaggtgggcggagacggggtgaatcgccagcctgagacccctctcggtcctccagcccctcttgaagtgggccaggatgtgcccgtcaccggctcttcggggctgcctgctggttgggtggtgtgccctctccaggctgtggtgagcaggcagagagctgccctgggctcactgtgggttcagctgaggctggctaggtcttctcccagggttctgtgcagggctgcctgctggttggatggtgtgccctctccaggccctggtgggcaggtggagggctgccccgggctcactgtggaccctggtgcaggctggctaggtctcctcccaggggctgctgttgggggagggactgtggtcctcggcgtcccttgggctcccgggcccctcagtggctgtcagtttccttctccctctggatggctttttggaggctttgtccccaggctccgaggcccgcttcctcttccgtggtggaccctgcccgtgctcctgggtgcagatgcactcaggcccctccccggtcgtgctcgtagtggcctccgcctgggagctcaggcccacctcgctgcctggggtgtctgtctcatccagttcgtcggactctggtctcagcacttcagccttgctgggctctgggtggccgtccaggtcaggcggctgtgggtggggag

SEQ ID NO: 343500 - DNA, 1000 bp, Homo Sapiens
tttttttttttttttttttttttcaaatcacatatggcttctttgaccccatcaaataactttattcacacaaacgtcccttaatttacaaagcctcagtcattcatacacattaggggatccacagtgttcaaggaacttaaatataatgtatcataccaacccaagtaaaccaagtacaaaaaatattcatataaagttgttcacacgtaggtcctagattaccagcttctgtgcaaaaaaaggaaatgaagaaaaatagatttattaactagtattggaaactaactttgtgcctggcttaaaacctccctcacgctcgtctgtcccacacaaatgtttaagaagtcactgcaatgtactccccggctctgatgaaaagaagcccctggcacaaaagattccagtgcccctgaagaggctcccttcctcctgtgggctctcctagaaaaccagcgggacggcctccctgctgataccgtctataaccttagggggccctcgggcaggcaacggcagtggactcatctcggtgatggctgtagatgctaacactggccaattcaatgccacacctactggttaccctttgagggcatttctccagacagaagccccttgaagcctaggtagggcaggatcagagatacacccgtgttgtctcgaaggctgtgccacagcccagtacgacagcttggcagagccagtatctctggacttctgcctccaaaacccagtggcctgaagagctaaacaatgtcagcttggctcttccaaggttgccagggccgagactcccaggagctacgtctgtctgggggctgccagacaggcctaggagggaaaaccagccaaggggagggatagtctgagaccaacctagagtaagtgccaccagcgcccccagatgtcgggggaagaggggcgtatgggcaggatggaaagtgggagctgcacttggtgggcagggctggaaggagccatatggaaccaggcaagg

SEQ ID NO: 343501 - DNA, 1000 bp, Homo Sapiens
ttttttttttttttttttcagaaagaaaggataataaagacgtttatttgcatttgtcaatcaacttaacatacagctgagaaagaaagactaaaaaccctctaataaagattgttaactgacagaagcattttgtttttgtttattttttgagacagggtctcgctctgccacccaggctggagagcagtggcgcgatctccactcactgcaactgccactttctggactcaagcaatcctcctgcctcagcctctcaagtagctggaactagatacacacagcactgcacccggctaacgacagaagcattcttatgatacgatctcctctcggctcacttcatcttagtcctggaggtctgactgtctagtttcttcttcttcagaattaatgtttccctcatccatgtcatagcggaactcctcctggtcatactcccggctctcttcccggaggacgtctgcatcttcatctccaggcctcatgtccatctcaccctcgaagccctccagcagagcctgggcctcctccccgggttctcctgcactctcagctcctggagcgtcttggccaggtccatccgtagaggtcggctttttggggagagttggtgtccacagggccaattcagtgatttgggtagctttccattttggaacaacagttactaattcttcctcctcttcctcttctcctctttccatatctgttaaacgatattcaccatgttgttcacacccaacatcaaatacatactttccagggccaacaggatttttgttcaagaacttgccctggtacctgtggttcaggtgaatgagctcggccgtgccctcctgctgtccgttcacccaggtgccaacatacttactgcccgtctccgcgtataaataggtgccttgcccatgcctttgatgagcaaaccactctccagtgtaggtgtcattattgatgtagtagtatacgccatggccgtgccgcaggtcatttgcccact

SEQ ID NO: 343502 - DNA, 774 bp, Homo Sapiens
ggattataaacagcaaatatttatttcttacagttctagaggctgggaagtccaagatcaaggcaccagcagattcagcatctggtgaggaccagtttctcttctctgacagtgccttctagctgtgatcacacattgcagaagggcaaggcagctctttggggtctcttataagggcactggtttcattcatgaggggtccattcatgagcattagggaggagcaccaggtagagagggaaagtaccgtccctggggtctggactttttgtgactcttccctctttttggggaaaaggacttcaagctcaggttttctttggtggggttgggtattgcttcttccatattccaagtctcaggaccctcaggggcaggtgccaagtgagagtgacccccagaggtagaaaggacccagcatcatttctgaggacacctggtagaggaggagcctggacacttggcctcccatcctggctcagggtatggccttgacacatcttcatccttgtttcctccttcttccagttccttcacaggaatcacacacttgaagccacagtgcaggtaacaacacttcctttcccccagacagtcctggtctgtgtgacactggggaggatcggacttgaagcagcgtacgttgtcagctgggcaaacccctgctttctctataccctctttaactccttccacagccaccagggtcacaagaacgagagacaccatgaggaccaagaagctgctggaccccatgttgccaggcaggtgctt

SEQ ID NO: 343503 - DNA, 1000 bp, Homo Sapiens
attccaatgaataataatcacactttaatataataacaaacatacaatacattaaagttagaacactactttgataagacaatcatactcaagctaagatacaaggtacagacatactgaaattgtaaagtgaccattttaatgtttgatatttacttctcttattggcacaagactaataagatagatgggttgtattactcttaaaatctaagacttctcctctagctcagggaaaatactggtggaaacctgttttacccaaaagcagctttaatatctgtttaaccaggttattctataataagaactccattttaatgcacgttatccattacaaatgtgtgagatattctataaaacacatatttaaaggtccctatcctcatataaaacattgtttagtgaatatgctacagctttatttctatgtttgaaaatctcaacaaacgttttaaatcacaactgattttttttctttctgccaaaatgcaagcttagtgatctgggggtcacatacaatcataatttattttcccatagtctggaagttagccaagaagtcagaagaaaataagccctgggttgttgaaaatagtggtcaaaatatttactttatcaaaatttaataaatctataaaactcacccaaagttgcttttgttttacaaagagttgtacgttgattatcttatttctaaaatcataataggccctgaattacaaaacaggcataaaattttattaagttttttattgcactcaagtatagttaaagctgaagagaataaacatagtatttacccttgcagaggactagcttagtaatatcttcttttatacaatactctcttgctattacttgcaaatacagtatactctaagcccttgttttgtgtaaaaagaattagaaacagtgcgattaagttctctatatacattttttaaggtctccaatgtgttaagtggcacccactctttaaaaactccacaatttgagt

SEQ ID NO: 343504 - DNA, 1000 bp, Homo Sapiens; identical to SEQ ID NO: 160627

SEQ ID NO: 343505 - DNA, 1000 bp, Homo Sapiens; identical to SEQ ID NO: 160628

SEQ ID NO: 343506 - DNA, 1000 bp, Homo Sapiens
ccagataacagcctggtttatttgcacagaaggggaagcaggtgaccggaggtcagctgccgcggggaccccccctccagggccctccagagccctcccagccggggagggtggggcggtctgcgcagcaactgcccgtcacaactgctgggaggccaagatctcagggttctcgtagcagtaggcctctttggtggtggccttcggggggctgcagacgttgcaggggcagcagcgggtcaccaggcggtcccagggctccagagaatggagccagacggggagccaggcccaggagcgcaggcggacaggcagccaggccggccggcgccgctgcaggacagtaaccaggatgacgaggagcaccagccccaccaggggacccccgacagcggccagcaccatgccccctgccagggagagcccgaaggccgccaggggcagcagcaggaatccgagcagcaggtagaccccagccacccagcggtaacgggcggtcaccaccccgaagtgcctggccagcgggatgggcagccgcagtgcaggcaccaggtaccacagcaggatgccggccaggttgaagaagaagtggatgagggcgacctgcagggcgctgagcatcctgtctgcggggctggccagggcagccagcagggctgtggtagtggtgccgatgttggagcccagtaagagggggtacgcccggtccagactgatcaccccgacccccatgaggggcacgacggccgccgtgaagacgctgctgctctgcagtgcgaaggtcaggccggcgcccgcgaggacggccaggtagccgccgagccagcccagcgggaaggggaagtccgcattgatgactgtcctcacgacctgggccacgcggccgcgcagcacagagttgagcagcttgactatgaggaccaggcagccgcagagcaccagcagggagccggccagcaggatgcagcccacggccaggtccgtgagctccgtgcccgca

SEQ ID NO: 343507 - DNA, 1000 bp, Homo Sapiens
tttttttttgtgtaatgtgtttttattgacagaaggcatcacacacattcccaagcagcatggttcccgtgagaaactgaaaactaatttcttgaatctacaatgcgacttccatcttccaggtgtaaccagagtttttcctggagcgattccagcttgtttccttttggtgccttccttaagaaattttgcagctgtttctggtgcagtttttgggtgggctctggggtgggcagacgatctccactttgcagaggctgctcttgtgagtggagctggtggtgagggagtaggagaggcctcgcatcatcctggcattcaggcccttagccatggagaaggacttgaggtggcttcttaaggtactggggagcgggagcttgtccaccagatgcacaggtgtgcaggacacgatggtgcggcagcagaggtcttgcaagctcagtaccttgctcggcctcccgagccaattcatcctgtgccgcagcagcactatcctggccagctccgtgaaagactctatgatgttgaaattgcacagagggctgacctcaaagaaggtcacacccaggcgctcggcgtaggcctgggcctgctccctgggcacctgcctcttgaatgccagatgtaggcgattccccaccaggattttagggacaccaggggcatgttcctcaatcttcttaatccatcgatccataccctcgaaagaccagcggtttgcaatgtcgtagaccaggatcactccttgtgcaccacgagagtaggagcggaatatggtacaaaatcttccctgccccgacgtatcccagagcttcagcttcacccgctggccgtccagcaggatggtggtcgtcttgtagtcgatccccccgagatggctgtacggggactcagctgcaccatcctgcaggctctccaggatctcactcttgcctacgtccctgtcgcccaccagcaggaacttgagcaggaagtcataggcctggtcggggctgcc

SEQ ID NO: 343508 - DNA, 1000 bp, Homo Sapiens; identical to SEQ ID NO: 160629

SEQ ID NO: 343509 - DNA, 1000 bp, Homo Sapiens
gagtggggagacaggccagggaggccacctggagcctggcacagtggcctcatttattgtgctgctctgctgctcacaggagaagcctgtcccccaaagtcctcttcctcgtcctggtgagtattttgttcctggattgcttgtcagccttgtccgcctggagcaatcagtagccagcaggttccccacctttcctggagtccgaggcagctgcccagccaccagccatgcggacgatggcttgcaccacagcaatgaaggtggacgtgatctgggtgtgatggtgccgggtctccagggctgcagtcacttcctggtcaatgtttctctccactgtcgtgacgttgggcagaagctggttgtgcagccggggctcctccacggcccacttcacgtcatagccgaaccagaggttgtagatgatggccagtgcagtggccatggtgatctgcgtgcccccggcagctcccaccaccatccggacctggccgtcctggcccaccatgatcgtcgggcacatggacgagagcggctgcttccctggctggatgaaattggcaggtgaggggggtaccccaaactcgttggtgatgctggtagagctgaagtcatccatttcattattgagcaggatcccgctgactggggagcgcaccttggagccaaagtagaggttgatggtgctggtggcggacacagcactgccgtcctctgcgaccacagacaggtgagcagtgcccccgtcatccggcatgtagaactcgggcttgtagtaggagatcgggtgagtggtgtcgtcagagatctgggcccggagctgggcagagaagaactcggaggtcatgtcgcggaccacctgccgagaccccagagctggcctagggaggtggggagggagggtggggagggggcacaggtctcagaaggcccctgactgtggctctgaccacaaccctctggcacccacaaccttccgtggctccccaggacccaagggcag

SEQ ID NO: 343510 - DNA, 1000 bp, Homo Sapiens
gaaattcaaagtaaatgctttaatgaaagttatgaatgggatttaacatgggaactatgcatatgcaatatcatatttttcatatcaatgaaaaattccataaaaatagctatattaaatttcatatgtaaatatttaacaaatatgtttgtattcttctatttttatacaatgaatattaatacatattgcatttatttattttaatgacatttatttaagttcaattgtacaaaacctaatttgttgtcaaaagtatcaagcaataaattttaaatattgtacagggaataatcgagcatgcaaaattgaaaaccccatgtaaagacagcatgataagctcactggaaattttttaattaaataagcttaaaaagacattggactaaatgctaatatatggaatataagatttcccaatgttaatttagttaacaacttttttgtagtagcatacacacacataccacctttatgtactatctctagaagtaaaatagtaagtatataagatagatatatatgagtagaacaaggaggacatcttgaggtcatttcagaaatgtacatgattttattgagtctgcacacagtttatgatttttaaaaacagatccttcaagctaagttaacacttctaatataaaatgtattttttcttcataaaaacaaaggaaaagcaaaagcttttagattcacttgaaagaattctctctctttctctgtctctcacacaaacacacacccatacacacatacatatacacacataacgattacaaagaagttgttttttactgaataagagataaaattttaaaataagcatacgtctgtacaaactgttctggcaaaactatcttaaatatttttccacagtagtaaaatataacccttctacaaatattggttcgctgcatttaattaatccactgtatacctattttcacttcctacttctacaaaaatagaaataacagctaacaggaggtttggagtt

SEQ ID NO: 343511 - DNA, 1000 bp, Homo Sapiens; identical to SEQ ID NO: 160630

SEQ ID NO: 343512 - DNA, 1000 bp, Homo Sapiens
gagggaatcacatttcaacattttttttaaatcacattttaaaatattaagttatgtcaattttagctcttgtccatagagatcatactctttaaataatatgtatctttgaatagctggtggtagaggaagcttctccactgaggctggctggcagagtttctggagacccataagccttcgaatttttaaccgacacaaatgcttcaatgaacaaggattctctagtatttggcggatttctggccattctctctgtacttctagtgcagacttcagtttagcacacaaatgaatttccaaagatgtcaccatgcatgcagtcaaagcacatctccacttgatagccattattcagcaatagcctcagcattacctcgtcgtttagagcatattgaatgacactggggaaacgagtgtcattcacatgcataaaataacaattgacattagctccatgggagagaagcagcctgacaatttcataattattggccctcactgcaacaagtagacagttgaggggatctaagtttgggtctgcacctgcagccagaaggacttctgtgcaatgaacgtcattattagaaacgccaaaatacagcgcagtcttcctctcatcgtcatagctctgggaaatgtggtcagcaagtagagtgttgacatcaaaaccattttcaatgagcagttctagacactgtgcattttgtccatctgctgctgagtgaattggtgttagcccacttttccgaattgcatttttagatgttactgggataagatatttcagtgcaagataatgcccctcataggcagctcggtgtataggaagatgtcctgctcggttaggtacatttccgcttcctccatattccagcaggagggaaatgcagtcgggattgccacctcctgctgcctcaaacagcaccgacgccccatcatccgccaaagcaagcacatcaccacctttgtggattagatgttctaacacgtcacagtg

SEQ ID NO: 343513 - DNA, 1000 bp, Homo Sapiens; identical to SEQ ID NO: 160631

SEQ ID NO: 343514 - DNA, 1000 bp, Homo Sapiens
ccagttctctgggcagttcctgctggtcactgctttaatcagttgatgtggtaaggaaaggagtggtgctggtgccaccatgtggctggacactcagggcctcagccacactccacctcggggtcttccacatcggtttccgcggcacagaggtcatccagggctgcctcttcacagtccgtcacatcaggaagccctcggatgagcatgctgacccccggcatcacctggtcaaactgatgcaggacctccacgcagtgcatcatgaagagcttgtccttctgcgataggccgtgcagcagcagcaccgtgtcccgcagacagcgcactgtccgcctctgctggtcggtccttgggggtccccctgccctccgcactgtcagccactgtctgtgcaacatcaccgtgagcgctctgaccacctccacattacactggcagttggagccagtgactgggggcaaggggctctgcacaccaagcttagccaggagccacaccacctcttgttccagctggagccattgtgtctccaaggccactctgtcaggccgtgatgtgatgtacatgtacagcagcagcaggaggcagccttctgagtgggaacagagctgaggtgccagctggtcgtggtccgccagcagggagaggagctcaacagccagcagcacgctaggcaggggtgtctctgggctgaggcactttggcagcacttggaacacacactggaacctgggcaagaaatcacaggaagtgttttcggctaatttcaccaaaaccttaaggcactgggtcaggacactggcttgaaggtgacctgttgctgcagaagagaaagccaacaggtgaagaagcatcttcaacagtgggtgctgtccttggtcatcagcaaccccccttagggctgaggtcatatctccatcactaagcctgtgaaccaggctcctgtttccttccccagcagcagaatctgcccccactcctgacagtaatagggaga

SEQ ID NO: 343515 - DNA, 1000 bp, Homo Sapiens; identical to SEQ ID NO: 342628

SEQ ID NO: 343516 - DNA, 1000 bp, Homo Sapiens
attttctggagaattttattgtggaggataatacaggagagcagctccaggtaagtggatgaggctgtaatgctctccagctacgtgagtccccaggtggttttcggaggcatcataagttcctggggagactgcaagattacagttggtgttttaggtagctaatcaacatgggaggaatatccagctggttgatggcttgtggctggccagcctggcacaaggctctgcggacgactaaacggacctgtgatagaagtgaccgtggagtggctcgggcctgtagcagcaatgcaatgcctttatcatcttgtgaggtcaggtcaagggagagagatggaaggtagatattagcaccaaaatcgattaacagctggatatactctggctcacaattatgatggaggcagatttcaaggagggtgcggggtcttgggacacgagccaataggccctggtcagtgcagttgtagtcagggtctgccccgtggagcaaaagcaggcggaaacagtccaggtgcccgtagactgcggccaaatagagggggccagaacatgaagctatgtttgatgcccagactggtagtttagctttgacgttggcctctgcaccatggtctaggagctcctgcaggatagcaacagcaccatcacgggcagctgtgagcacgggagaacagttgttgtagatgctaccaccaggagaggcaccagcttccaaaagcacacgtacacagtccagatggccatgactgacagcagtgaaaagtggcgtctgtgccttgacatccaagctgtcaacatcagcaccatgggctaagaggacttgcaaacagctcaagtggccataagaagcagccaagcgcaagggtgtcccaggaacaccccagccactcctgctgttgatgaaacgtttgtaacgctcctggcgcaaaagctggtccaaagtataggagtcgttgtcatacactgcttgattgagagcctgcttctcctctgt

SEQ ID NO: 343517 - DNA, 1000 bp, Homo Sapiens
aacttttttaaaattcactttatcgaatgatacattttgttaaaaaaaagtttacacagttagaaatgaagcacaggtcagcagtatctttacaatactaaaaaactaaatcaaggactttctttttaaacattccctccccttggcccctaaaatgttattatgagcagtatggtgggaaggggcgatgtcaaagaattcttggtccacctggaataatttgtttttaatttgttttgtgtgtaatagtcccactaagtagttgttagctagaagttaagaaggacttctcaagtgccctgtatggctcagaagagactccatggatattgaagggcctgtagtaaaaatccagaatgggtcaggggtttctacgttgcatagtggtcaaagctgcccaggtactctagtgcggcacgataggaaaactgatattgatcctctgtctgtaccatagctggtcgttgtgttcttaacattttgacagtctggaagatatctacaactccttcatatctcattctttccaaaacaatgcttagcgttatgaagactccagttcttccaacgcccgcgctgcaatggactgaaatgggtccatcttggccaaactgttcttttgttttatggacttggccgatgaagtcaataaatccttctccggactttggcactccttgctctggccagtcagtgaactggaactgccttactgttcgggactggccgtccctggcatctgtgaccttgaattcccttaggatatactgtggcatgttgtactcagccatgggatctacaacaaagtactggtatcttgcagaccgttctgctggccagtattggtgacatttctctctgcccatttcacgcagcttggtgagcatcacaactatggtggaattgtgttcccagagcatccgccagaagtcttcagtggtctctgccaagggcccctgggtagcgatgtaggctttctgttgtctgtatccatcaataa

SEQ ID NO: 343518 - DNA, 1000 bp, Homo Sapiens; identical to SEQ ID NO: 338567

SEQ ID NO: 343519 - DNA, 1000 bp, Homo Sapiens
ctggtcccacagctgagtttattatacttgttttcttttacaaaattaaaaacatctaaaaccaggcccaagtggcagcatgagtccctccatttctggaaactgagaaggctccacctggcttgatatggacacagggtgtggggtggaggggaggaggtatggtgcccgaccaaggaggcaaggggcaagggtggcagactgaggagggagcaccgccacgagccacagtccctgagttataattcacagtaagaaggctcaggctgcagggggaggtcaaggctcagtgaggttctggggtgaccaggggtttccctggggaaggtggccggggccaagatgctctcgagccagtttagaggccagggcccttcctggccatctgtcccgtggcctagccgacactccgttcatctcacttggtgctctgggttcctgtgacagaggcccctggcctttcctgcatggcctggccatcaggggggccgaggacaccactcagagagtcagaggaagaaggcgattcgggaggccacggtcttgcagccgttggaggagaagagctgctcgtcttcagggaagaaggtggtgctgtccagcacagcctggacaacctcatcccttggctccaggcccagctgggccagctcgttgagcacgcagtgccggacgtggtgccgctggagcgggaggaagggcaccactgcgtctaggaggcgctcttccatgatgcccgagtttgagaagccatctgcaggaagggtaggtggggaggggactttgtgcttcacaagaggggagaagccggccccaaacccccaggggcaggaggaaaaatgctggcctcagttccctcagccaccttctgggtgtaggactcaggggctgtaaggctcacccaaagtcacaaagctgggagtgccaaagccaggctcagaactgccgggtcagtgggcaaagcatgagaccccgggagagcctggcccctgggtgtggg

SEQ ID NO: 343520 - DNA, 1000 bp, Homo Sapiens; identical to SEQ ID NO: 246574

SEQ ID NO: 343521 - DNA, 1000 bp, Homo Sapiens
ttttttttttttttttttgcacaatgctgccagctgcatttattgtagcatgtacaaaccactcacagccagcgcctgtcaggggcccaggacactggccagcggggccaaggagccacattgctgggcacatgccccataccctggccacccggcagcagtgcccagcatccctcaatgacagagcagccaggaccccagcggtgactgtcccagagggacctacaggggcatggggccaaagctgggtcctgcaccttgtttggcctgcagatttgatttctgaattaatttctgccaacaacttaaaaaatcaggacatctcacatacaaatctgtatttctggcttctccagatttctgtcattaggcctgcattcccacaccagagcaattagctacacctgaatatggcagcggccactgtcagacggggacccgtgctctcccccccatccccaccgcactctcttggtctcaaggaaagtggctgttaccgactagattgtgcgaactttctctcatcacgatgtctttgtctccagcaacagtgggaaagtcaaagtgaagcaggctcccaactcaagggcctgtttcatccatttatacaacatacgtggccccaggggcatcggagtttgagatctctggacgagcccagggagggggcggcaggatcactccacacacaccccttcacatagctgatgaggcggagctgagggcagcagccagccttcccaagcctgagccagttggctctgagaaattcccaaactctccgaaccccagagcgctagtaggcaggcacaggctctactagagtgaggttgcgggaggaagccagacccagggagtgtggggctggcatgccctctagtgcccatcaggcagctctgcagccacggtgaagatgctgaacttgactcctaggagtcaaccatccagatcccccaaacaggctcccgccagtcccatggcttccagctacttcttttgc

SEQ ID NO: 343522 - DNA, 1000 bp, Homo Sapiens
ttttttttttttttttttttttttatgctgaagtacaaatttaataaagcctttgatcacatctcaatccataagttagctacaaaaacaaaaaatcctacaactttttagagccatcaagagccatcaaggtgtcagtgaacaccagttacaaaaggagattcagtgtttcagatagtgcaatatttccagctgctgaaaagaatttaaatgaaattacaaactacccctccttgtcaaaaatccacatgaagttgatattggtgcttataaatcactctctcccagtccctcactggttccaaccttcaggtgataaaaattaggatgggatccatcttccctgtgctgacagtctggggtccccgcatgtatgcacgaacccgcccagcgtgcgcacacacgttcagaagaaatcttcaaaggaaccgagcgtttggagaaagtggcaagtccacagaatcagaggttacgaacacaccttcaataatattaatacattcctgtctttaaattccttgccatgtttccatcaaagtagagcacacactcttttccagaagcctgggggctcgacctgggtgggacaccaggatgcagctgaaactctgaaggactgtggagacgggtggcccctgctttgctgccactgtgacagctcttgttggaaaatgttttgcgtctttgaggagagcagaggagggactgggccttcctggcttcgaatccggcatcaaccttggtggtgcaggtgcaggagcatgaggtgggagagggtgggtggctgtcaacacagaccacaaacagggcctctgcctcagttccctggagctaaagttcttacaacaaaggtaaagaatgagggcagaggaacacaatgggttggaagagaaatgaagtttaaaaaaaaaacaaaaaacccagagggtgtgagcctctgtcagtgcaacgggcttccgggttccctgtgctgaggaaggatgggcagcaagacccaagt

SEQ ID NO: 343523 - DNA, 1000 bp, Homo Sapiens
tttttttttttttttatataaaactgctttattaaaaagtcagctattaggaaaacaaagcccttacaagggttctatcaaaaagtacaaattttaaataaatgcatcagaaaaatggcagccagatataccagccacagtcacaacctcaaaggccttgtggggaaggaagggagaattagggaggaggttccgagaactcaaggaagaggctgggcacagagggtctttgggtgcctgcagagctgggtcctggagctaccaggcaagaaccctgcttccgttttcctttccttggaaaaatgtaaagaactggcaggtgtaggaaattttgagactggagcagaaaggcacaaaagtcatttataaggtatgattgctcactctagtcctgaggcacatggggtggataaatgggggatcagagccacagggtccctggctctggtcatgcttgcccctggctggtaccatctctgagtttggccacaggttaaattaaggtagaccaagtggactgcataatcctggcagcccggggtctggagccagtctttagatcagatgtgttgcttcattggcaaactggtgtctgccccccaagagatccccccaatgaggagcagcaggtctcctgcctagccctgtcctctgagtcactgtgggtgcccaccctggacaaggaacttctgagggcagtctctgccatccaggatcctgagaagccccaagccccagagccagagtttctccgaatgacaggcagaagcacagaaagctggcgttgaaaccagtccccaccagctgctggccccacacccatggtcactgctgacacgcctccttggtgacattaggcagtgggtaggcaaagagggagaagtccaggatatacttaggcagcacatcctgcagcagggcccggggggcactgcacaagtggtaatgcaggctttcggggctggctggccggtaccaggcctggcgagctggaaatcgg

SEQ ID NO: 343524 - DNA, 1000 bp, Homo Sapiens
tttttttttttttttttttttttttttttaagtaagagcaatgtttactgagcgatacaggactgagtactatgaagggtttacaaggatggaaatgcaccccgcccccgccctggccacccccgacacccagagactacagtacttaggagttacacacaacggccgtaactggtggctatctgttcataacaaacaaaccatagcatatttatactgtatcacatcgagtgattatagaaatccatatatatattgcttgtataaaatctttttttttgtaaaaaatattaaaaaaaaaaaaaaaaaggaaagtataaaaaacatgtgcagttgaaagccctgccaggacagccagtctgtaaacattcggtgagtatgtgctttggaagggcgcccgcgcctcagtgcccacagcaaactccagcagggctggcgagggtgcgcccggctgccgcctcctgggcagggccgcgctggaccgaggtgggtgggggcatcagggccccgcagcacgcccctctccagcttcgcatcagggcgaggggcagggctgggggcaggtgggttgcagtttcattctgagttccatcctcagccgcgttttggttgcaactcatggcttttcctggctgttcggaggttccttggatgggtgccctggtgaagaggccagagaagagcccagggctgcctcgttgggcgtctccctggcctcggtgcctctgtcctgcctccttcaagtggggccccaggcaggacaaccctacccgagggtcaactttggtctcagcgcttggtccctctgggtttcctcagcccgctcttcctcctgggtggctgatctgagtttcacaaaaaagctcggctgatgctggctgtgctgaacctcattgtacagtttttcatgcaccaaaggaagggccatctggggcccccctcctcctctctcttcgtcacttttccttctcctcttcctcctcctccacctcctcccagc

SEQ ID NO: 343525 - DNA, 1000 bp, Homo Sapiens
tggagttgaggacatttatttcacattcacacaactgtacattttctataaataatgtggggctgaaatatttacagtcatttcttgcccatacccaggctgtctctccctcctgacaccccgtgcctggagagacagcctgcagacagatgtgcaaacccagcttggtctttcctgccccctccctgatgctcaggcagagcagccagcggtccctgggactccactagcctcgaccactccatcctctgatgccgaaggcgtggcaggccacagggaattcgccgctccactgcagtcacagaggctgtggcaggcagcagccaacactgcgggccctgggcagtagctgccggcttgggaatgcagaaggaagcagggaggctgccactcactccggctgccccccaattcttcccttcctctctgtgcccttcctctgagagggtgagccccagggttccctcactcctcacagagtgaaactgctccaggcgcccagtcatgccgggtcacagagaagggagagccagactcttgcagtggacagttataacgccagggacaaggacaaggaaccacaacacaaatgtctcaaggacacaaaatagtgggttcacaccggccccacagactgtacacattcttgagccctgaggggaaggcagtttggtcttctgggagtggagagggagaaggtggacacgctcaagacacactcagagggacacataaccggtaaccaaccaagccacagcagggggcttgcagaggacacacgagcatcatccactcctcagtcacagcagcatcgtgcacttgggaacagcaaggggccaggggcgtgccctgggctggggcagctgcgtagcccctctccatcagctagagacaggccggggcggggttctgagatcttcctcactgctatgaactgcagccacgtacgagaagagacataatacggagtagcagatttcgtgggccattggtgtcttgt

SEQ ID NO: 343526 - DNA, 1000 bp, Homo Sapiens
atcattttaggaggtttatttgccaaagcctcaggaggtcctgacgacaggggcccagggtggtcagggcacagcttggtcttacgcatttttagggagacgtgagacatgaatcaatgtatgtaaaaagtacgtggttccgtccagaaaggtggggaccactcagggaggggcttcaggtcatgggtaggtgagacaaacagtggccttcttttgagtttctgatgagcttctccaaagaggcaatcagaacatgcatccatctctgtgaacagagggatgactttgagtagaatgggaggcaggtttgccctgaccagttctcaacttgaaggggtccaagctattttgctttcacagggggaaaggctggccactcaggaggggctgatcccgacctggccggtcccccttaacccagcccaggccgacacctggggcagaagcctcagagaagctggtgggtgggtgtcgtcctcagccaggtgccggcagcgtttccagaggtgatacgtgggcaaggccaggagcagcagtcccagcaccgcactgctggtccacagagccgcgggcagctggtcacccgcaggtttggacgcggggatggcctggcggtggctgagctccaagccaggcagcctcatcgtggcctggcagtagagggcgggcgggacaggggtccccaggggcggcagccgccagcgctctgtcaccctgaacagcacgtcctcgtccccctggggctcctcctcctcctcctgcacctccgggcccagggcttgcgccccctccagttcctggcccccgacgagcagggagaaggagagcgcgttggggtccacgggcgtgactttgtgggccgtacaggccacctccgggtcaccaggcaccagggctgctggggagacggtcagctggtccgggaaggcgtacacaaggagctgcacggtgtgctggaaggtgcggcccccgcaggagcccacgcacacgcgggtcccgg

SEQ ID NO: 343527 - DNA, 493 bp, Homo Sapiens
ttttttttttggagaaagctgcaaaagtttatttcgatatttttaagtcaaatatcttagataaaaacagttttgtgttgtttcagcttgtcttcatttaaacctgtggttgcctgtcacctccttctggcattttaaattgttctgattttggcagaatcttcccctggtcatcaggaccatttccacattcacccccagtctttgactgagacagctcctggagatcagcttccaggtcaggcacttgagtctcagctgcaccctgatcttcttctctctcctgaccaggtgcaggatcccgactttcagttggtggttcctcttgctgaggctcctcatcaccgggctccagcataggcccaatcagctcaggaggtggtacacttctcctcggcctaggcctatatgttgatcttcctcgccaaatcatatttcacatttcgaactaagtctcagggcaagtgtaagtatgtgtgccttctgaatgctt

SEQ ID NO: 343528 - DNA, 1000 bp, Homo Sapiens; identical to SEQ ID NO: 160634

SEQ ID NO: 343529 - DNA, 1000 bp, Homo Sapiens
tttttttttttttttcagtcagagcttttattgtcagataaacttaactgtatgaatgaagttaaaaatatttattactacaaatgatctaaagttttcacattttacatttcaactaacattaaatttccaaagcctaatgcatggcatttttaaatacaaatatttacagaccatgtaacacacattaaaaattaaatatctctttaaaacagtgacatatagatgtatgagtataatcttatttgaataataattacttaaggagatttgcttaacaagaatataatcaatgagataacactttctgaatatgaaccaatgtggcagatgcccaaatcgctagggccttagactccttgcttcttcccctcatctcatttctgatttctaccccaattctaaagggccaaacatgagacgtcctgggaaaaaccttctctggtttttattcaagccattgatggcctaatagtttagtagcaagttttcttagccggtgataaggtagtctacttagttccctacctggagatatgcaaaatctggtcatgtttctgtgaccaacagaagtactttgtataactgggtacgtccatgttcacttaggaatgagttcaaatgtggatcttattctcagtcattaatctagattatatttaatctgaagttctgtagagatgaatgtgtcttcacaaaagttcctgttgctggcttataactagaggtgatattactattcttgggacagggttagtagtaacccaataataaatgttcttcatctcccattgtaagaaccagatcacttctacactattaccaaaaaaaagagaacattcattatgaaaaatgctatctgaacatttggatatctgagtattattatgtttatataacacatattatgctgctttggtaaaaaatcccaactagacttttgtttgaacttttgacaactttgcaaaagcttaacttttacttaactctacaatcttat

SEQ ID NO: 343530 - DNA, 1000 bp, Homo Sapiens
tgtttttgtgtgtcatcctcagaccagccatttgcctcttccaaaaagctggggctaagcatgtgggtggttcaagaggggcagcccccaggccccaggctgggccgcggtaccagtggcaggtccccctgggtctcaggagcttagcttctacggagctcaggtgtcatttatggggttgccagagcaagctgttaaagggcgaatttggtaagactgagctcagagacctggtgggagggcaaggactggcgggcacagcaggaggagattagaggagggtccacctgaatctttgcagcaggcacagagcttctggctgcatctcagaagggggcagacgcacaggccagggaacacggggctctaggctgtggctccgagtgtccctggtgactggaaagcctgaggggaggctggaagctgatacaggatgccggtggcttgtgagacagaatgagctctttcttcctgaagagggacagaggggagagaagagagcagacatcacactgctccttccatccctgcccgtggcagacatcactaatcaaacttacggtgcctggcagacatcactcatcaggattgcactgccatctcccactgagcccagaccaaacctcagatccccagcacagcctccagcagccacccctgatctatcagggtaggagcatcttgcaatccagttgccaacactcgtctagagtttgagaactgaatacttgtgggtgtgcatctgcgagtctccctgcccaagcctggagggaatactaagaaatgtgcggacagtgaagagacaggaaaccttgttgcagcagaaatggcctcgatgccttcgggattctttagcctggagagaagagggctcaggggagtcaatgtgtgacctcaacactccaggaaggagagtgggcaagtgggatgccatggacagagccacagaaaaacagaaacctcttctgtgtattaagctgatgctaaagtcagagcagtc

SEQ ID NO: 343531 - DNA, 1000 bp, Homo Sapiens
tttttttttttttttttttttttttttaagggaagctgactatttattagtctttttttttcacatgaataggtgaactgtgtcaaaggccttttattcattaactgaacaatcattggttgatttcttaaaaaattgtggtgaaccaataaaagctaaagttccttctaattgtgggcttaactgaattacagttttaaaatgtggtgtcttcattgccactcagttcaatatattttctaacttccacttgatttaaaagtcatgtttgatagtatattgccagtttgtttaagacaggtatgattaactgcatcttagagaactcgtctgtcctggactgactgaagaatttctgcactttgccatgttccatttttccatggaaacagtgctctgcagtgagcctctctcttcaactccaccatgtcactggtctacctggtctgggagccacatctcctgggccagcctcttcctcttgtgtgctctgggcttgggcagggacttgcattccatgcttttccagctcttccttcagcctctgccgcttctgctgctgttgttggcacttctgctgcagctgctggtggcgctgggcagcagctgctaggagctcctcagccttcctgtgctcttcctgaaacagctgcactgtggctgcagcctcctggctgcggagaaagagtccctcatcaagggtggaggggccctcagccccacacagggagcacagctgatgcttcacgtcttccagtgtcgccttgaccagcttctcttccttgagcagctgctccttgctgctgtccagggcacaaatctcctttgccagccgctctggcatgtggaagtcccagaggtccttgtgctggcccatcagatcttccagctgttcctcgaatgccaacctcagctgtctctgtttgttcttctcttcttcaatctgcaagttcagggcagaaattctctccttgcactcctgcaacatggtgtgcttcct

SEQ ID NO: 343532 - DNA, 1000 bp, Homo Sapiens
aaagaaaacaacccaatattttaaagtgtgcaaaatatataaacagacatttcatcaaagatgctatatagatggcaactaagcacttggggaaaaaatgcttaacatcatcagacattaaggaaacgcaaggaaaaccactattagatatgtctacatacctattagaatggctaaaataaactttttaaaaaactaagctggggctgggcgtggtggctcacccctgtaatcccagcactttgggaggctgaggcgggtggatcacctgagctcaggagttggagaccagcctggccacccaacaaggtgaaaccccatctctactaaaaacataaaaattagctgggtgtggtggtgggtgcctgtcagcccagctactcaggaggctgaggcacgagaatcacttgaacccaggaggtagaggttgctgtgagccaagatcacgccattgcactccagcctgggcaacaagagcaaaattctgtctcaaaaacaaataaacaagaaaaggttttaaaaattgataaaccactagcaagaaagagagagaggacacatcaggcttgagagaagtgacatcatcacagactgtgcagacattaaaaggcataggcatattaggaactagatattactaaggcagtaaaccagatcactagcaaattcgttgaaaaacacaattcatcaactattggttgataatactgatacgcatcttctgtgtgccagggccttgaggccctgctccaggcagaaactcggcagtggttgggaaggcatcagatgtcagatggcacaagaggactcagagctgagggataatgggaaagaacacagaggaatccagccatttccacagcgtccagctctgctgtgggaggctgggaacagcccagcactaccaccctggactgggaggacaagaccacaaaatgcagcttccctgaacctcctcttggtgatggggttgatgtggtcgaggtagaggtgagtatgt

SEQ ID NO: 343533 - DNA, 1000 bp, Homo Sapiens
ttagcgtctctctgtttattcgctcacaataatacacagcccctggatggggagggggtaggaggggctacaacagggtggggtgggaggggaggagacatccacttccctggcccctctcccctctgtgcttgggggggaaagggagggagggggactccccctaaccccccagaatgtaaacagcagcagatgaacaaaaataaaaatacaaaaggccggaggaaagtcccaggcatcccccaaaccctggtgtcttctctgtcaccagtggaggtcccccatccaccaaaactgcctcagtccaaggggctgcccagtgccggccacatcccccggggcagagtccagggctcagaactgctgtgccagcagctcacacaggtgacgggagacgggctccttgctggtgcgcagggtcagccggtacatctgggcctgggcattgggctccagccgaagcagacagcccacctgcagggctttagtctggatgatccccgcccccacgaagttctcagggttggggtccacattgtccaggagagcagagccaaaccccagaagcttggccttagtaacttctgcgtccatggggtggttggctttgaagattttctgcgcctcctgttgagggaggctcagctgcttccagcgctggaagaaatcctgggccgccatctcggtgggctggaagaacttgttgatggtcactgggagcttcagggtgagggcctggggggcgccaccgtaccggaagcgcacggacagcagcgggggcgtcaggaagtcccgcaggcactcgatattgagcacctgctgcacctgcgcgccgccgtccacctgcgccgccacgcgcttggtctgcacagccagctgagtctggaggtctcccgggtgaaccacagtgggtgagaaattctggaactgcaccgaggtcttgttgccatagaagagatacatgcggcccaggttctgtcggaactctgacttgactccg

SEQ ID NO: 343534 - DNA, 1000 bp, Homo Sapiens
ttttttttttttttttttttttttgatattcaagcatgttcttttattaagcataggatgcgaggcacagcaggaggtttaagtacaatgtgaaagcaagagaactgagactgtgattgacagacaaagggattaactaacgttttattctctgccccccaaaatatcctgtgtattcttaagtatatacgcttcccttcctgcctttcaaggtatctaaggaatgatttgaaaaatttgttataatctctaaagaattttttgcatagcattagcaaaggagtctatgacaagtactttgccacctggtagttctgcgtattctactccctctgggtgtcactgtcatcctcactggctgggacaaggttctgagatttgtctccccagcagttgctaagctggctcagtcttggtcaggatgaatgaaacaattatctcctggatcaatgcagcaaggagcagtgaacacttgctttttcttccctaagtaggagaaggccagcccccggctgcagtggtggccgtggtggtagctggatgggacgaggggacctcaggctattctataacagtaaaagaaagagaattgctggtgcttctccagggagatacggaacctacacaccaagcaggtttttactttcaaacaggccaccaccagaaagcaaagagacctatgcctagcccagccccagaaaagtgatactttaccccaggaattccctgcttcccattggtacttaagatttttcactctgttgtgactgctcttatttcctttactcttgcggatctgtgttggagggacatttggaaggggcccagccctggcacttgcgtgaggggacacacacagggcgggtgtgtgtgcccatccgctctgagctccacttagccggactggctgccaagccgttcttggatcagcctctcgctgagcgcccacagggtccgggccgtctcttcgctctgagcttctggtgagggcatgcagcgg

SEQ ID NO: 343535 - DNA, 1000 bp, Homo Sapiens
ttttttttttttttttttttttttgatattcaagcatgttcttttattaagcataggatgcgaggcacagcaggaggtttaagtacaatgtgaaagcaagagaactgagactgtgattgacagacaaagggattaactaacgttttattctctgccccccaaaatatcctgtgtattcttaagtatatacgcttcccttcctgcctttcaaggtatctaaggaatgatttgaaaaatttgttataatctctaaagaattttttgcatagcattagcaaaggagtctatgacaagtactttgccacctggtagttctgcgtattctactccctctgggtgtcactgtcatcctcactggctgggacaaggttctgagatttgtctccccagcagttgctaagctggctcagtcttggtcaggatgaatgaaacaattatctcctggatcaatgcagcaaggagcagtgaacacttgctttttcttccctaagtaggagaaggccagcccccggctgcagtggtggccgtggtggtagctggatgggacgaggggacctcaggctattctataacagtaaaagaaagagaattgctggtgcttctccagggagatacggaacctacacaccaagcaggtttttactttcaaacgggccaccaccagaaagcaaagagacctatgcctagcccagccccagaaaagtgatactttaccccaggaattccctgcttcccattggtacttaagatttttcactctgttgtgaatgctcttatttcctttactcttgcggatctgtgttggagggacatttggaaggggcccagccctggcacttgcgtgaggggacacacacagggcgggtgtgtgtgcccatccgctctgagctccacttagccggactggctgccaagccgttcttggatcagcctctcgctgagcgcccacagggtccgggccgtctcttcgctctgagcttctggtgagggcatgcagcgg

SEQ ID NO: 343536 - DNA, 1000 bp, Homo Sapiens; identical to SEQ ID NO: 337570

SEQ ID NO: 343537 - DNA, 1000 bp, Homo Sapiens
ttttttttttttttttaacaaaatgtattcatctttcttggaactgaaaaataaatctatgtacaaaacaggaagagatcaggctcttgtcacccactcctaacccctctgcagatttcctccgggatgctccgagatgggctggacctctgggaggttcccagagggtcggaagggaggtcctgctctgatccggggccagtttcgtcaggaagagggcggggctcaggatgctcataggctgggggcggagttttgtgtcccagactcgggatacgaaggagaggaaactaggatttccaaattctggaagcaggactgaagttatttggggcagggagcttggattcgcaagatatggaattctgaagtgcggaaatatactcctaggggctgagtggtcctaggctccccgggctggaggtgggacctgtgctcccttgggttaagggtgaaacctcagctcctacaagctgggaggagccctgagtaacgttggtctggctctaggtgagcggttccgaggaggagcttgggtttctaggggctgggcctttaaagactggtaattaggacccagcgtgaggtttccattggccggctgggattctgggagaagagacctatattctaacgactggggcagagccctgggttctgagctggagaaaatcgtgggtttgatacagactgtactcgggaccgggaacctagggtttgggtagaggtgaggcctgtcccctttgggctgggggcagaacatgggctcagagttgggggactaaggcggagcctgggtccccacaagcggtccgaagtccccagtagttcagaggcctttgcgctgccgcttgaggaaagacagagtgtagtcactaggggtggacactttctgcttcttcatctgcacttgcgactgtgccgtgagttgcagcttgatggcgctcgagttgatcttggtggccaccagcagctccttcatgcccttcatcttctcact

SEQ ID NO: 343538 - DNA, 1000 bp, Homo Sapiens; identical to SEQ ID NO: 160635

SEQ ID NO: 343539 - DNA, 1000 bp, Homo Sapiens
tttttttttttttttttttttttttttttttttttttttttttttttttttttttttttttttttttttttttttttttttttttttttttaagtcaaagcattgtttatttatgacatatttacatatttacaaaactgattttactcaatacatcatcctgcgtaatatcataaaatgaacaccatatcctgggaataaaaatccatatttcttaataatttatgtatagcccaacttttagaacatagaatattatcaatttggcttcccaaactacaaagtcctgtttataattttttctagccaaggaacagagtaggttcaacagcatattaaagtaatttagttaaccctgagtaattactaacttgcataattttgaatggatatatataacacactttcatctgcacttagatacttatactatcacactacctttttgtatttatccacctcaattttcaacttcattaatcttcagaagaaagaggaataaagaataggaaagtaataacagaatcattacgaggaaattactagcactgcctaaacattcagaagtctgtgacacagtttaggtctagggttgtctcaaaaacctaacaaaaggaggatcccgaattgaataatctgagcaccttgtcaactgaggttgattaaattatttttcctgcattctttgtttcctttcacactaattaaatattgtgtacaagcttataaaattcaataatttgtattaaaatacaaaatccaataacaaccaggagttcttcggaagaaaaaaaaaatcacaaaacaaccccaacggtggtgaagaactatattaaagatggcttttcctaagacagagggagaacaaaagcaaacagcactctccctccgccaaggctagagcaggaggttcaaggaaatgggcaggaagagaacagaacactcaagctggacgattagtgaaggaaactgtggcctgagactgatgatcagcatatct

SEQ ID NO: 343540 - DNA, 1000 bp, Homo Sapiens
ggagtctataatttttaataattttaaactagctacaaaatgtcaatcacttcacaaactgacagaggagacaggaggaatttaatattacatgctataatgatatttatctcacagtttatatttcattcatttatattatttttttaaaaggtttctttatcagctactaaacatctcagcaatttggtgtgcatagctctagattaagcaacaaagaattgtactgataacaaaccacaggggaaatggtggttagtaagagtcagccttataaaatttacatccacactgtttcacagcaagattgctctctccaaaacgtagccatcaaaagcagcaaacaaaccctatattacatccatttgacataatttcagccaaacatatattttgctggaaatgattaaatggtgagtgtgtcaaatccatcttttttaaaattcttttttttaaaaaaggatgattatgatttagaagtctctatatattgacaggaaaaaagtgacactactgcacttttgctggtataacttaatcttgacagtgtctcaatactgagcatgctttgttgttgttctgttgttgttgctgttgttttgtgtgtgtgtgtgttgtctcatcagtatgctactgtcatggaaagtttttgtttaagtaggaatctaaaaatctatttagttctcatgcataaatgcataaatcacatcacttttagtgcaatgcctgttatgtaattccacattgtctaatcatgaaatcataaagacagataacagccatgaggaaccaaagacggcacattttgagagattcagagcctgacactcaaaggaccgtggcagtaactctgtggaatgtcacagttttacaagaacaatactgtggattgaaagaatcaacagcacattgagcattcctaaattgttgttattcagcaaatgccaccgaggagagaaaatgaaaaatgaaactcaagacatcaaggagttagagccac

SEQ ID NO: 343541 - DNA, 1000 bp, Homo Sapiens
gtgatttaaatattttttaattactcatctacacaaatgacctttgatcaagcacaggcaaaatataagttgcaataatatctacacgtaatgtgaaggttttaaaaaaataatacaaagttcattcacagtgcacaagtgaaaacaaggtaagtttcaaatatctcaacaacatatagccatgatcattcaaaaggtaagcatattttaaagcacatttccatactgctagagctataacatagaccagcttagagaactgagagaaaaaccattactttgatcccctttattggaaagcaaaaataccagatttctttcctcagatacatacatctagaataaataaatacaaaattattaactaaagattttatcttttaaacctatactctgactctcatcctatgtcaaattcccacattgtgaggctgggaagcaccactctctgccatgttccctacttatttttatatcattcatttgcatttggaggctgaataatttgcagaaagaagtctgcggaaaaaactgtggaaaatgggaatacaaagagggcaatatcataaactactagaaaggttgactgttccacccgcaactatagcacagtgggttaaacggggaagctgcaagggccacttatttcgtgctgtgcactgcctaggtacactgatttttaaaattgaagtcctagccaaattaagtttggatatcatctatttacagttgttcagtcttccatacagagctttgtccactccactctttgcaaattctgacataaaaacaaatgattctgtggctagttcgaatttaacttctgtatatttaatatctttttgtttaaattagaatcatttctgacttttgaactacagacacaagacacagggtttactcttgagactgaattttattttctttcaataacatctgcagttgataaatacctagctttcaaggaaaaataaagcatgcttaggatgagatcagctaa

SEQ ID NO: 343542 - DNA, 1000 bp, Homo Sapiens
tcttcacgaatttattatataaaacgccctcagagtatttaatttctcctcactttaattacacattaagaagcacagtggatgagaagcctttaagatgactacagttgcacgaaggtccctttcatcaaggtagcgtatgtaccctaacagtgttctaaaggctggcccagaaaaaccccatgttaccttatcacaatatggaaagcattgtcttctttttccactaaattaaattatggtgaaaagtgccacagttttatttagcattatggtacataacaaacagttctgtctcaattatgaaaaaaattaattaaaataatcctgaaagacatcctttttctccccccaatgatttgaaagctgcatttttcctgccaatttcaaacaaacaaatcatcaggttgatctacagtaatcagttaaaacaatcagtcaatcaatcaatcaatcaccaaggcacaagctcagcacattagctatagcttgtagcaaaaggatatatcaatgtctcaccttagttaaaaatacataatccttttattttataatgcaataaaagaaattaacaacatcacatacacagaagactaggaaaggggaaactacttacttctggaaatcagtaatgtaaacctacttgtacttttccatagtacatgaaagtaacgtttaacatgttttgaattaattaattaaatttaatctgtggggctatacaatgtaattcttaggagtaatagtttcattcatttccaggtcagcttactgtatgattaagtaacacaaggcacagtagccatctttttcattatgttgcaacactgatcacgtgcctcgataaaatggctgattcaacaagatgatggcaacacgaaggggagactttggattgtctatttaaaatctaggtaataagtaagtaattaataaaaactctatcttaagtgcactttcacatgctttttgtttataataaacaaacaacaaacttcct

SEQ ID NO: 343543 - DNA, 1000 bp, Homo Sapiens
ttttgaggtggaaatatttcttgtgacagtcaaggctcttttctgattttttgttgctcatacaagcagtcccatacgagtgactttggccgataaaaacgtgtgcaacacaaatacaatcggcttcggacaagagtgcaggtccatggtcagttctccctcgggaccaccaaaatccaagtatagatttcggatgccatcatcagcagacatcttcagcctttcaaaggggtagcggtacaatatgctgctggagcctccattttcccttgagatggtgaacccattttcatagtgaatagtaagcctcacctcttggccatttaacatgcagcctagagagacttccttgatcagctcagcagcagcatggcaaccctgaacaagtatcctggtccaggatgacagatcccgatgtgtctccaccctgaagagatgcatctcaatgccctgtcgagagcctgtcctggtagcaaatgtaaggtcagatccaagggagggggatcgacatccggagccagaatgaaccaacctggtggcaacaagtgggtagctgtggcatggtgacgcccaggcatctcttgtccacggcatacagtcatagagcagcaaatccttctcagtcacagccatgaggacaggtctccattgctgtcttccaccatctagttttgcctgttttccagatccggcatgcttaggtttctagcagcaaagcacattttgagagggatgatcttcctgtccttggtgctgttctggtgttttggcgaaccagagtcctcactgccactaaagcttggtgactggggggctgcaccttcccacggcagatctgatactaatgatggcttcttgatatatggtgttacttctcggatgaacttgacctccagcagcacctccttgcccgcgcgcttcagcgcctgcacggcctggtcgtgggtggcctggcgcaggtcggtgccgttcaccgacaggatggcgtcgcccagccgca

SEQ ID NO: 343544 - DNA, 1000 bp, Homo Sapiens
gacatttttttatgacagaaagcttcttttattttgacaacacagaactttaagaaaggaatttcattgcttctgatttatttcccatttgtgacctaattccttatcacgatgggcctgcgcaacttaaaacacattgctatctcttgtggttcctgaggccccagcccagatgtcagaatggaggccagtgttccttcagggcacagacgtgtaccacttggaatgactacaaagaactgctgggattgagaacttctctcctggggtgtacaaggggccaagagaaaggtcagagctcagggggtggctcgcatgatgtacacatgtgggatcagcgtgggaaggtgacaactcggaagggtcatacaaaccctaaacacaaatgcagtactccagctgtcttcctggagtcatcctgacaggtagaggctggggagctgcaagagtgcatctttacgtgaattgagtcatatttgcacacgcacacagatggcgctccctgcagaggagtcctcggggtagaagcaggacagacaagaagccaggcagacaggagcatgagcctcctgcctcccagcatccacccaacttgcacatgcaagtcccttgactctgcaacaggtagacctgggttcaaatccccaccctgccatcttttgcacattacttgcccagggttgtttgagtttcagtctcctggggtttaaagtggggatgatgacgaggttgttgtgactgaagaagataatgcatataaatcacactgatgattactggggggctagagatgcatccttcacactcccccagagctcacatcaaggaagcttttcctatgctagggctgggggtgggtgaggagacaggctttcgctgaaaaggcatgaccagagaataaacagcaggaaccactctctcttaaacacagtgatcccaggggaggggccttcatgtggagattctcatgagtcttactctgttctgcttcagtctctga

SEQ ID NO: 343545 - DNA, 1000 bp, Homo Sapiens
ttttttttttaactcaaatggtaggttttatttcactttaatccgcctgtgagttcacgttaaaggtaagaggaatcacagccctgcaattcaaatagggttcattaaattcggcatctcctcttaactgggctgggttgtttactcctcccacagtcttggatgggttttgagggtctggtgcggtgtccggtgaacggctgcaatgcaggttaggctgccaccatgagggaagctggagggaggacctgttaacctcatggtactgtggcgacatcagccaccactacgtgtcacggggtggatgctgaggaagagaaaacagagcagagctggagaagttcgtacagtagatacagtggaagacaggtggcccagctggcagcccactgcaggggtggtggaggtcgcaatgcgctgtccccaccacatggagcttgcttgcctccgcacctctttgctggctgcagccttgctgctcagtgggcggttgtggaaagaatcggttctcagttcccattccagctctgctatttagacaccgggagacctggaaacagccccttgacaaagtcttgctctacacgtttctgtagtgaccgtccatttgaagggatagggaaatattccctcagtgtcctgctgtgaaactgttaaagccacccatcctatgaaactcactcctttgggttaagcatcacgttctcagtcctttcctgtgtggatggagtgttggcacagtgaggcgggtgttgcaagtggacgcgtcgggggtggtctgcacgggctggcctgcatagcccaggggtggagagaggggtcagactagaacctatggagacttggtgggcaacaggcctgggctcagtccagccagcccaacctctgattgctatcctcagagcccctccagggtctccttggcaggggctgtcccctatgagcctctgcaggggacaggaagtgctgactgagaactgtctctctgtgacatgcaccc

SEQ ID NO: 343546 - DNA, 1000 bp, Homo Sapiens
tttttttttttttttttttttttttccaaggacaagagtgtctttactggagttgggactggggcctctataggggcttctggtttctgggctgtaggtttgtgaggtgtgggatcttaagtcaaaggtgggggactagggcagggtatcagaaggtgatgtcatcctcgtacagggacagcagcagcaggacggtccagccgcccagcaggcccacgttgtgcagcaggaagaggagccagggccgcgggtcccgtactttcaacatcgccgggagcatgtcgcagagtgctacgtagaggaacaggccggtggccactgccaggatccaggcctcgctctcctcgctgactccaaccgcgagtgccacgtagagaccagcgaaggccgtgagcgcggaggccaggttcagcagcagtgcttggcgcacggacagccccgcgtgcagcaaggcggcgaagtcccccagctcgtgtggcaactcgtggcagaacacggccagcgaggtggccagcccggtcttccaggaggacgcgaaggcggcgcccacggccagcccgtcggcgaagttgtgcacggcgtcgcccagagtgatcatatagggcagtagcctcaactctgggctcagtctcctgggctcagggttcagcagctccgggctctcctccgccaccaggtctgcgcgggagccctcgtgggggggcttgggctgccggagctcgctgggtgccagctgcagggacacaccgtggctgtggcccccgtggctatggctgctgtggccgcagggcccgtcctccaggtcctccgggtccctgggcagcaggagattgaagaggttctcaaacaggaagaaggcgtagagcccggccagcatagccaggaggcgccaggtgggctgtgggctgaggccctcttcgctgtgtgtatgcagccccagcaccttgggcgtcagatgcaggacagcgtccccagtgagtgcacccactgccaggctcag

SEQ ID NO: 343547 - DNA, 1000 bp, Homo Sapiens
ggtgcagagcggggaggagccccccgggtccccctaccaccgctgggggaggacgaggggtccgtctatggtctgtgccccaccctcctctggttctggggagcactcctatttgctcaccatccccccaccccccaccccggaatctggttttggaattggaaggaaaggaggaatgtgccaagtatttgaaggcggcggccgtgccagggaggtcgctggggcggccggggccggtgggggggctcgaggggctgcgtcgtcctcggaaatggtgcagaaacacagctgctgccgctgccacctcctgccctgcccactgggggtccaggcctcaggaggtccgcccgggaggggcagaggcatccggggccagtggtgtcgggcctgggggggaccatggctttaggttgcatagtggtcaaagcttccgaggtactccagtgccgcctggtaacagaactggtactcatcctctgtctgcaccatggccggccgctgggttcgtagcatcttcaccgtctgaaagatgtccaccacgccttcataccgcatccgctccagcacgatgctaagcgtgatgaagacgcccgtcctgcccacgccggcactgcagtggacagagatggggccgtcctggccaaactgctccttagtcttatgcacttggccaatgaagtcgatgaagccctcccccgactttggcacaccctgttccggccagtctgtgaactggaactgccggacagtccgggactggccatcccgggcatctgtgaccttgaactctcgcaggatatactgaggcatgttgtattctgccatcggatctaccacaaagtactggtagcgggcagagcgctcggccggccagtactggtgacacttctcccggcccatctcccgcagcttggtcagcatcaccacgatcgtcgaattgttctcccacagcatgcgccagaagtcttccgtggtctccgccagcggcccctgtgtcgcg

SEQ ID NO: 343548 - DNA, 1000 bp, Homo Sapiens; identical to SEQ ID NO: 160638

SEQ ID NO: 343549 - DNA, 1000 bp, Homo Sapiens
tttttttttttttttttttttttttttgatgggaaatcttaagtagctatatttattattactttttccagcaattttgcaagaggcagaagtgtgacattgaattgagtgagacgagcgtgtgggtgggttggcgaggagcccttctcctgacgcaggctgctggcttgtcaaggaatggctggttccaccgctgggccgtgtttactcttttgcttcaaggaaaagggtttcttgagggaacaactttacctccaataatgatttatttgggtccagttgagttacgtctctcctaggaaaggtgctcagtaacttgtactcatcccatggaaatcctttggaagctacaaaatcaaagacaatctggagcttgttgctggccaggaaacgccgctccaagaactcgccactgggggtccggatccgcagtttgctcacaggctcagcattttcttcctttggctcaggaggcagggcttgctctaaggacagccggatggcctcacgttcctcttcttgttctttgcgaatctgctccaaacgaaactgttctgccatctctctctcgtgagcttccctctttgctctgtcagcctcaagtgaaaggcgataggcctcatcttgctctctcttcacattttctctggcttcacgttcatcctcgtcctttatatcttcctgttgttgggctgtgaagatctccattgcagccatgagtctcatcattaactcatctactgttgtgttcccttgtatcacattcaacacttcattagatgatcgctttcccataataatcaggaaaagcggaaactgatccgttttttgagtccgaatggtttgtgccacaacactgccaaagtgtctattgcacatagtgagaaatcttgctctgttggagtcctttgtcagatcccaagcccaggttataaaattttgactcagataagaaacaatggattcagcacaaagcatttgtgagcagaacacgttggtt

SEQ ID NO: 343550 - DNA, 1000 bp, Homo Sapiens
ttttttttttttttttttttagcagcagcaagatttattgtgtagagcaagagaacaaagctcccacagcgtggaagcagactctggtggggtgccgcgctcgccagcttttattcccttattgtccccgcccatgtcctgctgattggtccattttacagagcgctgattggtccatcttacagagtgctgattggtccattttacaatcctcttgtaagacagaaaagttctccaggtccccattcaacccaggaagtccagctggcttcacgtctcactactacctttctgtagctgctactactacagtgagtagacggcagtgctgggattcgaaccctctgtcttctggcttggaagtcttaaccactaatcgcgtcttcctttcagctactccttgggaaaggcctggaaagaagctacagcacagggcacagcggggtctaaggaccgttccgcggagctcagccagcaggactgtggggctgcaggaaaggacagtccagcccagggtcccagcttctccgccactcaggttggaagtctcgggctgcagtgctcctggggctcaggggcggataccagcaggagcgcggttctgactgcgccagtcaaaagtgaccagcgcgcccagggagatgaggaccagcccggccagccccaggcggactaggttcccccgggtgtagtcggaggagccagagtcttcccagctgatgaccagcacctcgctgcgctgcgacagcacgtagggcgcggagggcgtgtgatagtagcagctgtaggtgccgggggcgcgggcgcccagcagcgtgaagtcggcccagggctgcgcggagtggcggtactgcagcggggccgccacgccctcgcggtacagcacgaagctcatgttccgcaggcggcccgcgcagcgcaggctcacgttggcgccaggacccaccaccggcccgggcagcgccaccagcgacggccgcggcagctcctctgtcaccag

SEQ ID NO: 343551 - DNA, 1000 bp, Homo Sapiens; identical to SEQ ID NO: 159641

SEQ ID NO: 343552 - DNA, 1000 bp, Homo Sapiens; identical to SEQ ID NO: 160640

SEQ ID NO: 343553 - DNA, 1000 bp, Homo Sapiens; identical to SEQ ID NO: 246575

SEQ ID NO: 343554 - DNA, 1000 bp, Homo Sapiens
tgcattttaaaatagctaactttattgtcagtgaaaagataggcacaaagtggatttaaacctgcttaactttattggaactagctcagttgattacagaatggggtcacaatcattaggggaccacatacattttaaaccaaaggcgattcttctctagccatctgccaaccccagctatccattttacaaacacatgccattaatcacaagggaggccagaaggaggtttcatggctccatgtaacccatcgttgctactggaaaaaaataaacaaactcccgacacttgtcctactgatgatggatggcacttggaagacatatttccaagaatcgtggcaggctgaaattggtggcaattagcccacagctgataccttcctttgaaaacattttcagtaagaatgcacacgttttaagtaacatattccatatgcacataagcaattgagataataggagactgtgtagctaacagatatgagaatataattgatcaaagttagtgcatatgtatacactttaagctgccgcattatgagggtttaggcttgtcataaaaagtagtttgcacaatcaatcagtttgttcattttccaattgttatacccacccaacagtgtaacaacaaaaagagaacatgatgggtctctgggtatctttcctatggcagatgatggcagatattttaggttcctgctgtcctattaccttgaagctcaaaagcagcattaaaaggaaatccttcattaaatcaacaatcaagatacatgattttaaaagaaagctcaagctactttttatttcaaaaaaagactgttaataggagtttcatatcaagtaaagtttgttctaatgaagtttttctatacatggaacactggggtacaactgaattagaaggtcctcagagatcaccaagcagtacaagctaagacaacctggtcaccctcctttcctgaggtgccggtaaaatgcacagataggtaggagtcca

SEQ ID NO: 343555 - DNA, 1000 bp, Homo Sapiens
tgggagcatgcaggttttcaaagaggtagcaaaataaattacttgaaatgaaaaaaagtcctaggacaaactacaataatttattccaatgaaaacttccattcgataagggtattccaaatttaacatactccttgtgggaggacattttggcattgcaaagatggctcgttcaaagtgttctccattgaccagtcactctgagttggctgtctggcaattctgttcccaaggagtactaatttaagaatacaccttataaagtaaactgggttacattcagattacagattccaaaccgtaaggttcactaacctgatagaaagattctgctgtctgacaggaggaaatcagttgttattaaccagtaaccgcaagacaaatacgcagctttccctgagtttgctggtgcagggggagctttaagcacagcagacaccacctccacggccacttactgcctagtgactgcctacagttatccacctgagactcacaagcacgctgcgcttttgcacagcagcccagaggcatttccagaacacacaggacagtgcccctggggtgggctgggcagaccagagtcccagggttgcctccacaactctcacagggcaagggccttagcttctaccagaattgacacagtaaaggcaatgctgaattatctcacaaagggactgtctcaaagggtcaagtgtgaccttgtctcaaggtcaagtgtacctttgcctgcaacagggtcaataggaataattgtgacattaagaagaaaggaaggcagttttctgcaacacacagtacattatttcatttcgagacctgacccaaccacccttggaagtacatctgctgagctcatactccaggcctggtggtggctggggaatgcagggaacccacttacccttcccaccctgagcagggcagggtgggggaggggggttggctcgcaccaccccgcccaccctcccgctttaccctgctggaattatcacag

SEQ ID NO: 343556 - DNA, 1000 bp, Homo Sapiens
ttttttttttttttcttgaggtggagtctcgttctgtcacccaggctggagtgcaatggcgtgatcttggctcactgcaacagctgcctcctgggttcaagtgattctcctgggaggcgaaggttgcagtgagtcgagatcgtgccactgcactccagccttggcgaaagagcaagactctatcccggaaaataaaatgaaataaataaaatgaaacaaactgagttagcccttctgttctccacagactaagttttcaatgaaccctgtctggagaactctagcgaggaagtgaaagcggaaagtgtggtggggaagcctttctctctccactgtcctggagtgagagcctttgcctctcttcacttcactctcagtgcacgtcttcatattcctgcccggtggcaaggccctggacagccaacccagacacagggctggactgggcggtacctacctgtgaccacaagctccaaggcattactggggaaggaccacaggtaggggctcctgttgtaccaaccgtagcacctgtagatccctgagacattgaggtccacaggacccaaagagaagttggccgggtgttccccactttggtgctgtggcagagaaagttctccctccttggccagtgaaaatctatcaaatgggatgtgtgctgagctgcacgtgagggaaatattctctcctggcatcaacaccagaccccgatctgcagagaggaagggtttgccatacaagcctgtcactaccagctccagggtgtcactgtaccggaacctgtagtgccctatcctatattggcactgatagcgccctgccttgtttgcgtccatgtggtcaatgacgaactcaggatcagtctcattccaaaacttcagtcttctgcctatctctcggtacgtggagttttttatgatcatcagctgggtcaggtaagcttcacgaatggcctggcactggattttcacagatccatccaagggaatcacaggac

SEQ ID NO: 343557 - DNA, 1000 bp, Homo Sapiens
ttaagaaaaaagcctttaaaatgtttttaatacaaaaatactcatacacaattttccaaacacagctttccattttaaatgctattttcccccaactggcaagtctcaactctctatttcagtatatccctccccccaaaaagtgaatttcaagtttttaagtctaactatcaaacctggtgacagcacccagtattcctaaaaggaatctgaccttacattgtatgaagtttagacaccaataggcacatttaagtttgtatttaatttctgacggggcatttcacacctcaacagggtatggtgaggctgtgacaccccgtggacacagcattttactctactgactaacaaacagtcatcaactacactcacaggatcaagatatttggcaactgacagtcatttgcattaacttgaattataaaacaggtttaattctggaaaataaggtagtcctggaagatgggcactgcacacgccggggtttagatgtcaagacagacaaacactgcgaaggggacccagccagccatggacgggtgtcgccggaagaaaggccggcctgaggacggacagctgggttctcacttcaggtgcctgaagagtttcccccacaggtgaccacattttaagctgcccattcggacacatccccctgtgggcgcacacgggtgggtatgggtttaggtgcagatgctggtttcggatgccaaggaatcctgagggattggggcggtttttgtgttttgcttcacattaatgatggaggattgaagctgatgttcaggaagtcaccacgtcctcagaacaaagctgggcagggccgagagccagccacacccacggtcacagctgggggcgtggtcagccccagtggcgagaaaccctgcaagctcagggccgctaccccaaagcctggctccactgagttatcaacgggtattgtagagacattcaaagttagtgttacttgctcattagtttaacagtttttgga

SEQ ID NO: 343558 - DNA, 1000 bp, Homo Sapiens; identical to SEQ ID NO: 246576

SEQ ID NO: 343559 - DNA, 1000 bp, Homo Sapiens; identical to SEQ ID NO: 343557

SEQ ID NO: 343560 - DNA, 1000 bp, Homo Sapiens; identical to SEQ ID NO: 160642

SEQ ID NO: 343561 - DNA, 1000 bp, Homo Sapiens
ttttttttttttttttttttttaaaggtgaaacatttttatttagtttcattacagaggttaaatagacttttatgacatccatacaaaatatagcaatggttgtgggcataaataagaattgttctaactattctaactgattttataatgcacagctctttcagttgattacaaatatgaagtatatcacctcaggatgcagagatttttgaattctatttagcaatttccaaaagctgaagtctagaaccgaagacacatataaaaagatgatttttaaatggaaccagccaccttgaaaaatattttgaaaaacatgatttaaactttagaaaataaaacttttaatacttaagagataacatgatgcaaacgttgcttgttggcctgactttccaggactaagaccctctgggaatcaatggggctcggtgacatggcgtaacctgctactggggtgtggtctcagacacaaaatcacactggatgttggtctacagaggcaggattctctcattgctggatgactcttgaaatgaagcctttgcctttgttacacatttggctttacaatcttcattgacaaatagttcggcaaagagtagaggagcacggccacgaagagcagcaggataagcaggaacagcaagccgatgatgacccacttaaagcggcgccacacgatgaacttcatggtcttgcatgggttggtgaaccagaggaaggaggtttctggtcgatttggtaagtccagcttggggttcatgttgggttcgtcccgccccttcccggctggcctctcgtcggcctccttctcgttgaggatttccaatgtcatctccactttcccagccattacgcgggcgccatctttctctgcgtagcatggccaccatcctttcatggacttctgctcaaagagggaggctgtcttggctttaagggggttcatggctttgaggtccggaatcatgtccaacctgcatttctctggtgat

SEQ ID NO: 343562 - DNA, 1000 bp, Homo Sapiens
ttttttttttaaattcaacattttaattgtgatataacttatgtaaatactttccaaaaagtatctaagatattccactgtacaacacatcaaaactatctgagaagcgggagacaataaagtgtaaataaggcacacagtttacactcgtaattgcatcctaaactgttgaatagttgatatttacaaccccccaataacgtttttgcatcctgaattagtccttcacatcttgatatttggcataatgttcaaacacactttatacacactgaccgctccttaaaccactcacagatttaataaataccgaaaaaattaagagatttgaaggcttgatcttctatttacttcaagatgacagaagagtaggtttcttgtgatgaaatactacaagaatgaagaattaacaaactgttgtgtaattcatcagaaaagcatattaactctgctgaagtaccactgaatgaaacaaaaatgaagctgtgaagtagcaatctgattagcaggctggcttctatgtcccatcactctcgtagtcttctattattatgttttcttccatgtctccttgggctgaaaagggctggggctggctagcaggcagttcactggcactattctgactcaaaggaagagaccaggtttccggcacagtggcttgagtgggttcacccagagattcctctgcagaatgtcctccattaagctgggcttcatctccgctgtcagggtctatcattccatgttccctgtcagtcagggcttccattttcaatcttccaaagtgtcgcttcagagggagccttccaatatcttggataaaagaaatctgagcttgatttctcattggaatggttagtagagcaaggtatggcaatagctgagtttggaggcataaagctggtaggcagaagtcaggaaaaagtgcttttgctgccaggcaattttcccgatactttttatttattagaaaccactgaggtttgtgcaagggtcg

SEQ ID NO: 343563 - DNA, 1000 bp, Homo Sapiens
tttttttttttttttttgccaagcaatcaagcaaaacacaagaccaatagaattagtagacagaagccttggggacaatggcagtgccctttctgagtaagacatgaatgccatctggaggatccatttgaaactacagtgcagtaaccaaagaacctaatgttttcaagcataaaggtactttttgtgaacaggtgggcaacacaggcaggaataactaccttcattctatggacttaaattcctatttctttctagcttccagtagaagactcttgagaatattgttgttgagtgaagtactttccgctgaaatgggaaatgaacccctagagtcttacaagtattattaagcatcagtaaatacaggtcaggaagaattaggcaagagagaagcaggcaaatgtgtcctgtttgctgtgtcctgccatctcctctccctacactgcatttcattcatgagaagatgtaaatgactgatagtttagttttttcaaaggtatttacattttcataggttgaaagtctaaattaagagagagagagataaagttaaccagcagaatttccagtagatatgttggaggggctatggttgaataagccatctcctttataaaattgttgattattccttttaaactaggtctgtttcttactgatacactaactttaacaaaaatgttttaaaaggattaattcctcaaaagtctgagtagttaaaaacatctgcatttcctagtttatttctaagaagattctgatattctgagggcatgtcatagagtcttctacctcaatgcctctcaaatatctcctattaaaaaactgtttctagggcaggcgtgatggctaatgtctgtaatcccaacactttgggaggctgaggtgggcggatcacttgagttcaggagttcaagaccagcctaagcaacgtggcaaaaccctgtctctacaaaaaatgcaaaaattagccaggtgtggtggcacgcgcctgtag

SEQ ID NO: 343564 - DNA, 1000 bp, Homo Sapiens
tttttttttttttttttcttttcaacattggctggaattgagtagaaaaaagtccacgatgcctcttcacatgtgtcatgaaatatgagaaatctgtctgattctagatactatttctttacgacacaatgggcaggtctccagctgcaaggcacaatccatgcacaggtcactgtgtccacatggcttcaattgtgtgtctgctacctcatcacaacaaagggaacagcagttttctcggatactgacttgcttcaacagagcaagacgcctgtgccttggcaaaatgattttttcttcagctgttaggaaggcgtagtcattaaaagtgctaaatttcatagatggtgggtatttgaatggttttgctccaaaattgaactcacattgttgatatgacatgaaactagctgcagcaaaaaatccagatacagtagatgaaaagacttgcttttcaggaggcagctggttgccatttaaaaagaagatcatttgcttttcattcaagtctaacagaaatcctactgtatctccttctttccagcatgggtgtatgtgaggcttacttctggcattgtaccaaatcagctgccggcagccatcatacgcacaggagtattcatcatccccaatgccgtagccttcatgattgaggaatttgctgtctcgagtggcccagccaatctgcatgacgccagaagtgaccactgttacttcatagtaccataccccggcatccacacaaaaggtgcaacgcacactttcaaaagaggaggcatcacagcgagcctctaagccatgaggtgagatcttcaggtactcgctgacatcattgctattcagcatggccctaatgctactcaagttcactttctcataggtcagctgtctaccttcttttaaaaagagattgtctaagctccactgggcacagaaaccaacttgacgtttcagataatcaggatcattagcccaggactccaatgtgacaagccggtca

SEQ ID NO: 343565 - DNA, 1000 bp, Homo Sapiens; identical to SEQ ID NO: 160643

SEQ ID NO: 343566 - DNA, 1000 bp, Homo Sapiens; identical to SEQ ID NO: 160644

SEQ ID NO: 343567 - DNA, 1000 bp, Homo Sapiens
tttttttttttttttttttttgaaatcaacgtgcttctttattttttaaactagataggctcattctactgtcttctccagggctcttctatgaaacagttacaaacctacggccaggccaggcagtggctcacacctgtaatcccagcactttggaatgctggggcaggaggatcacttgaggtcaggagctcgagaccagcctgggcaacatagggagacccccgccccccccgccatctctacataaaatttaaacattagccaggtgtggtggcctgtgcctgtagtcccagctactcaggaggctgagatgggaggatcgcttgagcctgggagttcaaagctgcagtgagccatgattgcaacattgcactccagcctgggcgacggagcgagaccctgtctcaaaaaataaaaaccaaaacctactgccagtttccccagggcttcatgcctcagcgctcccttcttgctttgagaagggaaggggagctcaggttccggagctggagggaggagtccaggaaggcctggggtaaaggagggcttaggggctaagctcggggtcggggccaagtggagtgactgcgctcctctgggggaaggaggctgggatggcccacgggaggacagaggggaactgagggcccacaagtgtcctgctccccaagtctcctggcagcaacaggcttgctcctcataagtcacaatgaggggtgggctgaggacaagaggagctggggccatctcagggccccagggttggagctcactgaagtcacatgaacacctttctgttcttcaggaggggcccaggcagccctcagcacccaggtgagaccagcgcctggtgaatgggctgagtgggccaagtgggtgggctggggggctggtactcccaccacctgactccagaggaggagagggctctgcaggggatgtggactggcactcgcagaaccccaaggcgagtgaggtgggccctcaggagcgctgg

SEQ ID NO: 343568 - DNA, 1000 bp, Homo Sapiens
ttttttttttttttttcccccgaagtcaagtcttaaagcatgttggatttcagaaacatgagtttattcatatcttctggactgagcagccgcctccgtttgattagaagcgcttgttcacacatatttacacacccgcttctggcgcccacggccggaaccgccaggagccagaaggcgagcttggcgagttttgtgtgcttttgggtaacgcacgaccagtactggaagagatcaggggtagcctggaagaggggctcctgcaggtaatcgtacacttcatttttgcctagccgatcatcttcctgagctgcggggttctcgacggcagcagagcggggcttcttggcagcgggctcgaagtcggcctcctcggcccaggactccttcacctcgttgatgagctcacagaccttgccgatgatctcctcgtgctggtagggtggcacaggccgcagcttctgctgcgggtccaggatcatggccaccttgtgggccgggtgcaccttgaagttctccttgagcgcctccaggaagaggtggcagagcttgctgacagtgcctgcgtcgttggccttggccgtgaacagcttctccagcctgacgtaggtgggcagcaccagctgcagggtgggctggctctcgttgctcagctcgatgactgcctgcttcaccggcgtcaggatggccgccaggttgctgagcaggtgcttgttgaggctctggatgaggttcatcttcttggcccggctgtagaactcgcagatctgctcatagcgctcatgcaccagcaacagtgagtccgtcaccgagttccagcagggtggtggagacgtctcctccagcgacccgaaggtctccttggccaggcccgtggagcccgccaggtcctcgcacacgttgagcagctcgacgacctcgtgcatgctgcgggcctgcagtgtccgcttgctcagcacgctctgcaccaccgagttcaaggcacaggctgagcagcgaa

SEQ ID NO: 343569 - DNA, 1000 bp, Homo Sapiens
ttttttttttttttttttttttttttttttaaccagtaatttcgggtttattaaacttattagaaaggggccatctgcagagccaccacttactgtccactcattactgaaaactgtttccatagtgacctaattatactttatttaatgcaactttaatgaatgagagaactttttttttttttttttttttttttgagatggagtctcgctctgttgcccaggctggaatgcagtggtgcgatctcggctcactgcaacctcctcttcctgggttcaggcaattctcctgcttcagcctcccaagtagctgggactacaggcgcatgccaccacgccgggctaatttttgtatttttagtagagactgggtttcaccgtgttagccaggatggtctcaatctcctgacctcgtgatccgcccgcctcagcctcccaaagtgctggggttacaggcgtgagccaccgtgcccggctgagaacattttacatatatgcgaaatagctacccagtcctgatcgactagagcactgagtgacacacattaaatgttaagtttgaaaagactgtaaaacattcacatatgacagctcttagtgaagtaagagcctctcatattccataattgtttgaaacatccaggagagctaggtcccgtatctcctctagaagtgtgtataggctccttccctttgtttggcgatattcttgatattcctcctgaatgatgtttactttgacttcttgggcaagctgagcttcttccacagatttagttacttctttcactaactcactcttcagcaagggggaactctgatgaataagttctgtatttggtatcttgtatggtttgttactaattatttcaagtctgattgtatcagaatggcaacgtgaggcctgtatggatattcttacggttacatggtcaaacaaatggaacgtaacagattccccatctgttgtagtagaggtaattttgttttgaaatcgttg

SEQ ID NO: 343570 - DNA, 1000 bp, Homo Sapiens
ttttttttttttttttttttttttgaggcagagttttgctcttattgcctaggctggagtgcaatggcgtcatttcagctcaccacaacctccgcctcccgggttcaagcaattttcctgcctcagcctcccgagtagctggcattacaggcatgtgccaccacgtccggctaattttttgtatttttagtagagatggggtttctccacgttggtcaggctggtttcgaactcctgacctcaggtgatccgcccacctcgggttcccaaagtgctgggattaaagccaccacacccggccacctttagactcttgaaatgttacgctgactcacaattattcccatgagttcaaaagacagaactaaaggacagtcctgaataatctatgactacaggaaaacatttatttacatgccctctacaaaatggatttacaaaacatagtaactattagggtacatgaccttgctcctatcttccccattgtgcttcttctctatagaaaatccaatatgaaatgacaaagagtactgtactcagaataagaacttcatctatcataaatgtacacataaatatcagtgaattgtcatactcaagactcagattcaggaacttcttcatcagggcagcagtaatattccacaaaacatatttgtccatcttcatttctaatcatatactgtaatgaaaggaagcctctgttatctgtccgaatagataccttacaagataggactaatgcctttgtagagggtttcagtaaggaaatcttgtatctgttgacttgggtctgattacaatgaaatgcttccatcaaatcagaatctttgggatagtcaaggtgggaacttcctgcatttccaaaagtagataacctgaaataaggcttgtcaggagacatggtaatttgtaggacttcactcgtcatatccaattcagaaaatgcttcacggagcccctctgactgcagaataattttattaataacattggt

SEQ ID NO: 343571 - DNA, 1000 bp, Homo Sapiens; identical to SEQ ID NO: 160645

SEQ ID NO: 343572 - DNA, 1000 bp, Homo Sapiens
aggtagccaaggagagatttaattgtgtttgatattacacagcatgattgacacaagtgatgattccacagttcagataacaaaatatttacatgtattacaaagatgagatttctacatagagattatttctttaggggtctccaaggtaatgaattcaaatatggtggacctgtttggaagtttattagatccacataatttggaaaatatgaaagcactcagatcaatgctaataattactgaggcactaaaacattacattttaagttaaggtgagtgctgcaaagctctcagccattcctgatttgtttgtagctacacacctatactctccttcatcactctttactaagcttgttataaacaggttatggaaccctgtgccactttcctcaacagtgaaccttcttccttggactaattttccatctttgtaccagtaaaccgtgggtcttggagagccacgaactaagcactgaaaatatgctgctgtacctattggtgcataacagtcagaaatacctttgataaacctgggaggcccttccaccacctgaaattcaaaaaaactgtctgtgtagttgctctttaagaccaattcttccattaaactgcttaaagtcactttgcttttctttgctatcacagcaaatatttcagaatctcccatggtgaggaatccccgacagatagcctctcctacacaattcacagctctgcacctgtatgttgcactatcagaaagacagacatttcgaattttaagagtgtgacttcccttctcctcgctaatcacgtatttaatattatctggctcaatacacatatattctttataccacttaacttcgggagtcgggatccctatgactgaacatttgaatacagcatctgaattttctggaattttaaaatcacaaataggcattataaagcgaggaggcatttcaaatacttctaaatcaatttttagttctttgtcttctccctcccttga

SEQ ID NO: 343573 - DNA, 1000 bp, Homo Sapiens
taaactatagtttctttttatatcaaaatgtactcttgaaaatgtgtttggcacagtgctaaatcatatatagttaatactaaatattgcaggatacaataaaaccctggagttaattgtttacaccctcttatgggaatgaaaataatagataccaattattcagaagtcagcctatacaaactgtataaacaatattttatgttttgctttgaaaaccagtgatataataaattttacataaaagactgtaaaataatataaatggatttaaacagatttttacaataagaaattcaaatggaaacagacaagtaacaaagagaagtaaaaaaatttattgcagtattcgctccaccagattacctggggatcccttttcttgtattgttttcagggtgacctaatacatcaaaatctacatttacaaaaactccttctgcagataggtcatagatactgcatgcttttttttttttcaacagaataaattatatatccaggagattctgccattttacagcctggaaaaaacaatgcttccctggaaactgggctaagctaaagaaagccatccgctgctaggttaaactccaagaacactttattaagaacattaacagactaatttccaacattcacttgtttattttttttaaacagaaagttttttttccaagatataaacaatttttgttaaactataatacagtgggagtaaaaatgaactgagaatctgtttctgctgcacaacagcgaagggagctcccacaaaaatgtttgcccaacatttccttcttttgttcctgcatcccaggttccacttactcttcataaaactgatttttttttgccagaatgttggtatttcaagtttttctgccttttaaaaaaattcctgtaaatttggctgcatgtacaaattcattagctggaagtcccatccttggcggcatacagggatcgtaaagtctgaacaactttattagtcagcttatta

SEQ ID NO: 343574 - DNA, 1000 bp, Homo Sapiens; identical to SEQ ID NO: 160645

SEQ ID NO: 343575 - DNA, 1000 bp, Homo Sapiens
tttccattttggacattttatttatagaaatttccagcagagccattgttaagtacctctgtcaggagatacctgtgagaacctagacgggaaaacagccacaggttgatctgcatctgttcctccccaacactccacacacaccagaacaggaatagccaggcaagcctctgggtgcccggtgatgcactgtctgaggcacagcccagcacgtgcttcctcagcacatgctacacacacagatctggacgaatgacagaaacttcacagatgtaacttccaagtgcgacctcaaatgacaactttctcaggtggtgcctggataggaaaggcaccggaacagaatctgtagaaaaccaaacctatcatgatcagcattcctacccgacgttaacctcctagactagctgaccttatttattttgaaagcaaatcaagtgtatacagtctctttttaaaaaactgtgtaaacgttgtaaagtttttaggggctgtttataatctgaagatttataaaaaattactggacttgttaggactataaatactaaccccgcctcccccatgaaaaaagcaattgttacaaaaatataaaaaatatactagcttctacgatttaaccttttcaccagaaacctcacgaccctgggactaatcctggtttatataccacacagcaagcacaagtgcaattttctccattttttaaggaagaaaaagttttagaacattcccttttgttatttgagattgtggctactttcttcataggggctgtgatgtcggtgggtaaggacagttgggagtttctgtttcctctgcacggacccggtgtggaaatcaagcatagaggctgctgcctcactcctcggcctcttctgctttctctccagcttctccaatcccattttgggacatgcggggtcccaggctcctgagcttccctaacttcccactggggaaggcagggaggatggggaagctcccagtgagggaggcg

SEQ ID NO: 343576 - DNA, 1000 bp, Homo Sapiens
aagtgacagggtcttgcactgttgcccagactggagtgcagtggtgtgaacacagctcactgcagcctcaatctccctcatatcaagcaatcctgcctccgcctcagcctccagagtagctgggaatactggtgtgcaccaccatgctcggccaatcatttttatttttaatagagacaaagtctctctctcttgcccaggtcttgaattcttgagctcgagtgatcctcctgcctcagcctcccaaagcactcggattacaggcatgtgccaccaggcctggctaacttttaagttttgtagagatgaggtcttgctgttgcccaggctggtctcgaactcctggccttaagtgatcctcctgcctcagtctcccaaagcactgggattgcaagcgtgagccaccgcacctggccagtttatttttatttttattttcttttgagagggagtctcactctgtcgcccaggctggagtgcagtggcgcgatctcggctcactgcaagctccgcctcccgggttcacgccattctcctgcctcagcctcctgagtagctggccaccacaggcgcccgccaccactcctggccaattttttgtatttttagtagagacggggtttcaccgtgttagccaggatggtctcgatctcccgacctcgtgatctgcccgcctcggcctcccaaagtgctgggattacaggcgtgagccaccacgcccagccaccagttttaaaaatctatacaacagggataatatgaaatctatgtcacaagcctgttgggatcatagtacacatacagtggtaagtgtggtgcttgcctcaggtaggcagtcagatgaataactggatggtctccaaatacaccaagagctcaccctcttgcagtgctgtctgcctggaatgttcttttcctctttcactgccagattcctacttttccttcagggactaccttctctaggaagtccttaactcctgatctcccaccatggagg

SEQ ID NO: 343577 - DNA, 1000 bp, Homo Sapiens
ttatgaactttatttcaaatatattttcacacattttatctaaatacataatacagaagcctgtgtgacttgggcaatgtggccaggagggcctgagactaacaaatccaccttggcaaaaggacataaaatacgtcttatggtcagaaaaatcaacattttgtgtatttacttagtttacgaaaagtactgaaaatgctattattagctgaatttgtgatttccttttgaaattctgagttatccttatttttcccattttgtttttgcaccaaggagactgcagtcaaataaaacagatactacacgcactcgtcggggcagccgtactgcagaagcacgttgatgcactcctggctggaggcctgccgggcgtaggtcagcgctgtgttcccgtgggcatctcgggccatgacgtccaccccgtaccagatcaggagctgcgccaggaccacattccccttgcggcaggccagatggagcgccgtgcagccgtctccctccccacaggtctcgttcacctcctcacgggagccatgtgccagcagcaggatggctgtctgcaggtcctcatcagcggtggcccgcagcagctgctggcccagggacagctcagtgcagggtagtggggccagaaagagcttctcctcatatttggaacggatccaccgttccttctcttccctcgtggacttttctgagggttttgtctgcccctggctgctcccttcccagatgctgttggctaggtcattgccaatagatgacataaccttcctgagctcaactggccagtcatccagctccagagatcgcacacgggaaaggcgggtgccaagactgcggtggatacctgagcattcaatacacatgaggactcccaagttcaaactggcccacttaggattctgggtctcacagtccacacagtgggcgttcccacgcatgttttggatcgactgcagggccatggccttgctctggctggtcagctgggact

SEQ ID NO: 343578 - DNA, 1000 bp, Homo Sapiens
ttttttttttttttttttttttttgtcactgaatgcaaactttatatttacagtcagtaagtttataaatatatattacattcttacaatctacagtacattctacacgcagatggatttggaagcgggcagcggctgcagtattcaacagaacatgacacaggtaagaatggaaagaaatatgaggacgttactgaaagcaaaggattctcattgaaaaggggtgacagcttaatcacccaaccaaacaaggtaggtaagcttgcggacaggagcaggtgacttactggctgcagaaacctcagtctcaagagcaccacagttgcaggggagagggctaaggttgggagggtaaactggtgaaatttacacacacatgatctaaagagaattcaattctatggagaggaagaaggagtaaagacacacactcaaaattacagagatgagatggagaggaagcagggagaagataggttcaaaggaggagagagatacagagacagacacacagagagactggaaaacagacaactgaagagcagagagagagagaaaatgaccagagggaaaaatagaagatcaattcaacagcacggcctcttctgcccaccacccgctgcccccgaccatctttcgcaggatcctatctggctggcaatcacccaacacaccattctctaccttggagtgagcgtgagatgaggcaggaattctctgatgtatccttgcccccatcttcataggcttcataagtgaagggattcagggatatccagagtcatggctggtcttaagcaatgctgaacctttcggggctgactgcaggaccaagtgcttgcaaacctgcatcttcaccacatgcactgatgccccttatcccttcgcacctccaagatgaagaaggtttctgtgctgtccggtgtgtgtgaggctgggcttcctgctggatccaccactttcacacccagaacccccccaactccacacgccctgcacg

SEQ ID NO: 343579 - DNA, 1000 bp, Homo Sapiens
agctgttcttaaattttattttccaaaaaatggcattttccaggtgccccagtcctcattcctaaggtcccacctcagttggcacctgtgcgtgtatatggatacactttccccccagggccctgcctggtatgggccagggcagcccatgaactctgggcctcaccacgaggttctgggtgaggccctcgtcccgcctcagtgctggcccgagctgccgagccagggccgcagcccccgtcttgcctctgtctgccggctgctcccggggcctgatcctctggcccccactgggcctgggctgcacatggcagctacctgctcactgtcctcctcactccctggcacacagcttcagggtggaccaatcacccaacgtcagattcggcccgcaggctaggtctcccgccacttcttcccgttcagcacctgcagcttctccaggctctgggtcactaagcacagtgcttgccccatctcacggacacggtcctccagggctcccgagagctcggggaggctcatggcctgcagggacgcttgccagcccttggagtcagctggggggacggctaggcccagagtggctgcaccagggggctggtcctgcctcactcgagatgacagctcagcttgacaggctcgcagctggtccaggacgagggcagcatcccgggccagggcccacgtctcccgcagccgggcctggaggtcctcgcgggcgcggtcctgctccagcaggcagctctccaccacggcgcgcagctcctgctcctgacacacctggccccgcgtggcctctacctcctcgcagcgcttgtgcagctggatggcgagctcctgcatctcagcctccagccggtcggcgtaggccagctccagggcatccccgggtgggcgggcactgctgtgccagcgggcaatggcggacgtcatcttcctcttgggcccaaacagcgtgatgccaatttccttcaggtcgctctcagtgagggtcaga

SEQ ID NO: 343580 - DNA, 1000 bp, Homo Sapiens; identical to SEQ ID NO: 160646

SEQ ID NO: 343581 - DNA, 1000 bp, Homo Sapiens
gaggccacatgagaacactttggagaagtatcttttttttttttttttttttttttttttttgagacggagtcttgctctgtcgcccaggctggagtgcagtggcgcgatgtccgctcactgcaagctccacctcccaggttcacgccattctcctgcctcagccttccgagtagctggcaatacaggcacccgccaccacgcccggctaattttttatatttttagtagagacggggtttcaccgtgttagccaggatggtctcgatctcctgaccttgtgatccgcccgcctcggcctcccaaagtgctgggattacaggcgtgagccaccgcgcccggctggaggagtatcttagaaaggcctggactgggtcctccccaatccctcaagggaaaagcagagactaaatcagcatcaccccacttacgtgggtgagagataggggcggtgcaccccaccctctccacctataactatgtaaggagaagagggaagggcggctgaactggaggacaggtccctgggggccgcgccgggctgggagacggggcatgatggccaaggtcgtccctgatggcgtccagttggtcctgaaggaggcggatgcgctcgtccaggttgcgctgctgggccaggacggcggccttgcccgccagcagggcgcaatagacgcgcagctcctccaccggtagtgctcgcaccagcacctcccgcacggcccgctcgcgccgcgctacgtgctccttcagctccttggcgtcctcctcctgccgctgcaggagccggagtcgctgctcatcagggtcgctgtctgaggccgcccgggccagggcgcggcgcacgcgcgccaggcgactgcccagcagcagcagaaggccaagcacgcgctctaggtcggccatgaaccggctgaaccgctccagctcctgaggggcacaggcctggcgcactgcagcctccagagccgcttggcgcctggcccatgcttgtgcctccc

SEQ ID NO: 343582 - DNA, 1000 bp, Homo Sapiens; identical to SEQ ID NO: 160647

SEQ ID NO: 343583 - DNA, 1000 bp, Homo Sapiens
tttttaatgagacagagtctccctctgttgcctaggctggagtgcagtagcgcaatctaggctccccccgcaggttaaagtaattctcctgcctcagcctcctgagtagctgggattacaggtgtgtgccaacacgcccagctaatttttgtatttttagtagagacagggtttcaccatgttggtcaggctggtctcgatctcctgaccttgtgatctccccgcctcagcctcccaaagtgctgggattagaggcgtgggctaccacacccggccaagagggattttctttaagcaagctttcacagtagtggagttaaatgatgtgggctaaaaggtggaggcaaaaaagccaaaaagaaatgggaaaggacatggcaggatgggaaattccaacatgagctaatatgagtgtgagaacgatcatttgcaggagagtgaaaatctcccgcaaaggtagataaagagccactttgtgtgtccagtgagaaagtggactgtgagtaacctataagctgctcattggaaacaagagggccctcaacaacgttacaaaggagcagatcatccttctggtctcttgctcctggtgcttctgaatccacagcaaaccttggcaggaacatgcttccctttgccacccagaggtgctctgagaaaacactctaactcactaggaggtggagatatagacctttttctgaactgcttctcacatgcaggggaaaataaatcaaagagaaggcctaaaagaactggaacttggactaaattaaagaaaattaagaaaaaatgagaataggaaggaagtttttgcaaacaaggaaaaccactatttttttttctccccatccaagataactttcaatagtgtattactctcaatatgttggtggcaagcttggttggctccagacaaaaacttgtaatacccaaggagaaaaaatttacctaccgctgctgatggcattagtgaggtcagcccaagccagcaacctcc

SEQ ID NO: 343584 - DNA, 1000 bp, Homo Sapiens
ttttttttttttttttttaaatgagacatagggtttattgaggacttagatacagggcagtccaggagcggcaggctggacaaaaaaaccactatcatttgaaagaagcatgcagtttatatagtattttcacttatcaccctccgcctagctcaaaacaaagggcctcattccaaggaacaggccaggggttcagaaacctccaggttggccactcctggatttcttcgtttggaacgctgaaccaacactcttcttagaccacagggtcattcttagggtgtgcttgagttactgctgtcagatatatctgttatacagtgtcgaactcctggcctccaggatgttcttgccttagtctcccaaaacactggaattaaaggcatgagtccctgtacatgacgagatgggcttttattaacctctttgttagtttcatcaatcgagaagagaggggagggtatgcaaaataaaaatgttagaaaatgggccacactttacaaattgagattatgtctccagttaaatgagttcccctattgctgtgtaattcacaagaaattctccaagagggagttaccaattcaacacatatttacccatgacttccacggtggctcttctgtaaggaaatgcttgaacccaaagagagaacatgcagatcataatcagttcatatttataatcttgggctggaggcaaatgcatacagtttaccaaatatgaaaaggtgaggtgggcaaagggaaatgcccttgagatccccgggaggctgaggcaggagaatcgcttgaaccctggaggtggaggctgcagtgagctgagatcgtgccactccagcctgggcagacagacggacattcaattcctctggccaacgaaagacaaccaaggtttacttccagaacatcatggggtgaatgaatgatgcacagtgaacacctgcctcgtggccgacataaaatggcttttgccagataaccgacatcatgtctggcaa

SEQ ID NO: 343585 - DNA, 1000 bp, Homo Sapiens
caaaagctgacgatttttaatttaacagaaaagaaaatgaaattaatttttataaaaatgatccaagtgttcaatgcacaaatttttctctcaaacagcagaataagatgcacccaggaattctcatataccgcaatagaatgaagaaacagtactttcagagaattatctttaggtgaagaaattcaaactgtcaagagtaatatactgtacataaacatatacataaaaagtctaaaaaccaagctgtgacaagggacctagaactgaaacaaaatttgagagaaacttacttaaaagcatttgtttcctgtaatctctacaaataattttagaagcagagatttctgcactcaactgttatgactaatacaaccaaaaacttcacttaatggcattttgtgtaatggtgccgatatccttggtgtattaattttttgacttatttcctttttctttttcaaattcagctatctgattaaatatattcagtaaattctgaggtaaatttttcttaacactgctttctgagtgttctttgctacttagtgcatcttcttctggaacctctgttttgatatcctccccataattgtcctctctttcatattctccttgatttgtatttaaacggtatctttgctcatgtctactgaaatcacgtgatccagagtgagcgtattttttgtatttctcaactgacttccaagagtattctgagcttgctggtgaggtagaatgcctcacagaacctggttcccaccttctatagtgctcttttcttccctctatatccttttcaaatctcctataaccataaatcttgtcctctgaattcctacagaaggaatctgaggaatttcttctactggaaaaatgtctttctgatttatatggcttttctgttttgctactacctgcttgggttttatagctgttataaaaatctcttggatcttcagacctacctccaaaatcatccggtatttcaagtgaagat

SEQ ID NO: 343586 - DNA, 1000 bp, Homo Sapiens
atttttatcacctctgtttaatctcgcatcactccagcggttaaccttttgcagaagatgaaggaaatcggaaaacaggtcaggccacctcgcaggtgcaccagccaaatccccacagtgaacgccgagtggggctgactgactgttcatgaatggccacagcaatattgtgttgtctcacattccctgccacgtcccctccccgtgaacctggggtggggtccttgtcactgctgccgtggagtgcaggaaaggtgacgctctgtgacgtgaggccgagttaggaaaggccacagagcttccatctgaccctcccgatgtccaccttaggagggcaaccgccatattgtgaggaagcccaggtccctttctgaaagtgaccctctttttttcgtctcccctctttattctggcacagttacctcccaggtcactgtcatgccctttagaagccatgcaaaagagaagggtatggatgaaggtcctaatgctacatctgagcttctctgaaatcaacacatacttgtccctttgcattttccgggactgggaccaggagcctgctgtctggctctggctgccctgtttgtcgggtttcctcacggtatggcagctgccttcctaagaagatgcccctcctccatggagagtctcacgtgggcaggaaccaaggcctgagattcccagccaaattccacttggcagccgtgtgaacgaacactccagtcgagccacaggggcaaaccgtctccaccgagctctgcccaagttacagattcatgagctagactgtggtgattttaagccactaagttttgggtggttgtttgcagcaacagccaccaggctccggctttcaccttctgttactgcagggtgctctgccggcaccttccattggtcactttctgaaaggcctagctcttcatctcccctcccaggtcactgttacgcctttttgaagctacgcaaaagagaacgggacgaagatcctaatgct

SEQ ID NO: 343587 - DNA, 1000 bp, Homo Sapiens
aaacgactacttaacagtttccttttttgtttgtttgttttgagaaaacctgtgctagaaaggcactagagaaaatgaatttcctcactcttgtatgtaacaattatacattgtgttagattctaaaagctaacgaagttgacgcacatttggataaaccatccgaatgatttagactcatctagtttcattttaaaaagcaaaccccaagtcaaagggagggcaggccacaccaggggagagccgccagaccgggaggtcacacctggtcagcccctgcctccaaggagctccagctgctccaaccctggctggcccgagcaggtgacagggcagtggccgggccccagtgggggctcactggcagcagctgtgggagccaagcctccgggagacctgagtgaacgagacaaaggtgaagttctcacagttttccagcttgaccttcttggctaagtttgggacaattccccgaagagagcgcagccccatcctctgctcctcataccacacgctgcccatgtctgtggcctccttcctggcagtcaggtagaagggggacttggcctccatttgggtgggcggccggtggatgtacatgtacttgtagaggaggcagtaagggcactgtttgtgtccccgggaatgctcatggtagatcttcccgtgacacactctggtggagccgctccgactctcccgcttgacgctgtccgtccgggcaaagtagggctggttttgggggtctttgagcagctcgatgtcaccatacatcagatccgcatgctcctgcagcgtccgcatgttcaggtactggctgttgtacttgaccacagtggacaggagagtgatagggctgtcatcccccagacaccctgcctgccacatctcctcctcgtcagaaagggagaagtagacgatgttgcgagaacgcgcgcccgacatgcctgccttactcagcacccacagcttctccttgagtttcttggtggaggagctg

SEQ ID NO: 343588 - DNA, 1000 bp, Homo Sapiens
tttttttttttttttttttcgtggcttaaaacaacaaccattttattatatctcatgtttttgtgggtcagaaatttgggccaggggctcagctggtcaattcttccattctacatggcatcagttcaggttaccaagtcgctcactggcatttagctggtggctggtctggtggatccaaaatttcactcaaatgtctggtatcttggtggatgtcaagaagacagggttcagcaggtgcctctccctctctacgtagtttcagggcctcttcatgtggtctcttcagcaaagtagccagactttgtaacaagacagttctgtcatttcatgagatgaagtaaccctaccagtaaagtctgagtcaagaaaccagcacagcagtacgtctaccatattctactgggcgaagcagtcacagagggatgtagattcctgtatacaacagagggatgtagattccacctcttgattgaaagtgtgtcaaactgctgcactcttatatgaccatgtcataaattaaaaaattatagcacagagcagttaagcgtcttgtccagtatgacacaaagtgatgggatagggatgacggtaaatgtctttttcattcttataacaggattagtttttagaacaaatatgctgaagtttcaggtttgagtgatgatggactacaatacattgtcacactcttttaatggtataaaacctctaatgccaacgcagttgcatgtatggagcaaaatagattaattactacattcatagaatgttctataacacagaagttgaaaagactttcttagatttttacattatgaattttcagatgatgagtaaggtgtgaatgttgcctaaaggccttcttacattccttacattcatagggtttctcaccagaatgaattctcagatgttgaataagggatgaattaagtctaaaggccttcctacattccttacactcaaagggtttttcgccagtatgaatgctctgatg

SEQ ID NO: 343589 - DNA, 1000 bp, Homo Sapiens; identical to SEQ ID NO: 160648

SEQ ID NO: 343590 - DNA, 1000 bp, Homo Sapiens
tttttttttttttttgcatgagaaaatatttattaagaatttagaaatgaatttcatttatactcgtatataatttttattatgacgataaaaataacactgtggtaaataaaaatttaattgtacatttaaaaatttttttttaaagtgtagaattggattgtttgtaaaacaaaggagaaatgctacagatgatggatgccttacttaaccctgctactattatatattgtattctcctattaaaatatgctacaggctgggcgtggtggctcaagcctgtaatcccagcactttgggaggctgaggcgggcggatcacatgaggtcaggagttcaagaccagcccggccaacatggtgaaaccccatctccactagaaatacacaaatcagctgggcatggtggctggcacctgttatcccagccacttgggatgctgaggcagaagagccgcttgaaaccagaaggcagaggttgtagtgagccgagatcatgccaatgcactccagcctgggcgaaagagtgaaactcagtctcaaaaaacaaacgaacaaacaaacaaaagaatctctctctttgatgtagcaacaattaaccccatgctttcacatgtgaatccaataggaatgaagaaacaacaggaaataatttcagagttgaatgatgacattattcaattttcaaaaaatctgtaatatttttcaagaaataaagtatactttgaatgtaattataactctgcaaaaaaccttctgatcctcttaaagttctatacaaataacttttctaccaactttagtttcagattttctatacttagcactctgatttagtatatctgaagtgtcagtaccttatatatttctaccataaattctctgatatttgcatagacttaattatggattaaatattttacttttactgcatctggaaaaaatatattctagtataactgttgatttctaagctgtagtttttgaaaaattgtttttcca

SEQ ID NO: 343591 - DNA, 1000 bp, Homo Sapiens
gacaaaaagaaaaatgctgtggctagaggacaggggtggagagagggaaaaaaaggacaaaaataaacaaaacatcaaatatgaaaattctcagagataatgcatttataaacacagaaatggttacaacaaagatggccgtgatgagtgagtataatatatttatatatatatatttatatataaatccgtgtccggcatctgactgtggcacctagggagctaagtccagtccttgcgtttgccttgaactctcccttctccgcaacacccctgttttggagtttcacagataacacaaagcctcccacagctccttgggggtgggttggggagactgagagtatagggtctttgtaggcagagaaggagagaggcttcaaggaaatccgtaaaaccataacacacacttctaagccacctgtgaccaacttgggaatttctggccccttggggaccacatctcagcccttgcccccttcaaataaaaggaggtctagcccctaccccaaatctccttctaccagcagtcaataggaagcaaagtgagacgatgtaggggaagaaatggctctcagggactgaggcatttgagaaacctctgttcttttgcaggcaagaatagaacaagaggctggttgcatttggggctcccttttctctgttatctgggagggccagcctctagtcttacatcagcccaaactttgaggataaggagggtaaggatagggtaagtggccacactggacaaggttctatgaggtcatagcaaatccttcccttgagcaccgacccccagttttagaagctttgcttgggaggggaggctgctggatgacaccatcagctcagtattcctttgcaatcaggagggctgatgttccttttgaagaagagttcagaaaaaggatggtatcctgtgaaggaaagccgtgacagaggcccaaggagatggagccaaggcctgtcaaggaagaaaaggacttttcccaccaag

SEQ ID NO: 343592 - DNA, 1000 bp, Homo Sapiens
ttttttttttttttttttcttttttttttttttttttgatttttcaagttacatttattactaatataatttcaattttccgtatgcatatttcaaatacagtcttttgtgataaacagaagtggaaatgttaatctatttaacaagagaacacaattttttaaaatagaaaagtgtggaccatgtagatattagtactttgaatagaaatctaatgtgaaaatttactttctcttaaaaaaacaaatatttctggaatttctctctagttgtaataactgtgcctgtttgatataacttttttttttgcatatacatacttgagccctaataggttggccctttccaatgtgtataattgtgccaaaatataaaagagacatattcagagataaatgaacaagaatccacgcatttaagaaactcaaaatacaagacaaattttaaatcatcttaatagatatttcaaacacatgcattggtataacatttaaacctaagaaggaggaaaagtgccaaattagtgtctctatgactggcatgctctctttttagggaaggctttttaatccacagtaaaactcaaactctttctacctatgtgattgctactaacaaacaaatgctttataacaaatgtggtatgtattttcaaagcaacggctcttctctacacttgctattattttagaactttagtgagaacaatagtcatctacatcttctcacccataggaatcaaacttcactctggcgggtgtcttgtctcaaccattagcttcaatgtgagcaatctaactttattcattttcaagtatgctggagaagaatacccacagtacactttaggatgatttaacaatggcactttgattttcaggttcatatctgcaaagtatgacttttcaaaccactgatttctgctacaaatatagaatgtttttttccttgtgagaaatgtgcagctttcccaccatgtactgtctttttcttaatgtct

SEQ ID NO: 343593 - DNA, 1000 bp, Homo Sapiens
ttttttttttttttttttaggtggagaatatactgatgtttattgtatgattctttcagattttctgtgtgtatcaaatttttaataacaaaactttggggataaaaagaaaagaagcatgaaaagacaaaaaataaatcacacaacaatgtgaatatgggtaacactactaaactgtacacttaaaaatggttaagaagcgtaaattttttttctttttttttttgagatgcagtttcactcttgttgcccaggctggaatgcaatggtgcagtctcagctcactgcaacctccgcctcccaggttcaactgattctcctgcctcagcctcccatggagatacattttatattatgcctttaccataattaaaaaaccaaactaggccaggcgcagtggctcacgcctgtaatcccggcactttgggaggccgaggcgggtggatcacgaggtcaggagatcgagaccatcctggctaacacggtgaaaccccgtctctactaaaaatacaaaaaaattagctgggcgtggtggtgggtgcctgtagtatcagctactcaggaggctgaggcaggagaatggcatgaacctgggaggcggagcttgcagtgagccgagatcatgccactgcactccagcctgggtgacagtgcgagactccctctcaaaaaaaaacaaaacaaaaacaaatcaaatcaatcggtcagtcacagatgcctgagccccactctgtggaatcagaatttgtttgggacatacccggtggactggccactgctgtttttttcgaggctctccaggtgatttagaggccagccaggattggaaagcctgttgtaaaacccctgaaaggtgactagccgtggccacagcctccaaggccacccccgggactgtgcatcctgctaacgctcacctcagcaggtcgtgcttcttggtgcggttgtgggcactaagtgccttcagctcagcctgccgtttgcgaagctcagcaaggac

SEQ ID NO: 343594 - DNA, 1000 bp, Homo Sapiens
ttttttttttttttttttttttttttttcagaatttttttcaccttcggttttattatagtgatggatttatcaacagatttttcattttctgaaatcttgcattcttgggataaaaatatcttggttattgtggatgtttaatatatgactagaattgatttgctcttaatcttactcgtgattacatttaggacccccccccaccccaccaccacccccaggatactctgtcttaaggtccttagctttaatcacatctgcaaagtttcctttgctgtataaagtaacagtcacgggttctagaaatcaggacctgtctatctttgggggccaaccatttaacctagcacagatagatgccttaggaccttagggcttaattctcttctggacccagttgagaaaagctgtctaggcaaacatgctcattatagctacagatggcacaaaaccatgccatgtgactgaatcaagacccggtatggtcctggctgactctgaatgacaaaactctacaaagcataattcaaaagcgtgtgacttggttgcattctgtgtggaatggaaggattcaagatgtcagctggcaattccaggaaaaactgtgattaggcttttcttagaagtggcatctgaagagcaaatggagaggcctgttcttccaggtctggttggaccctacagggagcaggccttgactctgtgagtgagcctggcttgccttccacatggcaatgcccacttagagaggaatcaggattgatggtgaagccagtatgctacacaggatagacgcagaggagtgttacaggcttcttcacgatgggcagatcaggcctcaagtggtcagagctttccaaaggtgggtgtgcacagtggagaatttcctctctgtagagagagctctgagtctggatgaccatctggaagggatatgtaggagaagaaggtggtgggtactgacttagatgattacttaaggttcctgtcaaactttg

SEQ ID NO: 343595 - DNA, 953 bp, Homo Sapiens
ttttttttttttttttttttgacatgtaattcttatttatttttcaccctcaacaaggaagaaaggtctctccctcaattctgctcttccaatacttgaggataggcacccctaaccctccttcctccagggaggcctcagcatcagtgtctgtggacgtagtctctgaagagtgcttcagctgatggggaaggagaaactcaagacagagatcctcctagggatggcgtcactttcctgccaactttctcgttgcctctccttgaaagcagaagaagtgccagccctcagcttccgtcagatcttgggctcctagggccttgtacaagtccatggccctctggttccagtccaggacggccaggcggaattgggagcagcccttatccaaggccacctcagccacctttttgattattttggaaccaatcccttgaccccgatattccggcatcacatagatatcctccagataaatggtgcgtcccttccatgtactgtagatgaaatagtatatcccatagcccaccacgcagggccccagtagcttcccgggcgctggaagaatctctgctaccaaacagtgatagaaaggattgtctccaaagccatctgctctcagggcttcttcactgatcttcacctgatccgagagtttttcgaattcggctagctcccgaatcagcctcaggatatctccacagtctccctccttggcctctcggatccgcacggaagccatccggatccccgctgtctgggaccaaagtcccagggcctcgcaaacggcaactagaccccttaaagggcctacggacttggatcctgaagagcctgagagagcggggtggcgggagtcgggggggacggcggggtagccgcggcctggtaagtggagctgggattccggcgccgtacgggaggagagagtaggccagcgaggcgatcctctg

SEQ ID NO: 343596 - DNA, 1000 bp, Homo Sapiens; identical to SEQ ID NO: 160650

SEQ ID NO: 343597 - DNA, 1000 bp, Homo Sapiens
gattcaaagcacactagctctgaaatattaatcttaacaccagacataaatggggaggtatgacttgcacaaaatactttcaattactttggttacactcttcatgatcttgcatgtttagctgcttgcagtgcatgcatgcatcctctttgctacgtcataaacataggtgacgtctggtcgcttctctggatctgggttgatgcacatattaactaactgtcggagttcttctgaatagtgatctgaaggaagaggtgggtagtcacactgttctatcttcttacacagtgagtataaattcattttgtcaccatagaaaggactttgtaatgcagccatctcatatagtagacagccaagagaccagatgtcagatttgaagttgtatccattttcatgtattctctctggagacatgtaataaggcgtaccaactaaagaatgtgcagctgtggtttttgagctgaaaaaccggccaagcccaagatctccaagttttaccaccccagtggctgtaatgaacacattagctggttttatatctctatgcatgactcttcgagaatgcatgtgttccaatgcactgcaaagctgaacaaaatacttccaaacagttctttcaggaattagcctcttttgcttcttaaaatgcttgatcattctggataggtcgccagcatctgctagttccaaaactatgtttagttcattatcttcaatgaatgatgcataatattttattacatttggatggttgagttgcttaagaagatctatttctttgatgcaatcagcacgtgctttggcatccattaaatcaaatatctgcactttttttaaagctactggtactccatccaagagacaggctgctctataaacttcactaaattgtccgcgaccaattttcttttctattcgaaagttggctaatgtattatagcccatatccggtcgtaaggccttctgtggttggaactgaggaacaggtggccct

SEQ ID NO: 343598 - DNA, 1000 bp, Homo Sapiens; identical to SEQ ID NO: 160651

SEQ ID NO: 343599 - DNA, 978 bp, Homo Sapiens
tttttttccatgaacatcagctgtcatttattatgatatatatatattttttaccatatttcatggactctaaagtgctaccaatggagagaagcatcctgattgagatgtgagaagctctgcgtcttagaaccagtggaacagagtaatacaatcaaacccacgggccgtgctcccctgccgctcagtcaggcctggggatgcttcccctagcaccgggctcctggtggacagccttagaagggatgaagccagggccgcaagaggttgtccagggcctctctggccatttagtgggggaaggacatggggacatggggagtggcggatctgggagaacagtcccaggccctgtcctccctgttggtcacagcaaacgtggaggaagcagcatacccagccccagtgccaggctggtggtggcccccactgtctggctgctcggggctctgttacacaggcggccggtgcagcagttggtggtgaggctgtaggtgacgcccctgtagctgacgggttcctcaaggccgcagctggtggctcgcaggcagcctttgttgatgaccggaccagtgcccggggcgaccccgtggcctgtgaagcagtcctcgtcatcgccacagtgcatgtaggtaccaggacactgcatggagtcggtgagctcacagaagacgcagtccttgacgcccgtcgtgcctgggggcagagccatcaccagaagcagcagccagcacaggaccatggcggcctggcggcgttgaccctgccccagccaggccgtgggcttcccagacctcccggaaccgctgaatgaaggacctctgaggactcctcttgcccacgggactttggccctggtcctggcctcccagggtcagcgcctggagtgtcctctgttcccaacgccctgcgtccctctaagtcctggggatggaggtgagcgggtggctgctgcccaacaagagtctgtgaatggaa

SEQ ID NO: 343600 - DNA, 1000 bp, Homo Sapiens
ctaaggctgggcctgggcggggctggctttgagctgggggtgcggaggtccccctgcagcggcggtggcgggtggcggcacgtcctggctgggtttctgggccagctgtggtttgggacgtccagcggggcccgggccgctgggccgaggctgctgcgtggtgggtggcccagtgcggggcacgggacccgcctggctggcctggcgtgtggggccggctgggcctgggggtttctggggcgggccctggcgctgctgcccgcccggtggggccccagaggcctttggcggagccgggccagagacggatgtctgacgggtagcctgtggggggcccgcctggcgctggggagacggagaggcgggcgggcgggctgctggaggcgccccggggcctcccgccactggccgggattggcggccttgaccctgggtcggcggcgcggcctgggacgcgggctgctggggcgctgaggtgggacttggaaggcgctggggcagggggctgccagctgggggtccaaggcctgaaaggtgctgctggccctgcgggggcgggcgctgctgcaatgggggtccctggcgctgggggcctggacccggctgtggagggccgccctgtggtgggggtcgctgctgagccgggggccctgcgggctgctgggaggtctggcggcccaagggcagggcccctggggacggagtctggccatgggagcccctgccaggggaggcatcccgctgtcgctgccggggcagggcctgagccatcttgttgaccacgagctctacgatgagctgtttgtcttcatcctggtggtcaccaatgagcggcatggaggaacccaccacctcaatgatgtgatcccttccgtccttgccatgtagcgcttccactgcgcagatgtccagtcccccaaaaatctctgagcacgtgtccacccacagcttgtatctgtcagacatggcaatttgctccagcatcgcagagccagtattg

SEQ ID NO: 343601 - DNA, 1000 bp, Homo Sapiens
ttttttttttttttttttcacatgatagttttaatatttatttagcagaggggtaaattgaaacatcagttctctagaccagtcaggaaatgtatgctttgtgctttataagcttacattcaacatagatgacataagttaccatactcaaatgtaagatagggagaggtagaagaaatagctgagaacttgaaaagatgtactgttattgtcaacaaaccaatgtcttctcccttcataaaattgtgtttagggaatattaacaattaagcttgtatacaatagtaattttgaatgtatttttaaatttattttttcaaaataatgacattagtaaaaattttacatagcctgtattgaattcacacattcaaatgaggctttaccagtaatgatggggattaatacagagctagtgtttggcatttgactttatctcaaatgagctaactgctcaatgaattacagaagactcatactctttttattttttcctggaaattaaaaaagaaaagctttactaaatattgacatatatatttactccaaattttacatttagtgaaataagaatatctctagtagctcagttaacatcaacagaaagcttcaaaagatgattctgaaaatggcaggcaaaatttctttttattgtaggcaattacttaaactggaaatttggctttatgcataataagtcatgtgggtaaaacatccacattgcagttaggtttccagtatctagcttttatttattttttagcaatgacattaacaagattttgccaggttataaaaatgagggctttcttgagaattacttatagtttccgagttgaatggcagagcgcacgtagacacatctgaaggtggatggctgtatctcccagtactggaccgggttgctgaaaagactcacacccgaataagaagcctttttggtgttgtgtccaggtgggcagaagtcacttgatccaactacagagatattgttgttatg

SEQ ID NO: 343602 - DNA, 1000 bp, Homo Sapiens
cactgttaacatttttatacatatttttccagttaaaatgcacataatacttttttcttacagaactactacattgtatgcatattgctttataatctgttttttctctttaataatatggtgtgaacactttcccatgagattaagccttcttctgacacataattttaatgaccatctagtattccatcgtatagatgttaatttaaccaataccatatggtcgaacatttagttgtgtctatttttttgctagtataaataacacaatgtagacattggggagactgactcaggctgctcccttgttctggtcataagtcacttagtccttccttaaaagccattggtcatttgatgggccagacagacttcacaacccttgctccaaacacaaggacaaatttaatctactcaagctaggagtggccttggatgttctcttaattccacagaaacactgatgtaaaaagacagttatactcaattcatttgttcatggatgcattatttcagacaaaacaggctcccttgactgatttccctttggccctggtcttcttttcttcaaggcaggcaagcttattgtaacagcaaaggaagcgaaatgcctttagcaaggtaaacctgtagaagcaactggaagcatgtattccagggtgaatcatttttaaatcatcttccatgtttaggattttccatgtaagtgttctgctccattagagtggataattgggagggaagagaataaacgttccagcgctcctaacatgctgaggcatttaccaaaatgctgtggttcatctaggcagaggggaaggcatcggctcaggagcactgagtaaatactcagtggagaaactggggcaaaatctaggctactggatcctagtttgtctcagcctcaagaaattcaagctgccacagtgggtggcggggtgccttagttcacctcctgtttccacgtccctggtcctttagctcagcagcaagccaggga

SEQ ID NO: 343603 - DNA, 1000 bp, Homo Sapiens
cggggaattgcctttttatatttttaagagcaaaacagagatgaagaagagtatttcatttataagcttatttccacccagtaactcagagacagagctaaggaagagtgggcccccatctaacaaatggaaaggcagagacaaaagaaaaaaaaggcagcagcagcaaaggcaagttagaggctttcccggcttggccactgcgctaggagggagcacaggacacaatggtgatgcacaggattatccatccagtcgccagcatgcctcatcagagatgctcccagccagggtgaacttggtttccaccagaaacatacacgttagaaataagggaaggaaacgtggcaccagtatgaatttctgggtcctcgcaatgcagcatcctctttcgcctgtggtttatatgcttacagagagtgaggccaaggaacccaagatgtctcttctggccagcctgagaacgtctgtagtcaccagtgccaggtggcagtaaacagcaggcgttactgggaagaaaagttgggaggggtccccaatgcttccctgtttcccaaacaacagcacaggtcatgtctgatcaccctgtaatgtggcactctgctctgaggtcccccaggtcccaatgtctaccatctcctggaaacctgttggctgtcgggaagatttggccagacacgccatgcgccggccgcctgatgctcctgctccctcgatggtgtccaggagaatccgagtgctgggcacaaagctccaggagcgtccgagggcaggtttgagcctcccgctgtccctgtctcgagttatgtggttggtcaccaccactgccatgccaaggtcccgggccagggtcttcagctctcgggccagctgcatcatcaaggccaagccttccctctgctgacctcccagaagtggggaaaccaccgcagtgaccgagtccacaaccaccaccttcacagttcctgaagaaccagtcacctgctgggccacagtgcct

SEQ ID NO: 343604 - DNA, 1000 bp, Homo Sapiens
gtatttgagaacatttttaataaataatgtgacaaaattacttttctgattattggattttcagtatgcaaaattatggctaaaaataaggggcttcttacatgaacataatgaaaacattaatcacatggattgttcccttagtactgcacgccttttctatggaactttttcaaattatctaaatgaacaagtttggttttggtgaacaccagcctttttttttgtggttcagttttgtttggctttgttttccactggggtcagacctgatacttatctatctatgaataaatgtacatttttttcttcaaatagcaccaattataaaatcaatgatattcataaaatgacaaaaaaggatcatagaaatctactagtcagagggcatcatttgtcaattgaaagcaagtaatgcctctattagagattttaaggaaatcttgtaggtttcgacattggccacaacaaacttaaacctctttttttctttaagtccaggaaaagtaagaaccatttggttcatggcccacaataaagtatgcatgttacttcaccatctgtcattattcaaatattccaaatacaaacatagagcattaacaaaacaggttaaaaacgcttctcaacattttttttttcaataagacaaaaaaggttaatagttacaatggtttacaaataaagtttagtgattgtgcttttaaaaccaaaaaaaaaaaaaaaaagagagagagattaaaaacagtgcattacaaaaacaaaaatcaaacttccttaagtggcacttctgaaagttgaactgacactaccagaagaaatttaggccagttaagacagggatgttcttactcaattggtcattaaaaacatccacttgtttgtaatacgtatttataattactttttgatgattgaaaaatagaacaaggttttactaggtttacttatgacaatgactagacaaccagagatccaactggcttagccctacttatcc

SEQ ID NO: 343605 - DNA, 1000 bp, Homo Sapiens
ttttttttttaccaacttccataaagcagtttatttttcttaaaaaggaaggtacatggtcacagtccaaaatgttttatacagctctcagcctggaaaatgcaactgatgaaaaaggcactgtttctagaacaaatggaaaaagaataaatatgtcatcatttaccctgcacagctttgagtaacaccataggaccctgtcacacgttcagggtcaattttaaaagcttgagaagacacagcaaggtgatgtcctagactagccaggctccgaaaggaagagctgtctgtccctcctaactgtcctctctctgtcacaggtgtccatgtcactgttcctctagcagatgtggaaagtggctgctcagtgaggactcagcccccaccaacctgactgagggtcacacgacaccatggtggaaagtcacaaagggtaacgggccaagagggtgaggggggctccctgaccctgaggacccctgaggcactgctgcaccttccacggattctgtgtctagcgttgccctctttgcagatgcccctcgtggtggtggcacaaagacctaaaaatgatttctgtaaaatgggtacaaggagctccctgataaagcagctcatcctagacagccttttggagttagcgtaactgtccttcctcatttctagttctcaatagcgaatggcagacctggaggccccatgtgcacctgccagccggggcgagggcagggacggccagccgggcgagggcggggcagtcggggtgagggtggggcggggcagtcggggcgagggaggggtggccagtgggggcgagggtgggtggccagccgggcctggtgtgaggagcagagctgcaagtttcctacagacaatccactgagtgccccagagacgtcactgaaaaacttcccagtgctctgacgtgccagcagtagggcctgaactgtcatccctccacggggctccctgaggcctcaggccctttcctttgcagcac

SEQ ID NO: 343606 - DNA, 1000 bp, Homo Sapiens
ttttttttttttgcaaaaaagtggcggtgttttaatcaagtctcattacaacggcagaattaggaatgagtcccacctagcttccacatgcgtgggcagcagctgtcacacgggcctgtcgtggcactcagcccatggcacagacatatgtggctcagggcaagaaccagtggatggggctctgcacaggaacgctggcctcgggatgggagacccggcctgcccaacactgctcagagcccctcccaactctgacaacaggctcgggtcaggactccccgaaatcaggcaccctcctgccccactgctgagatccccaacgggccagacctagcttggaaactttcttccacctggctggccaggaaggcagcaaacagagatgatgactcggaatgatgggctattcggaaatggctagggaaacaactgtttccctactgtcctggcgggacccaccctgggctaacgggcttcccaaggaagtcctagtggctctggggtcctgaagtccccaaatgggaacctaggctgagagaagcaaggctgtgagggcatccaaagggctgcctcaggttttgttcctgagaacgaagcgtggccccggaggctcaggcgtgctcagtggggccagggccaccagcatgggagtgggcaggggctgccacctgtagggggccagcactgggctccggggacgccagcagaggggccgagaggccatcagcagagtctgtgtcgaggtccagcctcccgtaagcttcgcacagaggcaggtcattagcttcgcaaaggcttgagctggacgagtaatactcctcctccagctcgtagaggtcaatggagatctcgtctcgcagcgtgatgagcttccggtcgcactcctcctgcagtgtgcgcagctgctggttgcgctggtcaatggcctcgttcacggaggggaagtcattgaggatcaggaactgcttgaggtcggacaccagcttcatcagggactcgc

SEQ ID NO: 343607 - DNA, 1000 bp, Homo Sapiens
tttttttttttttttttacattcctttggtatttgcaaaataaataaaaaactacgaaacaaatatactgagatcctcctatctccatcccaacccggatgccccagcatcaagggtcgaacgggacctccattcagccccattccagggcctgaatctccagggagtccctgcagggatctcactacctctcagctgtgttgcttcactatttgagaatcaagttctttcccaggcgaatgagaatcccaattggcctaaactgtttccagatcccccgaggctcctgggtctccacgcagcttgggtgcgacttccctggatcccgtcacttgcccacacagaagtcctggaagatgatgtccaggatctcctcggtaccccctccacctgtgagccgggtcaggtgaccccgggccacccgcagcgcctctgccgccagggccaggtcttttgactgcttgtagtggccgagggcatccaggcaaccctggaggtggtgctggtgccttgctcgggtcagcagcgggggatctgtggacgggtccccacacactgcagctagctccttcctcagcgcctccaggaggccgtccagcccctctcccgtcagacaggacagcagcaggtgcgggggcaggtcaggaccgggacctgggccctccggggacagcaggtccgacttgttcagcaccaggaggaggcgctggctgctgtcactggggctctgggctcccacagaggctacgacggtggccaggaagttgcaactggagggagaggccaggtcagaagcatccagcatggccagaatgaggtcagcctgctctagcctctcccgggcgcgccgcacgccctcctgctccacgggccccacgccctcccgcaacccagccgtgtcgctcagcagcacaggaaatccggccaggtcgactggggtctccagcacgtcacgggtggtccctggctccggggacacgatggacacaggcttccgact

SEQ ID NO: 343608 - DNA, 1000 bp, Homo Sapiens
gaaaatatttttatggtatgatataaaataactaacgttactcaattctcccataactaggtcaccaaataagtatccatccacactgtggataataggaaacaatggtgatttccaatctttctattttatagggctttcattaatgttcaaaacaattaccagtgaggatttcctgaagaagtacagatttctgtcaactttcaccctacatactatattccaatagtattagctgaatgattctggataattttatataatctcaagtctttagtcttgagaatttaagggctttgatattgcttcctagcctagtataaccaagcaaaagattattaactctcaaaacacgctgaatgataagacttttaatttggtagacttaataggcaaagtccctatgagtaggcaaatctgcatgttgagttttattccaggttcagttttaggttcactgtctctctctttgatgaacactgcacaaagttatttgtattacagctccttaaagaaagagtacaaattgtttacgactagttttttcatatacacgaaaaagcacaattataatttctgtcccactcagaaattaatggcaaacccatagtaacctaataaagctattttaacatgtgctaaataattcttttatctatactgttgtattgatcaaattatttatatgctctttaaaaatcttttatgaattgaaagctataactctctctcttgaagtctgtctgcatcacataagtattgatcagtcttggatgattcattcatagccgactgtcttcgttgagtggtcttcacaaatctcagcagattgatgatggcggcaggtgttactccgggtatgcgactagcagccccgatcgtctgtggacgactaaaatgtagtttctctcgaacttcatgggacaaagacacatccctgatagtcaaataatctaggtcttttggcagttggagagcttcatcttgctgaactcccttt

SEQ ID NO: 343609 - DNA, 1000 bp, Homo Sapiens
tttttttttttttttttttactgtcaaaacgtttattgcaaaatggagtcttagaacaaaggaaagcaaagaaaagttcacatcaaaatgaaatgtatgacaccaacttggatttctgaatacactgtggactttgtgctggaatatcaaattccaactataaaatcagtaactgaaatagtcttaccacacaagagtaaaatttaatcttccatacaaacattatacaagatatttggcataggacttgctcagaataacattgcaatagaataattgagaaaaagtttttgttaaaaaaacaataaagtgataatgccatctattcaaagctcacactcaaagaatataaatattttctattatttagtacaaaaattttaagagtgcaaaagcaatatgtgcagtgtatcatatctgacattaaaagatatactattctgcacacaatataaaataattaatgtaggtgcttggaactctagttttgaagtaaataatcacatgccagaaagctcctcacaggcaacagagtgcaaacaaaggtggagtctgagaaaacacggctagtcttctagatttcctgatggatactcatttttcatcatagaaatgctgtatctagagctgtcaggctatgctacaatcgagaggagagaatagatttttatgtctggcgatgcttaacacttaaacaggaaaacagtcttactcaaaagcagcaaaaggtgcctgattatagaaaatttatgctctgttatatatgtggtatgatgaaactctgctactttcaaaaggctgcaataagtctagtacaataattttttaaagtattaatatttaactcagaataagttttaaaactgtctttcataaaactcttaccattccaatgaaaactctgaaaaataaagttgtacgcacagtaattctgggaggtcattctggatcactcctaaaccctcccccgacccctaattccttgatttttaatggggat

SEQ ID NO: 343610 - DNA, 1000 bp, Homo Sapiens; identical to SEQ ID NO: 340113

SEQ ID NO: 343611 - DNA, 1000 bp, Homo Sapiens
tcttgataaagattatgaaacatatacactcctgtggcctgggacaagttggtttcagaatatactctaacacaagtcaagttcacacattttggagctgatagaattgtgtttgaacagagctgcaaccccatgcattcaaggcaggtcattagaattcttttctttttttctatattttgtgtttactttcacagatccagaacacacacagagccatcagacgcgctggcgcccactttatctcctcgggcgttccagcacacctcgaagataccgccagtgccttggtagctgtggacgagacttccactctgagtattccagatatgaacatacttgtcaaaggatccactagccaagtactttccatcggggctgaaagctacactgtagacaggctcttgatgcttcatgagtgtgtgggtgcagacaccttgctccacatcccacagtcgcactgtagaatcaaatgaagcacttgccaacatgatgctggagtttgggttgctggtggcaggcccggtggggctccacttgatggtgtagatctctttgctgtgagcctgaagatcgtggacgcatgcatcctgcttcatactccagatcttcaatgtcatgtcatccgagcaggacgccagcaacattccagaaggatcccatttgatggcattgacctcgtttgtgtgtccctggaaggttttgactgggtggtcacagccgagcctgcacacatggatacacatgtctgtgctacaggaggcaaaggtcatgttgttctgccagtccacatcaagggcgggggctgaatgaaaaggaaactgctgtttggcttctcctgtgtgagcatcccaaattattgttgttttgtctacaccagcactcaaaacataattcccctttttgttccatttcagagcgaagatggggcctttatgttggcctaaggtgctggccaggttaccattttctgtccatattcttgcgaaaccatcatatg

SEQ ID NO: 343612 - DNA, 1000 bp, Homo Sapiens; identical to SEQ ID NO: 160654

SEQ ID NO: 343613 - DNA, 1000 bp, Homo Sapiens
cagcaagaacgggtctgtttaatgacacagctgggtctggttacaaacatcagaaactagaaaaggaggacgggcggttgcacagatgaggatgaggatgaagatgaggatgaggatgggccaggaggggacacagcaggagccacagcagcaaaacatccttgaagacgacacacgtgaccaaggggcacacacggggggcccccctggcaagcctgacgcagatgaatagacagggccgactgccggccaggaggagggtggggtggggaaagccctcggccctcggagctgagggtgagacccaggcatgtggtcccgccgacctgctgcccagcagcccggatcccccggggctgccctggtggccaaggcaggtggagctagcggtcgaggtttctggactgaggcccctcccccagtgcggtcatcccacccagaacttcgctctgcccctgcccattctaggacagccggtgagtcagttcctctgagggagtagggggagcccactcctttctgcctggaagtggaattcaggaatgtggggagctggtctgagaaggggctgggctttgccgccaagccgggttgccccagccctgcccctccaggcccaggtcctctgcgctgctgtgggatttcctctttgccagaacactctgttctctgcacaaccggaacccctccctgccccactcacaggtgggccaaaccgaggcttctgggcgccgcggatacacattctagatatgtatgtgtgtatatatatatgtatatatatatttatatatagctcgtatatagaatatatctgtatatatggtagatgtgtgcgtgatactctagatggtgatgtggagacctgcatgctggccgggctgatagaaacggggctggtttattccctaagggactcctagacctgtcccgcttcctgccagccgctcagctaggtctctctctaacagtgagtagaaaagctaagaagagtgggccc

SEQ ID NO: 343614 - DNA, 1000 bp, Homo Sapiens
cgttgaaaaccaataatttatcaaaacgctgcgtgtgtatgtgggggggagggtgtcgcaacagacagggcagtggtgggcggacgcacaggcaggagacggtgcccggagagtgggggcggcagcttgccactggctggccatgcgggcgggcaggctagacattcttgccgcgcaggcgcagttcgtggcgtcgcaggtggttgtagagcgactgcacataggtgaagacacacttggggtcaggcttcttgcccatgatcatcatgtcgtccacctccaccaggggcacacagtccaccagcatcttccagtcaggctctcgaagccgcaccatgtcctctgtatccaggagctgcgggcagtccgcatgggtctccgcagatgagaaggccacctcgaagttctggcgtcggttctgagggctaagctgcccatagtcgaaggcctcagggaagaagttgtgcaccagggcacagaaggccatcccatcactccagctggaggagaagttctggatgtcgacgtgctcgtagccgcgagtcttggctcgacaccagtccagcagcatctgcttgatgctgttggcgttggggaccccgaagctggtggatcgctgcacggctgcgcggggtccgccagggctgccggccgcgccctccttctccagcttctcaatcatggccttgcgcgcctgggaggctgaggtcttgggcagactctgcgccttcatcagctctttcttcttctcggcctgccgtttctcgagcgccgccaggctgccggcccgtgggctggcctggtcctcgcggtcgaagatgctgcccatcttcttggatgaggaggaagaggagaaggtcttggtttgcatcatggtgctgccactgccattctccgagcgcctcacgaaactcgactccactgtggtggtgcgggccgtccgtgtgccatcattggagtggacgagccgctcagtcttggtaacagtgctgacagcaga

SEQ ID NO: 343615 - DNA, 1000 bp, Homo Sapiens
ttttttttttttttttttaaaaatccacaaagcagcatatttattccaggctctagtagacagccccctgatttcattcccattcatcatcaccaataaaatgaggacggatcctgggctggctgaggctctgtggtccttggctccttgccctgtgccttctcagcttcaaggcaggcagtctgtgtcagaggtagagatggcacccacagagggtaccagagctgcgcagatacatgagcccagaggcagaaagagcagggagcaaagggtgcacatccatgagtccagctggggcttcacttgctgcctgccatgatcttgaggtactgcagggcacggcgggcagcctcaccacgggctgcctccctggtggttgcagagccatgacacacagtggccggctgggtggacagttccaccaggcactggcagagtccactcaggctcagctcctcaatatccaggtagctgacgtgaaaggcctgctcctcagagagctcactgaggacacggcagcaggcagggcccagggcacccagggagcccagggagcaactgcggagggacaggatcttctctcctactgaatttcgtagagaatcccaggtgcaacctgggccccggtttcgaagaccatccaggcgggagcccacaccaatggagaagtggtcatcatcaggctccacctcattgccatcccgggcatccagaggcaccgtgtgcactcgaagcagcattttggccgccgcattccgctttgccaattttttggaagtgccactcccaatctcaatgaaacgctccactcgacaggtcatggtgaattctttgcggtgggctggcccagactcctgggtcactgtgtactccggcaaccgccagcctttctgcaccaccagctcctgcagagcaccaacggggttgcactcagactgctgaggggagacagggggctgcagttccatgggggggctcctggttaggactacagatggaa

SEQ ID NO: 343616 - DNA, 1000 bp, Homo Sapiens
tttttttttttttttttcagaaaatgccatttattttatcattttaataccggaaatgccagaccaatcaacagggaggacagaccagacacaaatgcctgtgctcacaacacggatgggaggatcatcacggctcagggcacacatgcatttccttagaaacaggcagacaaagagagcataaataccacacaacagccaggctcagggggctgcgggccacagagggctgcgcttcaaaggcagtcagaggcattaaatacgggacctacacaatacactccacttcaccatacataatttatatattaaaagaaaggggaccacagtatctatacgtgcaagcggctgtggtggagaaaatgaacgggggggcagccatgcacgggaggggctccctgtataccctcccgacgcctcgtccccacccttcccacagagtcacttgggatcacaaaacgcatgggccggccggggcgcagcctcgggaggtcctgcctggtctcctcggcatggacctctgagctccccgtgagccgggaggtgcctggaaccaagaacacttgaaccctgcatgtcaccacatccctgggagttgccctggaagggaccgggccaggcgtgaggggaggaatgtcgcgttggtcaggtggaggagggaggcgcagccaccgggccgggcaggtgcaacgcatgccccaggcccggggcccgggagagcaggaacgattgcggggcatccactcttgcaagcaaagcttaaacggcacgacaagcctgtgtttctctgcaactgtccaggggccgctcgctcagaactgactggcactgctggggtcgcactgcagcaggcggacgatggaggggtcgctcttggcacctctgatgaattcttccaaggacagtttgccgtcattgttggtgtccatctgcctgaagatcttgtctgtgcgcttctccggggtggactcatcctccggcatcttcatcacagacgaca

SEQ ID NO: 343617 - DNA, 1000 bp, Homo Sapiens
tttttttttttttttttttttttttttttttttttttttttttttttttttttttttttttttgatatttcacagaagtgcatctaattaaaaaacttacacatgaaatcatacaccaagactaacaatcaacaataaaatattttaagctacaaaaaatgtaaattactttttaattataagaaaacaaaacattgacattaagtgttgtaaaaatccttcttgacacctgaaactaagggaaaaaattcattattaagaagcaaataatttgtttacgttaaaaaaaaagatctggcaaaatacatacacccattccatttcacaactccaaaaagttaatgttcagcacagatagaatttgacaacagtcgaccttcaggcttattaaattttcaacttaagcccaatatcaacagggttaatgtaagctggaaaaatacgctttaatattctttagactgcagtgtaggtatttcctgtagcgctgcactgtctgatagtctgagtacttgtgacaatgtgctcgctgtgaattggattcaggaggcttggttgcacgccagtctcgagaacaggctgcatgcagcccactggaaatgcctggctcagctctgttttctctcttttggcttgaggctctgaagagtcatccagttcttcatccatttcactttctacttcactgccttcatctttatccagatttccaggagacacggcatttaaatcaccaaactcgcccatgactgctataggagtctctcctgttgcctgagcaacacgatgttctactaagtaaaacatatattcgtcgtagagtagacggatcaggtggaaggagccaaagctagcagcactgcgtaaggttaagtcccgaataaccattgagctgtagaaagaccattttagcagaaactgcctggcggctttaggaaaactgggtcttccttcatagggtttcagtgcttgcatcatcacattgtcaagccacgcagcc

SEQ ID NO: 343618 - DNA, 1000 bp, Homo Sapiens; identical to SEQ ID NO: 342745

SEQ ID NO: 343619 - DNA, 1000 bp, Homo Sapiens
ttttttttttttttttttttttaggagcagcacttctgacaagaaggctttataatttccatttattgtagaataatatagtactatcaacatagaaatcatgtttataccatttaaaatcataatttaaatgattttcattttagcaattgtggctgctggtatattataaacctgcttaaatattgatacatagtgtttaaaataatattataattatgcatttttggaaaataaacattcaataccttaattagttgcatacaattggatggctgctattaataatgttttacaactacagataatgcttctaataatattaaaaggtatataattccctttctgttatttgttcaggaaaaattccgaaagtcttaggtcagatgatgcaatcttttttatgactcttaaactctaccatgaatgatttttaaaagggtcttaataattcaccaacaatatgtggctctaccagttttttctatctttggtagctttgaatattttctttgtttttaatttttcataattgtacagacacaaaattgtgtctcactgtactcacgtcgatttttttagctacatttgggcattacggtactaacaatatcagaaacaatattttgagtatcttacatagatgaaaactttcatatttttcatttaagtttgattcattactatgggttagatgccgtcgggctaggtgctggagctctcttgttctcaatctctccttttgtccttattcaccacaatgttaatttggagctgagagattcatcactgaccgcatctattacctttctgcttcaccttggctgctttggcaacttcgcctttggcacttctagcatgacagacatagctgcgcttgagatcctcagaggtaactttcttgatgctcaaaatctgagttcttgtttcatcttctgttctactatgacttatactttcgttaatggtgacatcaatagtgatgtcatcaggttttttt

SEQ ID NO: 343620 - DNA, 1000 bp, Homo Sapiens
cacattttggtcactttattaaatgacattaaatagtttaagtttcaactactaaacagcactttgaatggtgaaaacacagatagtatattgtcatacttgaatgcttttctttaaaaacacaattccagtccttatatatattacaaaacagccttaaaggaagaagtgacatcttttctacagtacttaagatactcaatacagaactgaaaagcagtctaacagaaacaaaggcaagtcttcacagctgtatgatttcagcagccaaagctggatgatggactgaaacattactatacaactgggacaaaacatatacaatatcacaatactaagcaaaaacgctttacacccaaagaaataaaacaggttacaaaatgtggagaatttagcaggcaaaactgtattacaagcaacattttaaatcatcatttttaatccattgcaactatttaaaacatctaaaacaaatataaaaatgagccttttagtattttactgacgtgatttttttgtctttaaatatttgttaaagcttgatgttatactcaaagtacatattatatagctaaaatgtcaagtgagaagagtgtatacaaagtggtccaagttttatttcaaactctgatttccaattaacccttctaagtattatctttaagttatagtttcatccatggtgaaaagatttagaaggttgcctaaatttcacatctatgtctttgagtaaataattagaccatgttgaaaattcccaggtctagtaaatcaggtttaaaatattctgaacttgtagaaataccaactggtaacagttggccagagtgtactgccttcaaatatttctcataaatcttgtctttttcattttttctaaagtaaatacacacctgccccacccaattaaataaatctgattacatggctagcataatatctaaatatacaggatttattagtgatatttcatcatgggaaagtgggggagaggggcgtg

SEQ ID NO: 343621 - DNA, 1000 bp, Homo Sapiens
ttttttttttttttttttaaatgtctcatcgcagtttattagcctctacagttctaaatttactaaagagggcaaaaatacaggttttgaaagcactccttcccaggctcacaggcagcagacatgacttagaaggaaaaagggcatacagcggttcttcaagatttaatgagctgactctcctggctcccagcaggcaggctggctgtcaggtaagcctcttccatccaaggtggaaggatcacagtccctccagttagacaggaggaaaattaggacccaaaaagatgaagttatttgcccaaggttctacagctaaagtaggattaaaacccagagctctggccgagcgcggtggctcacacctgtaatctcggcactttgggaggccgaggcgggcagatcacgaggtcaagagatcgagaccatcctggccaacatggtgaaaccccgtctctactaaaaatacaaaacaattagctgggcgtggtggcgtgcgccggtagtctcagctactcgctgaggctgaggcagaagaatggcttgaaccgggaggcggaggttgcagtgagccgagatcgcaccactgcactccagcctggcgacagagcgagactccgtctcaaaaaacaaaaaacaaaaaaacccagagctctgcatatcccatacaaaatgaccctacattcagccttccgtcccagcaactggaatgaaagtcacccagcagatcagtttcccagcctcaaagccctgctgaaagtagggtcatgcaaaggacaaaatcccactgagaagtgaagatccggtggtactgaggttggggataagatgatttacaaaacagttcagatgtttcagggattcaggtgtaggcagatcactaactggttctaaggccctttatccagtcctgtgctatgtccctcctgagccatggagatcccggtccagctgtctgacagcttcagggatgtggacttgatccagggatatgagttgg

SEQ ID NO: 343622 - DNA, 982 bp, Homo Sapiens
ctatgtccctcctgagccatggagatcccggtccagctgtctgacagcttcagggatgtggacttgatccagggatatgagttgggccagctcccccaggctgtccagaaaacggatttttcgtgtgaatttggaactgatgaagggccgaagcagtgccagaaatgctttcacataccatgtagcatggacaaccaccagggctcgcaggtttttccgtagcctcggccttccaaagtgctgggattacagacgtgagccaccgcgcccgaccacctggtctttttctgctccatttccatcttgtgctctaccctcgcgtaagttccttttgcatgcttctacatcgctccatgaccaagattacttataaaactcgccgatccagggtacggtaacactgacgtatccagcttagaggtggaacttgggccctgcttgtgcctccactcaaatgaacaagcaggtaattttcagctactagcagctccagagttcccaccatatacctaaacaagtgttccatgacataggtgtagttggggatgctgcttctgggtagataacaggaagcaaaaaggatgacagcattgaggccatcaccgtggtaacctccatgagacaggactttcttatagggctcaatgacagtcatgtctacgcgctgctcccgtggtcccattcggaacaccctccagtgatgtccatcttctccagtcacatcccacatacaacctcggcccagcctttcagctgtctcactggtgcccagaccctctgcccggggtagttcatcttcccattcaaattcatgtccactgtccagctgctccgagtctgaaggtgtctccaattcgtctatctccaggtcagaactgccatcaggagaggaaggtgcagactgggtgggtgaagctccatcatttccaggccccttagtcagactcagccgcaactctggggcagaaagacgcttgcgcat

SEQ ID NO: 343623 - DNA, 1000 bp, Homo Sapiens; identical to SEQ ID NO: 160655

SEQ ID NO: 343624 - DNA, 1000 bp, Homo Sapiens
tttttttttttttttggagagaggctgggacatggataatcacataatttgctattattactttaatctgacttgaagaaccgtttaaaaataaaatttagcatgtcatatattccttatagtaggcttatttcaccttttttctgtccagagagagtatcagtgagaaagattttaagggtgaaaacatgaattggtgggacttagtaaagagctgaaaaactactacaatgtgggctacggttattataaaatgatagagatggaaactagagtaagtttattttgtctgttaaacctggaagtgagctaggcatggtcactcacgcctgtaatcccaacactttgggagcccaagacaggaggatcccttgagtccaggagttcaagaccagtctgggcaacacagggacaccccatctcgaccaaaaaaaaaaaaaagccaggcatggtggtgcacttctgtggtcccagccacttgagaggctgaggtgggaggatcacttggccccaggaggttgaggctgcagtgagtcgtcattgtgccactgcactccagcctgggggacacagtgagaccctgtctcaaaacaacaacaacaaaaacaaagcaaaacaaaacaaaaaacacttggaagtggggtatactcaaaaatataaaattatctagagaaaaacaatgctcagaaatatatagcattactgtggcagggcaagtgcacccaatatggcagtttacaaggagcagaaagcaaaggctcaagtgaggggcctggtcagagttcaggctccaagtgttctagaataagaaactcaagtcaggcaccgtggcacatgcctataatcccatctactcgagaggccaaggttgggggatggcttgagcccaggagttcaagtccagtcttgatgtcttcccttgagagacagggcaatatagtaaggacttgtctcttaagggaaaaagcaatgaaagaaagaagctcagttttccaaatta

SEQ ID NO: 343625 - DNA, 1000 bp, Homo Sapiens
ttttttttttttttttggaatggcaaaacttttattgaacatcatgctgaagcccagaagaaaatgccatctcccactggtactcctgtaatctgacacttcaagatgtctcctctgctcaaggatctttaaaagcaccttctttgaaccacagatgtcccatactccttgaagtctgccgaggtgacccacatctgcttgaaactgctcatagaggtcatgatggatgcaccaatccatgcagagaagcatctatcaggagaagctgtgatcttgatgggagtacctttggaagccagctgttccacttccttcatgagcctttcctccagcccagggaggagagtggtgcccccggagagtacaatgtctgcataaagtttattctggatgtcagtgtcacacttcatgatgctgctggagaccatttttgagagtcctgggctgtggatgcccagctggtcaggtgcaaaaagaacctcgggcacttggtacagctcatccccaaagtggatgacatgtccatctggcagtctgtatgctcccaggacctctccccggctcttgcgtagctctttctctggctccaaggcgatgtagcacaacttctctttgatgttatttaccacggccttgttgagtatgcaagggaagttaaacccgctagcaaagaggagccgggtgaggtgctctgtgatgtccctccctgccatacagagtttggtgactgcgtgaggcagggagtaaccctcaaagatggggacagtgcaagtgaccccatctccactgtccaccaccaggcctgtgacacaggcagaggcatagagcgctgccaccgcatgattagacaggtagaaaccaggcacactgaaggtctcaaacatcatttctgctagcttttctcgaatttccctaggattcaaagagggctcggtcataagtacaggctgttggctgggttttactccaagctcccgctcaaagagatgtttccagagtt

SEQ ID NO: 343626 - DNA, 1000 bp, Homo Sapiens
gaaaatctgaaagaatgaaaaaatacttagcttaagtctctggagtctctggaataaaaccttgaagtcagtctctggccactaaggtgtatttaaatatataaaaatcagctgaacaatatgtacaatttgctatgaatgatttggcggatctttgaaagtttttttttttttaaagcctattccattttgaactttctcaatgacaaatgtaagaattttaaaaatgaaaaatggcaggatcattatgtttttcactcaaaatctcttatctggaggggattctctccaagcaatagaatttcagacatgtaccagaacaatataaaatttcaaaggtcttcccagcagtcaaacatgtaaattaaacatttacaacataaaaagttttggcttttacacaaaaattttcaggatggagttaggcctggacttgtcatctctgttgtaggacttgcaaggtagtcattagattttaagcttgttagagacttgtaacttgccactgacgttagagatccacagaggccaagtaatgagggagtatcttccttaccttcactcattacatttaatgtgtcttgttttccatctccttcttgtgactggcctggatctagtgaagtctgagaaaggctaacttctgctgataactggtcaagactttgataacttttctcataccactgtttattgtgttttcggtaaagcaacgtatccaaggcaacagcattgacatccagagctcctggagaaggccactggttggtgagatgggcagttaactcttgtctcgatcttaaatcattattctttagcacagtcagctgatcttgaagctccacaattatatattctaattgttccttctccagtttatgagccagatcggaatcttcaatcctttgaagtagtattttattctgggagacagattcagatagttggttctctcgaagtcgtaagagttcttcaaggtaacccttctgttccagggtaa

SEQ ID NO: 343627 - DNA, 1000 bp, Homo Sapiens
gcttttagaattatttattcaaaaacactttataataaattcaggtaacagtaaagtaatacattcaatagtactaaaatctatagaaaatagataatttcattaaggtgcaattaaaatacttgaaattgggacacatctctatatttcaaaccaatatactggctttctttttaaaagactattctagtctttacgctgtccaaagtttttcctctttgcttttatttgctttagaccatatttaaatttttagcattcctaagtgcatacattttaggcatatactataatgaccaagagtttgtgaacctactgattaggtaaacactttggggaggtatgacctgcacaaagtagggtgggaaagctattatctcccttaatctggacacaactgttcaagcagtctataatttattagcttctctgatagcttcactatttggttttcattgaccttttgagcaactgactggcaaaccccagattcttttcgcctgaaatcttttcaagttagatactgtccatattacacttgtacttataatttactatcttcttgccttggacaacttatttctccaaattctgatttctccagcagtgtattgggatagtatcactaatcttgcaaagtaaagatcagaaatgctgtacataatatgggtcagtgacttagcatacaacaactattctatgattaatattttcaaaatctaactactcctcatttgtccttggcagttttctatcttagtcatttgcagaaagagttccagcttgccaaaacctttttttttttttttttgaggcagagtcttgctctgtcgccaaggctggaatacaatggcaaccctgtctctactaaaattacaaaaaaaaaatcttttataatcttaattctgtcatctgtgaattagttatttctcctaggcttgtgatctgtatgtaaatttgataaacttttcaaagccattgattagaatacttgaacaga

SEQ ID NO: 343628 - DNA, 1000 bp, Homo Sapiens
ttttttttttttttttttttttttttttttttttttttttttttttttgggattttaaaatcattttattaatccaacagtacaaaagacccccaccaccaccgcattctgccatcactttgttccaaaaagtagtggagtgagagagcgagagggagcagatccagcaaaaacactcccccaggggccattttacaaaatgcggagcaggggaagacaacacaaaaacagcaacagataaatggggcaaacagaacaacaaacacaagagttgagcagcggggtgggggtggggggttgccatctacgccgttttagtgtgagggacactgggaacgatgcccagaggctgctctcctcccagcctcaaaggttgtcagctccaccagagcagggtcttctctcctcatgccaggaactgagagaagtgggggtaggggaccactaggtctttgccactgtatcttgagctgggggactcctaacttctccgagggccacaccccatgcctgccttccccaccccatggaggaatgtgtgcatgaacagaaaaggagaacgagcagcgctaaggtcctcatcaggccccaggcccatctctggcaggcagtgcttaaaaaataaaaaaagacaaataaagcccagtgcaggcctttggctgagaggaatgagaattgctaattaatcaccaggcccaagaggatatgaaagaatagcaaagagaagcaacaaactccaggctcttctacctttgagtaccatggcaatgaggatcccgccgcatcccctacccacaggctgtgacagggcctcacttggatccttttatcatggaggaaatgaggtatagggctctgcgccttttcaagctttccttcaatcaagccaggaaggcaggggaataagggcgccgaaagttgaagaacacacggagtataatgtgcaacagatgggctgggggaggagggtaccaccaaagtccagactttcaggacagcc

SEQ ID NO: 343629 - DNA, 1000 bp, Homo Sapiens; identical to SEQ ID NO: 160657

SEQ ID NO: 343630 - DNA, 1000 bp, Homo Sapiens
ggcacacaaacaacatttattttaataattatggatttgttttaatgcacattagaaaaaatacgtaactacatatcaaacctatgattaactagatgtagtacagtttccttttaaaatacatttttttatgtcaaaaaaaagtagtgggggaagtaattttttttttaagagatggagtcctgctgtgttgtccaggctagactcaaattcctgggctcaagcaatcctcctgcctcaacttccctagtagctgcgactataggcacacgtcattgctcctggcttaaagagaactatgagtaaatattggtataggtggtgtctcggtgtggccaaagttatagagtataggagaccccagactcttgtgacctgagggttcttccgtaatgtcactgtgagcttccgggatacttttcttaaatagctgcacatgcgttttaaattcttgtgacacacaattaataataacaactaatgctatttggagagtccttttaaggaattcatgacaccccttcctacacattccagggccacccaatggtccaccagaacgccactgccgcacctttatgacccgcgccgttcactttccagtcgctcgctttcaggtgggccggccgggatgtcttcactagcaggtgctggacgtccctccaggttaactggctgtttgcttctagagccaaggcgatgatgcccgccaccatgggggcagagactgaggtcccagtgtggccatcggtacagcgctgacgcagatccgtggtgacgatttttcgctcataaaaggccccactgctgtaggtggtggccagggtggaggcacactcttccaggtaccagggcttgtagccattctcggtggcgctgctgacggagatggtgtagatgctgttggtgtagccatcgcacgagcagtagtccccctctctcccgccattcccagatgcccagacgaaaatggagcccaggccctgccggccctttttaa

SEQ ID NO: 343631 - DNA, 1000 bp, Homo Sapiens
tttttttttttttttttggaggactcgcactttcttatttcaaaacttactacaaagctacagtgatcaaaacaatatggtactgactccaagatagatatacagaccaatggaacagaatcgagagtgtggaaacgaacctctcttctgtggtcagttgatttgcaacaggagtctcaagatcaccttgcttctccgggttgcggacctgggatggcagatcttggatttccaaggtccactgcccttcagccttttctccccagcagtggacagtcatgaattcccagtttgtaaacccttcattggaaagatccagcaacctctttgccagaagttgagacttggttcccgagggagaaaccaggtagatctggaggtctcctcggcgtgggtgtgagatggaggtgcgaaccaccacgtgctccaagtagaccacccgctggtccgagtgctccgcgcaggcgctggtcagggccgtagtccgcagcacctgcactaaggggatgctcctgggtctcttgtccgaggcggccacacacatgtgctgcgatggcactgctgtccacttctttgcctccacaacgagagcttctgcgtccaccaaaccaaatccatagaaatggctaactttatgacccgcgccgttcactttccagtcgctcgctttcaggtgggccggccgggatgtcttcactagcaggtgctggacgtccctccaggttaactggctgtttgcttctagagccaaggcgatgatgcccgccaccatgggggcagagactgaggtcccagtgtggccatcggtacagcgctgacgcagatccgtggtgacgatttttcgctcataaaaggccccactgctgtaggtggtggccagggtggaggcacactcttccaggtaccagggcttgtagccattctcggtggcgctgctgacggagatggtgtagatgctgttggtgtagccatcgcacgagcagtagtccccctctctccc

SEQ ID NO: 343632 - DNA, 1000 bp, Homo Sapiens
tcagaaggtcgagatgagttccttgggaggttgtgggtggccgtccagcgctgggtgtgtgatgaccagatccggctttgctctcttcacagcctgaagctcctgtagtgactgctcgctcagctccacagaggccagactgagggtctgcaggccgcatccctggtgctgcaggactgcacacaggtaggtcaccatgggggcgggcagttggcagccgctgagatccagggtggtcagggcagggctctgccgaagcatacccaccaggtactggagccctcgctgggggtcaggcagctgtaccctgaccgtctgcaccctgcactgcggccaggctaggccctcactcagcatacgcagtcccgcctcactgagcctgttgtggaggaggcccagctccgtcagtgcgggggctgccctcagggcctcagaaaggtctcggcagaccgcgtcagggagtttgcagtgggacagcgtgaggctgctcagatggcacagtgggtcagtcattgcctgaaagagtggatgaagaagggaggctggcagttgttttgtggtgccttgagaactgctgccgccacccaggctggcctggagccgcttccccaggctcttcttcttcttctcctgcgcagcaaccaatctgcagctgatcagccgcagtgcctgtccagcagggcagcacctcacgcagtagctcagaacagccacgtccatgcggcagaagcgcactcgctgcagcgccagctccgggaaccggcacagggcttggcgcacaaacgcgtcctcctgcgtctcgtacaggcagtacagcaactccagtgggtagttgggctcctctccctcctcctcctcctctggctcttcggtgtcctcgagccctttggccccctcggtcacctctggtgccactccggggcagccctgtccctgtccctgcacccaccgcagggcctcctgcttcacacgctctgaaaccatgcagccgaagtggcgc

SEQ ID NO: 343633 - DNA, 1000 bp, Homo Sapiens
caccagtatgatttcctttatatttagaaaaatttgaggtgttgtcaaaatcattatcacacattccagttctgtagtttctctccagtatgtatttttttatgtttagtaaggtttgcagattggttaaaagctttgtcacatctctcacattcatagggtttctctccagtatgaattatcttatgttcagtaagttttgaggatcggctaaaagctttgctacattcttcacatttgtagggtttctccccagtatgaattcttttatgtgtagtaagggatgaggagtgtttaaaagctttgccacattcttcacacttgtagggtatctctccagaatgaattttcttatgttcagtaagttttgaggattggataaaagctttgccacattcttcacatttgtagggtttctttccagtatgaagtttcttatattcagtaagttttgaggatcggttaaaagctttgccacattcttcacatttgtagggtttctctccagtgtgaattctcttatgtgtagtaagggctgaggagtgtttaaaggctttgccacattctttacatttgtagggtttctcttcggtatgaattttcctatgttccgtaagatttgaggatcggttaaaagctttgccgcattcctcacatttgtagggttgctctccagtatgaatgtttttatgttcagtaagttttgaggatcggttaaaagcttttccacattcttcacatttgtagggtttttctccagtatgaattctcttatgtgtagtaagggttgaggattgggtaaaagccttgccacattcttcacatatgtagggttgctctccagtatgaatttttttatgtgtagtaagatttgagaactggttagaggctttgccgcattcttcacatttgtagggtttctctcctgtatgaattatcttatgtgtagtaaggtgtgaggactggttaaaggctttgccacattcttcacatttgtatg

SEQ ID NO: 343634 - DNA, 1000 bp, Homo Sapiens; identical to SEQ ID NO: 160658

SEQ ID NO: 343635 - DNA, 1000 bp, Homo Sapiens
ttttttttttttttttttttttaacttatttattacacgctttatttgagttaaagatagaaaacaatatacttttatgtaaattgctatggcaatgtagtttacagtaattccttttatatatacttcgtattattcttttagacattttataaggaataaagctaattgtatattaagtttaacaataatcagaaaatattctccaaaagaatttcctgaagtggcttgctaggtataaagctcataattgtcaagatacttatattagggacatgaacccaagtcgttaaataaaaataagatatttgtaaaaaagtgctatagaagaaggtgcacaaaaaacatgcacttacacatactttccaaaaggatgtaaactgtacttttaggcactgtcatctcttcaaatttcctttaccaatgatatatagcacaatttttgatgtctagatggtgctgtaggaagatgactaaggcaaccacgtgcagaaaagcatgtgtgtgatgcacagaaaatataaagattgcattccaaaagtgaaggtctgcaatgatagtttgttatctgaaaggtttggagtgtcttgtcattaaaaaatgaaatatatgccactggagtcatatcacaaatggtgcctgatgtggacactctacctttaaaatgactttttaaacaggcagacatttctatgctgttttataggtggctatgtgacttcagtactttataataaatagccagtcaatcttgagagccagctacttctcttaaacccaagtacaagatataaatattcaaaatatggaatgtttaacatagagactcgaatgaaaaaatgacaatcttcaaaattccccatgttttgtcatattgcatagctgaaaattcatctactacttagtaaaaagtgctctgttcattcaagctgaattttgctccagtctccttcagtttccatctttcatactgaatagtggatccacaagtttattgtgc

SEQ ID NO: 343636 - DNA, 1000 bp, Homo Sapiens; identical to SEQ ID NO: 160659

SEQ ID NO: 343637 - DNA, 1000 bp, Homo Sapiens; identical to SEQ ID NO: 160660

SEQ ID NO: 343638 - DNA, 1000 bp, Homo Sapiens
ccaaaagaaatgtctttattcttttaactttctcaatatttacaaagaacaagaagaacaagaacaacaactgagattggctcgcagagtgggtggcaggtaaacagatgcgtctctctggcttctggggtgactgcaaggcaaggaagggcaacatcccagtacctatggtctgcacagggacagcgggacaagctgctgggccctggcctgcctggggaggggccaaccaggtccagcctcccagcttccaaggctgcaaggctgaagggtcactgcctgaggagccctgccccaatcctgccctccactcccatgcgcacacaaacggaagaggccacactgtggcccagccacctcctcacaggagagcgcctcggggacctcgacactcctgcaggccagaggtgggggctgaggccctctccgcgtggctagaggtagccaaagacattgaagatgggtgggggcacggctggcttggtggggatgggtttcagcaccacgggcctgcacaccttctgccccaggccgtccacatccttgcagaggtgcgccagctccccgggaaaggctgggctcttcctccaaaggcccaggctggggacaggactctgaggcagtgcccccagggggcccggatagatgggctgtccatggtactggaaggggcagcaactccaggcattgacgcggcccaccaaggagaccccaggcatcttgagcggctccttttcagccagggcccttggagacatggacaccagggtagtctcaggtcccaggggctccaagcccttgcaatttttcttaccctcatagggaggtccctccctggggcccagtcccccctccagccccacatggtagctgtgggtgggccttggctcttcccagaaggaagcgggcagctgtcttttcctcatgggcacctggccaggctgggcagcttctggatgctgcctctgtgggagctgctccttagcaagacattcctccc

SEQ ID NO: 343639 - DNA, 1000 bp, Homo Sapiens
ttttttttttttttttttttttttttaagaagtcattattactttaatttggcttctaggtaccttcttattcaaggcacaattgcatttcacagtgaagaacacaaagcctctccaacatattcacacacatttagagcagaatttgatttcaacactctaatcaataaatatttagcaaaatgtggtgaatattactgatgaggtaatgggagaaagctaaagtaacagtctgaatagttttgtgcatcctgagttttcttaactaagactttatttttaattaaaaacaaaatttacattttcaaaaacggtttgcctcaaaaaaaatagcttctaaactatattaaattggaccaaataaggattttaattattataaaacaaagctcagtacttcagggaaataccacctccacaaacgttgagccaattcaggggctgccagtagaatcctaaagagtgatgtctccggttcatgtgaacaccatctgcagtccacaccccttgaggacaattcaggccataaggcagaccatgctcagcagagctgccccttcaccaccccagtcaccacccttagcctgattgggcaggcgatggctcatagccaggaaggctgcctccctcaggcttcccaaaaccaatcaagggcatacgcggctcagccacacttttgcactcatattcccgtatgcttccgcttaaatgtactcatgaaaaattttaagatggtttgctgtcactcatcccctgacccagacgggttacacagatctggcagtggacacaccctccaacacagcatgaaaagagcataggaaaacccaggtccagctaagccctacctcaaagtaatttggcctttggttcctcctctgaaagcaggtggatacaaactgtttggctataaaattgtgaatctatggaactgtagaataattaaagcttccaacactaaaccacaaaggcaagtagtgtctgtccacactgatggggc

SEQ ID NO: 343640 - DNA, 1000 bp, Homo Sapiens
ttttttttttttttttttttttttttctactaaaaataatttaattagaaacggagttttggcaagggaggcagaagcggctccttttctccccttggccgcccactcagcaaccaacaaggaggaaagcccccgcagtgctcggccagtgccgcgccatcgccaccagggagcgccccgcgcgcggtccacgtggcagaggtcgcggcctcgcggcgcggggaggagccgcacgccacagtggcaggtcccaggccgtcactccgagctctcgccttccgggccgctgtccggcgtgggcgggaggaggggtctccggcgcgagcgcttgacccggcgcgagggctgcagcagcctccgcttcagcacagcagccactgtgtcctggctgtccgctgtgggcccccagtagatgctctccccgcgtcggaagtttctgtgcagccgtgtgcagagcgtggccagggtgagcagcaccagcaggaaggtcagggccatggcagcccaggcggcctcttcagtgcgtggggtggggccccgggctgcccgtggaggcgctgctgcgcgaggggccggggaagcctgacttgaacagacacagccccctgggctgccttgcccgttgggcacctgagcctctgtcctggagctggcattgcctccaggcgcccccggcagcagggagacagtgggcacagatggggcattactctccctaccagggattcccgccatggactgcttggccttcaagctccctggggaagcagagggaaacctcagggctgagcgagtgggctggggaccaagggcagcccgcagcctccgcctcttggcaccactagaagagggctgcctgggcccttgagatgtcacctctgtgccagggggccgccagctccgcagagcaaaggccagagccagggcctgcacacaccctcttcggcacagcctccctctaccgggagttggctcggagggagcaggccctgaaaggctt

SEQ ID NO: 343641 - DNA, 1000 bp, Homo Sapiens; identical to SEQ ID NO: 160662

SEQ ID NO: 343642 - DNA, 1000 bp, Homo Sapiens
tttttttttttttttttttttttttttttttcaaaaattgaataagtatttattgttccagaaggtacattgctttttatacatatttcataaatgatacaggattttacacatgttcaatagtttgctatttgtttaaagaacttttctccatgtcctccctcccttgcttcccacacaccccaaaaagatttgctcgttgcactgtgctgtttcttcttaaaaaccctatgcacaaacaggataaatgggttaaaaataattcacacaacttaacaaaaataaatgagggaaggagctgacgactgggggtggtggagggagaaggaagtgggcggagggtcaggaagtggagacatgcatcctttcattccgtcatgccaatgaaaggggtgttggcaggagtagcagcagcagcagcaatcctggctggccttcaacctttgcaaggcacctggagtctgggtttgtcatttaaagtttttcttttcatacacaatgatcccaaaggaggaagaaaaagagaaagaaactccttgccacaatgaggaaggatgaatcacgtgaaagaaaaggccaatcagtggtgtggcagcccccatcatcctttccatcctgcccctacagcagttaaaaacaggatattagacacagattcctttgactcttcaagcgcagatgtcatctggaaatatggtagaaaatgttttgacaaagtataagattaattctctttctctcaatttaagataagaaaaaatagggtgaagagagtgggcttgaaggaagccctagaaatgtattcctatataaagataaattgcaccctttgagatccacacacttgatttacaactgaagttgtggaggtgggagggctcacaaacagtgtggaagtgtgtgtccttcgagatgaacaaagcctccagacaaggcagtcccatctggctggcctggaatgctgtcacacaaagcagattagcaataaaattattctggt

SEQ ID NO: 343643 - DNA, 1000 bp, Homo Sapiens
ttttttttttttttttttttcagctcaaattttatttagttaattactattattattcttttttgtagcatcggagtcttgctatgtcactctagctggcctcaaactcctggcctcaagcgattctcttgcctcagtttgcaaactgctgggattacagacatcaccatgccaggccacaacccaaacttgaaaaagaaaatctaagtggccttagaagagtttgcaagtcagctgaccaatgtggtacctccttaaggagggcctctgaggcccgatgaaaaaggcttatataaaaggctcatgaccagctctgccagtgatgaacatgtgtcaagtcgttctgctgtccccaactcccggacccaggtggctctgaattagcttcagctaataaagaacaaagacggggggcagaaaggctccccaaacttgtgcaaatccagtgagaaaacactttgcacatcatctgtctcagctgttctgcaggtgaggcacactcagaactgcaccaccccaggcaagcagtttgccaggactcgggggcctcagggtttcatctcggggcctccgcctgcaccagcgagtgggcctggctcagggcgagcctgtccttcttctccttctgcaagacctgctcctcccacagcgcctggtccacctgatcgtcggtgagcacgacaggcttgtacttctcatcgaagagccgctcgttggtctcggaatgcagctgctggggcccgaccacccgcaaatgcgccggcaggtgcaggaattcgtcgtcgttgatgtcgcagtcgcgcatccaggcccccagcacccaccagcgacccacgaagcccacgtccaggacccggccggggaagtcggtccagcggggctgcaggtagcggcaacgcgcctggtagaggctggcctgggcgtcgaagggcgcctcgtacaccagcgagcagagccccaggttgacgtagcgcaggcggccacggccccgcagccagag

SEQ ID NO: 343644 - DNA, 1000 bp, Homo Sapiens
ttttttttttttttttttttttttttttgagagtaaaaaagctgtaggctttattaagcagagtgacagtacaaagctttcacagcgtggaaggggtcccgagcggggtagccagtgttagatttttttatcaccttttaaactctctaaggcaggaaatatgtgtggtgggaagatgttaccagagggagaaacaaagacaattaacatgtctcagatcttgaggaaaactggaattgtaacttaagttttctctacttataaccttgcagcgggatggcaaaggagacaggatctcacgggattttacaaattgtgtttacaaggaattggaattgggaccatagataaggtctgctggtcacagaaaagtgggcttttaacattccttttagtttcaggagagggggaagggagagagggagagaggacacagggaagcttacaacaaaattttcgctgtttatagctttcttggggaagaaaacacaggcgcaaattctgatgttaggaatgttttaagcacatatcttcaatattattcatccaggaccaaagtaagtccgcatgcaggaaatgagtgagtttcacagctttctgagcccctacttgacccaggaagcccagctggaacctcctctcactttctactttcttctgatattccttgaaaatacttctccttcatagcggagataagtagttttaaacagcttggttccttccctgctgtgaagtattgagttttatttcaggaccaaaggacataaaccagtttatgacataaacaggtttagacaatccctcatgcaagaactggggaaagtttgcatcgggttcagtaacaatctggtttaagttgccttctggtccacttgctctctctgggatattaatgcggctgctgctcctttcattatcactccatgaaaatacctctgtatcttgagaatcctgaaagatagggtttctcttattccttttgggctgggtggaatga

SEQ ID NO: 343645 - DNA, 1000 bp, Homo Sapiens; identical to SEQ ID NO: 160663

SEQ ID NO: 343646 - DNA, 1000 bp, Homo Sapiens
ttttttttttttttttttgagacagagccttgctctgtcgcccaggctggagtgcagtggcgtgatctcggctcactgcaacttctgcctcccaggttcaagtaattctcctgcctcagcctcccaagtagctgggattacaggcgcccgccaccacgcccggctaatttttgtatttttattagacacagggtttcgccatgctggccaggctgatctcaaacacctggcctcaggtgatccacccgcctcagcctctcaaagtgctgggattacaggcatgagccaccgcacccagcccaggcccgtctttcctctcctagtctgccccaatcggaaggatcaggaggcgtaaagctggcccatggggaacctgtggctgggagcccatgaggcaggggcagcagaagagggcagagacggttgggacctctgtggccctggctgaggtctgctctgatggcatggtaatggaaacctgctaccagatgacaaaacactattaccaaacagctgggtgaccttaggaaaatcactcaaccgctcctgcctacggatttcctcatctgcggggccctgcagagctgttgcaaggatgaaatgaggcaacgtacatgtgcctggcagcacagctgaccccacacagctcaatcctcagtgtttgcatgtttgggaaaaaaaaacaacaactagaggaactagttcttcttacctgggaagattcctaagcacaaattaggtttcttaggggctgagattagaaaaaacttggtctcagaccctagaccttattagcaggcccttcctagagctggctctaatcggcacagcttgggaagctctccacctggccactgctgtctttctgtttctggcttaggcccactggcctgcctggcgtgagctccctggggcagggagcttgcaaaccttgggagttgagaagcgctggctcggccaggtgtgggggctcacaccagtaatcccaacactttggtga

SEQ ID NO: 343647 - DNA, 1000 bp, Homo Sapiens; identical to SEQ ID NO: 160665

SEQ ID NO: 343648 - DNA, 1000 bp, Homo Sapiens
ttttttttttttttttttttttttgccttacaagttataatttaattttactcaaaacaatatgagaattaaaattctttttaattttaaaaatcaaaatgaccaaacaatccagcaatcctacctctgagtatgcgtctgaaggaaatgggtatttccaagagctatctgcactgccacgcttgctgcagtgttattcgcatcagccaaggcacgtcagccgtatgagggtccttcatgatgcacggataaacacactgcaggagcctgctgagactccggagcatggtccgtgggaacgattctgatgcttctcaaccacgtgcttccttagcagagaactgtctagattagcggttcccagtgtttttggcaccagggactggtttagtggaaggcagtttttccacagatggggggatggtttcaggattaaactgttccacctgagatcatcaggcattagtttgatctcataaagagcatgcaacccagatccctcgcatgcacagttcacagtagggttggcattcctctgagatgcagtggcgctgctgatctcacagaaggcagagctcaggtggtcacgcgcactcacccactgctcacctcctgctgtgcggtccagttcctaacaggccacccatggggaccggtctgcagcccaggggtggggatccctggtctagattagtgcagcttgactttggaaaagaaacaaaaaccctctgatgtgggcacagcagccacatcacgcagccccatgatgcccaacttaagagctccccgcgggccctcactgggtaagggaagtaagcagcccagatcctgctacccaggagaccacctgccaccacttcagaaaagccaggggatctccctgcactctaggtctgaggccatttgtgaagacgtagctcaggtacagattcagcaggcacattccccgctgaccccagagcagctttctggcctcacccagctccggggcctctgtgca

SEQ ID NO: 343649 - DNA, 1000 bp, Homo Sapiens; identical to SEQ ID NO: 160666

SEQ ID NO: 343650 - DNA, 1000 bp, Homo Sapiens
gatctgcaatgactgttgattcagcacattagcatctgacacagccaacctgaatacttcctgccccaggcggtcagggttatggcacgatgcaggtggcactcaggggctaacttcaggctgatgagtgtgtggggtatggggcagcagaggcagccagccagcaaagaggggccactgagcaccagggccctggtggaggctgctgtgggacggtcaggccaccaccgcaaagaggcagccagagcttctgcacaggatgtccctggccccaggtcctgcagcaccttagtccatactaccagccccacccaccttccttcctcttccctcttctaggacacaggctgtggaccccttcaggtgcactataatggggctggaggggcccccacatctctcagccccactaatgcagaatcccactacccgtgagctagaaggtgctcagaggccaggggtctctaccgcccatgccgggcggccttccagtcattgcacagcaaagccatgtgcagggcgtccccctcaaccctgccctgaacatgccccagggcactgaggggcgaagccagtgcttgggctctgctgctgggagtctctggtctgtgtctgtgtgtgcctgtaagtgtgaaataaacctctctgatggcagcaagcctctcacttgttgtaggactgcaagacactggaccgaaagcctccaacacaaaccctagctgccaacctgctcatttcttaggttccactggtgagagcagctttaacacacaggcccaaggcactacggtgcacctcacaggccagtaagaaacaggccctttaactggagattttaaaggttacaggttatagctttaactccttctgagacagcatccatttctcaagaggcctgagcaggaagctccgggagaaccaagcatgcggagctgctcagggacgtccactgggaagcctggtgtccactcccacctgcttggcccctgcaactggggtc

SEQ ID NO: 343651 - DNA, 1000 bp, Homo Sapiens
ttttttttttttttttttttttcacttcagactaaattttattaaatatggtgtcatttggctacaatcggtttgtctttataaaactaagtaacttattttgtagtaaaaacaaccccaacccactgcccctctttggcagcccttgaaactcagttcaaagctaggcctggctcccggccatggcccctgctgccttcacctgctgagcgctctaggaagcctcccaaatcccaagtgtcaggcccccggagtccatcacctctgcctcaaacagccaagcccaggggctttggggccgcaggtatgaaggcccctccagtagccacacctgtgtcagggctgtgccctggggcctggccaacatcccccctccccttgaaccatcaggaactgggcaagacgcccaccagaggcttgaccacagggggcgtgcatccccttctgagcctgggagaccctaggggagtgggtagcctgggctggacccctggtgggcttgtgttctggatgtcgctatggcactttggtcctcaactcaaacccccacccctacccaggagtctgagacctcggccttccctggacttgttgggcagaaaaaggcaccaaggacaggatgagaaacccggaggggcagccccacaaatgagggcgctctgacctgtcctcccattgccaccccacccaggaacagcccctcaactggtcacagccaccaggaagccccaggactgctcccacaccacagcagtgccctcttctccatcccaccctcaggacctacccagggtcctccaggcagccaggggccagctccaggacagggcaggagaatgcggtccaggtctggcacgtaactgagggtgggtatgctccagagaagtaaggcaaatggcccagatgacgaccacctggggtagacccagggtctccagggaatggctcgggggcagacgctgtgtctgtgtgtgcaggatctgcccccaccagcaggaaa

SEQ ID NO: 343652 - DNA, 1000 bp, Homo Sapiens
tttttttttttttttaattaaatattacataatttaatgttctcccaagaatttgagctgacattttcatatgaatacaatttcacaaaggttacaaatatatatcaacttacaacagaaggaatcatttagtattttacagtgtttttaaaaatctagctccataatcactcttgaaaaaaaaaaaatccttaccacataatatgaaaagtccacatttctctggaaatgcatagtcacctaatagtaaggtccaaaatgagaattactatctccagaagagggtggaggaggcagtggtggagggggagggggtgggggtagggagtatggtaagttaagtaatggatgagcagccatgtttggtgtagcccaacccatgtttacaggtgggggtggtggtgggggtggagggcggaggggaaaattatgcatgtcaaacactggaagaggaaaggggtattgtggcataatgggattattttgtctctgagaaggaaatcctgaagtctcctgagataccatatgttctgagttatagaaatgctgaggtggaggcctgccatggcaagatcgagggtatctggccctggaaaatcctcgtgtgaattctctgttacgatatccttttgcatgctctgaagcagagctatgagcattccaattctgatgtacttcagtaaaatcttcaccaggctcattaaattcagatttgagttttttccggccttgaatctgagattttttcctctgtttggcttccttctctttttcatcatcactaaaatctaaggcctctggtggtggttcctgatcattcttccatgatgcatctgatcccttatcctgttttagtttttctgtgaatatatattgagtgaaatctttcattgatggagcaaaatacatagtctcctttattttaatacctttactctcaatgtgatctgaagaattaaaccgtaacacataaaatggatgtgcaacaggtccaaatatc

SEQ ID NO: 343653 - DNA, 1000 bp, Homo Sapiens
tttttttttttttttcaatataagctgtgtaagtttaaattaacataaagaaaacacaattgtttgtaaaaacaattatacacattgagagaaatgataactctctctaaatttgcattctcaatattgtctgtgcaaaattgcttgtagtgtcctcaaatggatgtctgtggccaggcgcacagagaacatccccttaaatggtacatattgaggcaaggcggccagctgtctcctttaactagatggagtctggccaggtcacggctgtgctttcaaacaactggtctggatatgtgagacctgcagaacaggcagcagcagctggaaggcatcctgtatgtacgttgtactgttgcagccctctaacaatacactactgatcatggggttaaggacctcggccttcttgttgctcccaacagtggttaaagaattcgtaaacttctttgataaagaggccacttcattgcacattgcagtagttaattttattagaacttttgcttggtcctgagctggtttttcctcttcttgtccatgaagaattaattctgctactttatgaagctgctcaatacagcgcgctgttacctccgccagactttcaatggacgacatgtatacttcctctatggtcttagttttcttttcctcctttttgtcttcttgagggtcttgagatttctcttccttttcttccttctttgtttcttcttcggacacttttgccacatctactgacaccacggtttgatcctcttccacccagtcatgagccctcttcatggccttattgagtttgtcaggtgtggccgccacatgtaattcaaagagaagctctgtaagcatgcgagcaaattcttctcccttttcttctaagccttgttcttcttgattttcttcattctctaattctttggctgcaaagatgtctttaatggaaattaggtcattttttaagagttccagcttctctccatcaagtgatgctaaaaat

SEQ ID NO: 343654 - DNA, 1000 bp, Homo Sapiens
ttttttttttttttttttttttttttttttttttttttttttttttttttttttttttttttttttttttttttttttttttttttttttttttttttttttttttttttttttttttttttttttttttaagattctgaaaaccctgtcacctgctttatttctggagaagggtaaagggagaagggaaaatattcacttgaatttgaggggcagctaaactggaagcaacaatttcaggcctctaaggttcctctgatccataagggaatgctgaaacttccttgtttggagattcaaagagtttaatttttccctacagcaagatcaacaattttcactgggataaaagaataaagaacaaactcaatagcaccaaatggggttttaacacagaaaacagggccactccttttaaatgcaaatttttacattaaaatatgtttataaatcatagtagttgttttccctcttgattcaacatttctccctcccctaacaggagccctagaacctgaagagcatgtacattactaacgagatatacaatccagccaccctgtccaaactggaatctgattactaatggactacactcgaggctgcccccaagggatgggaagcagtaactacgctctcagggagaatgggtactgaggatgccaccagtcaaagagccgaacgctgtgcactgggtccaggatgacttgcacaccctgttcactgcgcagtttccgaccaccatggacaggggaatcttggaacaccagtctcactcgatgatgccgcatgtccgtgctcacattgatagtaaacagagtaaatatcattcccatgacaatcggaataaagatgaaattgagggtggtgacctgcagtaggcagcagtcctggtctggattggtatgaacatcttcgtactgaacgggaggctgcaatcctcctgtacacttgctctttaacctaggggactgttttttgaacttgaagttgaattccc

SEQ ID NO: 343655 - DNA, 1000 bp, Homo Sapiens
ttttttttttttttttacttacgaacttttaaactttaataacttaagttaaaagagcaaaagaaataatcagttaaaattacctgaaagttgtgtattaacatttataataactattacacaatttctatattgtattaaagatcctgattgaccaaaagaaatcatgaggtaaattatgcacatggataacaaaattaagactataagaaatataaagaaaacattgcccttttgaactatttacaaatttttaaatcatacctgtaacctaatgttactaaagtttaaaatttttaacataccaagtgcctcaagagttttataatttattatataaacaacttgatacatttacttattcacttattaaacatttaacagagtaaatgtcatttttcagtagtctgaaaaagaacgaggattctgataagtttgggggggttttttgctttccattaaaacaatagtggttgcaaagctatcccttattttaagaaaagcaataaaaatgtaaagatctgcaaaattagaaagcagaaaactaatttattctaaatattccgaatcctcaatctttagtaagtaaatgtgtgagattagagccatctaccggttgaagtgtgatgttacacaacccaactgttggactattaacaaagcagggagacttagttgtaggaatttaaatggggatacacatgggcaaaaatcatctggtctaggacactggttcaagggtttaataaaatactctctttttatcaggaaacccaacatgtgtaacaaagtaggatccccctgtaaaaccaccagtaaggggcctccaaccctgaccctcaaagaaaggagtcactaattagcctgagaagcagaggccaggccaatgaaaaaccagccacgagaggtagtttgggcaaataactgtggtttggaaggaggcacaaagaaggaacagcattagcaacactgtctcttacccatctttcccctgaagaca

SEQ ID NO: 343656 - DNA, 1000 bp, Homo Sapiens; identical to SEQ ID NO: 160667

SEQ ID NO: 343657 - DNA, 1000 bp, Homo Sapiens
ttttttctaaacaaaatataaaaaataaattttatttatgcatttcaatacattaaagtttgttccttatacctttaaaaatgataccctgaaagacagctgtttagtcattctatacattagcagttctcaacctgcattgtaaagtccacaagttcatacataacactgagcactaagcatcctgcagtattttaagtgtattttcaattgcactgtaataaatttcaaaaaaccccctatatatttaaaagcaattctgaattcatagcttttaatcaagatgtactcatttactatttatacgaaattacaattactatctaacagcccatatatgttgggtttttgtttctgcttttgagagtttcactcttgttcccaggctggagtgcaatggcacgatctctgctcactgcaacatccgcctcccaggttcaagcgattctcctgcctcagcctcccgagtagctgggattacaggtgcctgccaccatgcccagctaatttttatatttttcatagagacggggttttgccatgttggccaggctggtctcgaactcctgacctcaagtgatccacccgcaacctcccaaagtgctgggattacaggcgtgagccaccgtgcccagccctgtatgttgttaaaatgaacagacttacaggcaatctgccatgtactaaatgcaaaccatagctaataatttaagtcatacatataactctctagcaaagagaggtatttttgttttaataataaaatataaaaatgggattgtttatagaaattcatcttttgcagaaaaatcagcttcaattctgtacctcaaacatgggttactgcatatggtacatcatgaaatcaggtggtgccactgtcgtgatagtttttcccatcttagtagccgcacccataattaatgcctactcacatcaagttagcaccactcaaatgtgggccattcacaggcagccagggatcctcttggtccgtgag

SEQ ID NO: 343658 - DNA, 1000 bp, Homo Sapiens
gacaggaggaaaaaaaatttaataatatatgtttgcacaggagttccacgaaatatgagactccaagaagggtcagatgattgacactcatacaccatcgtgagctatcgaaaagaacggcagtttgggagttctgcagggagttgaccacagaagtgggagagtgaagggaagaagtgtgtcgtgaataaagcttggctggttttcagataaaaggtcttgcgagtggccaggtgtggtggctcactcctgtcacgtcccagcactttgggaggccaaggcgggcggctcatgaggtcaggagttcgagaccagcctggccaacatagtgaaaccccgtctctactaaaaatgcaaaaaattagctgggcatggtggcaggcactgtaatcccagctacttgggaggctgagacaggagaatcacttgaatccgggaggcagaggttgcagtgagctgagatcgcgccattgcattccaatcccgggtgactgtgtgagactccatctcaaaaaaaaaacggaggaaaaaggtcttgtgagtaataaatgttgtctggagcagacctcaggagaagaggtgagagtctgtctgtgctggtatcacctccaatctccttccctgtgatctcagttcctcttccctggttgatgagattcttggggatgggattcatgatgatcaaatttcttttgaggatttgtttttgggcagatgagggaggctcagagaaaagcctctccctgcatgtgctatttcccaagtgctctcagtttgaagtcagtggcaaccagtagcatatttcctgaaggccttcagcatccactaaaccagtcaactgttcccatttgtttcctgaatagcaaacacttccttgaaatccttctcaaattcagcctccagtctaagtcccatttggccaaaatccttatacttgtaagaggccctgtggttctggaagatgaggcgcatgtcttgtacaaacccctccacttggggg

SEQ ID NO: 343659 - DNA, 1000 bp, Homo Sapiens; identical to SEQ ID NO: 160668

SEQ ID NO: 343660 - DNA, 1000 bp, Homo Sapiens
tttttttttttttttctgttaaattttattatagtaacaaagtgactatttttaataataaaagcagagtgcctgtaggcaagtggatggccctatctcaggccaagtctccttagtgtttcagacctaggctgaccagaatagtcttctagaatgtaacatttatccaccaggtgtcattatttaccaatctgacaagccactgggctgtctccgtgcattcaatggttggaatcaaggctacagaccagaataggagatgaatgaaaatagatttagaaaagggcgttgtggctggaatgcagcttgcagtgtagagggcagggatgggagggtaaagagggctctttgaaagaccagtgtcactttcctgatcaagtttcttaagctgatacttccctggaaggagtcagaacttgggtttgtaggagtagccctggcctccagctgcattgtgctagactcaggtttgaagccccaaatctaagtagtcccccctttgataaattcccggccgggtgcagtggctcacagctgtaatcccagcactttgggaggccgaggcagttggatcacctgaggtcaggagttcaagaccagcctggccaacacggtgaaaccccatctctgctaaaaatacaaaaattagctgggcgtggtggcaggcgcctgtaatcccagctactcgggaggctgaggcaggagaatcgcttgaacccaggaggcgagatcatgccattgcactccagcctgggtgacagagtgaaactctgtctcaaaaaaaaaaaaaaaagaaaagaaaattcccttactgtgcctacttgcccctctgcccttcctttctgacttcatgtgcctcagggcgtaggaaagcatccacagtagaaagataaattgagaaattgctccttcccagtcttcagaccagagacacagtttaggatccaaaagggagaggtcaggggccgttagaataggagatatgcatgggcgtgcctgt

SEQ ID NO: 343661 - DNA, 1000 bp, Homo Sapiens
tttttttttttttttttgagggggaatgtgtttaatcccagcacgtcctctgctgtcctgccctgtgtcgttgggggatggcgagtctgccaggcggcatcactttttcttgggttccttacaagccaccacgtatctctgagccacattgaggggaggggaatagccatctgcataggaggtgtcttcaaacaggaccgagtagtcatcctggggccgctgtgggggcgcatggatcagggcgcggtagaagcaggtagtctggggatacagggccagcacgagctgctccttctggaacaaggcctcagggtccgtctccgggttggccttccactggggcagcgggatgacacggcgccggctcagggtgtgtctctctttgccttcttcatcgatgtcatctacctcatacttgttggtggcatggctgtaactgaccacctcggccaggatccactgctcgtccccatccacggccttcacccgggcagccaccttgtctccaggtctggccacgtagtctcctgaggcagggatggccccacagaggggtgggggcttgtcaccaggcttcccgatccacaggggcagggtcatggccgactgctgcagcagggtcatcagcacccctctgcgcatggtcttccggggtggctccgagtcattgtagagaccggcaatcttggccgcaatccgcctctcttccaacagagacttgatttccgcgatcttgtccagagctttccgaaggatgttgcactcagcctctgcatcggccttggcggttgtgtagaggccacgcagctttgtccggtaatagggagaaatcttgttctctgtctgcatccgctcatgggtcttctggatgttcactaagttgtgttcgctccgcgaacgctcttcctgggtttgtttgatcagctgatggagctctgtgagaagttctgcaatgcgggaatcggcagacacgagggccattgtctacaggggcaccgag

SEQ ID NO: 343662 - DNA, 1000 bp, Homo Sapiens
tttttttttttttttttttgtttttgaaatcatcgatcgagtttaatacattgtaaagaaggaaaactacattggcgtatttaagacaaacactttttctctatcctcactacccactggacggtcctccttggtccaaaaaaaacctaacaatctcaagacacatcggcagctacccctcccgggtccaacctttcagatcctcccattacactgttaaaacatgtaactcaatccatccgcgaagaaaaccaaaccaacagaaaaggaagctgaagacatggacatcgcaagccacgcggtaatgcatacttggcacagagtagccaatatagaagacgtgtgcctcacacggttcactttgttcatcaataaaagaatataaaaatcttgttcacccagtggtaagtgtattaaaatagatctgtatcatacagcacagtttctcccggagtcgtgagaatgacaggagggaccgtggcagctgcgggatttgccggcctcctcgctctgcacctctgcgtgtgtgcatgcgtgtctgtggtcgtggccgcgtgcgatgcacacacgcgtgttcagtgcaattcggcaccatgtgatatgctcggggtgggagcccgtggctcctggacgcttatcctgttgtgctgagtccctcaggactgggatgtgggaatcgggcaagggtgacaagctgccactgcccaccctggatgcagaagcccttggcagcaagtctggtccccgaaggccggaacctcccgaggccaccgccctttctttcctccccaaccctccacccggctcgtaaaaaacctgccggatcttccagcttggccaggcttcccgaggggaggtgttcccatttgtaccttgaagcagagactactagaagcagaaaggaagtcagccagagtccccccaaccattcacattaaatatctcacaataaaaacgccatacaaaagtgtgaagttattttttggcatagtgtctgcac

SEQ ID NO: 343663 - DNA, 1000 bp, Homo Sapiens
tttttttttttttttgtcagtgagaaaaataaagtttatttcttgtacagaagtaattccaattcaggttttaagtctgaaccttcaaacttgggaagtttttttccaagtcatcagcaagcgccttatcaacttcacgtaggattttaataaaatcttccaccacagggctatagaaaggaagaaggttttgaaatgcagaggaacacttctgtttgctcaactggccttcctttactccctgagccaccgtctcctttgttaatgcctgaaaaatattagaaagaaattcacataaaatatcctttaagattttcaagtggaaatcatcttgggttaaatcagtccttttagtttcctctgtgttagactctgccgagttctctggttttttctgacactgttccatattttgtaagacccgaatgaggctgtcaattagaggaagatctactttttctatctttagatactcttgctcagtctgtgaggcatagatggcagacaacactgaaaaaacagaggctagcaccgttttctgttcttgaagaatgatgggtggatcatcagactggcagaattcatggcagaccaggtcaaaaagtaaattccaaatgtcttttccagtgtcaggacaatgtacaattgcttgaattccatcatccactgtagtaagcagttgtaaaatgtgcatgtaaacatcaagccattctggattttcagaacgtacttgtttggcagcttcaagtatacagggcacaagccgaaacactggctgctcttcagactcttcctggggttggtccagaggctgagcagccccatttctgacccattctaacattagtttctcatccaaatcaaagagcttgtccacaacctcccccaccttcaccagcaagtcaacatttgttgaacttgacataatgaagcaaatgctatcataaatagctggatgttcctggatcctttcaacccaaacactggccacttctgcctg

SEQ ID NO: 343664 - DNA, 1000 bp, Homo Sapiens
tttttttttttttttttttttttggagctgatgcctctctttattcatgtatttcatcccctgctgcctggtttctcctgaatccccttgttcccctaaatagcacccccagtccccgcccctagcccagctgcaggtggagtagcagctgctgtctccattcagcagatgggcagactgaagcccaagagtgtggagcccagtctgaggtcacacagcagtctcctgggttcccacttggccttcaatggggagggaggacttggcctgggctccgtgcgccctcactgcagggtggctggctgcggccacgtcgcagggagctgccaatctggtctctgagggcctccagtctctgggccaggtttggaaccccggccccacctctgagccctggtgatgtcttcgggggcctcacaggcaggggaggtgcagaaggtaccacctcctcctccgtcaacatctctgccaggactcgggtctgagtccagtcactgtgactcctctctcttgggcacttggcagagccagggctgcatgggggtgcccagggtgggggccgggcagatgggggcctgccacctgaggcctcagggtccaacacctggggcaggtggtgctcccctggcaggcaggcccagtgggccaggggcactcgacacagtgggcagatgtggcagcaggggcaggagtagaggggtggcagtgcatggcaagggggagctggggccatcaagcagggacacggtggggtcaggccaggaccctgctggtgatggtagcaggcagagaggagacgcctctctagtgcatggacctgctgggccaggatgcgctgctcattctgggccaggtctcggctattctgcagctggctcttttctttcctgagcctctcattctctagcatgaactcctgtagcatcccgtacaggttccgctgggcccaggccacccgggctccactgagccctgaggccttgcagtccatttggtccag

SEQ ID NO: 343665 - DNA, 574 bp, Homo Sapiens; identical to SEQ ID NO: 160669

SEQ ID NO: 343666 - DNA, 1000 bp, Homo Sapiens
ttttttttttttttttctttttttttttttttttttgaaacagtgaatgcaacagttgttttacttgtaaccacatgacaaagtgatgtcaaacaccacagattttgctggttctcctcatgttcacccatgtccaggattatcattctcctaggattgaatgcacttcttattctaagaatgtggaatgtaatgaggaaagggaaatgcataaaataaggaaaggcaaaagagtgatgttccctctttagctttttagctgtgaaatatttaatatcccaatatgatatacattccaagttacctgagtttagacttcaactgaagtacctgaagctaggccatagggtgggcactgtgcaactgttgtggccattttttttttttttttttgcattgtatgtattacagaagttagaaacaaacacctggatcaattgtaaacataatcctgaattacagtattttccataggacaaaacacagcaagacattttctatttagacaggcaactttttgatatagagcttatttatactgaagaatctggaacaaaacacaggacacagtactaatctgtcaaatatactatgaaatgcatagtctccacttaaaatgctgaatgacacacacgttttgcaagcattactgctttccacaaaaactgctgaataggagttccgtccctgccaagatcagtgtttaagagatactttatgatgctgataagtattattggtggtggtggtgttcagaaagtttgtcactcatgcagatgtctgaaatcttgttccgaatccatggaacacagggtggaggccagctccccctttttagatgatcacatagttctgagcagagatgtggtcctcaccctgcagttcctgcaggagctgctgctgctgggatggctgctggacagaggcctccatggagcccgctgtgctggtgtcatcagaaagagacgtaaaggaaacccgggatgagagctgctcaacg

SEQ ID NO: 343667 - DNA, 1000 bp, Homo Sapiens
ttttttttttttttttttttttttttgggatttttagtagagacagggtttcaccatgttggccaggctggttttgaactcctgacctcaagtaatccacccacctcagcctaccaaagtgctgggattacaggcatgagccaccatgccccgtggtatggcactgtggacgtgcactgtgtgtgtgcgccatagcgtgcaccctaactctgctccccagctaggatgtaagctcccggaggcagccgctcactcttatcttcgaagtccctcccacacctggccgtggccagcccctactgggagctcaagaaacactgccgatgggctgatttgcagccaggagatctggggagtacagatgaggcaggggtgagcaggtgtccatgcagcagggtaggggaggtgagcatgaggagtgggaattggagaggagattagatgaggacaaagcagcctgaagtctgcggttgagggggacccccgccccatcaccttcccccagttaccggccagaatgtggagggcccctgcggtggccgccagcttggctttcctggagagctccaggcccccaatgttggtgcagcgcaggcccgctatgcctagcaagaggccgaggaagcccaggaggatggcggtgatcatgagtgcccggcaggcctgaatataccctgcacacacaccgcctccttacagcggacgctcaacctgcaacttgcaagacgcctcccttcacaggggccctttatagacatcagccggacaaggagaccagtgccccccgacagtgaggctggggagtctgtggagccagagagggccagcatggacgggaactcccagcagttgtagacgcccagggagtcggtggcacagctaaaccagaggttctcgaagatggtgttggtggtgatgacgttcccgtgcacagtggacactcgccagtagctgtttggcagagtcacccccagcatcagcagccccacagttgccatga

SEQ ID NO: 343668 - DNA, 1000 bp, Homo Sapiens
ttttttttttttttttttcaattcagaaagtgtttattggccggagttgtcggagagccaaaagaagcagtccaggagggcttccttcaggaggcagccagcacagttgcacagggcagcttccactgccatctgccagcactgagtcctcctcatccagacacaggactgtccatgggcctctcaggggtctttggggccaggatgggacccctcagacctggcccaggtgggttttcaaagcctgcagctctcggctgttgatgttgttgcctccacacacgattaccacaactgaagtcagggaagggggcaggcagccctcggcctggagcctccgcaggaggcctgagtagatggctgctaaggctgccccacaggcaggctccaccagcatacgctcatcatccaggagctgctgcacagcgctcacagcctcggtgtcctccaccacttcagagtgaatcttgcacacctgcatgcactccagggcccgagcggccaccgtcttggcacccaggctcttggccacactggtgatgtctggaagtgtgaccagcttgccggctgtgatggccgcattgaagcagtgtgccccatgggtctccatggcaatgatgggtacatgctgccagcccacctccagcaggccagccaccaccccggccaggagacccccacccccaactgccagcaccagggcacctggtggggtcctcagcactgctttcagctcctgcaccaggctggcgtggcctttccatattagggggtggtcaaacggggggacattctcccagccgtccctcttggccaactcttgcgccctcagattggcctcgtcccagacctttccagtcagctgaacctcggccccctccccctgcagcctctgcaccacctgcagggaggtgctctcggggagcacgatggtggcaggaatgcccagcttcctagcagcataggcagcagcgatgcccgcattaccccctgaggagca

SEQ ID NO: 343669 - DNA, 1000 bp, Homo Sapiens
tttttttttttttttttttttttttaaatgtttacaaaactttatttaacaggtgcaattattatactgcgaaaatgaaaatattgcatactaaacagtacctagggtatgatctcaatgtaaaagagggaaaaatgtcaaactattgatagaggctatctctgaatgaaagtagttaatttttcctgcttccttacattttcagtaatatccaaatgttataatgaattggtcacagtgaaacacagggctgacaacccatccaggagaggcaagggaacaggctcctggggctgccagccagtgagagcagagtctgtcccctcacccccatggccagtgacatgctccaagttaggcctggagccttcccctgcctcttccgacctgcatctcagcagccaccctacccagtgaccaggagtccttaggctacctggatgcaagtcttgcgggggtgacgggccacccccttccttcttctcccatccaatcccactggttcctggatcccaggccctcagctctgccctaaaggaactctgagcaatccatgatgagtgtgtgctacacacatcctttctctcttccaaataagggacttcccctttaaaagtggtccaggacaagcaggggcaagggtgatggcaggcagggtgtgcagccagccgcctggagcccaggaaagctactgaggctgctgtcactggaggaagaaaccccaacgtttccagtagtctggaaatagactattggtaagaacgccatttgaggactggcgtctcagctctcctagctagctggtcagtcccttcagtcggtttctccggccactctgaaacccccaaaaagactggtgtgtgggggtatgtgtgtacttccctctggaaatggctattctacccttggggtttccttctccctacagtgaaagcctcagaaagtgctgcaatagcttatccaggcccccaaaggctgaggacatatcccacctgccagc

SEQ ID NO: 343670 - DNA, 1000 bp, Homo Sapiens
tttcacacttcatcttttattttttcttacaaaaggccttcatatcatcgtttgtcttacaaaaaccaaagtccttgtctctgagtttgaaaaacatcttcccagaataaatgggaaaggatctcttataaatatatatattttaaaaaagcaaaacatgttcctaaagcatcttcctttccagtttcttttgttccttcgcttcctggggccaagactagagtcacacagccgcctacccgctctccctctgctctttccgggagcttccttcactggcccccagggtccgcctggagtgggagagcccagcaggacccaggcatgcgttaccagcacatggcagggcccgccgtgcccagggactgcacgttgcggagggcagggcggacactgtcctcataggcactcggttctggggacgttagggctcgtcagctgggccacagcatctcacagatgaggagaccgaggtccagagggaacagggcccagctgtggtcacacagccctgtctgcacacatccccgaggttgggactgagaacttacgtggtgtggcagcaggagggggctggccatctcactggctgagagcccggccccagctgccctgtctctctctggcttagatgtagggctttgcgtggaggggtgactggaggccaggccctgggaagcccatgagtggcacctcacactcagacccgctgggcagggcctctccaccgccctctgttgccttcgggcctggctccaaggggaccttcactccctccagttccaggggcccagcccctggccccacctgccctttgtcctgagccgctgctgccatggcccgcccccgccgcacacagtaggctgcccccaccgcagccagcgcggccaggagcaccgcggccagggcgggcgcaatgaggagcggcaggttgccctcgcgggcctgggtgactggggcgtggttggagtggacggctgggggtgtatgggcctccccg

SEQ ID NO: 343671 - DNA, 1000 bp, Homo Sapiens; identical to SEQ ID NO: 160670

SEQ ID NO: 343672 - DNA, 1000 bp, Homo Sapiens
ttttttttttttttttttttttagccttgccgccacctttattgggcactcagccctgaggctctacacacacgcgccgggggatgggaggggatggggtgtcactcggggcagggaccctctggcgggaggacgggtggctggtgataagagcatggccccggggcccggcgccttggcccccggaacgctctgtgaccctcgcagctgacctggcctaagggcgtgcagagtcgtgacctggaccaccccgtgggtgaactggctccccaagttctgggctcacttgggggcattgaagggcacggcccgctggttcatggggttgtcaggagagcggagccactccttcttgagcagctgtttcagctgcgacagccgcatgttggggttctcttgtttgagccgcggcagctgggcttcctcaaaggctgtgaaggctgcccgcatgcgtctttctgggtgccggtcggccgcctcctccgccacgctgagcactgcaatggcgtcctcgatggtgcgcgcctccacgctgccctcctccagcacgcggcggttcacgttctcctccagcggcacctccagatggctcttggctttctcggctgtgtccggggcctccctgagctgatggtctcggcgcagcgtgtcctcgatctgggcccgggtgaccttgctggacgtggccacccgcggcgccttgccgcccttgagcttggagtcctcctcctccagtaggcgctgcgtctccttcttacgttccagctggtcgaggcgccgcttctccttctcctccttgcgctgctccttcctcatgacgtgtttgtcgtcgtccttccagtaggcatcctccagctccttctgcttcttggcatcagcggccgccttggcctctgccctccgtgcccgggccgctgccgacttggtgttctcaccctggaacttcttgggcatccctcagcagggtttgtaatccccgtgctttgggaggctgaggcag

SEQ ID NO: 343673 - DNA, 1000 bp, Homo Sapiens
aaaggagtgaatgttttattctttagtgtttaattgaatacataacaagtcacataatcaatgattcattacttcacacacaggaaggaaaacagtagctagtatttctgttatacaactggttgtgaacaggaagaacaaaaatctttatagcattagatggttgaaggaattctcaaagtttgggcatgtctgaaaagactttgactgcatcttttttcaatataaagggatttttttcttacatttctgtgtcattagaaaaatctgataatcttataagattttttctgctcttcttacatttagagaaaatggtttaatgatatgtactatttaaaaaatcagaatcccagataactctgtgtgaatcttacattgtctagcagataaggttttcagatgcctggaaaaatttaaacaacatataatttacatcttcaaaattaacatccagatggatgttttaatcctttgtcactaaatggttactaacgctgtttgagtggtcataaatgaattgtcatttgtattcaatagtaatagcaaaatttacctgcctataaagtcgcaaaaacagttgtataatagtttacattacaattaatgtacccatacctcaaaacacatttagaatttaaaaaaactggcttggaaaaaaatcacaaaaaatttaagtgacaacaaatcttgattaactagtccatcttcctaccacacatgattatactctaatgtagatattctggttgaatttcttccaaccaagtttgaagggccccagtagaaaatcaagtgttaatactttcagatttttattgtccaaaactgttgacaaagaaaagctaacttcaacataacttgtttctggctatacaaagacctatttcaggtgctacagatactgaaaataggagtattttacttatttctcaagagacagacttatgccatctaagaaaatgaattcagtttttaaatgatttatagtaaggaaaaa

SEQ ID NO: 343674 - DNA, 1000 bp, Homo Sapiens
tttttttttttttttaatttttaaatggttaactttatttgatgtctcgccaaataacatatatatgctgtaatgttcattgaaattaaagattccatgagacaagtttaaattaaatgttcacactaaatattttgtaatgacattttaatcttagaatactatatttttgcttgttgaaaacatagttgagtaaaattatttcagtgtcagacatttttagtagcacgtacagtcgcttagctttcagaacagaaagttccttttcaccctactctgctactattattctagtatacatagtcttaagaacatacagtatctattgttcagtgtgttacaatttttctcttctattagtatctaatactaaaattagagtattcaagcttagagatggttttttcattagaaaagtttgtgcggtcaatgcgagaactagggcttccaaccttgctcagccaggacttcatggaattgactttgtcttctggcccctgcacttggcctgtcacggtgcctttgctggtattcttcacccagccaaccactcctattttcctagcttcatcttctgtatacattctgaagcaaacaccctgcactcttccgaacacctcgtagtccacggatttgagtgactgggcggtagacatggcggcggcgagccctctgttgaggagccggagaggggctcggggcgcagcgactgcggcggctgcgagagggaggggacacatgggactgcttggcgcaccccgcgcctgtcaccggtcccggacgctagcgcgccggggtcacgcgtcggaagcggcaaatgagactgcggggcctgggagcgagggcagccggggacgccaggagggaagaggccgctgggccccaggcatcctaggcctctcttcccggactggggaggatgctgtctccacagcgctccctaccatttaattgatcaaggtactctgttctcaaagttagtaaataaaagccggatgct

SEQ ID NO: 343675 - DNA, 1000 bp, Homo Sapiens
gagtgaaagccaacaaatatatccggcagggttgttgggagtacagataatggaacaatctgaaagcagctataaccaaacacgtacccaccctgcaaaagctgaacccagctgttccagccccgtcccatcctggttcttcagcgctcaccttctccagttcatggcattccagtccttctgtcatgtggactcaaaatcttgagccctcttcaaattcttcctctctcaactgtttttcttaataatagctctcaattttctcatctctcttccactccctcctttgctgtgtgatggtcatctagccggtttcctgccttcccagctccaaggttcccttttctctttatttcacctccacactaccacaaaattatcctcctaaatggcaagtcccatgatttttcttccttgacccaaacccctgattattgaaattcaaacaaccttgcccaaattggacctaaactcccattccagttttgttttctatcgtgatgtcaacttcacccacccttcatcccaagcctctgttgcaagtacactgacttacttatctttcttacacctcccttcatgcttccaagcagtctcttccctcttattagaaggctctccccatcatgtctgctggctgaaagcctacctagcttaaaccttctagaggcatgatgttgtagaaaaatgcagcattagccctaaacagatctcatttcaaattccagatatgttactttataactctgtgcctcaagcaacaagaggtcacaccttctctgagcctcagtttgtagttttataaaatgggaatatatatattttgcagagttgtgagaattagagacagtctatgtaaaacaccaagaccacagtgcttggtccaagtaagtgctcaataaacagaataaacagttgctgaactgagtctctctcctcacatttttatgggagtaatgtctttactgtctcaccttccatgaggcctgaggccttatct

SEQ ID NO: 343676 - DNA, 1000 bp, Homo Sapiens
gaaagagaaatgagacttttattagctccaagagcatttttcaatactaaggcaaaaagtaaaaagaaggacaaggaaaaccaaggcacaaagaagggacctaggcgcaccccagaactcaccacggacacacagcagagggcttctcttcatatcaagggtatgggtaaacaagaaaggctgctgtttcactgagacaggacgaaccaccaagtccaaatgagaagacaagcagagacgtagtgtcagaccaggagggttagaacttgctagtgtagagggcaataatccacttgggcacacggaggaaggagggcaggtaggaggccagccagcccaggccggacacgtgtgagagaacagagctcaaagacaaatagtcttggacggggcggccgtccacatcccgaaggccatagcgtcgagcaaggtcacaggatggcagcaccttaccactcaggctcaggatattgggatctgttgccaaagccaccacacatttgccactcaattctgtggtttccgcagatgagaaggctgatttgaactgcttcaacacaggatcctgcaggacctcctcctttgccatatgctccttcagcagttctgtctgcacaatccccggccacagagacacacagctgaccccatggcgccgcagctcgtgggcacagtcagcagccagcttgtcacacgcagctttgcccacaccataggggacattgaacatatactgcaggcttcctggggaggagatgaccacgatgagcccctggccagctggtaccatcagccgtgccccatacactgagcaaaagtagtggcctctgagtccgacgttgttgatatcatcccacatggaggcaggggtttcccagaatgccttattcctggtgttcaggatcgtctggacccctgcataagcattgttgaccagcacatctagacgcccttgctgttcccgatccacttgctcaaacaggcttcgcacttcactctc

SEQ ID NO: 343677 - DNA, 1000 bp, Homo Sapiens
ttttttttttttttttttgttggaaataatttttatttaacagatataaaaaaaattcttaacatttacaaattgtacaaagattggtagcttttatatttttttaaaaatgctatactaagagaaaaaacaaaagaccacaacaatattccaaattataggttgagagaatgtgactatgaagaaagtattctaaccaactaaaaaaaatattgaaaccacttttgattgaagcaaaatgaataatgctagatttaaaaacagtgtgaaatcacactttggtctgtaaacatatttagctttgcttttcattcagatgtatacataaacttatttaaaatgtcatttaagtgaaccattccaaggcataataaaaaaagaggtagcaaatgaaaattaaagcatttattttggtagttcttcaataatgatgcgagaaactgaattccatccagtagaagcatctccttttgggtaatctgaacaagtgccaacccagatagcaacatccactaatccagcaccaattccttcacaaagtccttccacagaagaagtgcgatgaatattaattgttgaattcatttcagggcttccttggtccaaataaattatagcttcaatgggaagaggtcctgaacattcagctccattgaatgtgaaataccaacgctgacagcatgcatttctgcattttagccgaagtgagccactgaacaaaactcttagagcactatttgaacgcatctttgtaaatgtacactccgcaattttcccaagatctatgccataattcaatgaactccatgaacactgcttgtagttgggtgtccaggactcctcaaagctttccctcagacattcccccttttctcctttgaatccatcccgacctgggatcccaggtgtacccggaatgccattggccccagggctcccgtctcgaccaggcactcctgctggcccttgtaagcacattccattatacaggtccaccacc

SEQ ID NO: 343678 - DNA, 1000 bp, Homo Sapiens
ttaaagattgcaaaacactttatttccatcacatatgtgccaagacttgtgttctgtatccaggagtgtgttagatactaacatagtgtttcatttacatgtgtgtgaaacctgggtgaagagccagggtttctctcccccacccgcctcagagtgcttgtcctggaatcagagtgtaaaaccccctcttgaagcagacaccaaaactgaacttccacccggtcatgggccctgctcttcctgctgtcagcctagtccaaagagcaatgagggaactgcttaggaggggtctgagggtgatgagggcctgggggccacacaggggtgggtgctgtcaggtacaagcccatccctgcctgcaaataaccttgcacagggtccttcctcattctttcctcttcctttttgtttatgagatgaatggctcttctgctgtggctttaggggcagtggggaggcagggagctatttgggaacagcctggaaagctgaccctgcagaatctcccagaagccttggtgtggctatgggtacccaggctgtagaaatcccagatggtcctcttccagacctctccccaactccagctcacagtttcagcttcttggcactgaaaacactactaggggaagcaagagtccacttcagggcttctgcttggcctctacccaccagggcttggactctggacctgccccagctaggttggggtttctgggactgcatggctctggccctggaatcacgaagcagtggggagagcccttctctgctctgagcatgcaaaccttctcacaccagcccacggtttccaggatttcagcccctaggatgcctgggccaggacaggagaaggaggagcagagggtggtgtttcgggctccaagaaagtcttcgtgaccttggacttgtcacttggcttccctgagcctcagtttccttgtctgaaaaagtggagtgataatctcgatttctcaggtcaactgtgaggttgaaataa

SEQ ID NO: 343679 - DNA, 1000 bp, Homo Sapiens; identical to SEQ ID NO: 160672

SEQ ID NO: 343680 - DNA, 1000 bp, Homo Sapiens
ttttttttttttttttttttagtttaatcatttttatttcaagtgtatttaaaaaatcataaatggggtttcataatccaaagttgaaacatttattcttcatagcttcagaatttaacaaccaattgtagaccatgctttccaaatccagtcttctttgctatttttcaaaacttctgagatctagtattaaactgctccattctaaatgtatagttttagataagtattgtacacttgttgataagggttttctgaaagcagtctatcaaatataaagaatggtttctatctaagaatcagcagtgagggaagaaatattaaacacctatcaagaaatcaattattcattttaaaaataacagaaccagtgctgctctctgtcataaaagagaacatgtaaaatttatttttatagactttggtaatattttattcccccacagaggccttcaatcctacttaaagatattttacacacagtaaccatcaggatttactgagtaaaaatctcaggtattaaccatgcccctaaaatgtgctattccaaagaggaacaggttacttttgaggaaaaaagctgccttggtaacttccctcaaatgtttattttaaataaaaatggttgatggaaatattttttaaaagaactttgggtataatatggcatactgcccatcaaacaaaaaaggaaataaaactttctttccatttataataagttttccacctttactatcaagattacaacttattgaccttttatgcttgcttggtttttttgactgcctaatccaatgtttaaatttttaagtctgcatttcaatgtagtaggagttatttttcaaataatcttcagaacccagaatacagagcaactctcagaataccagagcaacactctcaagtcatacttttgaacccagaataccagaataccagacttcagaacccagaataccagagcaacactctcaagtcatacttttgactacaatta

SEQ ID NO: 343681 - DNA, 975 bp, Homo Sapiens
tttttttttttttttcaccatgattaccttttaatttatctttaatgttttctgataaatgttttgtaagctgaggcatttcttctggagaatattcagcatttgccagttcctccttgagcacagcatggatacagtctttaaccacagagggcctgaacccactccttgtagaaaggattcaagacagccgatgatgaaaacacccatgcttgcaagtgaaggttctgcctgtcacttctcgcagaggctgcagaaaaggcccaggaggctgttgatgacatgaacgaccaccaggagaagctggagcaggctgatgcacagaagggcggagaagagggacacgtgccagacaacagctgcagagggctccaggcagacggagttccagagcgaacggtcatacagataattcctactatgcaggtctttgaatgggtaaccatatttccaagcttgtgtctgattgaaggatgaaacatcaaacatgcaaaaaggaccatctttcagagcaactccagaagtgacaaagcaaatcagggctccaagtaaagccaggccacctgacaacagagcagtaagcacgcttcgacagagcccactcttactgaagcagccgtatctccagcccatcaaggagatgaggatagctgcagtgagtaccatgaggcctcctccccagagcccagttcccagcatggcatgcctgccaaggaggcccctcaacaggtaggtgacatcccagttaggaaggaggagtgccacgttggccccagcagcaaacagggctgcagtcccaaggctcagtcccaggatacgggagcaagtccgtgagcttgccggcgtgcagggagaggacaccatcctgcatctggtgtcaagaatcagaatgggagagacagaacctggagaaaggctgcgtcttcagagtggggctccactcctccagctccagggctggacctgaaggttgtc

SEQ ID NO: 343682 - DNA, 1000 bp, Homo Sapiens
ttttttttttttttttttttttccaacaatcaaaaagaatttattccggacacgtggcatgcggtgctgggcagtgcccaccgtgggggacggggtggagggtgggttgggggcaggtaggaggccgagccccgagcccccgcccggctactcgcggtagtgcacccgctggtgctggatgagctgggagctctggccgaaggccttgccgcaggcgccacacgcgaagggcttctcgcccgtgtgggtccgcaggtgccggaagaagtgcgagcggccgcggaaggctttgccgcagtcggagcactcgtagggcttctcgccagtgtggatgcgctggtgctcgatgagcacggagctccagatgaaggccttgccgcactggctgcaggcgtagggcttctcacccgtgtgcagccgctggtggcgcaccaggttggagctctggctgaaggcctggccgcactcgccgcacttgtagggcttctcgccgttgtggatgcgcaggtgctgcgtgaagtgcgagctgtggctgaaggcgcggccgcactggccgcactcgtagggcttctcgcccgtgtggatgcggtggtgctggatgaagcccgaccagccgcggaagcgcttgccgcactcgtggcaggcgtagggcttctcgcccgtgtggatgcgctggtgcttcaggagcagcgagttatacttgaaactcttgccgcaggcctcgcacctgtgcggcttggccccccgcgcgctgccctgccggctccgaccgaagttgactcccagctcggcagcccgctcgggcgcaccctcgggcccggccgctgcttgctgcacgagcgtcacgcgccaggcgccccgcggctgggcgcaagggacggccccaggcggctggcccgccggccgctccgcgctggattcaggcccgaagccggcgctgcaccgggccctgcggggaaggctcctcaggaggctgcgcagcgccccgcccgccccctcg

SEQ ID NO: 343683 - DNA, 1000 bp, Homo Sapiens
tttttttttttttttttttttttttttttttttttttttttttttttttttttttttttttttttttttttttttttgagagagtcgctctctgttgcccaggctggagtgtagtggtgcaatctcgactcactgcaacctctgccgcctgggttcaagcaattcttctgcctcagcctcctgagtagctgggattacaggcatgtacctccacacctggctaatttttgtatttttagtagagacagggtttcaccatgttggccaggctggtctcgaactcatgccctcaaatgttccacccgccatggcctcccaaagtgctgggattacaggcgtgagccaccatgcccagccaaagttttagcattttttgaggcactcaaaagttgagagcatcagagtcaccatgggtatagaattcagattgggattcgtaatcatgatcttggtgattggaacttggcagaacagtgacagtattacattctgggaaatttcactgagtataaaggaagacttaagtcttctgaagagataagtaatggctcattaaaatctaaaagaaataggagtaatattgtgaaaagattttatggaaagacttcataccttttttctgagtcaatgtttctgaccttcagataaggtctttccagcctatactgtacttggccattgtagtagttttctggagagcctgtgggcagttactattgtagatggctatggatgggacatggactgcattttacctactctggtccaatgttttctatgtaccatgacaaacattacaagcaatccttttctaaataagcctgtttagaatagaactaagagcacatggaagctactgtgaataacttagttaaaatgtcttttttttttttttttttttttttgagacggagtcttgctctgttgcctaggctggagtgcagtggcgccatctcagctcactgcaagctccgcctcccgggttcacgccattctcctg

SEQ ID NO: 343684 - DNA, 1000 bp, Homo Sapiens
ttttttttttttttttttttttttttttttttttttttttttttcttaataaaaaaaaataatttattgtcaacaaaggtgatatatacaacaggaaaacagatgtaaatgagaacgggagtgaatggggtgcccaggcccagcttcaggcctctgcagggttgggacaggaagaggtaatggaggcctcctggtttagaagcctgaacaagtggggaggagaggtgtcccccgaggtagtgggactcagttcaaacccccttatgaccactcttgtgtaaggcactgtgccaagggagaatggtggggagcagggggagggtgggaggaggtcatgggggacaaacagaggtgggggtcagcgaaggactggggtaggtgttctccacaggcccagtgccctactgcacaacagcctcagccaccctcgccgacctcaggcctggccaggaacagacactttccagtgccccgaaataacagtggatgctgccccagccccctcctgccctggcacctgtttctactctctccaccaggtgggtgagccaggcagctctgagttataagccactgggggacgctgcctcatccctccctccctccccaggaaagcaagaatttacactccattccctttttccggcttccctgccacagtggtgctggattctgacagaactgtgggccagtctgaggtgtcacctgctcccacacgcttggtgccctgggggtgcctggaccagtcttgcaggaggctgaccgctgggggctcctccatccgcacgcggataacctggagatccagtgtcccgcggagccccggagggggagctggagaggggctctccgcccggggaaggcctccttctgccacttccctgtctttgggtgagtccttgctgtctgggcccctgagctgggtgtgggagaagagctgcaagacgaagccggcggggaagctgccgtcagtgaagtgtcggacctcggctggtgctgc

SEQ ID NO: 343685 - DNA, 1000 bp, Homo Sapiens
ttttttttttttattaaaaaactttttaattggtttacaaaggaggctacagactacattgaaactaatctttgtacaaaaggccaaaaaaaaaaaaaaaaaagtcccaaaacaccaagagacaaaaggtaggaggaaagacaagaaaggaagatacaaaaggagcaggaagaaacttacttagggacaagattagcatcatacatacctaagagtggggggtgagggggaagaacaagatgagagagcatttaaaagcatttacccacacagccctggtgataattggattggaatcaaaacaaacacagcatgagattattaagaggttttaaaaggcaacagtggtgtggactggttattgccagtgttaagagagaaataaacttgggtttttaggcaccagagattggagcaccacccatcccttccagaggatgacagacttaggaaggggaagcaggccctggggcagctgccactggtgtgtgtagatgtctcctcaggtcaatctcagtgtatcttccccgaagtctttgtgccctagactctaggtaagggctatgggatttcactgggagaaagggatgatcaaaaatatgaagacctgcccttgtccacaatgttcaagagcagttaccgggaaactggagcactgggtagacagagcccatatccctggggaaaaggcacagtgtaattcctgaaggcaagatatgggaaagcacacatcccagcagaggtatcaacaaaatcctcactacttgcagccctagtctaatcccatttgttaggctttttttttttttttttcccctgatacttagctaggacttagggcagttgagaggcagatcatcatgcctctactttcttagcagagacaaggaagactggggctgtttgataatgaggaaggggaaaatgggacaaaatactcctctttcaaatgaacactgtggagaaaatctttctgggtttggggaagtcagagtaaaga

SEQ ID NO: 343686 - DNA, 1000 bp, Homo Sapiens
tttttttttttttttttttttttttttttaaagaaaaccagtttattctaaaaagctctaaatgccctgtgcttggtccctggtcagggagaggtctcaagaggttactacctgcacaggggctgaaggtacagggggaaagtcaggtttcagttggttgagtcctaccttatctgtttgttaggctttttctagaaagtctcgctctgttacccagactggagtgcagtggtgcgacctcggctcactgcaacctccacctccaggttcaagcaggtctcctgcctcatcctcctgagtagctgggattacaggcacacaccaccatgcccagctaataatttttttatttttagtagagatggggttttgccatgttggccaggctggtcttgaattcctgacctcaggcagtccgccgacctcaggcctctcaaagtgctgggattacaggcatgagccaccagacccggcctgtgttaggcatttataaggagatggcagtccagctcctggtgataagaaaatgtagactcccaagattcatgttttaactttcttcataagttaagcaggagtcatttgcctctgtcatgaattccaagactacaaagttttaagagatgctgggatagcaaatgaggcttgaattctgtgttgacaagcccacacacctcatttcatttagtatccaagagataaacaaacaccacctcttctactccaggactggcatctctggacttttctgccataatcccaaatcaggccaactctccttcctctaggattcgcgtggtgggatgccaggcagtgacacccttagagcaggaagtctgactgtagacccagctacaccccaaccagtgagggtctgcattgggcacttgggcctcctcgtgaggcgggggtccagggttctggtgcaatgcccaaggcagggccacttctcagccctagctctgggccagcacagtgccccggtttggctgcaccaact

SEQ ID NO: 343687 - DNA, 1000 bp, Homo Sapiens
ttttttttttttttttttttttttttttttgttttaagaataatggattttattttaagagaaataggaaatggattttattttaagagaaacaggaaacagctgttaagcataatcacattttgtgatttaaaaaaaaatcatctaggagatgggattggagaatttcgcttacacaatatcaaagactaagataacttaaaaactttgacccctgaaaacacctggaaatgctgggtaaaatgcaatatatttgaggacacagctgagcttacaagaaagaaaaggcaatctccaagtgacacaaccaaaaggaaacttaaaagaggggttcaacacgtactgattcctcggtcaccctgggaaagttgctatctctaattaaagggcttagattttattatgtatgtaggctgagtgaaacagactgtcaacacccctccatctctcccccaacacataaagctagaatctattaaaggtctgcatacattagtgaatgcatggactaaaaaagttttctaaggatgtgaagcccgtggactttacctcaagcagatgtgggtttcaagtttacatttcctacagtctgggaatctcgaaacaaattctcgaacataatataaaataaaaattgcttctttggcaggtgatacctccagggctctttttttagaacgtctcaaatcctttttctgcttgaaaataggagaattcaaaaaacacaaatctgtaaaagggtcccctcttctcagtttcgaagcgagggtgggctccttatagttcacgctggctgtgcacctacgtttaggcagagccactgctgggcttgctttattcttttttggagaaagagaaagtcttctgattttcacaacaggatacaaggagacattggtgatatccttcaggctaagatgaggtgactgctgagtttcaggtggtgtagcttctatttgaaatgattctccttgtcctggaagttcagtttcttcaagag

SEQ ID NO: 343688 - DNA, 633 bp, Homo Sapiens
tttttttttttttttttttttttttttacgggaacagctttgtgttctttattgcctctcccttgggctaagggagggaccagcaccatgtccttctggagacccggaaccccccagcaggccagggaggcaaggctgggcgccaggaagccatgcttgaacactaggttgggaggggaacaccccagcaccttggtcctattgaggcttgaagtgcctgcttgatcctgaccaaggggccaagtggaagcctgtgctggttgtggggaagtgccaggctcacatggtccagtaggcatagacgagcgtcaggaggataaagatggccacagagagcagcatgttcttccggttctcttgccgaagaaacttcagttccttctcgtagttggaggctttgttcattaggctgtttttctccttctccagggacctcctggcctctgggctcagctcccggctgtggagtctggagttcacggcctccaggtctctccgacactgggacagcttctcctctaacccatcgatctctagagcgacgcccagattctcccgcttctttttagtcatgttacttgccgggatcccccagtcatcactggacgcgcccaccaagtcgctatgtgcgcc

SEQ ID NO: 343689 - DNA, 1000 bp, Homo Sapiens
tagttctcctggcagtgagaagggtacaggggagggatcccagccatctgtgtctccctaaagagattcagaggtccatcaaacatcacttgttctgaaaaaaataaacttctgctgcaactcatttcatgaggtcaccccgggtttatcagcccatatgtttctggaatcaagaaaaggtgacctcctgaggtcatcccacttccttcctgcctctagcccaaattgtccatgataagaccaggaagcggaaattttcttcccgtttaaaagagtgccccctttaaacaaattatttcaatgctgctttcatgacagtcattacttagtaggcaataactttggaatgacatcgagtgacaaagtgacagagtgtacttttccatacttccttgaaaaatagtggttaatatggatatttgaagcacgtcttaaacaaccttatttatgatattagcttataggcaagacgtaaaaaaatgaaaactggatatataaaaataaaaatatatcaggggtgattagttaaaaaatagaacatgctcgagaatgaccaggatggttgtgagcatgtgttaatcaggtttccttaggaattagccactagactttaacctctgtaaggagacagacttaaaatggaaggggcatcttgcatcaggagccccttgacgactgcagtcatcaagtagaatttaaattgtattcaatcaaaaaggaaaaagtgaacacccagttcagtcaaaactaccaaaatggttttatgatggctataacataatacaatttccattcaaaagactcaggaaaagaacaatgtctctttctgttttctctgtctttattcaacttgatgaggtaagagttgaaatgactttctttgtcatgggttccttgactgagttggttgaaatgcccacctggaagactctgtattttagtctagcatttattccctctgcactggaagctccttgagattagcagccctgcatatcta

SEQ ID NO: 343690 - DNA, 1000 bp, Homo Sapiens
ttttttttttttttttttttttttctgttttctctgtctttattcaacttgatgaggtaagagttgaaatgactttctttgtcatgggttccttgactgagttggttgaaatgcccacctggaagactctgtattttagtctagcatttattccctctgcactggaagctccttgagattagcagccctgcatatctagtgcaccatggaattactcacccttagcataaggcctgacatgtggcagcatttaatacttattaactgaacaagtgttggacccagctgggcaagaaatgcctcaggaggtttttatttttcctcttcagatagatgttgcttcctgccaattgcatcctgtacccactgttccttctggattccatgatttaccatccagcagggcttttctgagtcgtctccagaagatgtgccgccccaggacactgtcctcccactccaggtaagtgttcctgctgagaaggcggtacagctccacctgctgcctgagcagggtcttctccaccttctgcaggacaatgaagatgataccagcacgactgctcagaaactgccaggtctgagcaatctcatattcaaagatacaccagcggctctggatgaagtgctgggacaccacaacaatcacctttcggcttttatggaaaccttcatggatgatgttggcagcaatggccacaccgggaataaagtctctgtagtgaaggcagagctgaaatggaggcaccccttcttctaaattctttactagctcattccttacccagtcctcatcctggcttgagtagataacaaaggcatcatagatgttttcacctctaccatactttatgcagccagcaagaagcatcaggtgaaaatagaacttatagaccagaactgctacaacagatactacaagcacactgaggaccgacacaccaatgatggtcttattcatctgacaggtgatattcaaactcagcacaggcatgccctg

SEQ ID NO: 343691 - DNA, 1000 bp, Homo Sapiens
tagacagtcattatttattatgaataagcaggaaataattcacatgccaattatttggctatcttttcactaagctaggtaatctagccagaaggtggataggtaggattttccccacttaggttcacggcctgtatgtgaatctacagcacacaggtgtctgagctctattattgacaaacctattttaatttgctatgttgtttctaattctcttctggatctccaagcagtaaaaaataccaaactgagaaaagttctgtgcaaattaactgggccagaaagaatttttaccacctgtttgtagatgtaacttatttgtggcactaatttctaaggaatagagcattgctgtgattgtctgttctgatgtgaacttctttcctcctataatttcccccctctaaaatctgccccaaatttcctgatgtaagtactaaagaagttttatgtttgtttgtctgcattaagatatatttcctgaaggtttgggaacctaaaattagaatatttaataagaaactactgacatttatcaccttctttaggatttaccgctcgcccagtgatgttctttcctaagctaaattaaaagacaaattcaaatcctgcatggtagccaccaaaagcatatatttgaaaaacaggattcggcgtgccatattatgcattatttaatggtatgcaaattataagtcagacagttaggaaaaccacacttcagcattaataaacagcaatattactactacattaattatgatattgctatgatttattcccaagttttgcattttgattctccttgaaaatttatgccatctgataagcggtaacctagttcccctcctacatctcctgcccatttctcaaatctgttcctcctacccacccgatgggtgtctgtaggaaacaggtacagaagtacaaaatcataagcagcctcattgtcttataagcattaaaaattaaagaacaagcaaacaccacctaaagctcc

SEQ ID NO: 343692 - DNA, 1000 bp, Homo Sapiens
tttttttttttttttttttttttttttttttttttttttcacgcaagtggatcaaaaaatgtttattctgaattctttaatttaaaaaaatcatacctatgaggtgtgctacaggaattcagatacaataagttgcatataaaacccgacctcattgctcattgtggtaaagcaaggatgatgagaaaatgcacctcaggagcaaaaacacgcttcacgggcactccgggacccaagtcccgagacatttccacgtgaccttctggaaagacacaccgcccacctgactgcacgacgggactggtccagcctcccggctcctcaggaaggagatgagtttcctacaaagtgagtggccacaaatgccaggacagcggtgtcctggagctgtggggggaccttggggaagaacacacactcatctgcacttcacacttctagccttcaactgatcaaactactgaaattgaacatgatattttggcaaaaatactacacccccattgacaggaggagggttcctggcggctcacagcagagcaggcactgccttccttcccaaggccgagaggccatgctgtgacatggcacacacaccgccccaggctgcccggtggcccagggaccatatgggtgacagttaagacatcagcctttgtgaaaagccaagcccgacgcagacctcaactgcactgtgcgtcccaatccagagacccgcggggcaggggaggatttcaaggactcagtgacactgcccggcggggacaggagaggctcccagcagccctcccggtgacctgggcatcaggggatgggtagagatgaggacaagccggagtgggcacaggaaaaaaaccagggtctctgctagaagtcacctgatcctgcgggctgtcacggtatgacataggcagatttcccatctgacatggcagctcctgtgctctgggtgacttagctccgggttaacttccatcaggcccagtcctctcctccccag

SEQ ID NO: 343693 - DNA, 1000 bp, Homo Sapiens; identical to SEQ ID NO: 339416

SEQ ID NO: 343694 - DNA, 1000 bp, Homo Sapiens
gagaaagggtcttgctttgttgaccaggctggagtgcagtggcacagtcatagctcactgcagcctcgaactccagtgatcctccagcctcagcctcgccagtagctgggactacaggcacacaccaccgtgcccagctaattttttattccttgtagagatagggggcaggtctcactatgttgcccaggctggtcttgaactcctgggctcaagcaatcctccggcctcagcctcccaaagtgttgggattacaggcatgagccaccgtgcctggcgtttgtttcccttctgtacagggagtttggggttgcgtgagaagacatctaagggtctttctatcccaggggtgtgtggtcccaggcagggagtcaggaggggcgccgtacgggaggttggcttgtcagcagcatagatggggtcactaaggccggcggttgggtgaccctcagcgctgggcccgaggtcgcgctagagacggaggccggggccgaggcagacaggccaaactgggcctggccagccgggagagggggaggcggcccaggaagagagggaggctgagacagaaagatgggcggggcacagggatgtctgcaaagaaggcacggtcccgagggggtgacagggctccctcctcagagagttccaggtcccgggccacggccaggatctcctggcgggcggctgtgttgcgcaggccacggatgtcgaggagggctgccacgtgcttctgcctgatgtctgggtagtcgcgcaccaacactcccacctccacctggatgctgggcgtgtcttccagctgcatgacttcagccaaatggggcaccacggcatccagccacgaggcctgggactccagccgccggaacagcctctgcagttgcgacgcgtcctcccggagcctgccggccacgcggctgcgggtccgcgccgagctgcagcgcaggcgcccacggagcaggggccgcacgtactcgaccagcgcccgccggtgtag

SEQ ID NO: 343695 - DNA, 1000 bp, Homo Sapiens
ctatttacccacgattcttctttatttggctgccaaatataggggcacgttagtattgcggtcagcttaatattaagtagaaggcattaaaggctagaacagtggtgcaaaaagctgtaggtaaatctcttctatgctggctgttagcagagcactgtgatgctatataattgcagcaaactttttttttggttctgctgcactgcagctcataaagggagcactcattctggaaaaaaaaaaaaaaagttaaatctagcaagtggttagcaccagcattccaaaaaaacttcagcagcctgtgttttcagcctctgctccaacttcattgctctttggaatcaagagcttcatgttcaggaatagccaccattggatgactcagcttgttgcatgcgttgtgactgaggagggtgtgagaattctcctgttcatcactcaaggagaaggacagatgactgaagggtcctggggcaagacagtcagcatgtgagagggtctgtggatgcagcagtgacttagcaggaggatagagtttagtctgatataaaggatggagcgagacaggcttgggagggactgttacatcctgttcagaaaagaggtcgctgttatcttccaagtatttactgaaagggttgggttcatagacttcctcctcttttttcagtaatattctggattttacaggtactgggcgaattactccaggcttagtcagctgactctcagatactgtagaagttggtgaggagagatttgcatatttggtttctcgaccagctgctcttggaagagttgtaggagttttgactgtgtcagaacccaacaatgtctttggggaccttgaaggagaatcagaagaatgcatagacaaggaatcctgtaagaccttatcaatggtagcacagagctcttcagtttgctgcctgagctgtgcaggaaaatagagctccactggtggttctaatgtgttgtccttggagacactttcagtctt

SEQ ID NO: 343696 - DNA, 1000 bp, Homo Sapiens
tttttttttttttttttttttttttttttttttttttttttttttttttttttttttttttttttttttgacaatgccgcaggtgttttaaaggggagcaagggagataaaacggtaatcacaagccatgtgacgatgccgcaggtgtttaaaggggagtaaggcagataaaaggttcccagaaagcaagctgctgatgggaagggagcagaaagctctccgaggggtctgctcagcaggcggctggaaagagaaggggggcctggcagggctcccgaggatgacctgggcatcaccccagggctgggggagggggctgccgctccctgggcctgaggcaggcggctgtagggcggaggccttaccctccagctggctggccgcctggtttccacccgctcgctccacgtccctctgctcgcgaggctcgggcggcagcccaggccctggagccggcttctccgctgggaggggaggcttcccaccgtggtcgctgtcctctgcgggctgccctgtgtccccggcggcgttgcctggcggcggtccccccttggccttttcccctccacccaccgccaggccgttctgctgctcagacagcactgcctggggccgaggatgcaggcccctgtctcctggccccaggtcctcctttgcaggctggacagctggctgaccatctgcttctggaactttctggggatcttcaggaagatcacccgcctcctccaaggcctgggcctgtccaggcctcttcccaacctctccctgctccggctcttgtttctctctttctgagtcgggcagaggcggcgccatctggccctggacccctggagcctttccgcccgcgtgtctggatggaggtttgttctcttctggcacctctcggtcttggccttcatctaccaccaccttgtcgtgaggaacaggaggctcgtggcggtgggcctcgcccacaggcacagcaatcccttgcccagggcgatcgagctgtgcc

SEQ ID NO: 343697 - DNA, 1000 bp, Homo Sapiens
ttttttttttttttttttgcaacattttctgctagttttattaagagaaccactttatgtttcttccccctttatgttattagaggcaagattccattacagtgaattctgatagccaatttgatagttattgtaaattcattgatataaatatatatattatatagctttcaggatagatttattaaaaagatgcaatgcttcaaaaagtgaaaactggcatctgaaatttgaggaaaaagtggcacatatataattccttccctcagcaaaatcagagatcattgtgtagtatggtattctttattttgaaaatttatgtgtaaaactatagaactgtcaagaaatagctatttttctccttcacagtaataaaggttcccacaaagtactttctatagtagtttattcttcataaataaatcactattataactgactacttactgagaaatgaaaatattttaacttaaaaaaatacagagcccttgttgattaacagaatttgtcttaaataggattttatctatagtatcatatatataaaatccttatacaagtaaccattgaaacaagtcagtaacaaaatattcacataactgtatcacagatcttaggaaacagacattcagaaaagatttaaggccactaagtaacagcctctcataaaacccaacaaatcttaaaattgcaattagacttaaaagggacctaaataccacttcatgctgaaccaagattagaaaaatcttccactcttgacattttcatgttcttagtttttcaatcaagtgatcagctgtgataaaccaataggaattgactctataaaccaacttggataagaagccaagctgatccactggtgccagaacatgaaggtgcaagtgggaaatggaacagaatggtggcatatgaaaacccatcctcacattcgtgaagtcagtgaaattatttctttcaagaatggtttttccaacagttaccatgttctcaacca

SEQ ID NO: 343698 - DNA, 1000 bp, Homo Sapiens
agtttttaactgttttattcttttgtaccttttgagttttgtgttgtgtccatttattatatgagttaatataaagtacttaaattagtacatcgcacatagttaagtgctatataaatgtaagcactatgtaaatgaaagctattattattttaaaatcatgtaaaattcttttgaggagagaccaggagaagggagtgggtgaggcactgtgcagggctttgggttggagctggctatatggccaggccctgtgaggagaagcagggttcctgggcacctccaagagctcaggagggatgcaggcctcctccagacaagctgaggacacactccctgaccagaccccagagttccagagcgttctgtgaagccagaggaaggcttcaggcgaggccacaagacatggtgcactcaggctctcgagggagggctctgagaggagggagagtatttcagagggcacggcagaactcgccctgcacttcttgaggacagggtctacatcctctgggttggctgaatgaccttcccgatggctgcgcctggcccgtcacctgggcgatctgacaagcttgtggggtagcatctgcaccagcaagggctggaaggagcacagagcctgggtttgcttccgtgtgtgtctttcttgacctttgtggctgctctcctggtgaccgatctccttggggagcacttggcagcttagggcaaagtctcacaattctctagaatgtatctggcttcttcctgcggatcttgggcttcttcaccggccgcagataagggttatcgatgatgttctcctccccattccggctacccgacaaggaggggttctgctgcaggacagaggtgttctccttctcggctccagaatcctcctgtaattccagctactcaggaggctgaggctggagaatcgcttgaacccaggaggcggaggttgcagtgagccaagatcttgccactgcactccagcctgggtgacggagcgaga

SEQ ID NO: 343699 - DNA, 1000 bp, Homo Sapiens; identical to SEQ ID NO: 160675

SEQ ID NO: 343700 - DNA, 1000 bp, Homo Sapiens
acagtgaaaatggttttatttaacatgcagcaaaacaagggcagcagagctgggatatccagtacagccatttgccacgaagcactgacctcaacagtaacgagtaacactcaaataactgtaatgtctagagcataacacaaagttccatttccacatagtaattccacagacattcccagggctgcagcagccagtctctggaaagctcttggatttattccttaagtagtgaaaaatgattcacttttgacttgtcctcttctaatgaagcagtgaaacctgcttgctaaagacagcgaggggcagggaagggatatgacctcttcccatagtaaggaataaggaagcctggcaaggggcagggaggaaccagggaacatggtctgtgccaccttcctttccccagagatgtccgattgctgagcttgttcacctgggctccgcaagcttcccccgtgtctatggcagctggtgattttttttttgtgacggaggcttggagtacatgtcccaggatcacatccagcagctagagtggctgggacaagctggcgggggccaagcactgttgaagcaatagggtctggtgactcagctcaagtgtggcccgatctcatcacctccagacccaacatctcgctgacagtgcccctcagtagctggggaacagttgaggtttctgggcagcacattaggacatatgtctagtgtaacatttgtgatcctgaggcctcctgtgtccagccacaggtgccacaccacatgccatctggtgagaggagagggaggccaaagcagtaggatgtagagtggcggtagattccaaggggaggatagcagtttatttcatgccaagcaagaggtagtcagtaggatggcctgtccccacggctggaggcacgcttttcccagaaagctgagtacctgcttctggagaaggggaaatactggctctcttcattttccttcctatccctagttgggcctgtcatgaggc

SEQ ID NO: 343701 - DNA, 1000 bp, Homo Sapiens
tttttttttttttttttttttacatattttcatatattttattttttaaactctcataactttgcaagctagcagtaaaatattgccttcaatattttactaattagcaccgtataccttttaaagctaactggaacattgattcattataaatgattgtaaaataaaatgatcatttcaaatgccaaattaatctcaaataacaagtgaactattattaattttatctctttttttggctctacgcacaaagatgtatttcaaagatgaacttaattatattagtatcagttttgtcaatctagcaaatcaaagtatcacagtttaaagcaatatttaatctctgaaattactagaggcatacaagaaagttaaggaatcagctacaaaaacaaaagatactacataactgatttatagtcccttattttttaaaagaatgaggaaataactcaatgaaaaattccatggtgccaagtatcagttacacatatggttaagtatacgtcagtattctctgttttgcttatcagagtttggccttaccaaaaaccatcgaaatgtccaggataactcacagggacagctggaagcctgaaataaaattgctcagtgcaaaaagatcccaaaccattcatataattttaaatggaagcctagacatttaatccctatttttaatgttcacatctgaaaaatctttcaaaaatatggaaaaaatctaattatactaaaattacttccacacattcaaaaaaaatttttaagggatattttctttcctgttttctgctaaaagcattcctctgagctatggggttaagttctgagccacgactgactgcttactagcatgcctgttttgcataccagtagaatcaagtccagttttgcctttgtggataactatgacaagatacaaaagcatgtgtttgccataaatagccctggctaacagcaaaccgctcacactgagcagatcaaattctctataaggagc

SEQ ID NO: 343702 - DNA, 1000 bp, Homo Sapiens
ggcaaaagaaacatataaaatgaaagttcatatgagcaaattttttttaattaacccaccaactaaaccagtaaactgtattgctggattacactcacttctaaactcaatttgttaaaaaaaaaaaaaaagtcacgaaatggagcaggggagagagtggctctgcagaaacagtttctgacttggaataaagtttagattcttgttgctcaggtaggactgatgatgccttaattggccagcatgaccttgaaaatccatcaagggtagaacaggaaaatagcagttccacagtgcttgttctctgggcgttcacatattgcattacttttaaacagcaaggcaaagtgtaccttttctgggctctcaggatacttattactggcgaccagcagctgcagctgctcgtgcagctgccattttcttgtttcgcattttgttctccaaagcttgcattttcatcttctttttgagatccagattcgctgccttctggcccttggcagtagcattgagataatagatggccaaaaccatcaccaaaatgacagcaatgaccagcccagggtttgaaagctgtctcaagatcttcgccatccagcttgggaaatcgtgctccagggtctctccaatgacttcaaacattctatttttgccactgaatggaccacaatcaaaagatggtgggagggacacgatcatgtacaagacaggcattgtggacaggaagaggatgagcagtagcatgcccaggtagaagttatttgatctggaagctttgaagaccctggcctcaggaacattgcagcacataacggcccagcactggaagtacatggatgtatggagtcgaaggatattgatgcctgggaggctgggagcaaagaaggagcccatccagatcatgccttggttgaagatcagagcgaggacgttgccactgatgtcgaattcggtgtatgaaggatatccatactccaagtcccagcaccagcaataa

SEQ ID NO: 343703 - DNA, 1000 bp, Homo Sapiens
aagtttacagaaatgttttatttctttttgaaaattaccttgtagaaatgtgacttttctatcaaatatatctgtaattagtcaaagtgctatagtgtatgttgaaatcaacagttctatactcaatagtatttaattccttgtgcttatagttttttcaaaattggcatagactataagttctgaaagcaaaatatggaatgcatgaattttaaatgacagaattaattaaaattctttactgttattgacacgtacaattttatagaagcttggttgaataatatttgcatatgatttacatttgatttcctcatactcatttttgcatatagtttgcaggcatttcaatgtatagtaatttcatatatttggagtaagactgatagatggaagggagtcattcaactaaattgttgaaaggggaaggccctgagagagctcaactgttcttggtccttggtggcctcactgggcagtaacaagggcaagtctattgaagggcaagttcaccttgatcagataagctgagtctcgcactctggaagagacttgaagttctgttggtcaggtactttccctgaacacagtccctgccccccaaaaaatgtccccctccccaaacaaaaagcatggagaaatggtcaaaacaaccgtggctccatatatacttctttctcaattttgaaatctataaatatttatagatgttctttatttgacaaataaaaattgtatatatttatcatgtacaactcgatagtttgaaatatgtatacattgtggaatggatcagttgaactaattaacatatgtatcacctcacacactagcattttttgtggtgagaacacttaaaatgtactttcaaacacttttgaactctctagaattttagcttgtccaatctcttgagagaaatgagtccatcaatacagaaaatcagcaatgggaggcaagaagagattctttgaactaacacaggaaaaaagcacatctc

SEQ ID NO: 343704 - DNA, 1000 bp, Homo Sapiens
agaaaaaagcttatttttattagtaggattttatactaccttttgtacacttttttgaagaacaaaatttttacatgtgtttactatgttatttaaatatcatatttttaataagagggtttagagtaataaaaatataaaaaatatatcatgtaaaatgagtctgaatttacataaatacaaaatatttacaccatgtctttttatgaatgagatttatctttagatttctctttttcactctttttcttctgtttttcttccacttgtttttcaaaataatctttaaggagatggttcagctgtggttcatactggtttgcatgttgcaatccatcttcccttccttcgcagtgttggatcactcgtccccaaagttgatttttcctcaaacaggctaaatttcccacaatcaacaaatgcctctttcctctagtcaatgcaacattcattcttttttctgaatcaatgaatcctacttgtcttgtccttacacaggacagaataatgatctccttttcagctccctgaaaagcatctactgtggacacctgcacagttttaatatcaggatggtgaaagtccacagcactgagtaaatgacaaagcttgtacatctgggatttgtataatgttatcacaccaatcatagagcctgctattccacttgcaatcagtgattgaatcagcttgagtgtaaacgtagcttctgccacattatgaaagctgttatctctttctatctgttctagtcctttaacattataaaaacacagggttggtagccattccaataaagggctccgctctatttctgttacaccattcatgagggctcctttgtaaaacagatcattagcaatagcactgattgcaggatgacaacggtattgagttctcaatagaattggcttgtgacccattaagcaaagtcgatcaaaaagagtttgttccaatccattttcatgagctgcatcagaaccctgaatagtaggaggta

SEQ ID NO: 343705 - DNA, 1000 bp, Homo Sapiens
ttttttttttttttttcattttgaaaaatgtttatttaccttaccttttcttggccaagtcaattgctttggtcatctgcacaaagattctaaacactggctttcagcatttctttttccaagcaaatgaaatttatcataacaagacagagctctgattttagtctctgtggagtctgggctctgatgacctaggctagtcatcatctaagcctggaatgactgtttgggacccccatggccagcttgaagctttccttcctcagccactctgggcccctgaagaggtcacatgcatctgtggcagagactgtattataacaaagttgtttaccccaaagtcagcaaacacatgtacctagaactcatcccaattgtaggttgctcaccagacaggttacacgatgtgcaccagttaacatgccataggaaaattacattccaagaaaaagcaaaatgctataaaaacaaaaaaaacaaaacacccaaaacagctctccctcctttgatctgatggtctgcagaggtcctcaaatccacacactgccactcttcaagaccaaccgtccactgggccttcttaatctcatccaaagtcgcattcacaactttgacaggagcttgggttcttcatgtggcagctgcaaccatgtagtgtcttctcacttgcagaactctaacctcaagtctctcatgagtccccaaattccaggaagcataaaaaaatagcaaagcacacgagtatacttccaaactttgaaaatacaataagatcacaggaacaaatatgaccacgcagcagcgtacgtactgtataggccatattcctttacgtgggacattaatgaaaagctgtcttttccaaactgaatgcgcctattaataaaaaaatacacctgaccatctaatgctgaagtcatccgccaggatggtactggaaattgagtggctaatgtggagaaaacgcaggcagaaaaacaggggagacaaaacgaaaggc

SEQ ID NO: 343706 - DNA, 1000 bp, Homo Sapiens
ctaattcattatgcttttattgcaaatacaggtaaatgacagttttgtgtatatatatatttgtgtatatatagttgtatatatgtatacggcagtagacacaaagggagagcaatcacagatcagtggttttgtgtttgttttgttgtgtgtgtgtcattgttatttaactcctgtaccagaccattttactaattatttcaaagatgtaaatattatcaatacattttacagagctgtctgaacttttatgctgaaacaagaccgggatggcaaatgaaaaattccatttataaatattggtcattaacctaatccaagagtatattaaaaggaaggaaatactactagaattggaacacagacagcaagcacaatttgtacttcccacacaagccctacctggattctaatttagagccccaatgcctattttaccaaggcatctttaacttatgccactcagctgaagtgatacatattccctagacttcacgtggggtcaaggaaaaacatgatagttgcctcagatttggctctggcctcctcatcttccacagcctccctatattgttctggccagttctgtggtcgctttctgtagagcctggccatgtactccaagactttcattttgatggtttcatggtgagctcgaggaccccatagaagctcatattcaactggattagagtaggacagtggcctgcattccagatagcgctgtctcataagcttacgggtgatggaatgctttctccctacatccacactaaatcttcgaagcaagttccagacattggcctctttgacacggttgcccatcaggaagatcaaacctaggattggcattacatattcttgagtgggtctccccaggctctctagcatcacttgctcttcctctgattctggttgctggacaaggaggtagatgtgctcactggtatcaacctcaatcagagacaacccatagaacatatcaagaattagagtagct

SEQ ID NO: 343707 - DNA, 1000 bp, Homo Sapiens
tttttttttttttttttttttttttttttttttttttttttttttttttttttttttttttttttttttgcttcaaaaatacagtatttattgtaataactacagtagcaagaagaaaaaaacgaagtggaactacgtgtttagcagcagagctgaataattatgaatataaacaattactattgggagaaaatacattacactcattgcttggaaccatgaataatacttatatatgtacgaaatatagaaaaataaaataggttaacataataaggatataggcaattattttttttaattttataaaaacttttatttttccttacaaactggggtagttaggagacctgataatagcttttttattttcttggcaccaaagcaacttacttatgtgttccttcttgcattatctgttccagatcatagtcaagttttccaattcgttttactaagctagcaaaattttttataccaaaaagagtaaaatcaaaacaaatgctcctttgtttatagatgaaaatctggagcaaaataacacaacattaaaaaaacaaaactttgcaaacacatcctaaagctacacacattgaagcgtttacagcaatatgctccctgggttcgttctcccttcccccaatcctctaaactgtgcctttgggtctcagacccttgtcccgggggtccctctgaatccacctttcaagaggatggagctgggccactaggctgaggtctggccctgttctcctcatctgccaaagcctcacagtactgcgctggccagtccttggggtcttgattatggaccttggccacaaacttaagaactttcatcttgctggtttccaggttggttcgcgggccccactggaattcgtagtcgacggggtcggtgtggggtatccgccggtattccaggtaacgctgtcgcacaaagtcctcagtaatgagtttctttggatctccgaaaattaaatgcttcttggtggggtag

SEQ ID NO: 343708 - DNA, 1000 bp, Homo Sapiens
ttttttttttttttttcataatatggtaatttttaatattaaaagtaaattgtaaatgtgtctttataaacaatatgcataaaatagatcatattctaaaaccttttctttttaaaatgctttttcacagtaaatttcttaggtgtcagattttccctcagaatagtgcaactggaagaagggaaatgttggcagtggctcaggactctctgctagtacaagtccttgtagatctcctgcaggagcgggtgaagactcatgtctgtctccgtcttcttgatcacctgcagtagctgcacgtgttccgtgacaatctgtctgaggtctgtcattttctggagcagcttggcaaacagctgtgaggactcagggtggttcagcttcagctggagctccagggcttgtagcaggttgtcttgaatgtcttcaatgggcttcacattcagcaaacctgggcggtctccactgagaataatgacagcaataaatattgccaagtcgctgtcatctaattccagtgcattgaacttcacagcaaactcaaacttgggctccataaagtcaccaaaaggctttcgcaggctctttagaaactcccttgtcatgaagccttggccctcggatatgagaaccccatctttattcatcaaggaggccagcattgtgtaaatgatctcgtggactccatatttgaggagagttacttggtcgttcaagtcaagatttacaaaaccaggaatgcttttggcatactctgtgatctcctgcacagcctccacggagcgaaactggcagccctgaaagatgcggatggccacctctttgctctgctcctgcaggggggtgatgtgtttgaacttgattttatcttctcccatcattaaggaattcatgtcatagataacgaatggtgatttgtctgttgtctttcctgtcaagatcgccctcgcctttgctttggtcagcgggaaggactttatgtatgagtcatacaaatgtt

SEQ ID NO: 343709 - DNA, 1000 bp, Homo Sapiens; identical to SEQ ID NO: 160677

SEQ ID NO: 343710 - DNA, 1000 bp, Homo Sapiens
ttttttttttttttttttttttttttttttttttttttttttgacagtagtctttctatgtatttattttacctgctaccaatcattgtactaccacaaagaatgaggaagtcccagggaccttgggaagaagaggtgtggtccctgagaaaagggttgagggggtgttggagtaaaaattttgtaccaaatggaagtttttcaaaaaggcacagacaacagttacctctccaaacaaatggatgtagcagtaaacctaagagtttctttaggctgtttactaacgtgaatagcaacatcttcctaggtattaggccaccccaagtgtagtttaaaaataaatagtactagaaacggaagtggaaacacatgcacagtttatcttttcactcttgtgaggtcagcagacatctgtaacgcactttccctacagcagctaacaaaggcaggatgatggtatctgttctgaacgtttgaaacaacatcaccacttatctttacagatttcctcaggttctcaatggagggcctgaaaaacatcactgtcaaggatgatgctgctacattttatgagctggagacgaacgagacctctcctgatgcctctccagtcacaggaataatggttttgaaaacgtcaatgctccatctgccttgtacgttgtaatctcctgtagtccatctgaggccaacgtgcacaggaccacagtagacaaagagtattcctgatgacaaatctgatatttcagtctacttcttcatgtgatatcccaagtattttttcccatccaccgtgctgctggatccatggcgagaagttctctttcaggtacttggtgccaaagcccaggaccctgttcatcgggtggttgtcaatagctgtgagcttggccgtgacgtctattacaagggcagccttaaagccctgagctttgacctctgattctcccctggggtccacacccattaggacctggtctgtgatggtcttgaaaacaga

SEQ ID NO: 343711 - DNA, 1000 bp, Homo Sapiens
ttttcttacctttaacttttttattttagttgcagctaaagcatttattggtataacaaacacaaggactgccacccctgctaacactgctggacccagctcttgccaaaggagatatacggccattaggatttgaaaaggggcagaccagaggagattgaggtttgctgtcaagtccatgagttgctgacatcaagttaataatttccccagtggaaaacttttgtcgagaaacatttgataaaagtaaggcctttttgtagatcagtccatttacagctgtcttaacttttgctgaggtgagcatgttaaaacgttgatattgctgaagaatcagagtttgcaaaaagactacaacaagaagtgccactgcatagccatagccattccagccaaaatctgagctgtgttcacagaaaatgataatttgcctgcacgtcataaaaattgagaaaggggcagaaatgttaaacatctgaagtgttaaatgcttatgagagtttagtattgtcaaagtgttacacacacacacacacacacacactcttacctgttctttttctttacttgcttaatttgatatttgtccccgccctctcttttttttttttttttttagtaaaatcaggaatcccttccactggcttgtgagtacgaggttattttctggttttcacatggcaggcccatcaaataattaacttttctggtataacttcatcagaaaagtcgagacatagatacatttaaaactttatttttctcaaaattatgtgttttatcaaatacagggaaacatgacaaccagaacgtaagtaggggatcttttagtatggcccacaggtgctgctttttttttttaagcttgatttatatctcatgttttattgtcacttttattcataaccaatttcttttttctctccttttccttatttcctcttaagtttgtgacagcatgatcaggatgattagggccaatgctggggagcagaaaaac

SEQ ID NO: 343712 - DNA, 1000 bp, Homo Sapiens; identical to SEQ ID NO: 160679

SEQ ID NO: 343713 - DNA, 1000 bp, Homo Sapiens
tttttttttttttttttttttttaggatttgcaataggggattttatttgagtacaaagtaaatatatattttaaacatttgagtttgtgcattaaaatacatctttgttaataatcagatagtccagaaattggtggcttctaaaataccagcatacaccaaaactatatttagaagacaattagattaaaaattatgcatattaagacttctgcaaaggaatatcattgtatacattttaatgattctcaaaaatacacatttatcattgtcaaatactatttatgaagtcctacattaaataattcaacttttagaagtttaacttaacttacactaaaatatataataaaaaagaaaagttttctttttctaatttcagtatatatgctgccgaagcaagcacaagaaaaactcttcaaaaaagattttactagtaaaaggattacaaaaaatttggtaacttgagatgctcttctggaacgtatgctgctggtttaaatgtgcaagctccaacttaacaaatgtttaaaatatttgagtttttaaaacagtgccaaaacaaaccacatcttttctagagatgacatatttagctaagcacgagcaaaataaatctttcaaccattccatgtatttgtttaaaagcctaagaaaccacgtgcatttccaataaaacatgaacaaaacactgaaatcactggagcctaacagttcacttataaatcattttttaaaaggtaaatgtatcagtgtgtgtgcatgtatatatatatatatatatgtaaaatatgaatagataggttagctgtaaatactagttaccaacaacacaataaaatcagtaaaaaatttgggttccaaacacatcatatgtgaaaagacaaaaatatataagccatggctatttcatcatagaatgccttattaatcacaagtatttgaaaatagaaagtttaaaaataattgtgatctttaagaatagtacatataaaatgt

SEQ ID NO: 343714 - DNA, 1000 bp, Homo Sapiens
ttggaatttggaaagtttttgttttctttttcccacacatttccggggttggggtgttttccaagactcagacacatttgttaacaaagagagaaaaaaaactgggggagcagggagcccgtgggcaaagaagtgaccccagcagtctgtggacaatgccttgctccctcttccctgctgcccgcgcccagcgggtgccacaggctgctgctcgtggaatctagagtatttgtctgtaatatatatctgcatttgcctttcccctccctcccaccccccacccctgctcctccagcagcttccccatcaatgcacgtcgcccggcggcacacacagaacaggccttccgtcaggcctgagccccttccctgggcggcaccaagcaggtgcctctcctggtgaggggagttggggcacttgccccaccccaccccacccacccactgggccactcgggcccaccctcccgcccttctcccaccgactctggaaacccaaagggaggaaaggaagggagaaaccagacacacaaaaaaagaagtagggaaggagggtggggacagtgagacacagcaagcctgggatggggattggagggcttgggaagagaaggaaggcaggagggacagaaggaagaagaagaaaaattgaggaaaattaacaggacgagcagtggacactttacaaaacccccagccttccttcccacccaaccccaccaaaataaaactacccccttaaaaaaataaatcaacccagggctgtgagcacgtgccctgcctggcaggcgcagagctgagagggacagtcagccccgggactgacgaggccgcgcagtggacggcaggaggaagggggcgagcacggggtttttccttttctttttttgcgtttcctcttcgtaagagaagcctgaggcagccagggagagggtccccaggcccctggcagggagagggtggcaccctcctcccgggccctcccaggaggggcagctggc

SEQ ID NO: 343715 - DNA, 1000 bp, Homo Sapiens
ttttttttttttttttttggaatttggaaagtttttgttttctttttcccacacatttccggggttggggtgttttccaagactcagacacatttgttaacaaagagagaaaaaaaactgggggagcagggagcccgtgggcaaagaagtgaccccagcagtctgtggacaatgccttgctccctcttccctgctgcccgcgcccagcgggtgccacaggctgctgctcgtggaatctagagtatttgtctgtaatatatatctgcatttgcctttcccctccctcccaccccccacccctgctcctccagcagcttccccatcaatgcacgtcgcccggcggcacacacagaacaggccttccgtcaggcctgagccccttccctgggcggcaccaagcaggtgcctctcctggtgaggggagttggggcacttgccccaccccaccccacccacccactgggccactcgggcccaccctcccgcccttctcccaccgactctggaaacccaaagggaggaaaggaagggagaaaccagacacacaaaaaaagaagtagggaaggagggtggggacagtgagacacagcaagcctgggatggggattggagggcttgggaagagaaggaaggcaggagggacagaaggaagaagaagaaaaattgaggaaaattaacaggacgagcagtggacactttacaaaacccccagccttccttcccacccaaccccaccaaaataaaactacccccttaaaaaaataaatcaacccagggctgtgagcacgtgccctgcctggcaggcgcagagctgagagggacagtcagccccgggactgacgaggccgcgcagtggacggcaggaggaagggggcgagcacggggtttttccttttctttttttgcgtttcctcttcgtaagagaagcctgaggcagccagggagagggtccccaggcccctggcagggagagggtggcaccctcctcccgggccctccc

SEQ ID NO: 343716 - DNA, 1000 bp, Homo Sapiens; identical to SEQ ID NO: 338011

SEQ ID NO: 343717 - DNA, 1000 bp, Homo Sapiens
tttttttttttttttttttcagtgttctaacaagtactttaatggatagggtttgctgtctaaaacatgaagaggtaactcaacattcctttcagtgccacaggttaagaacttggagaactggctttcctgaggagcttctagctccagaggttgtacatgctcatggcagcaacaacccattgaccacttcttcaaagtagttcactgccaaggagaatcaaaattcaatttggattcccaatactcagcctaccttcaatttcccatcaagcctatattcttagcctttagtttaagtgtgggttatcttaacagctcacttggcctcagttcaaagtgaaatttcctgagtccttgaaagaagtagaaacccaatcaatgagtttttctcttggtctctactttgtgagaaggatacatttctagaaatttcaataccttccaagtgtcagaaggaaatataatgtagctgttgaaatttgcgatgtaggataataaggtactcccttagtgccaggtgcccacgtagagcaaagaaactaaagaaaaagtgaaatcatattatttccatgtaaaataaataaagaaagaaatatccagataagcttgattgctccttctgcttctccaccacccatgcccctttgagtgtggggttagtgactagtccatggcctgctgggagtgcactacagatgtgcttcctgaggatatctccaggctccagatgttactgtttgaaagacagaagcttgaagctgtcatccaggatggacctcctattgcgtcgtagctttctctgtcgatgttggtaccaaaccactccaccaagagccagaacaacgagcagaagggtgacactaatggcaaccaaaacagaggccagcatctcaacattctttatggggatctgcatgcccagcatcttcacattgccttcttcaatgtctctggggggcactgctttttcagtctctttggtgatgacggtgagagg

SEQ ID NO: 343718 - DNA, 1000 bp, Homo Sapiens
tttttttttttttttttttgagagccagaacggaagtcttggttttatttatagttgataacttacatccggcctgctcctcaggaagcacagcagggaggagacagagcccaaaggagacggcgacaaaaatgcccaaacccctgagctaatgtggtgactgagagcaagcctaaagctcccttctgagctccccagcagccaaagcaaagagagaaacagggtcctgcagcatgatgtcacagaaaaccagggaccctggagcctgggttccaataagaaccttacattctgacgccttagatttctccctggaaaatggggagaaaaatactgaattggttgggagggccatgcaacacacccagcacagtgtctggatgcatttcagaggccccaccagtctagggtctacagaaagacagtacaggcgcctcactctccatgcctgtacgcatggcagacatcactcatggattgcaacacgcttccctggagccagatgcagcctcgtagccccattgcacaatgtctccaggggctaccaccaatgccccagtcggctggagctgaacttgcgtgtcctcccagcctctaaccagctgagaaaatgaccagaaggagctgggttatcatgattttcccagcacctggctcatgcctgcacctgggagacactcaataaaaaattgtctagttagggaagaggcagggaagaatgggagaaaggagaaggaagaggagagggtaggagagttgggagaggaaacttggaacttaggcaacttgttgagcttctctaggcctcagtttcctcatctgttaagtggggggttttagtagctacctcatggagtcattctgaggattaaatgaggctgggcatataaaccacttggcacacaggacgtcctcaacaagtgaggatgatgatgaggaggaggaggaggaggtggtggaggaggagaggagaagcacctgacactgggggtgggtgcat

SEQ ID NO: 343719 - DNA, 1000 bp, Homo Sapiens
tttttttttttttttttttttttttttttttttaagggagaaataatatattttatttcayccctgaaaacaaaaacaaaaacaaaattgtccacatctaataggagagactaaacaattattccaaacttctacctggcaatggcatataattaatttcttcacataaaggtagacagtacagagaagagaagagagatttggaaatctgtctttcatgaaacaatatttcacatatttattttaataaaatattgtaattattgctacatgtggtagcatattataatgacgaacaatacaatatctaaattctatatagtctaaatctagaagctagctgcacttaagcagttactatagagaataaatactatgaaatatagggcaccatgtggcaattagatttgctacaagggaaatttaaataaaagtataatttgttttatactagaattacccaagattagggttccctgtgctatatacagcttttttcctgaaaagatagtcaatcttcatagtttatattttaaatgttcttattttaagtggccattatataaaatgaatatctaatgcatctgttatacaaattcaaaatttcataaaggatactcttatataatataatgttaacactttccaagcaatttaatgcagcacaaaagtacctttattatatacacctggctaaagtcctcaagagttccattctccaaagtcccttcctcctagaccaatataataaaagcaaaattaacccaaatatggaaataatgtgctttcctgatagcatagacactcaaaggattaaacttttaaatgaacattcatgtatgtgaaaaatcatgaatactttattgttactctcatcataaaaatatcttttattcttcaataagtataagattagagtttacaactattttaatgctgttattaaattgccccaatgtttacgataggtaatggacagtggctgctacccatttcaaga

SEQ ID NO: 343720 - DNA, 1000 bp, Homo Sapiens
ttttttttttttttttttttttttttttttttttcccagatgaattttaattttgtttcctctcagacaagccattcagaaataaaagggaaatgaggttcatttaagtacacaatttgtaaatgtggaaacagtagtaattgtcatgattattttatattctctcttaacagtggctctaaaaacagcccaatgattcacacaactagcaaagcaaaccaaactctataaatgtatgagaaattaagttgctagcactgaaacactgggtttggatatggacaaggatgttgtctctgacttgtatcttttgggtaccttggtttttgatattttgatgttcaagcagaaagcgcgtgactttgttttatgcaataaggtgatgtaagtgtagaaaatgtgtagggatgaaggaaattccaagttacatgtgtatacataaatggctttataaaatacatatatatagccattaagatagttacatagggacaatgcaatttaaaacatttatactcctgcttacagattgccaagtctaatcatcccttaagtctttttcaataatgacataatttatttgcttaaaggtaaaaacctcctgattgtattaaggacattaatatactacactgtattaaggatactataccaacatcaatctaggaggtaaaataaacgtttggcaaatattgaagtcagatggaatagattcaactctataaagttttgttttagattttataataaaattttgcttctgcctacgatcatgtttacttcagcatgagtgctacactaactagaatttaataagtgttatttttattgagttttcaaatttggaaggattttgatccaaaatatatacctatgccttaaaaaacaaagtcaagataatcagtatgggctttagtaccaattttactttccaatccattttcttccccagtatttcacttgtatccctcataacttcatagcaaattatccagattat

SEQ ID NO: 343721 - DNA, 1000 bp, Homo Sapiens
caaaaaacttcatttaatacaaatagttgcttaaacaagtatgaaaggctgaaagtcaaaatctgcctgagaaacttaacaaatctgcaagctggaaaccgcgtcttttccccactctctgccagacagaatcacccagtccactttcaggggcccagcagggaagctgatttaagagaagtcaacagcttttctgactacactgtggattccatcagtgcccaggcacctgcagggctgcagtaagcatctctgatgaggtggtcccgggcactcactcgcagtctccctcctggtttccttgtgggaaggggcttcatgatttcaagctcagttcccctcccactcccagaggtggagcgcatggtcatagaaggagcaggtggccaggaggctgaaggctgagtctgcttcttctgggttcacgccacagtcacgtgtggtggctgctgtagcctgcagccaggtgccattcttcctcatgccctctgtgagtggcttcattccactctggggtctggcatggccctccccatcgttatcctctctgcattcatgacagggtgttggcaactcgcttgcacccttcaggtctgccgtcttggttcctaggttgctaggaaaggaccacgagggggcccgctgcagagaacggaagagcagccaggaccagtcggctccatacaccagcgagtcgggcaatgtgtgagatgtcaggaccgtcgcctcctgcctctcctccattgccttttggcagttgaggatcttaaagccactgtgcatgcaggcggccaggagcaggtggtggtggaaagggtgccacttgattctccataccccaccctgcacaggcgtatctgccaacggctgcttcatgtttcgtgtgtcccacagtaggatgtgttcatcatagcttcccgtggccaggatgtgctcccgatgagggctgctctggatgctgcacacacccatggtgtgtcttttgctggtgaagagaaat

SEQ ID NO: 343722 - DNA, 1000 bp, Homo Sapiens
ttttttttttttttttcttttttttttttttttttttttttttttttttaacaaaattcagatgtttaatttttttcaaaacttaactatactaatgaaaataaattatatgtagaccaccttcaatatttttacatcatctttatacaactgtaacagtgctttcaaaagacattttgtgaaggacattaatttcacatttaaaacgtgtttcaaaaataagggaacattaaagaacatcaaattagtctgaaatatatctcacaatgctgagaggcatactcttctttatcaaattaactgtatgtgtactcaagataacatggcttttaactaatgacatttcttgtccatttcagtaatttcttggatccaaaacaaaatctgtgtatttatttctttgaaaacatcatttgtcgaccgtcctttcactgccatggaatgatttgccttctcaatccagtggattttatggggagcttgcattttctgtgccactttctccaacaagttcttttcacacatttcatctgctgagcctgacacaaacagtacaggctcttttaaacgaaagaggtcttcatctctgagtttatgctgctgctttggatggtgcagtgggtaagaaatacaaatgagaccccgaacaaaatcatcaccatcatctggctcaatgtgacacattacagaagcagctgctcttgagcccattgaacgacctccaagaaaaacacctgcaagtttgtattctcctgatgtcttcaggtaattcaaaactgatttatacgccttaattctatgtacaatattaaggcctttacaggtaaatctcaggcagaaaaacccatgagatgcaagatgggatgccagtgacatcaaatgaggaagattcatatctcctgatgctccatgtgtaagaattattccatatgttaagctcttgttaggtaccaaacaaacagcatctagtaatttatttccaaaaggtatttttaattta

SEQ ID NO: 343723 - DNA, 1000 bp, Homo Sapiens
ttagagcctacattttcccatgctggaacgaagcatgagtacaccctcaaagggagttccagggttgttggccatcttctgccaaaggcgctgctcttccccctgagagtccatccaatccacgttcttcccatggctcacaccacttccagaattcaaacgaactcctcccagaaagatgttgctggaaaaggcctccttgtcccagatagtaagttctaggcaaacattctttatatcctggggatggatgccactgaacatgaatgtatgattccactgagggttaacactcttttttattaccagagttttgtgcttggtggctttgctatcatcagggagcaggtagcccttcacaaagctatcagaagtgcctcctgacttcactgctgtcaaattctttgcctctttgatgaacacttctagtattcctccagagattacaggtgactccttcttctttccctttttaaaagtcttatttccttggagttgttctggtggaagcatcaggttctcttctgggggaatgtaacgtaaaacaactgtcagctctcctttgtattgaaggccaatatcaggagcaaactccaccttgggttgaagcacaaaccactcatcagttggattttcaaagttccatgagtcaaaaggaatctctacttccccgaggaagctattacgtccaaatcgatcatagtgccagactgagagctgcagagttcttgtttccagctgggtatggctgatagtgtactttagtgtttcattgaattctggattggtgcctgttctgattttggtcttacgcttgttgttccgggacttgtcaggaagaagatatgacttgacataagcatctgtcctctgtttcttttcatctcctatggccagatttctgcaattcttgacaaaaatgtacagcccaccagttttgtagcagtagctgatatggagaaggatttcaccactgactttcacgttgccatagtctccc

SEQ ID NO: 343724 - DNA, 1000 bp, Homo Sapiens
ttttttttttttttttttttttttttttttttttttttttttttcacagcagtagcatttataatatcagagagttggaaacaaccccaatgtctatgaactaatgagtaaacaaactgtggtatatccatacaatgcagtattattcagccataaagaggaatgaaaaactgatacatgctacaacatggatgaactctgaaaacgttcagtggtaaaaagccagacacaagaaaccacatattgtatgactccatttatatgaagtgtccagaagaggcaaatctagacatataacgtggattagtggttgccagaggctggaggaagagcgaataggcagtgatgataaggggtatgagggatactcacacacctgaggtcacacctgcacatacaggtggcatcaacacatgcaggactgtcgcggttgcttctggaccgaacgaaggacgacgaatgcagaaatgagacagacaaaaggatctgtttgaaagaaggggtcagggggctccttgatattagggaacagggacctgagcttttacagcccttcatatttattaggtagagtgaatagggaggaagggataactgtcggtcagctatttgatttaacacaggcccacatgattcctttctttgttcaacaggttctggatgttcctgtggataacctcaaggagcacgggacctgggacatgactgcccccagcattccttctggcggcagacagagtttgtcagttcgccaacatcctgctttcatgagaacagtttgctgtttgctcacagagcctccagtggtatactgagttggtcacgaccctcattccttcggcctccaacatctccccttttgtttttgcattaattgaataaaggtaatttcaggctgtgcagctttcaattgccggttggtggttcacccgatcctatagacgcacaggacactacagctagcatggccaagaacatggagtcaggggtttttgcctga

SEQ ID NO: 343725 - DNA, 1000 bp, Homo Sapiens; identical to SEQ ID NO: 160681

SEQ ID NO: 343726 - DNA, 1000 bp, Homo Sapiens
tttttttttttttttttttttttttttttgaaactgattcttaacgatttaaagaaaattatattcaagtggcaaatttggaggcaacaggctacttcggagtccatgatatgagatggcgttttaaatacatgttttatcttcaaggttttcagctcttttctctggaccatctggatataagttgatagctgtcacaggtatgacgtccactttatccaactgaagaattcctttgtattcagaaactgggaaaaacacctttaagatggttattaccacagctgctcctgtaattccaaccaccatgatgttcaaaaactgaaagaatactgggaaaacgttgctccagaacctacacagatcttttctaaacttttccatccactgacacattaccttatatgaagatggcggctctgctctgagaggagtttcaggtaacttgccaggtaaaacatcttcatctacagtggtttccacattcctgataagatactggctagtggtttgcagtgaactaacactttcttttttggagaggttaggaagggtaaataaaatgtcactgtctcgagaaatagagtagagcatgctttcttccaaagggagggtatagtttgaatgtctgagtactccccggttcttaactaaaatatcaatttcagtgacatccttttgctgaacttgttttccatcaatctctactacctcttcttgaatgacaattagttgcaaactggaaccagatgtcataggccactcatgaactaaaatccttacactgacaattccaaaatattctttttcctccaaattttcaagattttcattcttcactatcaaagtctgacagcttattcgggttacaccactatttacaggtaagtcatttacatacacctgtccactctcataggttatgttaagaacaacctgctgtttagatatgtccccatcatctttcagtgtagttacattaattctgatgccgtcctgt

SEQ ID NO: 343727 - DNA, 1000 bp, Homo Sapiens
catcgtggtttgtacttgcctctcagcacccatcacactggatgtaactacaggcatgtctctcctgtttgactgtaaactccttgctggacacatatctcaggagtccttacagccatttcagtgctgttgcaaagtggatatttaataaatatttgttgaaggaagtctgtttgcttgtttttgagacagagtcttgctctgtcacctaggctggagtacagtggcatgatctgggctcactgcaagctcccctaccgggttcatgccattctcttgcctcagcctcccgagtagctggaactacaggcgcccgccaccacacccggctaattttttgtattttcagtagagacggggtttcaccatgttagccaggatggtcttgatctcctgaccccgtgatctgcctgcctcggcctcccaaagtgctaggattataggcgcggtgaaggaagtttttttaaaaaaagaacagatccagaagcaagattagggtatcaagattttacattactaattctgaattcgttatcctttgctttcagccatattaaaactgaaagccttccatacctgacgtttttctatctcattatacagctttcctgtcagatcttcttttagggtgactttgaagaatcagaacatcagggctccaactctcagtagagccagtaaccagcttcctgatttaaaaaaaaatcacctttggcctaattttgtcacttataaacagtggtattgcagtaccctggtatgattagttatgatatgtttaacaataattttaaaataccaaagcttgtgaattattttactttcaaaaaatatgtaagttagaattgtaattctaaaggcactgtcgtttgcttacacattctaacatatttctaataagaaagtacctgctttcttaagagaaaaagggataagttaccaaaagcagcacgttctcctgggctcataccccggattcatccatgaggccacttccatt

SEQ ID NO: 343728 - DNA, 1000 bp, Homo Sapiens
ttttttttttttttttgcttttaaattgttttattacaattaaaattacacaaaagcaaatcgattcatttcaatcaaaataactcatgtttacatatttataactgtacaataaaatatataaaatgttttcatatttcatacttcaatcatcatcttcttcctcttcatcgctgatcacatacttcttatgctttttatttgctttatcatcatcttctgcttttctctttccggaaggttcaccttcctcatcactggtaagtttctttgctttgagtaatctttgagctttatcttcttctgatccctcatcactgtctgatgaatagattctggctcgttcctctcgaatgccccctttatatcggtttttaatggcagccaagctgatggactcctcgccttcctcctcctcatcgtatcgatcaggttccaggtaactggcgctcagcccccgctggtgctgtttctctctcattcggcgctgctgagattccctacgtatggaagccctcaaacgttcttcttctttcttaatcatttctgtgcgttggcattcaggatcacgaccagccattggcaagattctaatcttctgtgtctttgaacacctatctgcaagtgacagagtcatctttctatgtgtggcactgtccgtagagtgaggtctgaaggtgagtttcgttttaaagactgcttgtccctgtagaccagtaccttgtcttataaaaagatgattgtggtcgccctgcagtggggctttgtacacatcaaacacttcattgcctaaatgcagggacatgcttccatctgaccacttgactatccgagcattgctttctttaatttcatttccttcttcatctcggcgtatcctccatcttatagtattttctacctttaattttaacctggttctaccttcttcatccagcatttcttcatcttcaaattcatcttcataatactgaggatcaaaaggtctgggctctacact

SEQ ID NO: 343729 - DNA, 1000 bp, Homo Sapiens
acactccctcagacgctttattgtttacaaaacagatggatcccatagggaaggaacacaatcattatgctgacagcagcgaacagagaagggaagaaaaaaggtgagctttaaagtaatcgcaaatcactgcctatgcgaagaggctgcttccgggcacctgggctgtgactcaggtgctgacatgaatacatcagcaaggtctcaattcagccacagtcccaagtcccccaaccttcctgattgcatctctattttaaatgacccagcctggacatcaaggacaatgatctaggaggcgggtcaaggagacagccaggcaaagtcagaacagacttggggcttccaggctatgcccggtgacagctgagctcttcagaaatgcgtcacattcagcgttcacttccttcgcttcctccactacctatgacatagcgggggaaagagacaaccatgagagaggggtccctcctcgctgccctcctcgcagctgtgcttgagtttcaaagggggagaggtttgtgagggaccggcacagggacagccagagccggcaccctccggcccaccgtggcacccctgacgatcgcggggtggggtaggagtgagggtgggggtcggggtgaggtagtgctgtggggagggcactgtgaatgatggaaacgtcccttctcagcctgggtcgtgcctaacctgggtctcaaatcccactctgccttcaccctggagtacactccagcgaagccgaggcccagccaacgctcgtgaagtttccacagagaagagcctgcaaaactcccactggaagaggagaaataaaggccatggaaagaaaccccagggaagagacaggcctcgttcacagaccctaggcagggaataaaaaattcaagtcattcacagaagtcttgaaaggcatgaggatttctgacagttcctagaaaaaggcaacattttctttatctttgtatccattggccaagaacgccgacatgtgaga

SEQ ID NO: 343730 - DNA, 1000 bp, Homo Sapiens; identical to SEQ ID NO: 160683

SEQ ID NO: 343731 - DNA, 1000 bp, Homo Sapiens
tttttttttttttttttttttttttttttttttttttttttttttttttttgacttaaaacaacacaaatttattcccttagagttctaaaatcagccagaattataaaattagcctcactgagccagtccaggtgggagcagggctggggccttccagggctctgtgggaggatgcatttcctggctctgaggtggcctggactctgtggcttgagctgccctcctcaactccagtttcctgctccatcgctacacctccaacctcctctcccgtcacctgctcttctgttatacagacccgggtgaggacatcaagccctcctgaacaagctgggataatcttcctggcgaaagatccttaacttcattacatctgcaaagcccctttggccatacaaggtaattttgacaggttcctgggattaggacatgggcatcttgggaggccactactggcctaccacaactgggcagcaaaactattacaccctccggtataatagttttggtgtttcaatgactgggaggaaaagggttggaattttttgctttggggtccctcttaaccttgtatttttaaggtctgggactcaccaaccctccccttccaaccagagaaactcactgcagtatctccttgaaagtctggtgacgtgtctgtctaagtgctggtgagaggcacaggaccaactgagggcctcacgcagtacccctggccacagggtgcccgcctaagcccacacctgctgactgcaacaagcccatggccaggacggaacacagagaagggtctgaggcctggagcgcgccatgaaggccatggggcaagtgaggtctgctgagatagcgcaggtctgcggagctgaagtgcagctgcagaggctggtctggtgctgcgagaactggaagaagctgggagctgtggtccctgtccacagagatgctggaaactgtggctgggagtggctctgaggccgtggagagagagcatctctgcc

SEQ ID NO: 343732 - DNA, 1000 bp, Homo Sapiens; identical to SEQ ID NO: 160686

SEQ ID NO: 343733 - DNA, 1000 bp, Homo Sapiens
ttttttttttttttttttttgagatcgagttttgctctgttgcccagtgcagtggcatgatctcggctcactgcaacctccacctcccaggttcaagcgattctcctgcttcagcctcccaagtagctggaactacgggtgcgtgctaccacacccagctaattttttatgtagagacggggtttcaccgtgttagccaggatggtctcgatctcctgacctcgtgatccgcctgcctcggccttccaaagtgctgggattacaggcgtgagccaccgtgcccggcctcaactttttatttattagcttgttggtcttcaacctctgtaagcctcagtttcctcacttatcaatcatctactgctgtatagagacaggtccatctcctagcatgcagggtgaggctaatgtgacatttgaaaactccagagtgctgctgacagtggttggaggtgaaggaggaggaaataaaagcaatgtgagaatagctttaaagaaaggaagggcaaaaagttgaaaagaaagaggcagtgtggagagatggagccaacagcagcatgggagtccctggctagggtcagggcttagatgacgacattgttggttgggttcacttgctctctgaactgcacagggaatcgagctggtcattagacatggcctggagccagtcactggaaaaggaaatcaatacccagactgattctcagaacagccaccatttgtatgattttaatccatagaatcattctgaaagcttcttaatcttcaccttttttctggacaggagacaggtggctgagcctagccctggactggatcatatcttcacacttccttaagccacagaaaacttgaaccaggtggtgtggtcatactcctcaccaggcctcagcagcacaggagggaagcggggctgattgactgcatcaggccagttctgagtctccaggcagaaaccggagtgcttgggatagacagctccattcttgccctttaa

SEQ ID NO: 343734 - DNA, 1000 bp, Homo Sapiens
ttttttttttttttttttccttttttttttttacgttttatcaactgccaagatcctttattttttccaggccccttcctgcccactccacatcggggcagctccagcataagggagatgacatgatgaaggggctaagagtagggcctggccagcatccactgagggcccaaccagggaacagttgctagccgctctcttccatgcagctggagcactagcaaggccttccagaggctcccagggcgacctccacatcactcccgcttgtctctgccctccagggtgctccgggcctcctctccctgtgtaccctagaggtgtgagggccacagtcctcctcaggtgaacctccctccccaagcccagggccctagcacaggctgcagttggacggcttcgagctgcggctctgggcctgctgccgctggtattctgcctcactggctgacagtgcttgtgctaaagctaggtcttcttcctcctgacaacttggaacctggggtttggtttctgccagggacatttccagggcccgctgcagagcttcatcctcactcaggccattctgcaaagcaatcactggaggggctgtccaggacggagatcgggttgtggctctgctgggagaggtacaggaaggcatggtttgacttgggctggggacagtgcttgtagaagccacagcttgtgctctggagatggcagcaagtcctgcccggctggttgggtgcccctccccagagcaatcatggtccagtggatgccggtgcttgatgcagaagtttcggctacagcgttcacaggtcagtttcatcatttctcgctgccggcagccagcgcgttcacacttattggtgaagatcttacgtttttgctgtgctggatcagagcgacagtctctgtcaatgtgctctcccacagcacggtcagggggctcccctctggccacaggcacaggcacattacagagagggcacacaggtacctggatatcctt

SEQ ID NO: 343735 - DNA, 1000 bp, Homo Sapiens; identical to SEQ ID NO: 160687

SEQ ID NO: 343736 - DNA, 1000 bp, Homo Sapiens
tttttttttttttttcattcaaaaccagcaaaaataaaatttaattgggctcaagtctgggcagtttgtccttcctcaggaccagccgtcagcagtccctgacgaaagcaccccattctctccacagacagctggttccagaaggaccctctgaggctggtcttccgggtaggatgtgctgtgggagggttctgtttccgaggaggagaggcgcgacacagcgtgcaaggacctgcagcaccttccacgcagcaccccctgctcctcctcctcagcccctgccgggctctgactcctaagtcaggcaggagcttcttcaggcccctggctgaggaagagccacagccaccctaaaatggcttcgggggcatgcagccctccatctccagcagctctggccatccctcgtatttgtttgtgtctgggctgttctttaagaactgctcaaaggggcttttacccctgaggtctttggctcctatgaagacccagctgtcccggaagcccagttgttttgcgtaggaactccccaagtcagagaagagtttcctgctttcatcgttcattttggtccctggatcgtcgtaggaggccaccagcaccagtgcaccccccggaatttctttaaggaatttcactaggtgcataacatctccagagtacatgtcaaatgccttctgtcccagcacagctcccgtggttccattcaccagggcgatgtttaggcctctgcccacattgtttttcacaggactcatgatcatgcggtcttcaaagcacatagtagggcccacgacgttggcggccccactgcagattttaaacgcaaagtagttggctgggcagggcttgatgaggccacacttgtactttttaacctggatctccttggtgggcgaggctgccagccagcgtggcagacggatggttttcatgctgaagctcatgtagcttcgaataaacatccatgtcgtgactatggcaaagatgagggccagga

SEQ ID NO: 343737 - DNA, 1000 bp, Homo Sapiens
aaaaatataaatccatttttattaaatagtataattcttattataatctcacatcatatttaatctggttgattaaaaagagaaagtggcaactgtagaagcaggaatagtacagttattaaaatagaaatttagggaaaggcacatttaaacaatgttggagggaatttgacatatatatttgacacaatttaacatatatatcaatagtaaaatgcacaaaccctttgacctgacaattccactcaagaaagttatcctacagatatactcaaaaacaaagagatatatgcacaagaaacattctatgtggtattgtttataccacaaacaaaacttaaaagaaataaacaaaacttaaaagaatctaaatatccatcattagggttgtttttaattaaataatgatataactatacaatggaattttatataaccattaaaaagaatgaggtagctctacttgtcatgatataaaatgatctctaagacttatattattaggttttcatatgtatagaacagtaatgcagtgtattgttcccactggtgccttgacaaagatatgtgcatgtatatgtaaggggacacataaattgacacatataccataggcatatacacatgtcatatgtacattaaaatattctgaaaggatacacaagaaactgttcacacttgctccttcttcagttatttcttgaggaaatttggttttcattatttactgtcctgcacaatttgaatatttggtcatgggcatgtattttctttgtaataacatcagttcttcagagaactagctggtagcagctaagaatcaaaaattccaattatacaagggtatgaatgagaatccattaaaatgtcttctaagaaccttggaaaacctaatttcaatataagtcttcattctagaactgtaagaaaatcagacagtaattataatgtatctcgtttgttgttgtttcttggtactagagtccaacaacttataaag

SEQ ID NO: 343738 - DNA, 1000 bp, Homo Sapiens
ttttttttttttttttttgtcaaaaaggatcaaacactttattcatctacacataacatatataaaagcaagcaaaatcaggatgttttcctcagccaccctttccacattttgtgcagttttagtgaactataaatcactgacttcttcaggcctagtcgcaccacatctccacagtcgggatcatgagccacttggaataaagtttcttccacatctctgttttttccaggagggtccataatatgatttatctgttgctgtaaggttttgggcaatgtcatcagctgagtgaactgtccttctgggcttttatctatctccagccagccttgctggcttttatacaccacttgaggattttcctgtagtatgctgccatagagctctcgaaagtgggctatattgggcttcacaatattcaacacttttgttttatcttctccaaccaccatccgaaagtcacctgaataggagagaccggcaatctctatgaagaggtcttcttcagaaaagctttcggggagcatgaggaaagcagcggtcacagcactcttcagatttctatcgagggctgatctaagagtgacatcctcgttcactgagataattttcaccggtttttggagtcgtccagcaatgtataagttattccagttgaggagatcttcaatcagaacgttagtgctaataactccatatttgataagcctaccattacacatgatcaatgaattgtagtaaactccagcgccatagttattctggatggacgtgataatcttgggccctaaaacttttaggaaagagtagtgactccaatttttcttcaggttctttgaatgccatgcgacagggtcatctactgtgaacacaaagtccagcatagcattcttctggtctgaactcggccctgcctggcggtacaccccggagccgtagacgaaagccagactcagctcctcggggaagtgagacaggatcttgcggaaggtcaccc

SEQ ID NO: 343739 - DNA, 1000 bp, Homo Sapiens
caaaaattcaaaaaattagtttattagcttaatataattaggtcaatggaatcctgttttgatctcaatacttcccatattgcaatatataaatgtgacaaattcagctgttttgtggcatagataagtgtctaagctgggcagttagtctacccgtttatagttcatgttcttcatggctttgcagcatttgtcactttctatgatgtgttcaaagaccagaaaaggccacacttgacctgtcagctggtccttgaacagctgtaggttttttttttttgagacagagtctccctctgttgtccaggctggagtgcagtagcgcaacctcgactcactgcaacctctgcctccaggttcaagtgattctcctcctcagactcctgagtagctgggattacaggcacatgccaccatgcccggctgatttttatatttttagtagagatggggtttcaccatgttggccaggctggtcttgaactcctgacctcaagtgatccacccacctcggcctcccaaagtgctgggattacaggcgtgagccaccrcacccggcctgtaggttttaactaataattagggtattactctatcattctctatcattcaaattctccaggtactgacctggtttttattttatttatttatttatttacttatttatttttgagacagggtctcactctgctgcccaggctagagtacagtagtggcacaatcttggctcactgcagtctccacctcctggggttctattgattcctgtgcctcagcctcccaagtagctgggactacaggtgtgcaccaccacaccaggctaatttttgtattttttgtagagatggggtctcaccatgttggccaggctggtctcaaactcctgacctcaggtgatccacccactttggcctcccaaagtgctggaattacaggcatgaggcactacacctggtcagaccttgtttttaaattatgattcgatgtacatgtcaaa

SEQ ID NO: 343740 - DNA, 1000 bp, Homo Sapiens
ttttttttttttttttagcgctggggtcagatggaccctggtttattagaaaaagaaaagcatgtggagtccttgtctttagaggaaggccccctgcatgctggttgacttgcagcagaactggctggagcttcttcttcccaggaaggacatcttcctgatatgccagcgtgactcctttgggctcgaagatgcctcttcatcagatgggtctagggattcagatgctacgtcactgctgaaccctggtcccctccgcagagggcaatgactgctcctctgggggcaaggatagctgctcctccccgggcaccagcagccactccatggatgatgatgactgcttctccgcgggccacagctccacctccataggctgctcgctcgtggacgtggacgattcttccagacttggtggcagagtctccacctgagatttgtgggtcttgtctggaagtggcaccgtcccctccttgggggtgtgaggctccttttgccagctcttccggaacggtgtggagggcttcaaaaatgctgacttctcctccgaggagtctggctggctctccaacgtcagctggcctgaaagaaatgactggctccccagaggctgtggctggctctcaaatgacgacagctggctttctctgtgcaacagtgatttctcctgaaaagaatgtgacctctccttggtcaacagcaacttctcaggagaaggtggcctctgcttgggtgacaatgacctctcctgtgcccttggcaattgctcttggaaagactcagatagcctgttgctgctggtgagcacatatttggggagggcaggttggttttctggatgaagagcggattgtctatccatagaaaatgatgagctaggtgtaggggggagctgtacttcctgggaggacacctgcccctgtggctggtgcttcttcttccccaggaaggacatcttcctgaggtgtcactgtgactcttttgggctcgaagctgcctc

SEQ ID NO: 343741 - DNA, 1000 bp, Homo Sapiens
ttttttttttttttttttttttttttttttttttttttttttttttttttttttttttttttttttttttttttttttgagtggcttattgtctctttatttatttagagacaggggctcactttgttgcctgggctggggtgcagtggcgtgatcacggttcactgcagcctcgacctcctgggctcaaatgatcctccatcctcagcctcccaagtagccaggaccacaggcatgcaccaccatgcccagctaagtttttattattttttttagagacagggtcttgctatgctgcccaggctggtcatttttctctttagttcccacgtgtattcctttgcttcccgttctcactcacgcctccatctctctaacctccccatctccactgaggctgagcatttcctcagggcctggccgggggcacagcatgggtcccgtgctgccaatggggagagcagtgactcgtggagaggccagaggcctggtgtccctggcatcctctctgccccaggtacaggcacagctacgtcacaaaccttctgcaggaatgaggctgtggggatagcaggggccactgggcccaacagaagcacccacagctgggatcctgaaaagacctggacccccctctcctcctcctcctgcttcctgccagggccttccaccctctggacctgataggaattcagaagtcaaggtttcctgagtggggtagatgccgggggtcacccccaagggccgctgcaggactgagaaagtctggggggagcacccccaccccatcatctcagttggctcctctggtctctgacgcgggcatcaggcactttctcaatcttctgtgaggtgctccgtgggcagctccacggcagaacaggagcccctctccccagcaatgctgccctcctagtccccccgtggaaattctgaaagtaagacatgtgtctctgtggctgtcctcctttctctccctgatgagacggggcaagaggga

SEQ ID NO: 343742 - DNA, 1000 bp, Homo Sapiens
aaaatttttagtcattcacttttattataggatccccacaaattcagtagaaaaggggtgggatacagaaaaaaaaagtgagagaatggaagttgtataatcactctatcaagctacgcaaaccaggacttaagttttttaccatgcgaagcagagcttttagcaatttcttagtgactctgaagccaggtactgtcttaggcacttttgtatacattacttatttcatttgagaaaaaaatatttaccataggaatttcaccatgaatgttctatcatatgtttaaccttgatttggaatctgatatatgttttttagaaggccaattttttaagagtttgcacttccgacatctattcctcagacacatcagggaggcaaatattaaatagtaattgtaaatagcaagtcatcttctcaaaccaagccaatcttattttaaaatgtattaaaggtatgtaaaatagtaatccgctgagaactaacagaagcacgtagacataatgcacatttggagactttaccaatggtatcacaaccaagcccacgtcgatgactattgttgctaatggaaatgacaaaaacaccttataaggtatagatagattgggttcctggtatctccgccttagtattcctatcattaataatatagaccataatgaacccgtgaaaaaaatatagtttatcaaatcaattagacttgttaagataattgcaagggatcccaaagtgacaagtagtagcacagctgtaaatggagaagagtgactattaagtgtattaaatagcaaaggcagctggccctcttggcttgcaagatatattggtctcgatgatttaaatatagaaatcagaaggttgctaaataatgaggtagaaatagcaaaaggcataatccatgctaatgagggaaaagctcgatcagcccatgtgatagctacagcatctgaagagagaatttccctgggtgtcagaacagtcagataggaaatgtta

SEQ ID NO: 343743 - DNA, 1000 bp, Homo Sapiens
ttttttttttttttttttttttttttttttcctttgttaattgaacaattatattttatcagaattatgtttcataagattattttaaaaagtcaaggtacagcattttctagaaaatagcagcctaacaatttacgcttgtatcttcaacatggttctgatttggaaaacatctttaacatgttattacattaaatttaaggatgtacacaagaattatacacgcaagttctgtagataaatagaattttaggaaattgaggaaaaaagataaataggagatagtttaaattatacagtacaattctcattgctctgacttggtttgcttgatgtgtgtgtttctccactggtgagaaagtcttgggatgggtgaatcatttagttgaaagtttgtctactagaacaaatgagaaccagtatcagaaggtgacacaggagagtttgtgacagtgccgatttcagctgacgaattaccagaagatccagcattgctgtcgtttccatcaaaagtagctggaagtagacttcccagtcttcttgatggaagaagccattgaggatactggagttaaatcaatgcactttagagaggatgatttctgtaagccattgtcattcagtttcaagccttcttcccaagagtgacttatctgtatctcactttgtagcttccattcagacattgtttctctatttattaaatccatggcttcttcctgtttgatttgatgaaggcggctgatggaaccatgaaagggaggaggtggcaacaacagagagcgtcgattcctaaatgttgttctgtttgtcctaattcttaacatgtcagcttgcaacacctgtgaattaaaaccaagtccattgatcaaaggggcactgttgactcttctcagaatgttgccgtctgcggtagtggaactcggcagcgacttgaaacctagtttcattttctcctgtgccatgtccgggtcgaggaataagttctcaaggctttccg

SEQ ID NO: 343744 - DNA, 1000 bp, Homo Sapiens
tttttttttttttttgctctgaaaacactttattacacaaattacattcagattctgaaaatagtgttctaacagtgtaaccatctaaaaataagacatcccaaaaacacaccaactgaagaaaatttaaaaaagaatttaaatagagacttttttatttccttcattgcaatataatgttagtgattttaaaaaaataggagatttagcagctttgtcgtcatgtagcacaaagtttctctttactgccacaggctaagaatgctgaacaggaaaggcaccaaagaaagacactggcaatgaaagtgctattgggaaaatactgtgttcaagcaaagaatggggttatttacatccaccaaaaagtctcaaaagtgtaaatgggcaaatcttccattgttagattagaattatgatggaaaaagaggacggtttctctagtctatgttcatataaagacaatggcactgttatgaacttttaggaaactcctcaactagaaacagaagccaacttaaccaaaacgaagtaaataaagtgtgtacagtcccacacagactagtacagtttacaattaaatacacagaactttaaacgtgctaaagggaaaggaatctgacattctgggtaaatcttactcaatctaaatcaaagcttggttttcaggaggaggaaggtgcgagcgcaggcagaggtgctgaatactcctcttctgattcacttccatcatcctctttctcttggtcactgccctcagtgctaagccggtcaaacccttttcgactgtagcccttacggcttgcaaagaaattaccaaggtttaagcctccacttccctttcctctaaatcttcccagtactcttcctgaactcgtctcgagtttgtgttcagaatctccaaaggcccttgattttttccaccgaataaatatggcaatggccagcaggacaaccaccggaataaccagaagggttgtaatgagaacaacaggcactcccg

SEQ ID NO: 343745 - DNA, 1000 bp, Homo Sapiens
ttttttttttttttttttttttaggaccccaggagagacgcattttctctttcagatgcaaacaaaatcttacactcttctcctttggatacaatagagaaacggaaagaaaggaaggaacaagaggcctgtgttaagtcctgttgatgttaagtcctgttgagagcaccaggtaaacactctgcaccccttctcttagtagtaataggtttttcactccttggcctcagctgtcctcacaggacagtgggggcagatcagagaacacatcagaaatacatacaaagaaatcgtacaaactggacaggttcccctccccctgccacaactggcatcccaacagagggaacaagtactaaatcatttttgacgacgtaaataagactgaaaacaggttaaacagttgctgaacttaagggcatgacaaaaaggactcctctctctgacccaggtaggcaaaatgctttgggtgtgaggtaaaaaaaatgggtaagagcagctgtacagagtggggtgaaatgttaaacagggtgcagtgcccaagggctaagaaccaggtccagcgcaagcctgagaccacaggaggcactcacagctcacaaaggcgtctcgcctgattggccagggcaggatctgccgcctcttctcggtgcacagacagtcatgccaaccctgggcagggtggcatctgcccctgctttccccactgagtggggagacagggcagtgtgctcaggccctcaatcctcacgcaggtaggcctcctgctccgactcagcccgctcctccccttcctcctgtgttttctgacggagctcttctatctgtgcttctgccagcttggtttctgctttccgggagagctggtgcacctcttccacctgcagtttcaccagctgaatgtgattcctggcggttatagaggcctgatctgcgccagtttgatatgcagcttctgctgccatctctgaaagaccaactgcagtcatccaagtggttt

SEQ ID NO: 343746 - DNA, 1000 bp, Homo Sapiens; identical to SEQ ID NO: 160690

SEQ ID NO: 343747 - DNA, 1000 bp, Homo Sapiens
tttttttttttttttttacttcatgattctataattggtataagctatacagtctctggaaaggcatttctttaggaaacatattatttatgatcattggggaccgagttagaggtttatttcttttttttttttaatagagttttgtgtgtcttattcttaaatttaaaaaagcatcttcagaaggtgccatatccatcccctcgggcagtcactgcaaaagttgggtagacctcataggttgtatatgctgctaagtcttgtccaagggttaccgcttgcttgagctgggctgcagacacgggtgcagttgcattagggacagcatatcctgggaaagcagtagcagcagcagcagcagtagccatggtgccatcgcctccatcagtggggatgcccagggtctgcagggtgtattcggctgcatacgtctttgcttcatccacaaaggcactcagctttggaggtgtgaaagggtggattgcaggattctggctggctagagcaggaatagttattttgtacaagaatagctgtctttggtcttgtccaatagcagagtgcagctggtacactggctgtccccagttatttttctgacaaatctcttctaatatctggggagcgagtttaattccttggggttttaatgtgacaggattcattggggtgagctccatcccaggtaaaatgtcatagagtttgtcttctcttttgtctcctttgacctggtatcctcgacccaggcctgtgtatgccaaatagccacggccgcccagtcctctcactcccgcagcccctctaacagaaggggctcggataatggctctgttgctgagatgtcctttggtggctgggaaatgaagactgggaattgctgcataggtctggggggcatagaagacaggagctccaaggtaggttgtggtgggatcataaacttggcccaaagagtaggtatactctccttgcagcatggtgccccttccacctgtgcctc

SEQ ID NO: 343748 - DNA, 1000 bp, Homo Sapiens; identical to SEQ ID NO: 157694

SEQ ID NO: 343749 - DNA, 1000 bp, Homo Sapiens
actttcatgggtgatgtgatactggacattaacatacacaaatacatatgtggacgtgtcgtgactggtttcctgaaacagaataaagatgtgtcccctggaagtctacaagtgggctgaccagaagcaacgggggacttggtactggacgaaaggcaggaattagttgtaaggcgaggctcccaagaagcaccagctccactttggtttacagctgtaacagaagctccaaggaatggcttcttgagaagtcccatcgacaaaagtcagatgtcatcagtcactctttttcagggtggacagcccctgcttccttccaaataaagtgcagatggtcaaaggatactggtcaatcatctgccagtttcagtcagcaatgaagaagaatttttaaaaaagacacccctctggcatagatatatatctctctatatatttttcttttttttttaataaagccacaaatatagaacttttaaacggatgtctcagactgtaagcgaaggacaaatttgtgagatttggggtctatgaactcttcagagagtatgatgaatggaattttcttcacattgactacgaggctgaagtccaagcacttaaggacgaacacaattccatcccgtaatccattagtcacagcctcatcactgacaagcctccactgtgtagagagccagcggtccttgtcatattgcagggtggggcccgcactgaggtaccgttctaggaaggccttgggggtcatgccgttggtgatgcagaaggccaggtgctgcaggatgctctccatgctgtggtagttctgctgccgggtgatgcgcaggtacttctggagagccctggccatggaggggaaaatggcctgggcggcctccctagggtccatcacctcccctggggctttctgctgctcctcagcctggagacgctgaatgtggatgaaggcctcttccactgcaaccaccagccttgctttccgcttctttactcgccgttc

SEQ ID NO: 343750 - DNA, 1000 bp, Homo Sapiens; identical to SEQ ID NO: 160694

SEQ ID NO: 343751 - DNA, 1000 bp, Homo Sapiens
caggaaagaccaaaaaatgaatttttttattgcaatctagtaattttacttgttactttttcctgtatttaatcagaatataataataggtgtgtatagtccataacctctagctggtgattccatggtccacactgtcacttttcactgtagcatgttcaaaatcattcaggaacgcactattctcaagctgtctatataatgaaaacaatgtacatgtaacacaaggttcatccaaattcgtgtttttttttcacatatcacacaatgtacaattatataacaaagacataaaacaacatagaaacaaaagtgaaactgacaataaaaataaagttgggatagtcttaatcgggaactaatttcttcttcaagtttccagttaatctcaaaatgtatttaaaaactaaggagcacttggtggccagcaaccaaattacgaaatgaacatatcagtgtgcagcggggatgtcttgccgaaggaataacaaatgtctgtaattcttaagtttggataaaggcagtggaatgaatttagaaatatgtccacttttcacaattcactatagaattttcttttcacagtccccatgtttgtataaatagttcttctcttgaattttctttctagaccctagttgtgttgtattcagattcatgtttgcttagagacccaatgaggcagaaccgctggacggctttatcgtgtctggacagcctgtgactggtggtcggcacctcttcgatttcatctatgtcacaggcatctgcagcatcttgcgagtagttgtgtttcatgacaaggatatttcttctgttcatgggtgggatgaggggttttcctggctgtgtgggcatctctgtcaagatagaagcatctcttgtgctgaggttactgcggctgcctttagtgctggacagctgtgatccacagtgatggtcatgaatgcatttggaagatgacctccgcagtttatggtaattttcaaagtcatctgcc

SEQ ID NO: 343752 - DNA, 1000 bp, Homo Sapiens
tttgaaataaaacgcctttattctttggcatacaccaaataccttcatcattctttgagtaatgattgacagtctcgtttaatgaaataatgtttgtcaaatacttaatttgctgccgggcacagtaaatgttagttatgattgttataatattatcataaaacaagttttttttttttaaggttttctgaatggaaaggaaatacagatcagggctgtcatgttcgtgcaggccactcaaggtaaaccatagtggattccagagtttacaccccctgagactgctgcccctatgacagcattttacccccaagatagtcaaattctcaattctttagacttttaccgggtctcccaaggtaccgctcatcccctccttgctccccacaagagggaagagacaaaggctgctgtttctcttgcaaggctgcccccaccagcctgagaaggagttccagggatatggtaattaacatatttttcttaatcttgcttttatagttaatctccaaagcatgaaagcactttgccagttgattaaactgtaagaatacaatagatccaaagtgagggcagcactgatgaatataaatgcataaaattgcccattctgcaggaaaatgcctcaacctgaatcccaacttgaaatactaagttgaacacttaactttaattgcacgaatatattttttggatcaatagatagcaaaaaacctaacttggtataatttcatcttcaaagtaagaagcaaccactctttgatctcttctaggaaacaaaagtgattctatttaagagtttggtctaggatcactgcctatgagggggcttcagggaatgcccggtaaggctcttgggcacaatagtgctggatgggcctttagccagactgccactcggtctgcgtatccagggcattcagaagcatttgtgtagctgttttggaaagaagggcactggaggcgggccttttctacattaggtggtacaggttcaaaa

SEQ ID NO: 343753 - DNA, 1000 bp, Homo Sapiens
tggtatacaggtgccatttaatccattcaaatttggaagctacatcttcaagggtctgagagagctcactccccccatatattccccctttacatgttttcttataagacatacagtttaatcaattaacaaactaaacagcttatatactggcaatatattacagatgggtttatgtcagagtaatagatcacatgaaatggaccatgtggtaccccagtgcattatgtcttggtagagccctgaggacactgacagtagcatctctaagtaagtagtgctgtatgaatacagacacatgcggatctgtatctacatccatctgactaggccaaggagcaggtagatgcaagatagagacacacacatgctggatggggccactgcacaccttgtcatgccatttaaaagggcagttacaggttgccggttttgcagccattaaaattacactttatggaaaaggcttctctaattgtgtctgatttgctttctgtagtaagcatcattggaagaagaccaaagcaagagcaactagaagttaaatatacatttgagcttagctgcaatacagaaccctggggaagaagcaggctgaaagatttatttaattttaggcttggattctctcccttgctgttttcttgatgttgtgtgtctgcatttgtgtgtgtgtgtgtgtctgcgtgtgtgtgtgttccatcacatcatctcctgaagaacgctgggtttcgcaggcaggcggctagtcacctgcaacaacccaggggtcctgccgaggcttccaggctgctgtcagtgtcagatgccagggtctggtcggtggacatggaggagatgtcattgacagacgaggatggagggagactctcactgctgttcactgctgcacctgaaggagaaggctgtccttttactacaccatttttagtcttttcttctgaattcattacttccttgtagataagttctttccattcttcaattgtgtgttctcttt

SEQ ID NO: 343754 - DNA, 735 bp, Homo Sapiens
ttttttttttatacaatacaatatacatttattaaagtatatgcatttttaatgcaacaataatactaacaggtaatagacaagttgttaatagtttttcactggctaattaaataacagctttaattgtattcattttatagcttttctacaatgagcgtaaatcacatttacttttttctacataacttttctaaccacaaaaaaagaaaatggtttaaaagaagagatgagatatctttgctaaaatttaatgcctaaagaagaaacttctgagctgtatatggtatcctgaagcacctgcccatcatacccgtacttccagtagccctcggtactgttgtcttcttgcatttcacagcccaggatgacctgcagggtgtgggactccttgctgtggttgtgattttccataatagtccagaagtcaacagtgaacatgtgatcccaccctttcagactctgactcagctgcagccacatctggcttgaaattctactggaaacccatggagttcggggctccacacggcgactctcatgatcatagaacacgaacagctggtcatccacgtagcccaaagcttcaaacaaggaaagaccaaggtcctgctctgaggcacccatgaagaggtagtgcagagagtgtgaacgcagcaagcgcccctgcaggaccgcggtctgcaaaagcatcaggaggagaagcgccggcctggctcgcgggcccatttcccc

SEQ ID NO: 343755 - DNA, 1000 bp, Homo Sapiens
cgtgtcactcacgttcagctaagacgtagtgccccatggctcctcttgaaccctgcctcttccttaatattatgaacaaaattccaatgaacaagatgacgacaaaaacagcaattccactgatgactccaatgactagggtgccagacggtgagggctcccagatcacaatgaggggctgatccaggcctgggtgctccacctggcacgtatatctctgctcttccccagggggtacagccaaggttatccagccctggtaggtcccatccccattgggcaatacgtctttaggttcgaactccttggcatccattggctgcttatccttcagccacttcatggtgatgttctgggggtagtagttcaaggcccgacaccgtagagtggtcacttgttggtccaaaacacctctccccagctccagcaactgctgcagctgtgcagggcagtccctctccaggtaggccctgttctgcctggcccgaatcttgtgcctttcccactccagcttggtgggccaggccctgggttctgctgctctccaatccagtgtgtcagggcagaattcaaggtggtcctgcccatcatacccgtacttccagtagccctcggtactgttgtcttcttgcatttcacagcccaggatgacctgcagggtgtgggactccttgctgtggttgtgattttccataatagtccagaagtcaacagtgaacatgtgatcccaccctttcagactctgactcagctgcagccacatctggcttgaaattctactggaaacccatggagttcggggctccacacggcgactctcatgatcatagaacacgaacagctggtcatccacgtagcccaaagcttcaaacaaggaaagaccaaggtcctgctctgaggcacccatgaagaggtagtgcagagagtgtgaacgcagcaagcgcccctgcaggaccgcggtctgcaaaagcatcaggaggagaagcgccggcctggctcg

SEQ ID NO: 343756 - DNA, 1000 bp, Homo Sapiens; identical to SEQ ID NO: 157735

SEQ ID NO: 343757 - DNA, 1000 bp, Homo Sapiens; identical to SEQ ID NO: 160695

SEQ ID NO: 343758 - DNA, 1000 bp, Homo Sapiens
gatggttgcacaacaatgtgaatgtatttaatgccacaaaccatacacttaacaatggttaagatggtaaatttgatgtgatgtatatttgaccacaatttgctcaatgcaccattgctggtttgaaggtggagggaccacaggaccagggacaaggacttgggaacctcagtcctacagccatgaggagttgacttgtcaacagcctgaatggtcctggaggcagatgcttccccggagcctccaggtgagagtgcagcccaccaaggcctgacgtcagtctgagagaccccgctcagggcacccactgagcccaccgcgacttctgccctggagagctctgtgggcagccaggtggcaggagaggggcagaggcgcagcatcgctctcctgcagccaccgaagactacccgagcatcctcttggaccaatagcaactgcttcggagtggagacaatgtgtgggtccaccctgggagcatctcaagaggctgggctcctggggctggcggccacatgcgtggggtcagggtgtatttgcccttgcggtccaagctgcagccacagcggatggcaaaccacaggaaggagctgaagagcaaggcggacaccgtgagggccaggccgatgctggtcaggctggaggcgacctgctggtgtgtcctcaggaagctccggatgccctgaaggcagtcctctctcgccgcctcctctccctgacacaggtcagcctctgtgctccccagacggctgaaaggagacttcttcccacagcacagaaactttcatcgcctgctcatataccaggtcgtaggtgtccagcatggcgtcctccacctgggtggggctgtggagtctccagaacaccacctgcacctgtgcgcagaacgccagggagaagcacaggaagccccctgccatgaggccctgggcctccctcacggtggctgcagcgctcagcacggctcccagagtcaggaggcccaccaggctcaaccccg

SEQ ID NO: 343759 - DNA, 1000 bp, Homo Sapiens
ttaaatttcttatagacatttctttattatattttcccacttgaatagagaataatttaaatgtaatgcatactgacagcaagcacagtatcaaatattagcttttttaatatttttctttcctcaccctttattcctttaggaaaaaaatatttagatgacctcaaagaaacaattattatgctaatcacagtatgcagtaacacaaacaagcccagactcaatagaaaagaaagcaacaaagaagtgaaaaagtctttctcctcaaaacattttaattcgtttttccacagccatataaatttaaagtatgaaacaacaataatacaactatagaatctaggttctctttcaaagcagcggcatataaaacatagaaaagctaaaacctcagcacaagcttcaaaagaacaaggactgagaggattttgatgaagacatgaaatgcacaaaatacagtacacaaaaatactagaatgccataaaatataaagctacacatttcaggtagaaagcattgtaaaatatataaaatatgcaagaaatcaaaaccaaagagatttttcttagagtaccatgaatacactggaactggcaattagcatttgaagatgggaacaagaaaatagcagtttcccatttaaaactttatttctaggctttaggatttcaccttcttgacatccttctttccagagctctcagtagctgactctgcttttcttttctgtgactaaaatggaaacagatttaatgttctgctccaatatgcacattttaaatggcccaacaatgttaaatctaaaagttaggaaaatgctgaaaattttaccattggagttttagttgcccgtttcttcttttctgctctctctctttcctcaatttccatattttctttctcaatcaatgaaatcagagtgttacagcgtctctggaattccatggcagtcctagacttgataaaccagtcaaatctaaactggggagcatttcgtac

SEQ ID NO: 343760 - DNA, 1000 bp, Homo Sapiens; identical to SEQ ID NO: 158113

SEQ ID NO: 343761 - DNA, 1000 bp, Homo Sapiens
tcagcacggcctcaggacgcagaagtccagctcctggggcttgcggtgcaagttgcactggtcccgggccagcagccggcctccgtggcccacacacttgagtgagcgcctctgaaatccccggccgcagctcttggagcagggtgaccaggcgctgagctcccaggtggggcagggctccccgcaggcttgtgtctccacgggccgatgggctgcatcacaggcagggaccgtgcgctgcccggcggagccccggcagtccaccgcccgcttctgcaggccactgccgcagctcgcggagcacggcccccagctgccagccacccagcgtgcagggggcctgtcgtccggctgctccacctggttggagaggctgaggacgctgttgtgcaagacagagggtccccgggggtccttgggatgagaggacttgtcctcccgaggctctttgggcagatagaaggagtagcggacccggggcggtgtcatcttccccacggagaggacctccacggtcagcggctccaggatgggccgggaagcctgcaggctctccaccgctgtgcccgtgccgctgtaccgcagcagactgcccttcaccaccaggtcccgctccaccgccgacaccacgaaatgcccgttgagcaggtacttgccttggctgttcttcagagccaggtagttgtcatccccgatcagccctttgtaaccgcgctggcggatgtcgatgcttgaggcgcctgcggggatggccaccacgaaattgtagccatgcatgggcttggtgaagagtccagtcaccttcttgcagctcttattgtctcccccacacaccccacacttgtcgaatctcttcttggagcccaggttcccatcacagccagccttgatgcacttgccttggacacagacggaggtggagtcaggagagcacagcgtgccgtccaccaccttgggtgccagcacatagaagtagccagtgccattggctcggcagatg

SEQ ID NO: 343762 - DNA, 1000 bp, Homo Sapiens; identical to SEQ ID NO: 160698

SEQ ID NO: 343763 - DNA, 1000 bp, Homo Sapiens
tttttttttttttttttaatccatagaaaatgcagtagtttggagggaggtgtacccttagaagtggttaatagaaccttgtataaacacctttcaccagcccttcctttagggcagcattcccatcctatcctctctcccagacattataaacatcttttaaacagaagtccttgaataatctgatataaaaatgcatgcctctgttaggcatggtgagggctttggaggggcggaaggagctttccttacgtagtgatgaactctccaggctggggagggtcccagtggtgggggaagggctgttcctggaaccgtgatgtccacagggggtgagggggagagatgtctggctggctcctcactgtggaggtggcacaggggtgaccgtgcctgggctcggggctgtggggtctggaggcaggggggtgcctgggtccgccacgcctgggtgcccgctgcctggcactgcccctggcatcattgagggaggagtttgttggttggggaacggtgaggggccatggggtccaggggggggaacccctggtgggactgccccaggctggggggctccagctggttgctgctgctgtggccctgcagttgaccctgcctgcccaatctgttcagaagggcccaaacttcctggaggggccccactgccagcaggagcagggactacagaggctggagccacagccaagccatggactgcgggtggcccagcagcccctgttggggggataggctgggagcctgggggcagggctggtggtggctgctgctgctgttggtgcatctgttggaagtgctgctgccgagccctcatctccgcatacttcagctgctccatgtggaaggcttgtctgtcggccaggagctgctgcctctgatactccagtgcttctcgctcccggtccatgatagtctccagctcctcaaagtgccgaagtttgatctccaactttttcatctgggtctccaccagcagggccac

SEQ ID NO: 343764 - DNA, 1000 bp, Homo Sapiens
tttttttttttttttttttttttttttttttttttttttttttttttttttgacttgatcacatttattcaatatggttggaaattagcaagaatcagaagaagcacatatcaatcaaatacagccacaaaaacatcctggagataaataaagctgcactatgagaaatactcactactgaaggaaccagtactctcttacatttactacctcttagcaacaaacaactcaaatgtaaatttaatttactcacaatatagaacccttgactttttaaaaaaaaatatagattcaaatcaatcagaatttgcctcgctaggccttttcgttacgtatgtttttgaggcctagttcgacgactgttacgaaaatgacaaaaacaaactcgaaagaatgtttccacaaagttcaacaaaacagtgcagaaataagttacttacccatgcacagaataaggcaaaggctaatttcattcgggttaggaatagtaaatttaactagtttcttttacacaaaacgaacatttcagacttctttttaagtaacgggtatactctattatacatcatatgctacgttacgtggttttcctaactctactcagaaagccggcactcaaacgtcaaacagaaacttctccttgattagacttattctgtaacaaccacagaaattaatctgggtctcgtgatagtgtctacagtgaaaagagcacacactagtagaagcacacagtttagagagctgaaggtacattaaaacatcgtctataggtttcacaaattttgtttttaaaatattttttccaaactaaaagctgcagaaaattagttcttaaatattctactgaaaactcttgagcagctagcattttaaatttcttaagctttttattttcttaaaaatatttaaatgagtgtagtatctcatctttttgaaaaataatccaaaaaaagattacaaatctttagttttaatcagtgtgaccaagggtttgtca

SEQ ID NO: 343765 - DNA, 1000 bp, Homo Sapiens
atgaataagaaagctttttattttacaggtctttgtgggaagaaacagaaagaaatcacaaaagcaattaagagagctcaaataatgggtaagaaagaatacctcaacaactgaattgagctagctgaaattttgctcattatgttttgtcaagaactttaattatctctttacagggtttatgccagttacatacaaggatcctgcatatctcaaggaccctaaagtttgtaacatcagatatcgggaataaattctatcacgttaccactaataaacttattttacagtaagtggttgtatgatgccaatactgactcaaaccaacctttggatagaaaagtgtttgaggagtgaggtaaagaatgacacttccccttcataccaatgtccattaagcagattgcttatttaaaatgttaacactcatcacattttatctatgttgaataaaagtggttctgtgtgattgtcatttatatctgatccccaaatagctcatacaataatccattcaatagaatggaattaaaactgttcagaatgattttccaactagcaaatataagtatgcctggttaagatatcttccctttgtagaaatgttacattgggatggatagtggtgctgtcacagaaggacaaaatattcctagacgagtctaccctcaaaccagtagtgtcttttacatgaagagatgatttacacctaatagacattgaatatgatagacatacatgtatatatgtatcagttctgagttccactggcctatcccaaatacactggattaccaggcttgtactgtattcaaaatgatagatttgctaaatttcatgcaaaggactctaaactaggggagagattactgtttgtgttgtgttatagttgtgtaataattaaggctgccagatttagcaagtacaaatgtaggacaaatttaaattttagatgatgttttgcaaatttattgcatgatatccagcattttatctggca

SEQ ID NO: 343766 - DNA, 1000 bp, Homo Sapiens
ttttttttttttttttttttggttatccacgagggtttatttccacttgagacccctgatgggagcaacaatgcagaggccctttacagaatggtgaagcatatgatataaaagatacaaaatataacatcatttacatgtgccattcatagacaaaggagtgtgtttgatgagccggttgagaaagtggacacttcccaatcattccctctcaggggcttctctggctgccttgctctgatggagattttcaggagagagagctccagggagaaggagaacaatcagccctgtgagggccagagaggctgctagcagtcagggaagctctgagtgctccagctagaaggaacctgcaggggaccttatgccagcctgttgctgacggagaaccagagactcagacaaagaaaatgatttttcaaaggttatacagccagttgggggcagagcagggactagaacccaggactcctggctcttttcactgcctgccatgggtgagcctctgattcctttgactctgaaaaatgaaggagtgggtccctctgaacatcctgcggggtggattctccgcccagctcatgccccagggatgccaggcagcctggcaggatttgggtgacttctaatgtgcccaccccactctttcttccattttcctgcccaaaagcacagcaggacacagtgtgggtcttttctttttccaggtaatcgactaagtccccatattcgggcctgggcttcaggtagcctttcagataatacatttcaaggctgaaagattgctttgtgcttgtctggagcagcaggtgtggacgcccatggtgtcagctggtgttccagggtggcatatgggcccaaatgtgttctgagttgacaatgggaatttaagggcttggtgggcctcccacggctattctgctcccagcagtcagcacaaaccttcccaactttctccatgtcttttgaaattcctttaatggggaacataagggat

SEQ ID NO: 343767 - DNA, 1000 bp, Homo Sapiens
ttttttttttttttcacatcataatcaaacttcttacaaccagtgacagaaaaccttaaaagcagccaggaaaaaaatgacatcttacacatggaagagcagagataacagtaatcttgctggaaatcacaggtagataccacttaacatccactaggttggcaaatttttaagtctgaacttaagtgttggagatgctatgaaacaaaggtaactcacagtgccaagagaggtataaactagtacagtcacttcagaacacaaatttggcattattttatcaatatatcaagcaatataactgctagatacaatgttcacagcagcattgtttcaacagcaaaaacaaataaacaaaactcaaatgtccatcaagaatgaataagttgtagtatatttatataatactatatagcaataaaaatgaaagaaagtcacagaagtaaacattttgccatttatataaaattcagaaacatacaaaattaacatttcacttacagatacatacgtatgttgtaaaactataatagacaaatgacaaacacaaaattccaaataattatttgagagggagagggccttagggaacttctaaaatgtcgacaacatctgtatcttaagctggctgatgagtacacagatatttacatttattatccctttatatatacgtttatgtatttttgtagtatgaaatacttcattaaaaaaagagtgaaaatgtaagacttcaaaaatgaagactaccatttatgtataacaataaaattagtgtaaaaaagtatacaaagaaaatgttcaattctttatctttccgtgctctatataatcagtattaatctaaagaccataatcctagtatgaaaaaaataacaagctttgacacaaaatctaagcatctgctttcctggcactcttaagttagacaagagtaaatatgttagcctctcaattctgcctcttcatctttcatctatacttagatttttctttatct

SEQ ID NO: 343768 - DNA, 1000 bp, Homo Sapiens; identical to SEQ ID NO: 160703

SEQ ID NO: 343769 - DNA, 1000 bp, Homo Sapiens
gtttggtttacaagatagatgggatgggagatcgagagcgcctcagaggacaaggagagttgtagggtgatgttactggagagagcctcagagcattgcctgccaagcccgctatgttgtttaagcttcgggatttttcatatcctttcctgatccctccatcagaagcacacgtgtaatcacctgtcgtcagtaggaaacatgtttcccctcttctgtttttgtctctggtactagagcgtctgatggggagcctttctgggggtgatagtggcggctcacttcctgtactgtcgtcacctgataacactgatctgttatgttccagaagtcgattgtctttgcccagacatgtgtcactctgtgtactattgcaggccatatttaattctgtcttgcaaaaagtaggtgagcttgcctgaggagcaggagggatgtgcttctttcttttccttggaagtttctgctttgccattgccaaggagtagtacattccaaaattattgacaatgacaggcactggcatggctattgtcagcactccagccagagcacacagggctcccaccagcatgcctgaccatgtttgggggtacatatccccataacccagggtagtcatggtcactacagcccaccagaacccaatgggaatgtttttgaactgtgtgtgctcactagctgaagggtcgttaggttgagctcccactctctcggcatagtagatcatggtagcaaatatcaaaactcctagagccaggaaaattatcagcagcaaaaattcattagtactagctcgaagagtatgtccaagcaccctcagacctacaaaatggcgggtgagcttgaaaattctcaggatcctcacaaaccttaccaccctgaggaagccaagcacatctttagcagctttggatgacagcccactgagtcccacctctaagtagaaaggtaggatggccacaaagtcaatgatattcaagagatttttgatgaattc

SEQ ID NO: 343770 - DNA, 1000 bp, Homo Sapiens; identical to SEQ ID NO: 160704

SEQ ID NO: 343771 - DNA, 1000 bp, Homo Sapiens
tttttttttttttttttttttatacaaaaaaatttttattaagtacagtttcaaatttagagcttccacgcttacaaatgtgattggatatttaggatacataatttattcttaaaatacacaacttatatacagatattaaaaactcagtctccaaaatgctcaataaagatgtctgggtgacacttatagaattgacctagcaattttttcttctctttggcagaaagttttgaatcctcatcaagagtttttagtaaattcaacagctcatctttggttgtcttctctgtattgttggaatagtcacgttgatcaattctctggcaataaatatatcctgcatctctatttggatctcttccgttctgtatggccataagcttaacacttacaattttatgtagagttccaggaatcttaaaaacatctttctgatgatccattaaaaagagtaccagaagatctgttttgcctttggataaatttttattgtcaacaatagcttttgagaatatccttttcacaaccattcggttgtcactttctttctgtaatttaaactcagaaggatttgctgcaacagccatgaaatacagtagtcttctaaattcttctctattttggaaatctaaaagctttagaaggagctgggtagcttctaaagctatttccgtcttcccattcactaagagttctgcaattccattatgaacgtcagataagtgatttaacagaggttccctactactgtaatatctgccaatggcatcaaacagaagttctttcactaagtctgttcggtctggttgctcaggaaagcttctgcttatttccaccaccatttggtctggaaggtattctgaacagtcaattgctgccgagagccactcatcttcctgagagtcactataagccttgagaatccctcgatccagatagttactgctgttgaccatggtggactgcctcttaggttgaggaattttaggtacagcct

SEQ ID NO: 343772 - DNA, 1000 bp, Homo Sapiens
agagatagtgggcagtttatttgcttttagggacatccagttcaggaaataatagcccttatagtaatgtgtactatcttgtcacaaatcccttactcaagttaggcacctttggaatttcaccatcctagatagaacagtagaatatgagacttcctactctacgctaataaaaacaaataaaaaatagatgaagtcaaaactaacatttaccaatttccatgagaaactgaaactaaactactgagttttctttcactattgcagaacaaaaaaaaagaagaaacctagtaattcaaaagtacattcaatttagaaaaggatcctggtaattaataaatcattaagaatatagaatcctttgtgcattccttctgtcagatcttgatcaatctagatactatgagataattcaccatgaacattgtgctgctgccaccttttgttttttgaaatctatcatcaccagtggcaaaaaataaataaaaacaaaagcaaaaaacagctccactgttccactttgtcaaaatgggtatgaagaactttgatttattctttctttacactcaagaaaacacaataaagtaaaacacagatcaaactaccatgcacttgaaacactatgtacctttctgaatttcatgtcttgtttagcatgtatttcagggctcactttacccatattaacaacaacaaaacagtagacacaggaatactaacacataaacaactaacattaaacacggaaatggatttcgagatgtgtgcatgtacacaaaaaaatatatacaaagatttgcctggatacctgaattgcctcaagttcccattttagaagtaaactagatggagagttcaaaacccaaagtcatttagaatgtgaaaatcatttagaaattctcacttaaggcacccacagaattaggggacccacaatactcaattctaatcattataaaatgatatctaggcacttgggtaaatctaagactgtatttgt

SEQ ID NO: 343773 - DNA, 1000 bp, Homo Sapiens
atgtaaaaattgtttaatatttactaacttattacagagagtttgcattttcattttacctacatgagcatttagcattaagaccatagtgggccaaatttggcttttgtttttgaaggttcacttgagtagcgtaatcacaacatggtcatctcggccttgccatagcatctctccttcaaagtctaccagtccatgtttcctggcacgcatgagaatgcccactactttatctgaaatacgaacgtatctgtcaaagagatctccaaaagtaacctggatcttgccatctcgtctgtggcgagccattgtgcagataatgaagcacatgtccatcatttccctgtagatgtgctcctcagcacgcttggccctttcagcagttttggttccttctttggggcggccatagccctcatctcctttgtgtaggcgggtggacatggccagctcgtaatcaaactcttcactgaaaggattgagcttctgggattgtatgtgttcatcagcccactgctgccatctccctttcaagttgcccactgggctatatttctgttgggctttgcagttgagtttctctgtaaatctgtttacctgggagggcaaggggcgcttgatcctgaccacagccacctgcactccatcctgctcgggcctctcctcagcctctcctccatagccgctgtcctctgtgtctacgctgtcactcctccatgtgggctcctcctgctccatcactctccagcccttggttagctcagacaccaggttggcacattttctcctccgcgttggggagccgtggctgtggaggattctgtcaatgtcattctctggctgcccaggttcaagcacaccagcatccctctcgtacctgtggctgaggtggctcacgtcccctcctctctcgtaagtcttgctgaccaccgttttggacacctctttctttttgatgtgagaaacctcaggggctttctctgagctttgtccatctcca

SEQ ID NO: 343774 - DNA, 1000 bp, Homo Sapiens; identical to SEQ ID NO: 160706

SEQ ID NO: 343775 - DNA, 1000 bp, Homo Sapiens; identical to SEQ ID NO: 160707

SEQ ID NO: 343776 - DNA, 1000 bp, Homo Sapiens; identical to SEQ ID NO: 160709

SEQ ID NO: 343777 - DNA, 1000 bp, Homo Sapiens
tgccacatagattttaatttgcctaaagatgatagcgattttgagctgtggttagggataactgttcccacagtagacctattaccaacatgagttgctggctttcatttaataggactccaagctggcaaacaaaccccaccatcttcccaacagccacatcatgagatctagcagcaccagcctcttgaagtggcttctcagtggaaggtttgctccgtttcagtgaagcttctctctcaaagctctgacgtcaccagggtgcccctcgagggtctggatagactgtccgaaaggtcaggttcactctcggttctctagagtggtattctttgggcactcgatgctgccagtcagcttgtgtcgctccttccatgattaacaaggtcccatgatccaagggtatcttcactctttccacatatgtgtagtctccattctcttctggtggtggcttctttctcatctcaaatgtgcgtgtggcaccaaaacttagtgaagcaataatggggcacctccctagtgagggttcatcatcactgtgccagtccacgctgtccttctcattgcgataaagattgcagagtaaggagttgaaggtgtggccagtgttctcttcaatgcggttctttagtgtgcgcagcacagggtgccagtgaggatttggttccatagtgattcttgaataagtgtaaggaagttctccataccatgctgtaagtcttggttgctgataagttatatcctctctgatgccggtcctctgtttccagggaacatcttgacaaagctgttccaatatccagtcagcttctttcacgtcaacaaagccaggatacaaacagaccctagatacacctgtgggtgacaggctgatttcatacacaccctctctgtcaatcactcgtggctcaggagctctacgtactacctgctgaggttctttgaacacaaactctctgtcagagagatgatgctctttgttcttccaggtctggcc

SEQ ID NO: 343778 - DNA, 1000 bp, Homo Sapiens
ttttttttttttttttttttttttatggtgacgcgcgctttattgtttcaactcctgaatccactggccgaccccagagccagaagagtagcaagaattcaatcagcaactcctgatgtggacaaacaactgggcagtgggaataggcagttggggggctgtggctcggcggggccgggggctccacttactttcccgatcgggtttcgtcttcatccccagccagagcccagggctgcccttggtgacgcccaggagaaaaccccagcccgcaccctcaccacagttccatttgtacatccaggaagcccagtttgaaaaacaaaccacgcctgtaaactgagttggatgaaaagagctgccttggggggtgggaggctaaggaactgttcacggtcttctgggtgggccctggattcccgcacttctggagcagtcctcagacagccaagggatccatccacgggccagggcttcccgaggctgtctccacggtcgctgggtctcaggagtcgtcctatcacctgagcgtgctcactacttctgctaccattatggccacaatgacttcccataaacttaagtcattgagaccatggaattctgttcccatccgattcctgttgatggacattcgctgttttggcgtcatgggaactcctcggatggtaagtcagtttaaggacaaaagcgtgagtccatcgttcctgggacagtttccagtggccctggtcaggccacgtccacactggagaccccttgtgctggacaggagacgcaggccgctctgtcggagaccacgctgtccaaggcccgcatcaggatgtctggcatgtggtcggtgagcatcttcggacctatgagtattttgctgaattccgcttcgtgtgaccacttggcgctatagtgagcagcagagcagcagccaaaccgccccgaggcgccctcctcctgcaggtggatgatcctgccgggagggtagagaggggggtacttggga

SEQ ID NO: 343779 - DNA, 1000 bp, Homo Sapiens
ttttttttattgtgtaaatacatttatttatagagtaaaaggcttagaaaagatctaatggaattgtctttaaatcaagccgatggaacaaagatgtgggcaacatttatggcataaatccaaacctcagcttcccctttttttctttatattatgtccacatgcatctttgactcgttggttgtgagttaaggtattattcttgttggaaaagaaaatgaggacatggcaaagaagtaccaggatcctctctaggtcagagttccgggagagattcaaactctagaaaaagtcaggatagcagctccaggttagaaaacaggttttccatcatccactgggttagctggttctccttccagactacttgagccttttcttttgtctaaccagatattcagtacctgaatctgctccaggacttctcgccgcatctccacagccatatggtatacatgatgatcagagtcattgtacattacagcattttggaacatcagcatcaggtctcgcaggaattgggccatggtgcgaatccgacccttagagagatttctcttcaggctagttaagtccatgggtcttttcaccacatccttgtaccctggggcctgcctttctgacacaggcttcagaaatggactgctgaacctgtgactggcaatcatcttccagactggcaggagagtcttcttaaatagcaaatgatcctgaacagggtcatcctggcttagatcagtcagctttgaggaggtagcatggctgaaaagtgtatccaccaagggagtctccttaatgttaaaggcatcatcacactcgcctgaagggggctggtcttccatctctgacacatatacttcaccctggtcctcccctttggattcttgctgagcctccccctcttcactctctgtgagtagtccctgaactgtacaaataactgagggagctgaagccacctctggctttccattttctcccagtggcttttcagctacta

SEQ ID NO: 343780 - DNA, 1000 bp, Homo Sapiens
ttttttttttttttttttatgatcaacaagtttttattacataatactcttgatattccaaacaattcagcactttgtaaaaaaaaaaagaaaaaagagaaaaccggatcatggtaagtttgctatattaacatatcacgaagaaaactggaaacctattgatctatggaattgacatcttcgcatggatgctccacgcagcacgcttgcttccgtctggtgagtgatcatctttcggccagggctggaatatttggcctttctctcctttggctttgtcacccaaaaaacacgacctcagtggtgtcagctttgaacatgctaatctgcctggcaccaccccattttagagactgtcacttggaggccctgaatgctccttccattcctcacatgcaggctgctccatggtgctggatggattagagttaaggggtcagcagggaatcgtgttactctttggcatctggcattttaaacaccattcaccacgtccattctgcgcagggtccttcccttctggtgcgccttcatcttccatggacattctataagctgggtgtggtgtgagttcagctgtctactctttgacagagattgtaaaatctgaccaaattccccaccagtgccaaggtttaagtccacaagcaactgtttgcaccagaagatcattactttttcagtagcaaacccattcaatgttaggagttactttcaatttttatttagaaagcaccaatctgtgaaaaatacaccaatagtagttgctcctcttcattaattagcatcttttccaagcaactttttctgcataattctcagctcgtcactcaagttgttattcaccttcattagctgctgtatcttggcctcagaagccactagagcgtttttgacctccataaattcctgtacagtgactggtccatctgataaatctgaatctaggctcttctgccggtttgttttgcttgcagtggtttccaaatctgtgtcttcg

SEQ ID NO: 343781 - DNA, 1000 bp, Homo Sapiens; identical to SEQ ID NO: 160710

SEQ ID NO: 343782 - DNA, 1000 bp, Homo Sapiens
agctgagttaggggagagaacccgaaagatctcagtggggaaaggactaggggtgcagggtgtttcacagaaacaatcaaggggcctcgatttcacagaaatcatcaagagggctccttgtgggtagaagaggggtatcacagcaccccaaatattggggcctgttcacccctctgcagccattctggggttttaatgtaaaaccccaatggcaggatattccacatacattatcatgggtttgcaacattagcatacgctggctgtcccgcaggacggtggggactggaaaatcagtccagggtctgggtttgagtcctaagaggacaggcctggcggcgccacacggctcctcttcaacagctgccggagcccctcagggcccggcccgggccgcagcaggtgaacgggctgctcattctccaggttgcgcagtgtggggtccgccccagctgccaacaggtgccgcacgatggcctcctgggccggcccagggggcagggcagccgccatgtggagggctgtgttcccgtgggccttcatgttgacaaaggtccgcaggtctccccggggcagctccagcagcagctgaaccagagtggggttggcagcctgcacggccaagtgcagaactgtcttgttgctcttgatctcctggctggtgtgattagcacccatttgcagcaacatgtggacacaatccagcctgtctcgggcctgtgtgctcagcacccggggacagaggtcggaagggcgcatagcaacgttaagggccaggatggccgtgtggagcggggtgaggccctcgaagtctctggcttccaggtcaacctggaccccagagttaagcacagccaagagaactcctgggagcccgtaggtagcggccacgtgcaagaccgaacgtccctgatggtcagcggcattgggctctgctcccaggttcaacagatcctccacaatcaggggctggttggcagcagccgccaccaggagaggg

SEQ ID NO: 343783 - DNA, 1000 bp, Homo Sapiens; identical to SEQ ID NO: 160711

SEQ ID NO: 343784 - DNA, 1000 bp, Homo Sapiens
ttttttttttttttttttttttttttttttttttttttttttttttttttttttttttttttttttcgtatcataaatacaagttttatttaaacttttttgtaattcaagtaaaaaaaaagctgttttttaactactgttacataaaaagtggaaagtgaggcaatccatcttttcggcaataatcttctcttcttataataatgccatcttctttgaaagtccagataattccaggccaggcacggtggctcacgtctgtaatcatagcactttgggaggctgaggtgggcagatcacaaggtcaggagttcgagaccagcctgaccaacatggtgaaaccccatctctactaaaaatacaaaaattagctgcgtgtggtggcgtgtgcctgtaatcccagctactcaggaggctgaggcaggagaattgcttgaacctgggaggcggaggttgcagtgagctgagatagtgccactggattccagcctgggtgacagagtgagactctgtctcaaaaaaaaaaaaaaaaaaaaaaagtccagataattccttgtaaataaggtttttaataaattacaaatatgtaataggtttttatccatcttcttcctaactactcaatgcattgttgcatagcaacagtttttttctgcttcttctttgttggaagtctgagagtctgaaatctgcattggcttggttgagcttgggaatttttctggtaccaggggtgcaaatatccattgtagaagtcagtagctgttagtgatttcttgagcatcactgatcgaacaccaatccaaccatccttgcaataaaccaatagtatttgtgactgtttgtggtatattactgatcctggaataagagcctgtcccgttaattttggatcagcaaggactgaactgttaacttctaccaaatccagaagtttaatggtattcgccatccagagcgtctgcaacggaattatatttccaatggcacggtaaagtct

SEQ ID NO: 343785 - DNA, 1000 bp, Homo Sapiens
ttttttttttttactgaaataatgaaagtttttttttaagcaattttaattaaagaatgcaaaggtacatttggttaaacattttataaaaattcaagcaaaatttaaaacacagccaatttcaacatttctacaaatttaaccagcattattttggtcaaatccacctttagctgaattaatgagaacaaggacaagggacattgaagtattctcctcaccacaatggaggtttttctcactttccacactgcatagccactacatggaaactcccagaatgatgagcaattcagtcatgctctacacttttcttttcaatgaaaagtgatgtatcttcttgttttgcttttgacaaaatatgaactaaatacaagtctataataacaagaatccaagagtagctcatacacaagtcaactatgtgtatgtttttattatttaaagcccaccattcagcttatctgtctaaagagatgataacaaacaatttgtttctttttcactaatgatactgatgaccagtcagtgttaagagagggaaagtccaagacagctgtttataatccagtccaatgacacacatataactatttcaacttcaagacttctgacttattgcctctgccctaaacaggtcaaacactgatggcagataaaacggcacaaacccttttggcatatgaaagtttaatacaggaatgatccaggattagtccctgcaccaggtctcctcagcagcccccttggtttcttcatctgtcacgtgtgacctgtttaattcccaaatggtcaactcataactggcacacaccatatactccatttcgagtgcgtgtgaacactcctcagttaaagccacatgactgaggtaaaacagtgcatgactgtgctaggaaagaacagtattcagtgacgaacatccctttaacgttaactttcctaaagaatgtaataaaaatggaaaacttttttccttctggctgaagttggacttatt

SEQ ID NO: 343786 - DNA, 1000 bp, Homo Sapiens
tggcggcagatattttttactagaagattctatggctaaaaaacaataaccaaggttctgtaatgctggaaaatacagtacacaaaagtaagcaaatctcatgggaaatcattagcaattatcagtgcagtcaaagaaagttaagtgcttggagaaatcaagacagattgcagccctccacatctacaaggcaatttcttcactctctcaaattctctcctggacactgctttgggaaaactctacagcagcaggaggggagagggcagggttccacggcgaggaggtggccggtgaatgtggcatatgggaagctataaccacaaatgctcacagggaaagaacaaaaccaggtggatacagagggctgggaggcaacggaagtttcgtttggctgtttgagtcaccttaggcaaagagagtgacccagcattttctctaaataatataaaataccaaggttggaaaaatgataaattagcgatacaggaaatggagagcagcaagccaggcccctaaataattctggcccacttatcaatatgggttcacgcttgaattcctgacttactgtgttgcaactgccaggtccctttgctgcctcccctgcaggcctgcaggccacggggcggtttgtatttgcctggggaaagctccctgatgtggatggagatttgcaaccaaatgttgaagactgctgcctttccattgtcaaggagaagcttatcccagtagtttcccaccaaatcccaagctgcagtagctgggaactctgcacctggcttcaaggaacacacatacagttataggctgctgcttctcagaacactgcctgacacttgaaaaccacttggaaaggggcaaggaaaaacacaaaaactggcagctggagctcaattcagggtggtaacctcaccagctcactcctttctcaatgcaaacagcttacttgccagggaacactgtgactcattcagtatcatttccttcatctactgtt

SEQ ID NO: 343787 - DNA, 1000 bp, Homo Sapiens
ttttttttttttttttttttttttttttttttgaagtattataaaacactttattacaaatttgtcttagctattagcaaataaaactgattatcattctttattaaccctccttggaattttgaaaacctcgattaaagttgccaaattgattactggatccagaacacaattttcccctcagaacagatagacagactgaagccactgaactctgccaggagtcaacatgagattccttttgctggatatgcagaaatgataggaaaaaaaccaatggtgaaatttcaagtttcaaaaaccaacctttcattaccaatgccaggcaacaaacatgtccctgagtgttctttaagaacatttgggatttatgtacaatttaatactggagttagaactttttccttattgaatgccaaccttatgatggatgtgaaaatctacggccaaatacttttgaaaacacctttctatattgcacagtgggcaaatggcttatgtgaggtaagacactagagggataaatttccagatcaacatggctatggtatttagtaatggcccagcttagagacttcagctactgatctcatcacttattagacaaattgctgctgaccttacgcctgtatattaagcctccgcaggatgccggacaatggtgaagaaactccagatatcaaggaattgggaaatcctggccaaaccaccccaagatgattacactgaaatgtagtattagtactgctgccagatctctttttaacatcatgtgcgtctcttgggatccagcaaaagtgttaagccacaatgcccttgtgccttttaatataccacagtgccagttaaactaatatttttgtttgttgcttttgggagttattttcattagtgatttcagcaaatctcatgataaaggacaaggtcaagaactccagagcactgagcagagaggctggtgatgaaaaggtgaaggcctgcgcactgaactgtaaggcag

SEQ ID NO: 343788 - DNA, 1000 bp, Homo Sapiens
tttttttttttttttttttttttttttttccagacaccccagagtctctttattgaggttcttagaaggcgagtgcaatctcagcctagggtagctgaaggaggtccagttcgtgtcaagtctgtgttcaggaagtaggtgcagagctgccctttgcctttcaccttgatgacaccccggctgtagcaggtgtagcccagggactgtagggcccatgctgtctcctcagtcacttggattttgccaaggactcctgtactctccatgcggctggccacgttcactgtgttgccccaaatgtcatattgcggcttctgggccccaataactccagctactacgggtccatggttcaaccccactcgcaggcggaagttgttgaatgaatgcttgttgatgacgtccagcttagaccccagggccacggcaaattccaccatagtgccaaggtggctgcagctccgttcagcatcctgttgtgcatcctgtccagaggtggcatttaagcctgtggctgccatgtaggtgctgccgatggtcttgatcttctccaccccactgaacttgggcttggagagcagctcatcaaaatcagcaattatctcattgagcagcctcagacactctaggccctcatgattgatgttggattcagagtagaactccttgaagtctgggactgaggcgaagaggacacaaacgcattcataggactggtggtagagatcctcgttgcgccggttctggccaatgaactggggggccacgtgtgcagggagcacgttctccaagagcagccgagtcaggttctccatcgtctctgtctcctccctctcctgcctcagcttcttcttccacaggaagtccaggcggcagtagtactcattctggcgagccaggacaaggagggtgaagaagaagatgaagaaggagatagcacccatcagtttgggctccttcagcactccgggcctggagtccaaggggcccagatagaggc

SEQ ID NO: 343789 - DNA, 1000 bp, Homo Sapiens; identical to SEQ ID NO: 160712

SEQ ID NO: 343790 - DNA, 1000 bp, Homo Sapiens
ttttttttttttttttttttttttttttttttttttttttttttttttttttttttttttttttaattttgactaccagcactgtattttacttagttactttgctaatgaccgctacttccaaaaatatgggaaatacccctacatggatatcaaaaaatttaaactacgattatagctaaattatattgcagcattgttaatccaattgattacattgaaaggcaaaaataacatttaaaaaaacagattgaatgaccagatgcccaatgtagattgcacctctaatggttccccatgtctggtagcatgtctagatgtagaaaatgtcacagctctgatctgctgccatgaagccacagggctcagtgaagagtcttttgtcatttctgaggcggagggcacaatggcttatttcatctttctgtttcctttacgattttcctttctgcattagcagtcaggaaaccctgaatgacattttatgtttaattacagcaggtttcctaacatctataagttttttgttttaattatcttacttcgttccaattttaatttttgtgctattttcatttcctcttcccccttctccaatgattaatatacatagttttaatattaatccacttagaccctttcggatacaaagcataatacatacaaaatgaaatcaaacttctggtctactgagctctatcatcaaagcagcttttacagattcgggatcattcattcagcctcaattacccttgaaaggcagttgcttccctgtgctatttgagggaacattatctggggaacaatagaggcttcttgaagaaacttgaagaaagacactttaaaaaaacatcatttacttttggtcatgctggatttggggcattcctactccaggagctaagctggtaggcttctagacacctcaagaagagtgtggagctgctcagggtacccggtggggccatgatgatgagagggaagagtggacttactctcc

SEQ ID NO: 343791 - DNA, 1000 bp, Homo Sapiens
ttttttttttttttttttttttttgcttcatcagttttattggtcatatatccagaattcatcatatataaatctttcaaaataatgagctattacaagaatagtttacaagtcagctctgactgcacaaatacttgacacaggaaaccatttttacaaatacatatgttttcttataatactgtaataaagaaaataagtctgtatacatcctacgacaaattttgtagtctctttttcccattcaatcatcgtttcaggttttctattacagaacgtccatcacatccaataaaccaaattacaatctgctgcttcttctcattttcaaatactataaagattcacactgttaaagggttttttgggttccttttctaatctttcctgatttgaaaagaatccatgtatctaggctaaaagaggtaacttcaacaatatccctcttgactagaacttctatctgattaatcattgtttggtgaattatcttttcacttcctacttaggctaggccaggtggtagttttacccctgctgataaagtcctgacattcctaatagttcctaaactgcaaataaaaaaccctagaaacgagtgaaatagaaaagaaagctaaaccactattgattagagaacacactcaaattcagggtctctcccaggttgaagaagacagaaaagcaataaagtataaggatgtggcagtagttgtataaaatactgaaaatctgaaagagtcatcacttaagccagtagtgtatcatttccaaaatgtcagaggatacagaatcttagactctgtggctaggctgaactcagaatctcagactctgtggctaggctgacattcttatgctgtggctttgaaatagcctaataaatatccacttgcccagagcaagtaatcatttaggccaggggaactttacagaatactgaccatgtttgcctgaagagataggaaccaccagggcaaacatttggtattcactccac

SEQ ID NO: 343792 - DNA, 1000 bp, Homo Sapiens; identical to SEQ ID NO: 160714

SEQ ID NO: 343793 - DNA, 1000 bp, Homo Sapiens
tttttttttttttttttttgaatgtcaaaaagtgtttattatatcatatatatatatgaaaatctatgaaaccaaaagctctcccacaaaagatgatttaatgaagacattcattgttcttgaagagaaatacaaatgatctttgaacaacacaggtttgaaatgctaagtttcacttatatgcaaacttttttcaaccaaacacaaataaaacatatggtatttgagggatgcaaaaccctcaaatacaaggaccgacttttcatatgcataggtcccatgatctgcagggcattgcttggattttggtatccacaggggtcctggaactagataccaagggaggactgcactcggtattgtcggtctctccaaatcagtcctataaatgttgtgcaacccatatcaaaacttcaagagatgtgctcaccagcagttaaccaatttttatagaacatgaggaaggctttacccaaatctgagaacataccaaagtaatgcatcatttactaggaatatggaagagctcagtgaaagaatttaacacataatgaaacagcatttcaaatcagacatatgagtggacttttcaataaatgaattttgaacagatattggaagcagcgctgtttcactcttcagaaaaatcaattctaaagatctacatgttaactactcacacagaaacatgtcgtagaggaaaatacatgacgtgaaatgagcacatgtaaacataggaaaacatacactgtaaatgtcttagaaaataatttgctttatatcctgaaataagtcatgaaaattaatcaatttgattgtatacaaatataaaacatttatttaaacagacaccatgtaaaattaaagccaaatggctaagtaggagaaaacattggcaacagacataaaatacagaaaatacaagagaactcctaacaaatccatgagataaaaggacaaatcattcaatagaaaaatgagaggaaaaagaaaattaaca

SEQ ID NO: 343794 - DNA, 1000 bp, Homo Sapiens
tgagggtgcacagcgcatttattgagctcggactcgtcttgtccttgcctccgtcgcccatctagaagggcaccaggctccccgcgacacctcccgctgtccctccctgtgccccggcgcacgcgcaagaggcgcaaaaggcacagcttgctgggcggccgcacgcatgcgcacaagcagcagaggggaacccgcccagtgctgagttgtcttcgaggttggcgctcctccaggaaagcgattggctgcgtggagtttagaatgggaaaggaatgccatcaacccctcggtgctttcagagggaccagcggggtaggagcgggttgagaggggggctccgggacctcatggagctctgcacgtgacctccacctcgactccatgcagtgcaccagcctgcaccccccaggttgcctttgatggggaatctgccccagccgagatgtccagatgttgctttagacctgaagggcagctcgggaggtccagtaggctgggaccctctatgtccccccatgggtgcagatcctttaagaagtgggcttaaggcctagacgtgtggctgatgaacgtggcccacggtcagcagctcacaggcgggccatcaccccaagtagggccaggagccagccaaggggccgtccaggggccccagccatgcccagagtcccgttggtggtctcaggcactgaggtcgatctcgtgatgctggtagatctgtgtggggcccttaaagcaagcagcaaagaggaagcgtctgccggccatagtgatgtgggcaaaggcacggggggccaccagggccggaggccccagctcctgcagtggctccaggagccccttgtcaggctcaaggcggaggacctggctgaaggcgaagtcgctgcctaggatggccagttggtccctggcgatgagcagtggctggaagacgtgggcaccgcgcgagggaagttgctgcagcagacgaaacatggagccgtcccagcgcatgaccatg

SEQ ID NO: 343795 - DNA, 885 bp, Homo Sapiens
ttttttttttttttttttccaaaaatatatttatttttaaaaacagaaaatcagatcagttttatagagtcaaattttcaagagacaaaccagagtttggattccagcttagagtgcaagtgaagcatcagtaatctcatgcagaagatttgtctctgcaggaggtacattctgcttgactgcaagcactcaattctctaaatctggtttgtacttctgccatcattttattccattccagcgctctggcatgcaagataatccatctctaaaattcaagacttccaaattgagatgaacgattattgggcttgggttggggtttataaccaatccgatcattgatcatttgttcccggctcttgggatcactgctaagcccaatggctccttctccatcactgcctcctacaacttccacatcttccttctgtttcttacgggtctccaggtcctttcgaatgttctcaaactcttcaatgtcatcaagctttagctctaggcgtgttggtttccgtctcagcatactgaagtcaacactaagggccaaacccagtgaactattagcaattcacaggattatcctccgcgtccaaacagatcttaaatgtgtacgtcattcattaaacaaacacttcttgtgttccagctacaaagttaaaaggtacagtcataatctcttttcaagccggcctagccccttcccggaacctcggctcccccccaacgaaactactgctaagccaactggactacacttcccagactgcttggagcctctctctccgcagaacctcgtcttccgcgagcttttcctggaggttctaggagggatgcccctcaatgccacgacgccatttcctactacgacttccatcatgctcc

SEQ ID NO: 343796 - DNA, 1000 bp, Homo Sapiens
ttttttttttttttttttttttttttttttttttttttttttttttttttttttttttttttttaagtgttctgaggttgcttttattccaagaactctgtgagctccgcccagataccattggcgcctgcttgtgtccccaggggacctacacacaacagcaccagcaccatgagggcgctctcgacccacacaagccctggtccccgtcagtcaatgtgactgagtccgccattgaggccagtctggctggccccaagtggtccctctgagtccccaactccctggccagcaaggagtgaagctccatgccccttggtccacgcctctagagtctgagcatatcctgcagcctcgatctcaggaggcaacgcatgcagcccccctgcactcagaaagggggcttctccagtcgtggtcttcttctctgtccacaagtttccagatggcccctccttggagcccctgcccaggcagggaacggccacatcctcgggcagagccaagagtcaccgtctttcgtgggcctgggaccaggcccagccaggacgctaggaggctgcctctgctgccatgggctggatcaacatggtggtggcctgcagcgggtagtagcggccccgccaggtcttccagaagattcccttcttaagcttctgccgctgctgtgggatggagcggaagtactggccgttgaggttggaatggctgcaggtgccaaaccaccagcctccagagaggctcttggcgcagttcttgtccctgcggaggtcgtgatcctggtcccaagtggagaagggtacggagaggccgctgggtgggacggtggtggcgcccagctggccggccacgggtgcagtgagctgcaggctataggccgtgtcctcgccacccaggtgcacggagaactgcagcaactcggcgttgccatcccagtcccgcagctgcacggccaggcggctgttgcggtcccccgtgatgctatgcaccttctccagac

SEQ ID NO: 343797 - DNA, 1000 bp, Homo Sapiens
ttttttttttttttttttttcagaacttacaaaccaaacttttattctgagaaactggctgtacaatatctaaaaagaaagtgacatgaaggaagcaatctacaacttccttccgcttagcgagcatgcatgtgtgtacgtgcacgtgtgtacatgtctgcatgtgtgggaatccgggggctggcaggtggagcatcacggagcaggctgaggggagccggagttgggctgggagccattggcttttggagtccctggagctggagggggactgtccccagcctcctgcttccccccacaaagggcactgccgctgagtggggacggggacgatgccgggggaggaactggagaaggatgggaggtggggcctcctttgccctcccctgttgggggaagtgagaccacgatgtacttctggacactcccaggaccagagggagcagtgctggggggtgcggtggtggcggtggagaccaacttgacgatgggctgcacgctggggacggtggtggtgacgggcgaagtggtggtggaacctgagccgggggccgaggtgctgagggacaggacctgctgggtggatggggcgctggaggacgatgacattacaataaacttggttggaggaggggaaggctgtggtggggcagccgctcgtgcagacaccagtgtctggacaggaagtgcgatggagccaggaaccttcagcaagccaggggtgcgagggccaggctgtggggcctgcgagagggtcagcgtgggccggggctgcgtgatggtcagagtggtcctgttgacctgctgagcctgcagagcagcctgggcccgagccttgaccacctgggagcagaggaggggcccaagggacccgaattctgcccgataggcgtcctgattgtcaggcggtgggcgcagctttgccagaacaggagcacagtgtttcagcaggaggctctgcacatggtctgctccaatccggtcaatgttgctcagcaca

SEQ ID NO: 343798 - DNA, 1000 bp, Homo Sapiens
ttttttttttttttttttagggtaatcgttgaagattaccaaaggtttatttggaatgacacagcactgaaaacataattgttacagatgatttgtggatacagcatacaccatctattttactttagaacaatctgtgaagatgagttgcataaatagaaagaggtggaaatatagaggagctgtttttatagtgttcttttgggggtagatgaatatgccccatctttctacccaatctcataaaggcagaagagaagactgcttagctgcccatcccaactagcctacctccagccacagcggctggacagctagataaatcaggccctgccttctctgagggtgcctcagtgtagtcgtgctatctgtcatctcatcctgaaaactgcacagtacaaacacagatactgttgactcttttgccaatgggatggctggttttgccattaggcaaaactgcaattgtaatgccagacagaataagagcaatgcatgtatcaatgacaattgagaggcaaagagctacaatggaaaggaaagaagcaactatgtatatgtagccttctgcatacacatagatccaggagtcatgggaactagcttgcgtgactgtgtgtccatatatatatagatgtgttggaaaagaacattgagaacttttgcagcagtttagttttaaacatagtaaacctgaaagggagcgagagcacgtgctcacacctgggcaggggaataagataatcttgtactacaggataattcatcacatcttctgcagggcagccactcaatacgatacacctgatgcagagaaattaaagtctgatctggagaaagctactttagaattggtgggaggggatcaagtacaagagtctccacagcttggacaaagcacaaacaaacctgttattgacaacatgggaatgagtgaggattttttccttaatttactttttttcctcttacatttttttgcacacatgctccattgata

SEQ ID NO: 343799 - DNA, 1000 bp, Homo Sapiens
taaattgctaattttttattttttattttacttagaaaacagcacaactttcacaataagttccagggataatggataaaaatgacatagcatgttttcttttcaactggaaagtcccccaaaatgttaaaagataatgatgatgacagctatttacgtgggcattttctgcatgctaggaactgttttatggggcttgcatggattcactcattaaagagatttaaagatgtctactaacataaattgtatgctagtgacataaagaatattatttaatgaagaatcgcaatttttccccaagattattccatttataaaatacactacaactcagctagtatcactggggaccagaaatacatgtgggagaaattagaaaaaaaaaaaaaacactttacaataataagctacaagtaaatctataattttttccgtattatatttttcttctgaaagtaggaataaaatgtttaaaatcaatgaacaggaaaataattttattttcaaataacactttagatgccaatgttaaaattttaaatatatctaaaagtatccatgtaattgccttatgcaatcaaaggtgaatttttcaacagtaactgtaggtctaattgccccaaatgttttcattgtagtatttctctgtataactactgctatattattgtgatttccctgaatatcattccaaatagagtcatcatgaatacttttgatacaaaatcataattttatacaatctgatgaaacttcctaatataatctccagcagaaaaggctaaagagatacattttttaaaaatagaaaattctttcagaagaactttacctaagaaaacacatgaacctacttcttaaattattaaatgtcttaaaagtttgtaagtagtttgggacatcatttagctacattcttaatattatggaaagttgaaatttaatagccaatctcttgtttactgctttcagctattttgaccatcagatttctaaa

SEQ ID NO: 343800 - DNA, 1000 bp, Homo Sapiens; identical to SEQ ID NO: 160715

SEQ ID NO: 343801 - DNA, 1000 bp, Homo Sapiens
tttttaccagatctacttttatttcagaaggaagtttgtattatagtatttacttttgtttatatacaagttcttcacatttgtgtttaaaatgcacagacctcccttagttctcttgttcctgcttaaattagctgttattttacaatacaaaaaataccaaaaaattgcagtcctaaatgtatgtataacacccacaatccccgcaatgaaatagtttacaatacttactccatatttacatgagtgtaatagatgctaaattatacatattaacaaactaagcttgaatccaaacaaacgaaatcgtaaataactataaaacaaaaacatttccagagccagaattagttcaacgaaacaggcttcactagtgtttagaatgttttgtgcacaaattcagttactgaaaatcaattccattactgcctttaaaagatgaggtgccaattttcctctccatttcaaaacatctccttgtaggcagggtgtttgactctcatcaaggggcaatatctcttggtgggcctggctatctagaaaccaccgcaatggctggagccaagtttggtcaatggggtaaacatttcagaaggtaggcagggcatgccctgaggccaggaggcctctgccgtcctggctgtgtcctcaggatggccaattctcacagaaaccaccacaaggaaagatctcctgggatgacaggggtgtgaggacttggattttgttttaattctaaaatctatttttacatctcagtcactaccctagcattagcttaagttagtgtttagcaaatacttgttgaatggatggatgaataaatgaaatggaaggatcaaagatgttcatgaaaacaccaccatctcccaaggaagtgaatcagcccctggccccagtacaccccattaaatcaaaggagcaggatttgcactggaaggtaaaatgcctcttcccaccagcagtgccctgctctttttatttcccaggtgtctccagt

SEQ ID NO: 343802 - DNA, 1000 bp, Homo Sapiens
ttttttaactgataaaatttttatttcacttttgaatttttacacttttcctgattattctgtgtaaggtgaaactagaactgtttaaaagacatacacaaatctagtacatcaataaccggggatttttcttttttgctatactattttcacaaccacgggtgtgcttgctaggcaatataaccatcacagaagcaaacgttaggcagaatactggtaagaaaaaacaaagcaagaaaagagctaccagatatacagacaggcttggttccacattcactactgcattttcaagcgccaagtattaactgcacatttttgttcagctagaaaggagggatttttttttttgtttttttctttttttttggtttgttttaaatcagtgcataaatttttcttttctcatttcagcagatggacaaacagatggactctacagctaagtggaatatcaaaggtagaggggtgattctgtgagactgataggcctgactattctcaattctccccactgcagtgttcacgcaacttccctgaatatagggtctccttaaacacatctgagcactgacctggatgagtgcacttgggagacctggtgacaggcacaaaaagcatgatcagggctagcctcaatacagggagaaatcatggatatttaaaaatacttttttgattcagattccggtatgactgaagagcaacaccgtgttgagaactggaggaagacagggttctggtgccagaagctcttctccaatctttaaagccaggcttgctcaccaaggtgctcagtaatgtctctcacccctgcccatatatagcattaaaaagtgaacaaaagacagataaagatagaattcaaaaaggaaaaaaagtaaggaagcagagggacagaaacttagaagagaaaaccaaggtcaacagtcaaaaaggatggtgggaaagaatgtttagatttcaaaatttaaaagccccgagctaggaagaacctgaa

SEQ ID NO: 343803 - DNA, 1000 bp, Homo Sapiens; identical to SEQ ID NO: 160717

SEQ ID NO: 343804 - DNA, 1000 bp, Homo Sapiens
tttttttttttttttttttttttttttttttttttttttttttttttttttttcaagaacaagaaataacacaggccttttatttgctccagaacttggctactgtgtggtctgagggtgccatgctttcccaaagcccccgagggacactccacccagggggtgccagatctctgtgtgtagccagactgcagtgtccccccaggctgccttagtccagaaggccagctgcctgccaccggtgcccgggacgagcatatcccctgaagctggagaatggtgtccacctttgcatggcagcttctcccaaggcattggctaaaatattgcacttgtaaatcaggaaaactgatgaggcaagggtttcctattacaggacgacgtgccaagcatccaactactatttaaataaataaaactcaaagtgggggtctgagctgcaagctccaatggccctctaggagggcccgagagcccaggcctggacctcctgccccatcagccagttctttaaggaacttggtcaacgcgaagcctccgcggtctccgcagcagggagcagcagctccagatctggcttggccagggcccctgacctgccagggtcttgggccccctcgtaccggggcagtggggaccccacggggcccatccttctactcctccagtagcctgggcctctcttggtccaggcctcgcttccgtatgtctatccgtctgtccagagacacagcctctgggggcttgcttgccccctccgtcacagggggcagggaggcaggtgggcaggggacccagcccgcctggtgtgaacgctgagctcgactccagtggcccctaaagcgggggactcatcttcttctggttaataaggtccaggtagaggtcagaacggagaaagcgagggtacgagtccttttccatgagcccgaagatgcgcttctgtgccaggtcgaagcagccccgcgtgacgctctgcaggttgtccttggtgtgctcc

SEQ ID NO: 343805 - DNA, 1000 bp, Homo Sapiens
gacggagtctgtctctgtcgcccaggatggagtacagtggcacaatctcagctcactgcaatctctgcctcccaggttcaagcaattctcctgccttagcctcccaagtagctgggattacaggtgcctgccaccacgcctggctaatttttgtatttttggtagagacggggtttcaccatgttgcccaggctggtcttgaactcctgacctcaagtgatccacccccacccccattggcttcccagagttctgggattacaggcgtgaatcaccgcgcccagcccaaatcgccgaagtctttatctcctaccttgatctctgtagcagaaaagaacagtatagatatcaattgtcatcaacagatgcaacatatcttgtaaatcaatatattttcaagtgaggtctctgaatcacctgcactgaaatcatctgtgatgcttatcaagcatgcagattctcaggacccttcactgacttcataaatcttcatctctggaggtgagaccctggacactgtatatgcaacgagcacaccaccaatcctggatgagccccgctttttctctgtgccagaaccttaatgccacgcagcattacattaagtcacattacaactttggtcaatggaaacacaggtctttttctgacaaaatgccatcaagccaggtttgctccccacttaagttcaaatattaatcattaattttctgagcctaaatgcatttatccatgttaaacataattattttaacctcagcttgatttggtctttttaacctttgttctgttaatgagattcttttttcagcctgtgttgaatcatccacaaatgagtattccacatcattaataaataatgctaaggaggacagaaccaaggacagaaaccggtaagacgactcctttttctcatcaaattagataatattcagcacagagttgttcaactgactacaagtcctcttaatgcttaaagcctctacccacacctcaatct

SEQ ID NO: 343806 - DNA, 1000 bp, Homo Sapiens
aagtgaagcaaatattttatttaaatcagtcgtcaaatcacaacttatccaaatgaatgtgttgcaacattgttcttaaaagaatggcacaaatatggcacaaacacaatccagtatctatcaaaataccatttgtaaagaacctgacttatttcatgccatgtgtgaatgcagtccagcatataagagtagaatcaaaaacttacaacaattcttttcttcataacatataaaacatattcactactttgcctcaggattaagcacacttatcggtccaaacaaccataacaagtaggaaaaaggatgtaaagttaatttgctaccagaatataacttctttctaacctccactgggttagaaagaaaaatttcccaatgacaatagaacattctgtatgtttcaaaatgctttttagttttagcacactccgtgtaataggaaagtgaccaatttcagagtaccactaaatatggacctcaatcattagtgaattttaaagaattgtaccttgatcaggaatgttacatctaggaggctctgtttttcgtgggttatataactgaggcttaaagctccccaagcctgcactatggcacatgccccatcatatactgtgtgatacaaaaagcatgtagtatcctgcacatttccttaaacattaagaaaaaaatatacaatagatacaggaggactacttaaaacatacatataaatatgtaaagaatgatactccagtttcagaagcagaactaggtattgccaactccagttccaggttaagaatttaggaccttaaatcagaatttatatggttatcaagggaaaattgtaggttggtcttggaaagaggaaatgttaaatggctctagctcctgatgaagcctcaggattgtcaggggctctctagaaatgagatcagttgatgtgcctgctctccaattctcaaagttctgaaatactggtcttcagtctcagcagcagcattcattttcttct

SEQ ID NO: 343807 - DNA, 1000 bp, Homo Sapiens; identical to SEQ ID NO: 159245

SEQ ID NO: 343808 - DNA, 1000 bp, Homo Sapiens
gcctgatgcaaaggtttattgctgagtctgtgcgtctagctgaggggagtgcaaattgtgccccggccttgccagacggaagctccttgtccccgactgcagcacaggccctggcctgtggacataagcaaagatttggtgctggatgaggaaggagggagcagggatgtggggacatgggcctttgtccctgatagttcagccatggctctcagcttcccctgccagggaaccctgaatggaaggggcaagagaagctgctggtagggacaagagggtcacccaggtttgcttgtaaccccacctgaggtagacccttttgggcacagccagggcctttgtcctatcctgaatcctctgggctgatccaagggagctggactctgtccccagccacccctcaggacagcccagctattggccatagctggtgtcaacagtaccctcccttaaccccttaacacaccatcctgttgtccaaccagcccagggtactgtgtgtgggtggggaagtggtgtgtggatctgctgtccaaggacacagggagcagatcctgctggagaaggctggaggttgctctgagcctagtatttggggaagggtcctgctgtgtctcactctggcacccaagggcccccaggtctgccccctccccactaatttatttatgtgggggccacacaggccagagctagcttggactttggaccctttggaggctgctgggagggacagtcactggctctgggtagacaggtgtcaaacttgtcacatggaggtggcagggtgagcagctggcctgtgtgtgggagggatattccctgtccttgatgaaatactgggagggagggctgtttgctgagcccaggcccaccaggtgagtcgtgggcccccaggggcaggagagctgcgggagattggtcagttgggcactgctgagtcaccgtgagcttcagctgccccaagtcctgcccgttcctagctggggctggctgctgt

SEQ ID NO: 343809 - DNA, 1000 bp, Homo Sapiens; identical to SEQ ID NO: 160719

SEQ ID NO: 343810 - DNA, 1000 bp, Homo Sapiens
ttttttttttttttttttggtaaagacttttaagagaaagaagtattttaaaaagtagcagtgctctgaggctcagggtgtaggatcgggggcacagcctggtcccgggaggccccttgtgcacaggtggtggcccagggccacagtgctcgctcttgggggacgcgcggccgggggacgcggcctgtgtccggcccggggctcccggcgggctccggcggcagggacaatggcgaggccgctcaccacttgaggaagaccatcccggccaggacggtgtagcccagcaccaggaagaggaccttgagcagacggtcactcttctcctccagctccttggccaggatctccaggaaggtgatgaagaggaaggtgccgcccgccaggccctgcagcagcacggacgccacgctgcccggcacgccctgggcgctctcaatgcccaggcccaggccgatgcccagggggatcatggcgcttacggtgaccgccagcttggccgcgtcccgcaggggcatggcactccgggccatgctgatgcccagggccacggccaccagtgtctcgtggacggccacccccacgaacaggctcaccactttctccccctcctcctgcaggcccagggccaggccctcaaagaccgagtgggccgacagcgcgaaggccaggctgagcaggcgcacggggctggcgcgcgagaggccctgcacgctcaggctggggccgtggccgtggggctccacgtacagcgcgtggccccgcgcgccccccatgaaggggctctcatactccgagtcgctgcccacgtccgatccggcgttgaaggtctccaggtcgatgaaggacggcttctccttgcggaaggtcaggatcagctgctccaggaagacggtcatgaagaagcccagcaggaggatggtttcggccagcgggtagtcggtgctgatgtggccgaggctcaggaccttctggagcttttccctcacagcgggcagca

SEQ ID NO: 343811 - DNA, 1000 bp, Homo Sapiens; identical to SEQ ID NO: 160721

SEQ ID NO: 343812 - DNA, 1000 bp, Homo Sapiens
ttttttttttttttttttttaatacataaaaccaatgggatattttattataccttcttatttaaaaagaataacatgttagtatacttatgataattgtttacattaattatctgtattcaaagaatcttggcagatctgaaggctttcccatactgcttacattcatagagtttctcccaagtgtgaacccttccatgccgttgaaggtgcgaggcacatctgaaggctttcccacattgcttacattcatagggtttcactccagtgtaagtcctttcatgatatcaaacggaactagaatacactcatagggtttctctcccgtgtgagtcctttcatgacattgaaaagaagtaaaaggaatgaaggctttcccacactgcttacattgatagggtttctccccagtgtgagtcctttcatgatatcgaaaagaactggaaaatgtgaaagttttgccacattgcttgcattcatagtgcttccttccagtgtgagtctattcatgtccataaaaggaaccaggctagctgaatgctttcccacaatccttacattcatatggcttctctcccatatgagtccttgcgtgtatatgcaaggaagaaaaataattgaatgcttttccgcattccttacattcatagtgtttctctccaatgtgtgttcttgcatgtatttgaagaatcttggcagatgtgaatccattcccacaatgcttacattcatagggcttctctcctctgtgcttcctttcatgtatttgaaaagaagagaatttacagaatgctttttcgcattccttacattcatagggtttctctccagtgtgagtcctttcatgcatctgaaggtttgaggcagatctgaaggctttcccacattgcttacactcatagggtttctctccagtgtgagtcctaccatgctttcgaaggtttgaggcacaactgaaggctttcccacattgcttacactcatagggtttctctccagt

SEQ ID NO: 343813 - DNA, 1000 bp, Homo Sapiens
ttttttttttttttttttttacgagtataatagtttattacctaacttacaggtacaaagtgcaaatgacttgacgcctctctttccccaatcccttgaactctctggatctcaaactttctttaggaaagcaaaggttaaaagcagacagtaactaaattccaaataaagacaagatttcaaacatgaatattatcttgatagcaaaaggtacagtaaaaccaaaatttcattactccacagtttacctttccatttaaaacttggatagtataacacttgagactgagagatttggtttcaggcattaaccagatttaattgtttttggcaggtaagtacaggctctggcagagttaccaactattctggtcaacaaaagtaaagacaagtggataattatttttagtggagctttaaaaacctgtgagaagctcacattgactttttggcctccagtccacaaaataatacttcatttgataagctaaagtaaagagcaattttatggattaactctatcaaagtgaagcacatgaaaaatgggcctaaagtcacaatatattaatcaggatataaaaaattaaattttcacagaggttttcagggatgtttgtttgttaacaatgacctatatgtaataatgttatttgttaataaattcacacaacacaaagcagtaattaactaatgaattttcatttttctttccccaatattaaaaagggataattatactatcattataatttgataatgtctatatctgctaattagggcacataatatcctgcaaactactactataaaatgtgggaaatcctagaactataattaatactgtaattaaaatccccccaaaggccaggcatggtggctcatgcctgtaatcacagcactttgggagcccgaggcgggtggatcacccctgaggtcaggagttcaagaccagcctggccaacatggcaaaattccatctctactaaaaatacaaaaatta

SEQ ID NO: 343814 - DNA, 1000 bp, Homo Sapiens
ttttttttttttttttagagtcatgaccttatttatttacaagcacaggataagtccctaacctcccccaaagactgagcaaccctacccagcccagttaaatactgcaactgggggggtaaaaaaggtcgggaggaggaattaagggaaatacaggaataggggaacatatcccacattaaatagttatatacacatcagttcctgtggttctgtacagagcagcggctgaccccacccccacaggacacaatgtggggagaggagactgagggtactgaggccagagccaacctctggtgaagtgcaatagcagcagcaaagtcctaatggtgcacaagagggaggggaacccccagggctacccacccccaccctgccctggaatgtgtaagggacaggaatggctctcagggagcacacaggaaggacaaggctggaaccgtcttcagggcccagttttaagggcaacgttttgcctacttcaccctagacacagaacccttggaggaaagcagatggtcagcagtgctcttatctgcccctccaaacctaagtgagggcctggttccttcctacctctccccagggaaaaggaaggcagctgcttggcttccttctagaagccccgggagcctttaactaccccagctcccttcgtagtgtcactgtccccaccagggaggggccaggcacagtctgtgggtcatcaggctcaggagaagttctggacagggtggctgaccttcatacaggcccaataaagagcccggcccaaacacagcacagccaacaggatgacaaatgcccaggctgcatagatgcctccatatcgccgtgcatgcttccatgtgccaaaggcaaggccagtggcagtgactgccaaaagcaagccaagcaagaagcagcagatacatctcttacgtgtgtatctgcgcccaatagatgacactttcctgcagtgaggacaacgtgccaaagtgcggtctgtgaactctgt

SEQ ID NO: 343815 - DNA, 1000 bp, Homo Sapiens
ccaattttaccaaattctttattgaacaaaaaatcaacagcaaacattgtcaaacaggaagctcaaacagggcaggtgggtagggctgaccatcctctccttgcagtcccacctctctctggaacaggcttcaacactagtgagggcatcaaaacccctgttctggtgggtaaggagggtcaggcctttctagggaagggacactcagagccagcttcatctgtaggccccaaagaggagtcacgggctgggccagggggctctggagctgcaagggcgctagacaaacgctgcagagggcgggggatggagctcttggtctgggggcacagtaaggcttggagctggtgactcatggtcgccagggattcgaggtgccggagcagggcttggtggggacaggagtccctgtggaagtgctggccacggccaaagccatgaccagctggtgctactgaatagggatgctgggactggcgcaagcctggctctgggggccactgccctcgcccaggatgctgccagttttcaggctctggccagagcctccccctgcctctggggggcctctgccaagcagagattccccttggagctatactgcccctgccctggctctgctgccaggcacctcctgggggaggggtgcccttcaggggcacattcggcctcctgtcatctggctgatagtatctcttctccaccttactgttgaaggagaccatcttttgaaccttccccaaccaggggctggaccctgctgtgtctggaagcccttccttggggagcagcacagccagcaacagacttgagtgagtgacctccagacctggggaaaggagaggggagacaggaagagcccaaaggcctgggccccccaaagggcgcagcctggtgggcaggggctggaaggcaggcaggggcagcaggaccatccccatgtgctccacagaggccagcccgtggcgctgcctatcattgaggtatgagtagagcaggc

SEQ ID NO: 343816 - DNA, 1000 bp, Homo Sapiens
cccaataaacctacttatatttaggtgcatacttagcctagacattttaagaatctaaaaattcctgaagattatacaattaatcataaagaatttacaccttttttgttacatgcttgtatctgaaataatttctacacctgcccaaaggctgccactcactttgaaatcaaaggtgtaattggtgtaaggcatcaagttattttcataggcgctcttaagttggaagccatgtgtgattctcccttctgagcttccattctttccattgcagctgaagttcataagacactcattgtaccctagttccttgaagtctttatggttgtcagctactcctccattgcttaagtattccacaacacctgaatctggcaatgagttaagatctgcacatagcaccagcgggatggaattaggatctgcagttgggcttccaggcctactagaggctttctccagaatgtttttaacctctgagacaaacatcatggtctggatgagcttcacatcagaatactctgggtcccaatgcatgtgggcatttgccactataagcagctgtttgtctgcagcatgaataggcttcatacctgctccaaatagttctttgtggacctctaataccacagcgacaccaatgttatcttttgtcatcactctgttcagcatagcttcggatccatctgaattagccatcgccacttggttaaattccactgtatgcttctgcaccaatgtaaatttttctgttttgaagaatattgcacaaccatctacatgctttctctcctgctcagacatgattttggcacgtgactttggagaaaaaaatccatcatatccacgctccttcaatgctggcagaaagagagtgaagtattgctctgtttccacttcctgaagactaatgatatctgcgtcacagttaacaatttcttccataattccctttttcctgtattcccagtttaatgcccaggatgggcaatagccatat

SEQ ID NO: 343817 - DNA, 1000 bp, Homo Sapiens
cacactgtcacaatttattgaaattttataaaaactcaggccaagtggaagaataaggtacaactcaagagtacaaagacaactccgtttccgttcagtacttttctcctcagcactggtggtaagaaagccccttgctctctagtagccaggcagcatggacttacagtcttaaaatgaggctttatgtatttcaggctggaggcaggttgccttttctcctgaggaatctcaggcagggtaaaagttacttaccactcagtacctctgtgccagaagaaaagctcaatttattcaatccttagaaaagttactatcgtcccctggtcagacactaaggtgtcttgataaggtccagagacaaccacatagtccttattctaattcgtagtgaaaaggctgcaggcatatggtgctcctacgatgggcctgaccctttcctaagcacatctcatttccacatcctttgccttctctttcccccaacatttccagccagcatagaacccaatttctgggaaattgagaggagaaacagtattatgaacacagactcctttcaaattggaacaggagccaaaccaaataaataagagaattgtgtagggaagtggggtagaagggaggtcagggagcaatcccttgcctcaagtctggtgcacctcatggaacatcagttcacgggggatggctgtttctggaccaaacttggtggctgcccgacgctcaaaggcagcaacattctgtttgacagcctcatcaaaaaacatggtggccagctgggagcgcagcagagaacgaaattcaaaggaaatcgaaaagtccacagtgcaggttcgaggataggcaggaataccagggctgaatcgccaaatagtctctaagtggttgaagagcttgccatcagtacaaacagccttgaccatgtgaggtttgaccatggaaactgcagaggtgtaacgttccatgacaggtggaaagccaacctccagctgggctt

SEQ ID NO: 343818 - DNA, 1000 bp, Homo Sapiens
tttttttttttttttttttttttttttttttttttttttttttttttggctttaaatcccgtatttattgcccaaagctcattagtattacacaaatcacatagattgagaaattttctgaggttaaaaagacgctgcaaaggcccctgggagtggctgaggcttgcgtgcgggggcctcactctcactgggccaggcttgaagaccaccctgggtctgtccaccagcctttttcctcctctaggctcctgcccttttcccaggccagaggccagaacaccaaagaagtcggctcataaccaggtgaaaggggtccgtcggccagctcgactccacggccagcttgacatcttggtccctgcaccctcacactgctgtctgggaatggaagaagggcatccccaagcctgagggcatgtttgaagtgaccagaggagggccaggcagggacaccaggggtgcagcaccatcgcaggcgtggcttgtgttctcgcacagctggccagccccgccctgactgtgtccaggcttagcctccaccccaggcatgaaccaatctgcccctcaggcctcccttcctctggcctcagcagagtggggcatgggtgctgggtgaaggtttcccctcacaggtctttccaaagccagaccagggcctagtggcatagcccactgtccctctgtcaccctcaccctaggctatctggatcctttgccactgcaccgccacaggagcagaccccttggctcacctgaagctgcatttgggagcatgacggaaatcatccgggagacaaagcaaatgagttatgagatgctgaggccacaggctgggccagggcaccaggcctctggcagggggagggcgggaaggggtgggtaggcagttttggtcccaagataaagtgcacaagaataagaccttatgataggtaggagcagggtgagcttgaagtgagcttttcaaaagacgacccagacatgccagcacctagttcag

SEQ ID NO: 343819 - DNA, 1000 bp, Homo Sapiens
aaaagtaactactgttttaattttacctgatacgttaatcactagaaaaagactctgaatttctggcattttgtatgctagacataagtgatatttatacaaatacagttgcaaatacgaggtataatgactttatatttagccacagggtagtattttacaaagaatgagagttagtttatatgtataatttatttgttttcatataatttagagaaaacagtccttaaggataatgattactttaaaaagaaagcccttaaaatcatggaagaagtcacttgagaagaaatccatccctcaatgggtcgtcatcttctattataaagcttgctgtacccgtgtaatgggcttgtcctgatacttccactataacagctttaaaatcaccacatttcgcttccctcacagctttccctgtgaatactgagccagttgcactgcttttgaaggctctcatctggttcagttccagaagccctttgtgatactgtaaggcaattcgggctgtcactcctgagccagtgggacttctgtcaacctgttcatctgcaaaaacacaaatgttggtggttggttccttggtataagcatcttttccatctgttaatatagttccatataaaaaggcaaggtcttcactatcaggatgattaattttaaactgagctttcactgcctctgtcactgcactcgctgcatccacaaggtccctggtctttgcagaacaaatgtctagtcctaacttttcagcagtaacaaatgcataaaatgcaccgccatatgcaatgtccaccatcacctttccatgtccaggaacatccaccatgagatctgtggccagcacgaaggccgggacgctgtggaagcgcaccggtccgtggctgcggccgtcctcgcatgccacgaaggcggtcaccagcccgcaggggcagtggatattgacgcgggcctcgcgggtgcccgcagggggcgccggcacaagcccgaagtccaaagc

SEQ ID NO: 343820 - DNA, 1000 bp, Homo Sapiens
ttttttttttttttttcattcattaaacaaacatttattgagtgctttctaggtgccaggcaccaagccaggcactgttaatacaaaaattccaacacaatccttgccctcaaggagcttacagtctactggggagatgaccattaggcaggcaagtgagcccagagtgatctgtgtagtatgccagggtgggggtcgggaggagagagtatagccaaagctccttggaggaagtcaagtctaagttgagatttgacagagaaagtaccctttctctgtgaccaaaagaaaggaggaatcagagtggcaatggagagccactgcatctctggatacaggaggctgggacccagaatgcaagaaggcaagtgatgagaccagagaggtgagcagggacaaggacaccatgagtctcacaagccatgctgaggggtccagactttatcctgagggcagcagggagccaaggaaggttttaggccagagagtgacttgatcaactatgcaatgcattttaggaagatagctctggccacatgatagagaagcagtaggaggctgtcacgataatccaggtgaaagctgatgacagtgggagtggctcaaatcaagagatgttaaggtagacctgaccgttttgagagattggatgtggtgggcagaaagagaaaacaggaatagaataagtttcctgtctggctcctgagtgatctcggggtcaagggaagtacccagaaggggcaggtttgcagaagacagcaagtaccatctgggccatggacctgaattgtctgtgcacctagagggcagcaaaactgtggttcaggtgatcaggaaggatgttggggctggaggtcaactctaaattcctcaccatccttgaaaccatccagatggatgggcttccctagggagcccacagcagaaccctgaaagaccctactgtgcatgggcaagtggagaagcctgcacggaagcctgaaaggaacagccagggagg

SEQ ID NO: 343821 - DNA, 1000 bp, Homo Sapiens
ttttttttttttttttttttttatttttaaagttgtttattcttctgcaccagcagtccattgtaaatgtgtgtgtgtgttttggtcatttttccctaagggagctctcttttgggcgtggctccacggcacctgtaggaggcggggctttccctaccatcgttgagagagagccttgggacggcagggatggcgaggtgagtgcccgggagggaagctgtgcgggcagcagtcctggtttactctcttgagcctgtgcatctctgcacctggagtcaagtccttcccatcagacctcagccctggtgcacccgtgggccttttaagaggttcttctctgaagacccttcatcttccttatcacaagtttaagtgctgcatggcatttgatactcttgacagccaagatacatttcagtagtaaggttgctttcctgattattaccttaaagtgaacatttaacctggaattcatttactttatcttagaaaaatagaaaatgatagctttgaaattagcacttatttctgtactgttgtgtcccaccctcctcaaaaggacacgttcaagtggcttccagtgttaaaatggtgagtgatgtgatgttgaaatgtttcacctgagttctgagcttttccatccgtataatcataggtacgaaggtcagggtaggagtcagactgaggagaacctggattgtagcaggagtagctccagagagtcgctcttccataaaatgagatgttgaccttccagggtgtccccttctgcagatctaacagtggctttctgtcgtctcccagcttcccgtggaggatgacattgacctcagtgatgtggagcttgatgacttagggaaagatgagttgtgagagccacaacagaggcttcagaccattttcttttcttgggagccagtggatttttccagcagtgaagggacattctctacactcagatgactctaccagtggccttttaaccaagaagtagtacttg

SEQ ID NO: 343822 - DNA, 1000 bp, Homo Sapiens
attaccacatccaacttctttattcttgagaaaacaaaaaagtccaaaatcaaaggaaagcacccgttttaaaccctcatatctttctcagggctcactgcagtctggccatatctcaagcaggtctgtccaatggcttggaacatagacttttgcagtgaaactttaaaaacattacttgaattaggattacacaaaaaaaactaaattctaagtgagcacaactatcgctgagaccctgaaatttcaggaaataaacatggttcaaaactcaaactgttcatcaaaataattacgcaggtcagccaccactgcagaaccatcactgctcagaggaattgagtcagcaatggctgatctcatcatctcttcattagcacataagcggttcaacttgggatacgcaaggagtctctgcagaggtacgaaaaatttatctccaacacagaagggtgtgggagagttctctatcttggccttctcaacctctgtgaagactggtccaaagcatgggacaggggcctttgagccaccaatgtctttgggcttatcaccccgttccccagcctgttctttccgccttggcaggtggctcactcttaagctttccacttgttgggacacctcattaaccaacacaagtttaaagaacctttcctgctgtaagcttgggtatgaggtggtaaaaacagctttataaacatgctgatcatgctgctctgaaagacatgattctgttgcctttcctccatttttccggaagattcctatctgggtacagtatccaacattctcagctccagctggtggttccccgacaccagtaaactccacagagtaatcatagcgatttgccacatataaagcccaggtctgaaactccattctggtccactcaaatttatgatctgaatctcttaaggtcactgatggaaacaggggattgaattcagagtttggtgtgctgatgacaatcatggatggaaacaggtacccaaat

SEQ ID NO: 343823 - DNA, 1000 bp, Homo Sapiens
gccattcatttgtttctttattcaatccctcgcaccaatgcctctctggcccagcgctgtgtggggagctgggacatggggtcatgggactgccccaaccctctgggaactcataggctggcagggtgggaggaggcaggcttgtggctgtaactgtgggtaggagtttcacgggcatctcaggctggccctggacccctggaaggggggctgggtttgggggttaagtggagtcggtcagggatgagggtgggaaggggacagcaggcagaggatgtggcgggcaggtggctgaggcctggagggacatggggaggggccaggggccaggcttacagggcttctgggtaaagctgtggagctgagactctactgcttgtgtggagctaggagaggtcttgaccatggatggtggttagctctgagctctgggcaggtggacgggtgtggggggacaagtggcagtgcggagtcaagcagagggttggcaaggccagctcgttcccctgggcctgacccctctgctctccgaagccacgagggcagggcagggtgatggtgcactgggtcacctcctgccaatcaaactgtccttttccccttcagtattgaagggggccccttggactgtgagaggggcagggctcacctggaggggcagccctgggggagagtggggacctcagagggcagcctctgggcctctggaaatggaggtctttgctttcctcctgccttctccagagaacagaagaagtctcttcctctgaccgtcccatcgcaggttccccaggaggctaaaactgtgtggattttaggacagagttccccagcgtgccatgtgttgccttctttactgcctggttctgcacatcttggatggtgtcgggcagcggcaagctctgggtctcgggcagaagcagtgcggccaggccactcagcactggcaccgtcccatacaccagcaagggcagccaggggccatggacacccagcagcc

SEQ ID NO: 343824 - DNA, 1000 bp, Homo Sapiens; identical to SEQ ID NO: 160722

SEQ ID NO: 343825 - DNA, 1000 bp, Homo Sapiens
ttttttttttttttttttttttttttttttgggacagggtctcgctgtgttgccctggctgctctcaaactcctgagttcaagtgatcctcccacctcagcctcccaagtagctgggattacaggcatgtaccactgtgcctagctgaaacatcagtttctgactgaagtggagactacaacaactttagtgtttcccttagaaggattacggccatggtgaacttgactgagtaaacaatgctataaataaaaagctcttccaaaacattaaccatggtaagcatcattatccccataaaatggtggcatccaggttaaatggcccacagaccaaaagtctaaaatgaagatagaatccagtcgttaactttttctgtatctccatcggtgtggtcacaaggattacaatgctttccttagcattaattcaatctgggaaaattttaatctccgtgcaatatccagtgagctctcaccatgcttattctttattgtggggtctgcacgggcttccaagagcagagggataagagactggtttttcatttcacaggcataatgtaatgcggtacagccataacaatctgtagcattaacttcgacaccagcatcaagtagcattcgtacaagagcctcattctgctttgtctttgataccatgaggaaatacccaataagcagaacaggcattaagaggataattagtagataatcaatgaaggtaaattttttcttcacagcatgatgcaagcaggttctctctttctggtttttgaggttgacattagcatttcttcttaaaaggaaggaaacgattctcacatgccctcgcctgcaagcacagatcaggggcgtgtctccattaaagccatcttgaacgttggcatagctgctgtcttctttcacccaccgccacacttgtccaaagtcattctgataggctgcttggcagatgggctcagagtataggattcccatgctggtccttcacaggctta

SEQ ID NO: 343826 - DNA, 867 bp, Homo Sapiens; identical to SEQ ID NO: 160723

SEQ ID NO: 343827 - DNA, 1000 bp, Homo Sapiens
tttttttttttttttaaagatttctcaatttatttgcatatatacattgtcaccccagggagccagctctatttcagaagtccccggctccccttacccagccaacacccaaaacccacccaagaggatgggtcctggataaataatgcccaggactcatatcctgaccccataggttataacagaattcatcaaacaaaaacagagggctagaggccagtgtccatgagaggtccttgcccctttgtaaacattgacatccaggccactggagcctggggaaagtgtgcaaacatgaggatgccacactgtgtgtccaggggccaggaacacagctggcaaccatacccgtgaagtcctgaggatctgccccccactggaacatggcaagtgccgggggcagaagcaaggcagttaccccacacccaagggctcacatgagatggcagcgacgctcttgcccataggaattctccacacgggcaatctcctggatgactttggtgaagatgccttgagtcagctgattctctcgagcagatgactccataaatgtcgcaccccaggactctgccagcttctttccttcaactgcctgtacctctctctctggagagagatctgccttgttccccactagaaccactggcacccgggttttcccatggccttcatgtagcttttggtacagactctcaatgacttggaagctatgcagagaggtgacagaatacacaagcacataaccatggaccccaatgatgaatgaatagggcagaatgctgtactcatcctgccctgctgtgtccaccaaatgtaggtgaaactcatctttgccaagagtcactatcttgctgtaagtattctccactgtaggatcgtagccttccgagaactcgccttccacaaattgatgtgccaaagatgtcttccctacacagcggtatccgaggatgaccaccttcctgtagcggactagcggcatggcaggagcccgccc

SEQ ID NO: 343828 - DNA, 1000 bp, Homo Sapiens
ttttttttttttttttcttttttttttttttttttttttttttttttttttttttttttttttttttttttttttttttttttttttttttttgctgaaatagagtctttatttctgaacattccaaaacagcagtgtacacagtaacaaatattaagttatatgccataagaaagcattcattagtgcaaatggattttgtaaaaggtctatcaaaaagatttatttgctttaaaatgcattcatttccagaagcattgttaataaaacattacagtttcatccttcgtaataaagtattgaaaatcaattgtggtacagtagcaaacattgcaggtattaagtgcaatgagctcatgatgccgttataaatatgaaacccatgtatgacaataaattaaaaatgaaaaagacaggaccatttaattctgctgtctggttatctccttgcaatgcttcaaattatgttgtgctcattcaacacaaaattatgtgtctcaaattgcatgatgtgtttttgctgatatatccctagagctaaaaaaatagtaccttaccacaaaaatatttttatggcacaaaatttaagttgttccatagtggttcacataggtgtaaaaagaaataggcacaaaaaataaaattcctgtaaactataaaaaagtaaatttcaaagcatacattatagaacctagttgtcaatatgcaatgtattaaaatacagaacatgtaatggaaagatgtttagaacacgtgagtaaattgaacaagttactttaaaaaactcatatggcaaagcattattgatacatcttaattctctcaaaaagtattcaggtacagagcagttctacaaaaacttcctagatctaagtgtcacaatactgcaaccatgggtttgagaatgttgcagtatctcaggcaaatatttaagtgcaataattagtctctggtgactggtccattgagaaacaatgcagtaaatatattaaaacacaaa

SEQ ID NO: 343829 - DNA, 1000 bp, Homo Sapiens
ttttttttttttttttttttttttttttttttttttttttttttttgatggtgttttacacaatgatttattttaaagcttaataggaaatcacaaagtatttaataaaaaatagttttaaatacatttttaaagtcttaaggaaagtctctatttataatcctcccacctccacctcccaagtagctgggactataggcacatgctaccacacctggcttaaaggtgcagttttaatggcagatttcagactccttaagctacatgatggctaagagtcagcttaaggacttaaaaaatgtacatttataaaacattgaggaaattcaccaaaatgttttgtaaacattataaacaaacatctactatataatgtgagagacagtttcaggatctatttagaaaggtttaaatcctgtattttataatattattttataaagttactattactatgaaatttgcattacacattctgtgtcacccttatgtgtcaccttaactaatatcaaggacaggtttgttaaaatatacgtattacactatatacatacatacacagacatagtgcttttttccccttgcataatgctgcttcataagaacatatgtggtctaaggaacaatcagagcatagcaaaatgctgccttaattgtttaattaaatgttgtgtgtccacatggtctggaaatgctgcttcagacttctgcgcagcaacatagcttctctgcagatctccaatcttatcagagattgttgcaaaattaaaatgcggttcatacatatggggtgctaatgatgatgcagtttgtaatagtgcccttgcctgttcaacgtggcccttccgcatctccagcacagccaggttgttgtaggcctcggcgtggttgttgttgttgaccagagccagcctgaagcactgatgggccaaatttgtatctcctattcccacagctacatgtcccaagttgtaccagacatcagctgcctcttcttcat

SEQ ID NO: 343830 - DNA, 1000 bp, Homo Sapiens; identical to SEQ ID NO: 160724

SEQ ID NO: 343831 - DNA, 1000 bp, Homo Sapiens
ttcagctagaaataagttattttattttaaaacacatacagattaataaatattactggaaaacttaatagcctttttatttacatgaggcaataacaacatgctatgactacatctataaagcaaaatataagcaggtcttggccactgacacatgtgtctatgtatgctaattggaagctccccaatacatgtctatgacaaaacttttacacaaccaatcaacatttgacattttttacatcttcttcctctcatgattatattccattttcaagaaaataatagttatcctttgaaaaggcaaaacgctcaagccactgaaaaacagtatctaaatttctgtaaagtgcaaaaatactaaggtggggggcaattattatattctgacaaataaatattctgaacttttcaacatgaccctttggcactagtggtttgggagccctgacattcgcctggtgtcagttcagcatcagggttgagctgcttggaagcaggaagttcagcgtcatttattacaaatccagtgcaacagaatccacgtgtttcacaggccattaaatctttttcagaatacagacctcggccgaatgtcaggagcacatcacaccatcggaaggtgatctttctgtgcggctttctgaagtccctgtttaatttccatattttacaatagaacatataaaaccctttcttttaaaacaaaaaaaggaaaactaaagcttcatggaatcatgcaaactttacacccagcacttcctttgctttctcagcgcatgaggctgtgtgtcctacagcatggtcctgagcagactccatggtccgtgcaagcggagtttccactgtgccactcccaggcacttctgaacacggtgctctcatctcaggccaccagaacactgctgaaagtgccggtgttttagaaacaatttgaagaaccatcccacccctttagaggtagaaaaactgaggcacagaaaggttaagagactcacct

SEQ ID NO: 343832 - DNA, 1000 bp, Homo Sapiens
gacttgcttattttttttattaaatgatacattgaaagtataaaaagttgccgcagtacaaacaaattacagaataatgcatataaaagcgctatggactacacgtgacaattctgcttaacttccatcttgatgattttatatcagtatccaaaattatatactccagcattttttccgaatatagtcttacatgattgcaattcctgaggtaaactaagtgtccactgccaacatccttggacgaaaaccaagtcccccgggagaattcagatatttatattcacacatacaatacaacggaattcatcaatgtaatcagatattgcagatttaaaaatggaaaatggactcttgcaatacttctgcatccatatataattttaccagcagggcctcccaaaatgttgtgtaagtatagtttaaatggatttcattaataagtttctgcatttagataaaaattcttggctaatctgtaagaagtgaacactgactagcattgccaaacagaaaatcaaaagtttcaacaatttgcaaagcagcacagaattgacaccctaaagaggatgccaattttgctaactacagctcttaccactcttctccatggaaaacctttaagctaaatgttgtcagtgtttaggtgcgcaggcaaaatttaattctgaatataccatcgaacttttgccaatcaggagctgtctatcatcatagtcagttgttttcaatgaaatgagcctgtggacactacattaaaaatacttctttaataaatatcgaagtagcgtattagagatagcacatactatttttctatcccaagaataaaaattgatgtttggtaagagtttcggagcccaaacaagtagggggctggccctcttctggctcatctgtgattgcacaaccgagggccacacggagattaaacaatgccatctttgaaaaatccctttctggtatttctcccaaagcctgtctcttcatgcttacttca

SEQ ID NO: 343833 - DNA, 1000 bp, Homo Sapiens
ttttttttttttttttttttttttttttttttttttttttttttttttttttttttttttttttttttttttttttttttcatgcagaacaagctttactcagaggaacagcaaatggccccctcccatccctgctggccagggagatccgccctccccgctcctccccagccctgggatggcgcggtccatcccctcatcgggatcctcgcgctcactgctccgtcgtggggtgcggcacagagtccacgcaccctcgagggcggccctggcgccgtgggcgccgctccagggccctgcgtgtgacggtgcagcagcggctctggatggcgcccggcgaaggtcgggtgggcacggtggggggaggggcggtggcctgggagggttcagggaagccccgggcctcacccgccgggtcgtctcctccacggaaccccgtcccgctcaggagagcgcccagcccttccggccgcagcagcaccgcggggagtaggcccgcccggtcgccgtacctgcatagccaccagccgcggtctgacgtttccaacacgcgcacgcgcgcccccgcgggcacggacagctcatctgcgcggctgctctcgtaggcgcgggaagcacagaactggggaccgctgctccctagggacgggcctccctcccggccttggcccggggccgcctcctccaggtagggcgctggaaaccaggcggtctgccggtcttcgttctccaccagccaccagcctgaggggtgccgcagcagcacgtccaggctctcctgggcctgcgcctgaaaaggcctatcccgcgtgtcctgggtacagaagggctgcaggcagcgcaggctctgagcctccagactgtggatggagaggcggcccgcagcgcgagaaagaggctgctcctctggggtgggcaggatcacccggctgccgggtggcagcgcgggctccaggtccaggggttgcggtgcgaagaagccagtgatcgtcgggctccg

SEQ ID NO: 343834 - DNA, 1000 bp, Homo Sapiens; identical to SEQ ID NO: 160726

SEQ ID NO: 343835 - DNA, 1000 bp, Homo Sapiens
ttttttttttttttttttttgaaacagaacactttatttgtaaaggagcaaagaccgtcgaccaggccaagcacttggctatcacaaaatcgggacgagaagcctttaatcagccagttctctctacagacagcccacctgtgaattttccccacctagctggggaacagattctttcacatggcggtcaaggcaaacgagacaggaaatcacaacaatcacaacaatcacaccgagatcggagggtgagcttcccgaaggctcgttctgggctgattcagagccgcgtttccctccctcagcgattcctgccaggagagcagacagctggtaccgccccacggccatccgggccaaggccccggcaacagcacccctgcctcaccagcgagcttctccatctggaccaaggtatcctcggtcggagcaccttccaggagcttctcggtcagccggctgccacacgccttcaggagccaggcaaaggaggtgtgcaggcacgcccacaggttgtcatcacttgtcagcgatgtcagcgagcgggcggcgttgccgttcctctggtgtaggaatggcgtgaaggctgtgttcatcctctgagcacgctgtgggcatccaaactgctctgcctcaaacaccttgagcgccttgccctggagctcatcgatgattccccggaccttccccagcaggaagggccaggagttgatgaggtagatccggtccatcatgatggtgatgatgctgtaccagcgctggaagcccctggccaggctgtccttgatgaagaaggtgtggctgaacacaaagccgtgctgctcatctccgaagaagatggggccttcacggccagggcagacctcacagctcaggctccggacacaggcctggcggacaatgctgaagagctgggggtggctggggtgctggtggctgacgtatttaatggaggtctctttatcatggctgatatatcccgggtgccctgcagcaagtgacc

SEQ ID NO: 343836 - DNA, 1000 bp, Homo Sapiens; identical to SEQ ID NO: 160727

SEQ ID NO: 343837 - DNA, 1000 bp, Homo Sapiens
atttttttaaaggtggttatttttattttttgcaatgccacagttataggagtgtatgaagaggtaacatgtctccttttccttaaccatgtttttttttttttaaccttctgcacaaaggtaaaagtttttgttaatctcatagttaatggtataaaacagagattggcaaacctttcctccaacaggccaggtagtaaatattttagatttcacagaccacatatttttttcttttataactctttaaaaatgtaaaaatcatttttagtttgcaccatacaaaaacagactgggccaaattcggcccgtgggcagtagtttgccaacccctggtataaaatatctactttgtcttgtcagagaaattgctgtccttaggcttctagacaatctgctgcctgaagtcaagtggagaagggccttatttacaatttaatgtggtttgtgacagaagtagaaatggagagcttctgctcacttttgactctcccagtttttccattcactcattcattcaataaatttgttgagcacctactatgtacactcttaaatatcttggtgttagcagaaatttccagtgtttcttccttaaaagggtgatttctccagtttctccaaaccaggaattatttcttaatactcatgttttatggaaaaatcaggattaaaatctctaccagcacacaagaggatacatgattatacaaaatgaatctagccaacaatgatatccttgcacccaatagtgacacagcctagatgaggaaaatatgtaactatctctattttaaaagatacctcttttcctcccacaggctgaaactttcaaaaaaaaaaaaaaaatcagatctagaacaccccgcaagtaatttcttcccattttcctagttttgctgccatgttaacataaaatctggatccaggtaggcctcttcattagctttctatttcagccataaaacaatactacacttacagctgaatactgactcca

SEQ ID NO: 343838 - DNA, 1000 bp, Homo Sapiens
aaaggatacattgccttatttatttatatcccaaccttgttacaaaaaggcttacaagatgcagatattatagtaatataaaacgattaaaacttagaaaaatgagaataaggaaaataaaagtagaaaaggaagacagaaccaagaacatgactagcatacaaaatacataaacacttgctgaaggtagaccacaaattgggctctaaatggtctagtatcagtacaaacagaaaaatacaatcagctgaatatttagtgtccttaaggtaaaaaccaaacagcaattcaggaaaagcataactgggtccagagaaaatttctcccacgcattcttaaatagaatattatgaactgttacgataaacaccctttacagtatccacagcaattaaatttatttttttcctgagacaagatctcactctgttgctcaggctggatgcagcggcacgatccccactcaccgcaacctccatctcctgggcccaagcaattcttccccctcagcctcccgagtagctgggaccacagtgtgcgccctcatgaccagctaattcctgtatcccatcagctttaacctctctcacccatgtactgaagagtgccacagatagtgtaggcttgagctccctggggcacgtggcgggacagaccaaagtctgtcagtttcagatggcctcgttcatctagaagaatattctccatcttcacatctcgatgcatgatgcccaagtcatggagataacacagtaccagcaccaactcggcagcaaagagacggatggaagcctcaggaaagcagccaacagccgaccaaagggagtacagatctgtgctgcagtagctacacataatgaaaaggtgccgttttccctgccagctgtcccccaagctgtgtacaaagggatggttgatctgtcgctggatgctaacctcctctttgcactgcctcacggtatccctctgtaggacctttaccttgggcaccaccttcact

SEQ ID NO: 343839 - DNA, 1000 bp, Homo Sapiens
tttttttttttttttttttttttttgagacagggtctgtggcccaggctggagtgcagtggcgccatctcggctcactgcaacctccacctcctggattgaagcaattctcctgcctcagcctcctgagtagctgggaccataggcacacgccaccccgtcaaactaattttaaaatctttttgtagcaattgtgtctcactgtgttgctaaggctagtctcgaactcctgagctcaagcgatcctcctgcctctgcctcccaaagtgctaggatgacaggtgtgagccaccgcgcccggccttttgtttctgaaattcaggtgctgttgccacagctcttagacaaagagggcagcggagcagggagtctcagctgaggactcatgggtggacattggaatttccaggaaccttctgaaatcttttaaatgttgagagtatatatttacatgcacattttttatagggggttcagagcgttcatcacattctcacaagtttctgtatccgcctctcctctgcccccaccccacccccaacaaaaagggctaaaaactagtggtgagccgggtgcagtggctcacgcctgtaatcccagcactttgggaggctgaggtgggcagattgcctgaggtcaggagtttgagaccagcctgaccaacacggagaaaccccgtctctactaaaaatacaaaataagctgggcgtggtggtgcatgcctgtaatcccagctactcgggaggctgaggcaggagaatcacttgaacccgggaggcagaggttgcagtgagctgagatcgcatcattgtactccagcctgggtgacaggagcgaaactctgtctcaaaaaaaataaaaataaaaataaaaatggtgagggcgttagaaactggcgatcagggtttcctggcctccgcactgctgccatgctgagctggtgtttctaggcagggcctgtcccatgcattgcaggatgttgagcggcttctctggtctcc

SEQ ID NO: 343840 - DNA, 1000 bp, Homo Sapiens
gcagagctctagcacatttattgggagagtaagcctgggaaagactaagggagtggtggcagggagaaaggctgtggggaatcagagcgggtgctcagttgggtcttgaaggagaagaggaggagggtgggaggtgggttgccgaggatatctggttgaagacttgggggtcaagacaaagggacttagggggatggggtctggttagagttggggagggggcctaggacatccgtgcagagtctggggaggttggggtgggagagtctgtacagtttggtgttgggtgttctagttggcctggtgtccaagagttggggcagtcgaaaaagggttccagagtctggtgtggctggctggggtttcacggcagaaaatgggctggagggggcagttgtagactgtctggttgcaggggaaggatcgggtcttgggaaccaggcctggatggtctggagtgggaggtctgtgcagtccaggacgtttggggggtggggggattgtgcctgactggcctggggttgggggagggctgtctacaccataatttggtgtcaaaatagggaagggatggaaatgtagtacccggatgtctttgtagaggactcagaaggaagtagaggaggggtcttaagtggggctatatgccaagaaagtgggtcggtggggctgagactgtcggctgagggttagggtagtgctggtagggtctggaagccgaggagttgtcggtgtggggtcggaaagctggagggggtgtgagagcgagggtgtcagtggaagggtctatgttatcaaggcagtgtccaggatggaggtcagggcagaatccaggagtgggtgagaggacagtccttggcgcactcgggacatctggctgggcggagtcagatcggctttaatagagggagcctgaggaggctcccggggtgcgggcgcggcccagccccctcctacttggctgcggctggcggtggggcctgggccgacgctggtgcgg

SEQ ID NO: 343841 - DNA, 1000 bp, Homo Sapiens
tttttttttttttttgagacagagtctggctctgttgcccaggctggagtgtaatggtgcgatctcagctcactgcaacctccgcctcccgggttcaagcgattctcctgcctcagcctcccaagtagctgggattacaggcaggtgccaccacgcccggctaattttttgtatttttgtttgtttgttttgtttttttgagacagagtctcactgtgtcgccaggctggagtgcagtggcacgatcttggctcactgcaacctccacctcccaggttcaagcaattctcctgcctcagcctcccaagtaactgggactacaggcgtgtgccactatgcctgggtaatttttgtatttttagtagagacggggtgtcaccatgttggccaggatgatcttaatctcttgaccttgtgatccgcctgcctctgcctccgaaagtgctgggattacaggcgtgagccgctgcgcccggccaattttttgtatttttagtagagatggagtttcaccgtgttagccaggatgttcttgatctgacctcgtgatccgcccgcctcggcctcccaaagtgttgggactacaggcgtgagccaccacgcctggcctagtttcctttttcctttgagatacagtcttgctctgtcactcaagcctggagagcagtggtgcaaccatggctcactgcagttttgacctccaaggcacaagcgatcctcccacctcagcctcctgagtagctggaaccataggtgcctgtcaccatacttggctaatttttaaattttttgtagacacaggtttctatgttgcccaggcgcatctcaaactcctggactcaagcaattctcccatttcaacgtcccaaagtgttgggattacaggtgtgagccaccacacgcagcttatttcagtttcttacacaagcatctgaactatagacacataatggataagtatctgtcagacaatcaaaaatttcttctcagtgatgtggtg

SEQ ID NO: 343842 - DNA, 1000 bp, Homo Sapiens
tttttttttttttttttttttttttttttgaccaaaaaaattttttaattatatttttatatcaaaaaaatatatactttaaatagcaaataatatgaactttaaaaaatgctgtggcctcattaaactttggtaatagcttttctttttacttcagaaatccaaacattagagaattcaccaaagtaatcctctttagaagggcatcttgaattatattatccatccgtatttatggagattggtaaagtagttgaaccgttgacttggtgatctgctcttctccgtgactcttgtatgtatgtgtgcataaactgaaggccaaataattcccgttcctcttcttcatctgtgccttcactgggaggaagtgatactttcaatttcagtgggttgtctctgaagttgacaaacctcagatttgccatttcttccatgcatactggaatatcttgcagtttattgttgctgagaacaagagtacccagatttttcatattgctgattgtttgaggcaagcatgttatttcatttcgttgcagccataacgtatgtagattttgcattctttctatagtatcaggaagttgttcaagtttgttgcttcccatgtccagccactcaagggcaggcatgttcaacacagcaagagggattgtagtaaaatcgttcatactcagatcaaggtgagtaagttttagcagattgctgagctcttgtggaagatcacatatatctctgttaacagccagttctagtttctccaagctggcacaattacttagttccttggggacagtcttgattttgttgtagctgagaatcagttcctgaagtctagtaagcagtccaatccctggtggtatctctgaaattgtgtttcgagataaatctaacacaatgaggttctggaatcttccaatgaattcaggaattttcagcaaaccagttctatgaagttgccattcctgtagttgattcagtttcagcagagaagaag

SEQ ID NO: 343843 - DNA, 1000 bp, Homo Sapiens
cttcactatcatcaacctgttggatgaccagatcagcagacccatcttctacaatctccacataggatctattctcatcttcactcaagtgccatctggaatccttatctccatctgatggggacataagatgttgttcagcttccaagtcaatggggaggctgtctatgccaaattctgcaagacactcattacacagtctgtagcgcctggttccctcctgtaccacttgccctgttagatctgtcacatgacgtttacattttctgcagatgagtttacatgcctggtgaattgttcgaaaatggctacttagatggtctagcctgctaaatctttttccacaagcttgacatggatagggcctttctcctgtatgacaacgaaggtggcgctttaggtctgccttccgcttcaccacatgtgtgcagtacgggcacttgaatcgcatccgaggcagatcatctggaaagcttttggatgtgacatcagatccttgaccgtactgatagccaacaggagtagagtccatttcagcatcaatctgtgcttgttcttcagactgggaaacatggctggaagaatcagatgttcgtacttctcgtttgcttgacttataatgagtaacttcagaaggctgtgacaatctcaaatgtttggtctttttaatggactctttccttggttcatgcttggccaagggttgttgagtattcttctgggaggctggatgataattatacttattccaagattttccacttattatacctgttccttgctctgggcttaggtgagaacgtggagaactgcttccttcttgccagccaccactataaaaagaggaacgttctacaccattagaattggcatctttatctgagagactgaaatagcgatctttttctttctcactaatgtctaaggaagatttaataaaagtcttacatacacttatgacatcagtcatctgaaggaagctagcagccgacatcacttc

SEQ ID NO: 343844 - DNA, 1000 bp, Homo Sapiens
aaaaatgatgttttattattaaaatgatcttacaatgtcaacatcaatgttaataaaaatatataataggctgaattcatcaatgatagaataagttgtaattcacttggaggttccatctttcaaagtaagcctttcatagataaatgaaaatcctttattttgtagaattttaaagattgttaaaggctgggtcaaggcaaagccacctctattagaaggggaaagaaaagcaagatgaaacaaaatatgttatcatacatattgcgtgtgctatgagcatctttctactcctgccagattgaaaattctaggtttcaacattcttcaggatttaacaagtcaaaataaaagcagaattcaaatctagacagatgtaaaagacttcagtttcaaattgaagttgatatttttcctcttcatagtatttggactttaaaataaaaaaaaattaaatcttactctctactaaggtatttatgtattgagattatgggttcttttcatattgaattttaagagatgctgctttgctgtctgcatttttaggcttttaggagcaacaacatttatgtgcaatgaatcagtacagggttggtgacatgaccctttaaaagcaaagatacataaaaaagatttttttcaaaaaatattttaacacataggggcttgctttgtatatacatgctatagttaaagacaaaatgtggattaattattatatttgggaaatagatatttatttgcactaattagctgtgtgtgtgtatgagagagagagagaaaaaaaagagagagagaggttatttttcagcttaaataagactgtaacttcctgagaactctctctaattgggtaaaatactgattgagatattcagtctccttaccaggaattgtaagaaagtctactttgtacattcatgagaagctgaaatagattattgtgtaataaccgaatggaacatctgtttaaccagatgttttagttgagagaagt

SEQ ID NO: 343845 - DNA, 1000 bp, Homo Sapiens; identical to SEQ ID NO: 160729

SEQ ID NO: 343846 - DNA, 886 bp, Homo Sapiens
ttttttttttttttttgagtaactagtttggtttattctgcatcctgcatccccggatgaagcaaacttttgtctttttccatctggaactcttaaagtggtgagatcatcaaaaggattgactgaagcagcaagcagaaaagcaccttcattcacaagatgcaactggtgagtgctgcaggggccatgcaggcggctacagcttgcaaccatccagccaccgtgccagggtatcggagtactggcagtaccgggaccaggtgggccatgctcccatcccttcttttccttttacaatggtcttggcacatttaattgtcttctctaaattaggattcagtaaagcggaacatgacatatggcagcggttcctgccatggtcgccacaccagtcactgccacgcatctgaaagaggccaaagccagtgtagccctcacgtgtgttctcgtagatggccatggggttgaacttgctctcgaagtaggccaggcacacccagttctcaaggctatagccctcaaaataatccaggcctccatcgtggagtttcttagccactgtgcaacgccccaagatgtaagcaccacttggaaccaccaggtagccaaggagggagagaaccacggatgccttcatcttctccaggctcctggcaggtcagggcaacggtggccagatgagtgggtggagtcacagggacactggttctctgaagggaaagaagggcacagtccaccagcccttccaaaggctggcttttggtgcctttccaaggggaggggaagaacagccactgcagcagcttcgacgtgtgttgcagggaagttgctccacctacatttggttccttgggtttttcagatgctacttcattaatcatccact

SEQ ID NO: 343847 - DNA, 1000 bp, Homo Sapiens
ggctggagaatcaggtggttttatttaccctatattgctgcccacacaaaactaggcttttgttcacaagggaaaggggagaatggctgctggggaggagatgcggagtgcagggagggtggggaccaagaacccggcttggtcctggagagggcagtggcctgcccctctccaatccacagacatgtggggtgtctggttttctgtggccctcagaggcccacccacagactctttctcatttctctgtttaggatgagttatctgttggtctgttgcacgcccagctaagagaatgagattcatgagccctggccctgacagaggccacttcccccatcccggtgacctctcacgaggctctggacccagtcattaccgggctatgggattggggaaggggtgccagactccagcctcaggggccagcaaagggtcccctttgctgtacccctcaggctgtgctggcctaggggggtgcccctgctctctcatttcttccccagtaagtgatcatttatccttagggcagacccggcctgcccgtcccaccagcccacagtgcagcacacagctctgttgaccctttatttcctggtctatcctccttcccgaactcctccaggccagcagcccagggtgccagggtccagaagttgcttgcacagacagcagatgggcagcagacagacagagttgcatggaggctggcaggtggccaggaagcagagggtgtgatcatcccagccggagagagcttgaccagtgttcaccgcagggcccccgggcaggcttgggacttggccctaaatggactttgacagccttcagggctcccatgcaagtggcatggttgtggacagagagctgcatgtctctgggcctcagggggctgtctgtaaaatgaggctgtggtggcaccctgcacagggcaccataagggccacgtgaggatgtgcgagaagtgcaggtagtgcgggtgtgcaggaagggtgtgtgc

SEQ ID NO: 343848 - DNA, 1000 bp, Homo Sapiens
ctgtagaaaacatttaataatagggaggtgacagggaaaacaaagcaagggcagtgttggggcatcagaccagggcagggctggaactagggagaagcaaccagttaagaggcaggctactacaggtagcaaatggagagccctctcacccagccaactccaagagttcctcttgtcccttgtgctctaccccaaactttagccccagcacctgttcctcatctccagcaaagaacagcagggcaggacctgaactggtctcttttcaggggctgtcttgaagatggctgttttagcagacatgaggctgcccaaaggtttctacaagccacctgcgtggactttgggggttgttgaacacatgccctgataaccatgaattggagacctggatctaaacatgggctagctacccatcctggcatctttggctaatacccttagcttgggtgcccctatctgagaatgatactttgggctgttcaagatcctgtctgaggagcctcacatgggtttcctagttaagttgtaaagtcactctgccagagaaggttatcaccgcaaaaggcaggacctggtgggctgggctctccatacacttccagctctgactgcctggtataaatgttcctcttgagatggatgtgtgttgaggtggatagtgagagcactgggcggtggctagggatagggcaggcaggatttgctcttggtcacactggagggatgcccagaccacacccgggcactagagcagttctgggatacagtgtctgaatcctcagtggtcactgctctcttggccctgactgtgcaagggaatcacgaacacagagacgtcatcgtaggacacctgcccttcctctgtgagactgtcttcctttccctgtgtgctgtgtatcagcatctgggccagctttgggaacctgtgaagaccatcctgcagatagacttcaggggcagagcaaaggggcaaggccagaccttaggagaactcact

SEQ ID NO: 343849 - DNA, 1000 bp, Homo Sapiens
gaaggcaatgagttcttctcagctggtttattctccactgaagctcaatataggattatattttctttacttacaggaagtggtcactgctctgttttccaataaccctcaaaacagaacaacaatgcttacgcgaaataacacaagccttaactattatactttgcaggctttaccatttcaatacacttctagtccaactgctttcccaactctaaagttctgtgagtgaactatgaatatttttaaatattttccagattcatcagggaggctgcttttcttctctgcactgtaatcacactgagctgctgggaagctgaagcagctctctcttctgcctgacttagacgcctttgaagtctgttggctttttcttgatgctctagaattagcttttcattctcagctaccttttcatttgccatttccagctgagaaagcagctcttgggtatgaagtttctgtcgactcagctcactctttagattattgattctaatttctgcactttcagtaagtttcttcgtttcttctttccacctattggctgccttctgttgagtcgctaggagatgcctcagttcaacaatggaatttctattactgtcttccatctctctcaattgaacttcaaatccacgttcctttattgaaaattcatgttccattgtactgatctttactttggcttttttttgagcctccagggcaatcttccttaaactctcagtctctttccgtaactgtttattttcttgctgaagttttagcctttgttcactgacaagcccacagttctctctctcagactccaatacattttgaagtttctgaatcatttcttggtaacgtgatatttcttctgaggagtcagtttcaagttgttttattctattttctgctctcgtaagtcttagctgaagatcatcttttgaacgctctgaaaccaggaatctttggtgcatttcttccagttttctgtaatcacactcatttc

SEQ ID NO: 343850 - DNA, 845 bp, Homo Sapiens
ttttttttttttttttccactgaaattaagagattttctcggtctctgggcgggccgtgggaggcttcctgaggtgggggccgggccaggatggctgcagcgcagcgacggccggggccgggagcgggtcctgggcggcccaggagaagcagttcccgccggcgctgctgagtttcttcatctacaatccgcgcttcaggtgtcatttagatggaagaggtcttctcaaaccggctggcctttccctcaggagaagctgaatttccttagatgtattttcttgacacttcagtttacaaagacgcttcacttcatactccctttcgagtttgatagattctgcagaagggagcagtccatctttaatggtggtacattttgtgagctgcacagaaccaccaaatgaaatttcttccaagaaaggcaacttgatattggctaggtttgtgtaccaggtctttgcaagcaatgcaatatcccaaggttcctgtacattataacaactgccccgcaaaatggttttcactgtgttctttcttggcactccatacgccatggtgagttattacggtatgatttcgttacataggtgcctgatggaatgtcacagataactctgttcactttacctgggccccaccctgcctccgactcgccaggaatgcgctgtgtgcgcggggcttccagggtggcgggtccccgcgagccggcgccggcggcctggttacccgggctccaggggctcggagggtcgcggccggggtactgaggtaagagcgcgctgcgctaagcgcacatggccgcgcacacgcctcggggccgcgccgcaggcacacgcctccgct

SEQ ID NO: 343851 - DNA, 1000 bp, Homo Sapiens
gtttcaaatcttttattattagaaaagtgctgccagaaacatccttgccatgcttctgtatgtactggtgctagtgtttctatcagataaatttttagacatgaagtgaattactaggcataggaaatataatttacacttttgatagatactgagtttttgctcatttgctacatgaagcagaggcagagtattctgtgtggggtttgggacaggaacactgacccctgaagtcgagcctgggggtctaacatagtggtcatttgtccagcctgttttatggaaggaactggactctgagctttggggaatttcctgcaagataaatgtatatcccacctatactggtaacaggtaagttatgcacaaagatgaaaagacaaagccctagctagatcagctcttgctctcagcactacaatggccagcggtaattctttcagttaaaatgacaattaatacagtttcattgaagcttcaaacagagcagccagatcctcttctgactggggacggggtgcaagcttggtgaccctttcctggggcagcgttcctttcactagtgcggggatatcagctttggagtaaccaacagctgctaggccatcatcaacatccagatcgaataagaatttccggagcgtgtctgccaacaccagccctgcatcttggatcctggcagtgcgggtgtcggctcccagtatttctgccatctccaggtgtcgctctggaaacatctgggcggtgaaagtgaacaccgctggggacgtgagcaccacagaaaggccatggggcaccagtgggtgatccacattgtaatcctttgctttatacatcttcactaaacctgaaattgggtaagacattccatggcacagatgaacaccagcatttccaaagccgatgccagcaaaagcacttgccaagtgcatatgagaccttgcttcaagatcatcgggatttctgacagccctcttcagatacttagccacgatccgca

SEQ ID NO: 343852 - DNA, 1000 bp, Homo Sapiens
tttttttttttttttacaaataagttttaccttttattgtattccattatacaattttacatagtaccattattttaagcaataattaagcaaattgaactactgtttttgagctctacttttcagcatatagatttacctaaaaaagtacaaaccaagcacagtggtgcaattttccaggcactttcaagttgcttatttacaaatatgtaagcaccctgttggaacacatgaaaattttggtgtcgagaagaaacactccatgtatatcaaatctttaaattttaacatttgcacagctccaaatattcctgagaaaggtcagtctcattgtcacgtacatctgcatttcctcacacttcagcgtatcttggggaaccataacctcggtcacttgatgtaccactaattgcacaaaatacatgtaatgtgttgctcatccagggagaatgcattgtgtcttcttgtaatatctgctcatggataatgtcagataattcttttaccatgtctctgaaatttgactttagcccttcatggtactcaacttgatcttctttaattagccgctcatttagttcaagtgcaatgctgcatgcttgtataaatttcctaaacatgtctttcaactcactcactttcttaggtggatacttgctagcttggctgtcatttaagaaagctcttgcatatgctaatggaccagcattgacctgcacagaaacacagccctgcaatttaagttggagctgaatcatgtccacgtcagtagaggagcaaagcttttgcagctctgcagttttatcttttatttcatcagtggcaacatcaattggttttaaattaatctgctgttcacagttaataggaatcctcttcttcacgtaaggaaacgagtttgaagttgtcaagattgtacggcgtttgcactgttcttctatacagccctgttttttgcctgataaagtgtaaggggcctcaaaaacaaatctgctgatat

SEQ ID NO: 343853 - DNA, 1000 bp, Homo Sapiens
catccaattagtcttttcattattgctggttttgaaaatggccaacaatattcattaggtactgtgccattaacattgcattcaaaaaaagagaacatgggaaaccaaatccttgctctcctactctgctgatatgctctggtattggccagagtatggtagtacaaaaagagtcttgttgttatataaaaagcaataaacacatcaatagaataatgttcatgggcagccaagatgaagaagattccaaagaggttgagaacccaggataaagtgtgcaagaaattccagcttcttggtgtatctaggaaaaggacagaaagatcattttaaagctacattccttccaatgcttctcagtcacgtttctcaggtcaggctgttttgccattcttcacaggatctgacacccttcccacagccttcactgcagctagttacctaatacgcatagaagcactaaaaagatacttacattcggtgacaaagaaattcagcatagttaggacgactgtgtggccactaaacatgtaatctccacatgtgtgaacgccagtcagggtcataccaaagccactccaaatggcaaaggctcgatgtaatttctcccatacactgccatatatctttccagtacactgcaggtgttgtcctggcacggagagggaggtcacaaacatggtaaagcagcgaagcaagaatacagttcccatcagactacagagccttcgcagaagtattgacctgtgcttgtgaagaagaagaaccaggagccaaatatagcacagaatcatgccacatacttccgtcatggcaaaggcccatgggattctaggaacgctgtctaagaatatatctgggagtggtggataggtctgcatgtcaggcactcgctcatggactataaccataatgaaagatgtaaatccaaatactataaaaacatatatacaactcagtatagtcttccagtattctgggtccaatcttcgaacagaat

SEQ ID NO: 343854 - DNA, 1000 bp, Homo Sapiens
gaatatttactagcttttattttcaaaaatataaactcactgtaggaattaagcacattcctcttgtggaccatttggattaaatcctttccgtgggcagagatcactttttatatttttcttgttcccccaataagccttccataataccaatcataaaatacacactcagatatttcatggaatatgtaacaaaccgaacacactggacatacttgagataaaataaaaatctaaactaaaagtgatatgtattaatttctttccttattttcatgtagcatcctgttaagatgcccttagaagctcttcccatgctttaattgcatgtttgaattcagcctatatttgttccatgaacgaaacaatatattgcaacttgtaaaatgaaaaaggtaaaataaaaataacgaaatattgtaaaatgaaaaaggtaaaataaaaataacaaaatattgtaaaatgaagaaggctctgacaaaattttaagaactcatcagtataaggatgcttttgtcattctttgagaaatgcagctcaatattatatttagtttatttggaatagctatgtccttaactgacagtcaatattcaaacatcaccaaattattaaatttttttaattaaaaaattttttaaaattatatttgcatatatgaaggtaagtaagacactggacaaattatagagtctcaggcttatgtggaattatgactgctctcaacaattactgaaatcccctttcaaagaaaatcttcacataaacctatgtttgactatgtaatagaatgaagacagccacagatctggcattctcaaaacatcacacaagtactgcatgtaatgctgcaaaataactgttttcctctaaaatttcactaaacaacctcaggcagtacaataaaacaaaacattaagacctcccagtggtcatcctaagaattagacagatttctttgattttttcttctctgcttcttccttttccttttctattt

SEQ ID NO: 343855 - DNA, 1000 bp, Homo Sapiens
tttttttttttttttttcttttttttttttttttttttgcctttgacaagttttttattgtgaaatattggatctagaaaaaagtacaaaatgtcaacagtcagatgtgtacaagtacagtatttcaatagtctatacatgtgaacagcttaacaggttcactgcagaatgcatatttagaccaatataatctaaaaaggactgcaatattcacaggctattaatacataaataacttgagtcaaaatgacccttactggtaaatgctaattaatagtggaaaacaggctaaaagcacaatacaccacaccatagtatctccttacaggtccacatttaaagaatatcagtttattatgtcaaaacactacagagatccaggactgggactgaattactaatttatacaattgcaaaaaaatttaagttataaaataaggtcatggaataaagaagggtatttaattaggactaaatactgtgaagcccatgaaagggttttagccttggaatttacaaagctaaattattagactgttaatgttagctaacactaaaactgaattaccttccattttaatgttagctaatattaatattcaactttttaattttgatgttagctaaggggaaggacgaggacaactttcttttgtagtttctccaacaaggtgtaagaactatcaaaaagtaaaaccataatgaccactgtggactgacaaatggctatgaaacaagaatataaaacattacaaatttcaaagaaaggtaataactatcttatgaatttagcaaatcctgcaaacgttaaaatccatgttaaggcattatctatcatggttgagagtactaaatttaagaaaattattacatgaagatcccataaaaataaactggtttagtttacaagattctaactgaatctttttgtatcacttgaaaattaccctatattatgctttcaaaatggacaaagaattatttggtattcactttataa

SEQ ID NO: 343856 - DNA, 1000 bp, Homo Sapiens
acgccagattcatgatttatgatcagtatccaaaactccaactacaaacaatgcaaagtagtgctcctcagtattatttttgcaattgttagtaatgttaagcatcaaggaaaataaaacacatcattgcacattacagccgcaaaaaacaaaaaaaaaaaaacaaacggctaaactttgacactagagaactgaataatttttgatgctatatcacaaatagcttcaatgtttatcttatgtgaaaggtctttacacatgtatgacattttccttgggtgatacttcaggtcaaatgccgagttatggcacgaagagcataaagaagttcagcttgcattcgtgcttccattaaaagtagattgacatgaactttttctgagtgtttgaactgccgccagtaactatcatacatgcgttttgtagttctctcaggatagcaggtcactgtcttaatgtaaaccttcaggcttctttcaagtaattgattaacttctccataatcatagtcatcatacctgattccaaacatacagtgaacatagttaaataaagctctgcgcagcatggttgtgtcaacatcctcatgggtggccatagtgttatatgtgagattgtagaccatccgaaacttttcatcaagaagatgtccaatgtcagaataaagtctgttcaccagggagaacccatgattttcccaggtatagtcctgagctcggaatgttggcaaatgctcttctcctcgtctggcaaagtcttcatacccaaaaccagggtcttcaatatatcgagagacatcagatgttataatcatgtcatcctcaaaatctgaatgaggaaatgaatgaaaagtatctccagagaccacaaaaagactttctttcttctccttttcaaaacgagtgctcatttcttcttgagacgcctcttcatcttccctttcttcttgaagtcttttcatcctttccattaaggcctctagctcacttagagaatccac

SEQ ID NO: 343857 - DNA, 1000 bp, Homo Sapiens
ggaatcactacaactttattttggtagacgggctcaagacaggggtgggctgcacacatggaccctcctttggacacaggtgttgggggtgagcttggtgggtaaaggcagatgcatcacgatgttcctgctctgcagcttagcggtgccaaggggccctcccatgtacacaggacacgagtacacagtcaggtcggctggggctggcaggtcactggtgcccggggcctgtgtgctgatgctgacgggaggcagagggctgggttggctggaaggactgtcctgcaaggctccagctattgggtcccactccgcatgtaggacctgtagcccgatcagcagcagccctctctctggaaccgtgggatttggaccattctccaccctgaagtgcagagggttgctgttcatctccagacgtttatactggagctgactggagaccgagcctcggctaccagggaaattcgagctgggcacattctggtccagggcagcttccccacgcaatgccagcagcaggcggcgcgggtggcgaaaggctgacaggtggaagacgcgctctggtacatcactgctcgcgtccgcgcccacgcccaagtaacgaaccaacagttgcccacggcgcgacaactgtcgcagccagtgccagggcggctgcggaccggccggcgcatgaggtcgccaaggcaagggtaggcggccagtccagagagcgtgggccaccgcagcacagcggcgggaggggcacgggggtgcgcccttcagctgctgcaacaggcaatcaaggtcgcgttgtagcgtgcccaccaactggctcagttctagagcctcggtctctaagacgccctccagaggccgccgtgcattcggccccagcactgaccacggggcgtcggactcgtcttggcgaatcacgtgggtcagcagatcctgcagtgactccagcctccggttgacttgcactaggcgttgccgcagtcgcctttccgcaagctgg

SEQ ID NO: 343858 - DNA, 1000 bp, Homo Sapiens
gaccttagcctattttcataaggctcattttgaatttattcggtcatatacattaaaaatagcagagacaagttacttgggaatcctaaagaagaaagagggatcttaataagtatgaaatcctgtgacggctgggcgcggtcgctcagggctgtaatcccagcactttgggaggctgaggcgggtggatcccgaggtcaggagttcgagaccagtttggccaacacagtgaaatcccatctctactgtctcgtcaaatgcaatgtccatatcaaattttgaaagtgagcttctcaaaaccagccagtgttgaaaaagtattttgagatcttcttctcttgctccttctcttctaaaatatttaagggattatagtcttagctactgcaggccttagctgaggtggcaggatcccttgagcccaggagttcgaggctgcagtgagctatgaccatatcgctgcactccagcctggacaacagagtgagacactgcctcaatcattagatggaagtggatcatcgtaaaggtcgtcatcctcatcatcttcatgttgagtaggccaaggaggaggaggaaaataaggtatcagtcttgctgtctcaggagtggcagaagtggaagaaaatttgtgtgtaagagaagccacgcgtgcaacccgaaagtggacttccgggtcacggcggagccggctctcacgtggaggcggggaagtttggcccaccggaaagtagacctgggccctgggatcccagagaagaaaaagaagaagaaagtggtcaaagaaccagggactcaatactcaattttaaacaatgatgattactttgcccatgtttctcctataaaagccacagccccctctaagagtgtggtccacgggcaggcacctgagatgcctctagtgaagaaaaagaagaaagagaagggtgtcagcaccctttgcgaggggcacgtagaacctgagaccacgctgcgtgccagacggacagagaagtca

SEQ ID NO: 343859 - DNA, 1000 bp, Homo Sapiens
ttttttttttttttttgctcaccagaaacttgctttaatgtctaaatgttctaaagatgagaggggggagggaaatgcataaaaagcagtgcctcatggaaaacacacacatgtgcatgcacacacacccaaagtcctttgtgctttaaacattcctggtaacttcactgaccatcctggccggaatcttctgaaatggttaagccaagaatttcagtcgcgaatatttctgcagtgatttcgtctggaagttcttcttcaaggcaaatttctgaacctttgacggagcaggttgcaggctcggatttccatccctcgggattcaggccaaacagtgaagcaaagcaatccaacatctcctcctccgtcatatgctcacctttagtaacgagcagtctcaggaagtcctctcttcgaatggcctttttccctttggagttggtataaccgagcacctcaaagctcttgtggatgccactcatggtgttaccaaaaggtggcttgtggttaaggtacacttttaggaaatctggtaagttgatcttgtcgattagctttccagtgtccacatattcaccaaatttgatttcgttaaatatatcatcaatcttctcttcagatgggtaaaagccaattgctctcatgacaaaaggaagctctgacaggcaaatgtgttctgacacctttctggtctccattgtgtcgatgccttgactgcggagctgagaatagtagaagtagtcttctagctccctgtagaattttccttcccggccaccagacagcagaccatagaatggggtcaagtcttcacccccaagagaaaccgctgcctccaggacacttaaggtgattttccactgcaccaccgagcgatcgtgccctcccgcagtgaaggcgtagcagccatcataggaaacggccatgccggccaccccgttcgggtggcaaacaatagcagatgtcttatgtggattgccgtcaactggtaagatctgaa

SEQ ID NO: 343860 - DNA, 1000 bp, Homo Sapiens
cgtatggctaatggtgacacactttattaatttaaaaacacgcccttcccacatagtgcgtgaggcatgtgcacattttcctagaaggacatgaatagtgatgtggaggtacggtggaggtcaggcatctacagggtcattcgaggaggaacagattcaagctttcggacgatcagtgttttgtaaatagcagcatcatcagatctaagacaacattggacctggcagggccttttctttgggtggcattaattactccagattcagaccaggccatcctctcccggcccaggatctgcctctccctcctctgtccccacacctagacatgaaagccataacccttgggcccctcagagggaaaacacaaggggtgcgaggggtgggggggcggcgatggggggcattgttgagcagtcctctcacggctgggagcctctgctgcttccagttaactgcctttctggaaagcgattctattacatgatggaggcagcggaatgaaacattgaattacacggcacgagatccaagctagttgttctcatccccagggcatcagagtttaaggagtttaatttgaggctacttcttttaaaaacaagatgtaggttgtgccattaaaaaaatgatggttgaaaacatgaaagctgaaagttcagacatcctaaaacttgaagcaaggacaatgctggtggaatcttctccctcggccctcctaagcgtcgaaacccgctttcaccgaacgcttcccacagcaacgccctgccctggctttgccttctcgcctcctcaaagcagactgctttctacccacaagaggtgggaaacaccgcgttccccattgtcgtaaggaatccacaggcatgcaacaatttcagtattcagtggaggttctcccaggcaaattccactaggagaggacaaggaagactgcacgtcctcatgtgacatggatgacatggatggggcgaggccaccattaccatgatggcgcggc

SEQ ID NO: 343861 - DNA, 1000 bp, Homo Sapiens; identical to SEQ ID NO: 160733

SEQ ID NO: 343862 - DNA, 1000 bp, Homo Sapiens
catgtaaacagtagtgtttattcagaaagcataaaccccagcgctcttggaaggtttttctgagatggaccagaggctccaatcagaggcttcgtgtgtaggaagcaattacagcctaaaggagcaggtgagagccagggaaggatcacgtagggatctgagacttgaaatggcctcaggccagacagcacaaggcagcccggacaagacaccctcaacccacatgcaccaaacccagcctcagcacctagcccaccccgatgggacgggggagcagtggcttgttgctgctcatgacctcctggggaaggagggagctgagatcaaaatgaaataaggaacctggtagtcgcttccgcattcatacaagaaacctcatgtctgagggcaagacaggcagggactgccccctgagagccctgagatcgacatttctgaagccctgccacctgccatccctcgtagggattcaagtccaaatagccagagcctctggcagaggagatgggggaaactgaggtagccctagggtcgtcctctcaagtcaagctgcctggagactgtagcagctacggttgaggctgctcaggaagcacagaccgccccagacagcagctgaagctgaagactccagggccaggccatcgggtcaggcgttcaggaacgcgaaagctgacggctctgagccaggaggctctttggctgctgtcctctgggacgatgtttggggggcgcggggagcatcaggacaggactctcccgcagcagccccagcccccaccaggcggggacaggccaccagctccatgccagcaaacaaggagtcgcggctccacgcacagctgctggggcctctctttgggctgtccgtgccccctgggatccgttcaggtctccaccgcctgctttctgccagtctggcctcggcctcgctggggtctccgggggctggaatgggggaggcatctgggggtggggtgggcacagggctggacggcat

SEQ ID NO: 343863 - DNA, 1000 bp, Homo Sapiens
agaaagtgactctgctaagtttatttcaaacaagggacacttgaagttggtttttcacccctatgacaaagaacacacgtgagctcacaggccctctatgcttctccccttcaggaacagaagacctgctctagaactcattttaaggggctgatctgaggttcttcccataagcagtgactacagctaatcccattaaatgcttcccagaaagcacttctaaaactggatctccaatttagactttttccccgatgggtccaaaggaaggatgagtggaaacatgaagactattctttctcctgaggcagaatcaagaatttaagccattgtgcaatccaatccaagatatcctccaagtccaaagccatgtccagattctctcctctccaatccaagaaaaaaggagattaacaggggtatcctcttagacacaattcctcttgatggagctgagtatttttgtgactgggctgggagatagaaatggggaaagagagtttggttactggctattgaaagggcttctttcctaagtgggatctttgatgtttgtcaaggctcgagctccagctgaaacttttcccacagtgcgaacatttataaggtttctctccagtgtgaaccctctgatgtctattaaagtttgatctctgaatgaaacttttctcacagataggacatttatagggtttctctcctgtgtggattttctcgtggtggcgcaatcctgagaagtcactaaagcctttcccacagtaatcacatttacagggcttctctcccgtgtgagttctctgatgcttcacaaagtctgaactccgcagaaaggcttttttgcagatggtgcactgaaagtatgtctctccggtgtgagttctttggtgaaaaataagctgagaattcctataaaaggtcttcccacactccctgcaggtggggagcttctgggccatgggggctcttggctgccccttctgggaggtctctctcttctcct

SEQ ID NO: 343864 - DNA, 1000 bp, Homo Sapiens
tttttttttttttttttttttttttttttttttttttttttttgaacttttaaattatgtttttattaactattgagtagaaacaatatttatagaatacatataaggtataaagaacaaaagtatgaacatctgtgaaccccttacacggctaaagaatattaacaataagcctctcctcagaggtaaaacaccatatcaaggtttacattgaaccttgtgttgctattctttatagtgttttgcggggagggggttggggggttgttctggttgtttttagcccactgcagccttcacctcctgggctccagtgatcctctcacctcagcctcccagtagctgggactacaggcacacaccaccaaacccagctaatttttaaattttatttcattttattttattttttgtagagccaggatcttgctatgttgccaaggcttgtctctaacccctgggctcaagtgattctcctgccttggcctctggaagtgctgagattacgggtgtgagccaccatgctggcttgctgtttgttcatgctgtaaattccctttgttgatttccaaaagtgtttttatacttctaagttgctgagagtccttattatgaatggatgttgaactttatcaaaagctttttcctctattcagatgatcatgtgatttttctcttttgaactcttaatctgtggtgaattacactgattaatttttttttcttggagacagggtctcaaactggcacccaggctagagtgcggtgatgcagtcacagctcagtgcagactcaaacttctggcctgaaggatctttcctccttcagcctccagaaagtctgggattacaggagtgagccacctcactgggcctgatgattgattttttaacgccaaaatcaacgttgaattcctgacttgaaccaccttggtcgtggtgtattatcacttttacaaattgttggattttgtttgctaaaattttgtttagaatttttc

SEQ ID NO: 343865 - DNA, 1000 bp, Homo Sapiens
ttttttttttttttttttttgctttttttcatgttttattttaggttcaaggagtatgtgtacatgggtcaactgcatgttgcaggagtttggtgtacagttaattttgtccccaggtaatcagcatagtacccaacaggcagttattcaatcttcatcctcttcccaacctccacccataagcccgtgtctactgttcccttctttgagtccatgtgtaatcaatgtttagctcccacttataagtgagaacatgggatatttcattttctgttcctgcattaattcacttaggataagagcctcagctccatctatgttgctgtaaaggacacagtcttgttcttttttatggctgcatagtattccatggtgtatatgtaccaaattttctttatctggtctactgctgatgggcatttacgttgattccacatctttgctattgagaatagtgctgcaatgaacatacaagtgtttgtctttatggtggaatgattatattcctttaggtatacacccagtaatgggatgctgggttgaatgctatgtgcttttatgtctttgagaaatcgctgcagtgctttccacaatggctgaattaatttacattcccaccagcagtgtataagtatttgcttttctctgcagcctcactagcatctatgttttgattttttaataatacccattctgataatacccattcagacaggtctgagatggtatctcattgtggctttgattgcatttccttaatgattagcgatattaaccatttttttcatatgcttattgccacatgtatgtattcttttgagaaaggtctattcatggcctttgcccagtttttaatggggttgtttttctcattgttgatttgtttgagttctttatagattctggattagatctttgtcagatgcagtttgtaaacattttctcccattctgtagtctgcaaatagcttcttttgctgtgcagaagttatttagtttaa

SEQ ID NO: 343866 - DNA, 1000 bp, Homo Sapiens
tttttttttttttttttttaataatacactgattatatccactgggtttttttttttttaacagtatgaatttcctcttatagcaataatggatgagatttaaatgacagctttctcacattcattatggcatacagtgccccccaaccaagtcatcttggatgtgttgataaaagatttctcaatattcattatactcataagtactctcctctcatgcaaattctctaaaataacactagtgaaaatggtagctaatatttgtggtatgctacgttcaaggcaccattctaagagcttttacatgtaataacttacataatacttccaagaatcttacaataaaggtaatatacttaggtctatcttaaaatgattaaaccaaggtagaggttaagtatcatgatacatataacaaaaagatcaactagtagagctaagataacgttgaaaaagatatttgttttcaatatggctaaagggcttcctacatttactatattaaaactattctccaatttgctaatgtttaataggtttccagtaatgatgtttttctatatgaatgacactaccattttctctcacataaattatctgatgctgtgctttatgaggcaaatgtgcgcccatattcacatttgtgagaattctttgctgctaacaaccagagaacctcttcatagtgatctcaaataatcagacaattcacatgtaaacttgtgagccatgactaaagtcaatcccacattccttatattcaaaagatttctcactgatatgaattctctgatgttgagttagctgtgaaccacgagtaaaggccttcccacattccttacattgatatggtttctcaccagtatgaattctctgatgccgagaaagatgtgaactctgagtaaaggcctttctacattctctgcattcatagggcttctcaccagtatggattctctgatgtagagtaagctgagagccatgactaaaggccttgcca

SEQ ID NO: 343867 - DNA, 1000 bp, Homo Sapiens
gagaattactatttactttattaacttacggatttattatataaatatatattcacctagcaacatatctctgccgtctctcctgctctcataatgaagacatagccgattctctgcccgggccccttgctgatgctcctccgggtctgcgtcgggcgtgggtctctggggaccctccagaggtggaggtgggctgatggcctggctgcctggtggttgatggttttgctccccctaccttttttttttgagtttattctgattgattttttttcttggtttctggataaaccaccctctggggacaggataataaaacatgtaatatttttaagaaggattcctgcagcatcatctttttttatttctcctgtgtctgtcctccaccttctaggagagccagggcagagctagcactgtcttaagctgtcaacgtggactagctcgtgtcatctgctcgagaagggctgtcgctgttcttgtttctgagtgaggagtacgcaggccagagtggtcacccggccgtgagcagtgagggccagagactagccccagacaggtggatgccagagagagtggcacccatgccaggcaaggcctagggaggtggtcttgctcagcaaccctgccctgagcagcaggtgcgcccatccggagatcctaggagaaggtggccacctccatccactgtctgtgggtcaggcagatgaccccctcacccccatccaggtgctggctgcagtggcagaagatgcaggtgaggtgggccacacaggacacgaaccgctcgaagtccacacgcagacggctatcccggtagcggctggtgagggtctgggtcagctggttgttcaggtggaagcctgctgcattcagtgccagcctcagctcgtaggagttcatggttccagaggtgtcctcatcgaacttgttaaatatggcctgccactccaggaggtagccccagagctgctggaagtggtgtaaggccaggctttgc

SEQ ID NO: 343868 - DNA, 1000 bp, Homo Sapiens; identical to SEQ ID NO: 160736

SEQ ID NO: 343869 - DNA, 1000 bp, Homo Sapiens; identical to SEQ ID NO: 160737

SEQ ID NO: 343870 - DNA, 1000 bp, Homo Sapiens
cagctttcactatagaaacctttttgcaaaataccaaaaccttagaattaggctatgcgcaactaaaaaggaaacacagataaagagacctcaaagaggttacccatgaatacttccccaaaacaagtggttctaactcagaccatgtccaagttcagttaagtccaaaacacaagtagcagtatgggtctcttcttaaattctttgtcaagctcctctcggttgaactgggcatttgcactctcgaaatcaaagtcaccctcaaatttgattgtgttttccttaacgttagttggacggttttgccctctggagcgattccttgttcgcctgtttcctgatcgcctcctctgaggtcttctgttctcgtcattcacctgcccctgagcttgcacagctgccggctggactacatcgctggccgtcttgctgctcggctgggcctgacgaccgttgagctgcgtccctgtggtgcccttgccaggtaacagctttttagcattcaggttgtcagcagaaccagtctgcacagcctgctccaccatggggctcttgccgactgggatggatggaaaaccagctcctctctccatctcctccctttccaaggttccaggacctgtagggactctaaacaggacaatgtgggactgggtgtaagtgaacagagatctgaaacagaaaaggcaccccttggcagtgagctgctgtggctctgaggacaagtcaagctctgaaacgggctgtggagatggagaagagctagggctggaagcagcggctgaggctggagggcttaccaacttctctagacccagggaggcggcatactgctggctgagcagggagctggccgccagcgggccgtagggcgccatccctcggaaagggctgtaaggcacgtgcggctggaagggcgaggcggaggcagaacccagggaagactgaacaatggcgggatcctgcgggagtgtgtgctgagctttcggaggttcacaca

SEQ ID NO: 343871 - DNA, 1000 bp, Homo Sapiens
ttttttttttttttttttttttttgagacggagttttgctcttgttgcccaggctggagtacaatggcatgacctcagctcagtgcagcctccgcctccaggcttcaagcgattctccttcctcagcctcccaggtagctgggatcacaggtgcccaccaccatgcctggctaactttttgcatttttagtagagatggggtctcaccatattggccaggctggttgcgaactcctgacctcaggtgattgacccgccttggcctcccaaagtgctgggattacaggtgtgagccactgcgcccggctgcttggacactttttttaaccacttgttaaagaaatacattaaaatgaaaatgttttgatgccattcaaatactgttacttaaaaactctggtttttaagaaggatataatataataccagagaaatctgctttgaatcttggaaggctttttcaccctaaagcaactgccttttgaataagcatcataaaaaaatgcagtgtaagatgattcacaaatagtgcaaaataaggcaatagtcttccatcattttgtcagggtttcctaataaggttaagttctctttcaacaccccccttagtcaaaggcagtttttggtttctttggtaatacgtacaaattgcttcattccacatctgtcatttctagtccatcactttctttgacatataccactgaacccaaggctttcccagaaagagatcctgtgccagtcccttcaatccttgtaaagttttcttgatttgtgtcttctaatcttattttcttggtgttttgaaataactgagtcgctggttccaacctgcttttttcagtccctcgtattaagtgatcatccacttttgaatccatatgtatagcagatacctgagtagcagatttactaagtgaaaatcccattaggatagctgaacaaatgtgaaagtaatttgcaggtacctttttaagtagtggaagtgtttcttcaactt

SEQ ID NO: 343872 - DNA, 1000 bp, Homo Sapiens
tctattccatttgtaatgccatcaattttatttttgaaatgcaagggtgctacttcccccaggtaggtcaacagatgagtaacaagcaaaaaaaaaacctctaggaaaagcaaaaagaggcagtcatgctacattcaagcatgctcatctgacagtgataataatacattgtgtatgcaccattctaattcccagtagaaaacttgttgctggtttataagatgcagttaaacatagacacttccagcctgggcaacatggcaaaaccccgtctctacaaaaaacacaaaaattagccaggcatagtggcacacacctgcagtcccagctactcgggaggctgaggcatgagaatcgcttgagcccaggaggtggaggctgcagtgagccaagactgcaccactacactccagcctgggtgacagagcgagaccccgtctcaaaacaaacaaacaaacaaaaacaaacaacacagacactccctgaaacccagcagaccacaatcttaaaggaatttctgcctttgaatagaggcctgcctccctcttccctcgtacatgcccggatgctagctctacccccggcccagagcagtcatggcaaacaacaacaacgacaataataataggcagcttccatccactgagcatttgttttgtgccaggccactgctaagggctttccacaaattatcacatttgattttcacaaccctttgaggaggctgtgactattctccccatctcataaatggagaagctgagcgaacaagcatcacagccaggctgtgagtccaggtctgcctgctcctgacagcaggctcccaggctgggacccactccctacctgcagattgctggaataatccctggatgcctgcagccagaggtgaccttagaactctcctctccataaacactcattaaacaccaactatgtacagggtcccagcctaggaaacctggttttaaggacccagaaccaagtctcagggaagtga

SEQ ID NO: 343873 - DNA, 1000 bp, Homo Sapiens
ctagatataacttttattcagataatttacaaaaattagaacatgattttaaaggtggtatatctcttgtggagggaaatcttgctgaaattacagcttcttaggttaacagagaatgtgtcctgtttgtgcacctctctaaatgaaagaattaaggagaattatttcattattcatagtttggtttgtgggggtgaaagagggaatgagaaaaatcctaagacatccttggaacaatttaacacaaaatatacacatatatagatcctgagatgttacaacaaattaacaattatatagatcaacatgatccaaatagttttcaagacaccgttatggtgggtaaacagccattttacggcatgtgctccatggatgtccacatcatgccaggaaaaccatactctttgtctccaaatttgaaagctagtcatccagagcaggtggccagtcaacatctacagactcaacatccagctccagaatgtctgcagtcacattcatcagggacccaatgtttggcttggttctcccgaagtctccatgtacaaactctttaatgtaggtgccagcctgagttttcaagtggaggcggaagtggtgctcatccacgtactgtgtctccatgaagtgaatgacgcgagctcgcacagccaggggccttcggtgaaggacgcgcaaaggtgttttctggtcgatctttaagtcctttatgtcatttaggaattcaatgtctttcttctgtatcgctttatttgtccaaattaaggcactgtaggtctttgtcttttcttcttcaccttctttcatatgtcctattgcctctcttgtgacaagctgcaagtcacgtacttggattttgttagatgagttattaattttctgctgaagttccttaatttcttgtgaagtgaaatgtactctatgaggattcaccagctcaattgcaaagggccttccatttcctaatgttctcacatctacatcttctcttccagag

SEQ ID NO: 343874 - DNA, 1000 bp, Homo Sapiens; identical to SEQ ID NO: 160738

SEQ ID NO: 343875 - DNA, 1000 bp, Homo Sapiens
ttttttttttttttttttgagacagggtctcgccaggttagtctccaacttctaggctcaagtgatcctcccgcctcagcctcccaaagtgctgggattacaggcatgagccaccatgcccagccagacatcttaatatgcactatctactatattataggctcttgagaaacatttcattccacagaatggttctgatttatccccagtgttgatgctaccaagaggaaaagattcactacaaaggtagttcaccttttaccaagtgtcaaatattccatattacctttgaaaaccagagattataggtattaatcccactgattcaactgtgtatatatatatacatatatacgtatatatgtgtatatatatacacacgcatatatacacatatatgtatacatacacacgtatatatacacatatatgtatacatacacacgtatatatacacatatatgtatacatacacacgcatatatacacatatatgtatacatacacacgtatatatacacatatatgtatacatacacacgtatatacacacatatatgtatacatacatacgtatatatacacatatatgtatacatacatacgtatatatacacatatatgtatacatacatacgtatatatacacatatatgtatacatacatacgcatatatacacatatatgtatacatacatacgtatatatacacatatgtatacatacatacgtatatatacacacatatgcatacatacatgcgtatatatacacatatatgtatacatacatgcgtatatatacacatatatgtatacatatatatgaacacatatatatgtgtgtgtatatatatatataagatttttcttgaccatgaatcaccatgtttgggagtacagtagggttaggaattacaatttactgatcccctatcatgtgccagacacaattatcaggtaaggaacttcaaaccctgcattctttttttataaaact

SEQ ID NO: 343876 - DNA, 1000 bp, Homo Sapiens
tttttttttttttttttttttttttttttttttttttttttttttttttttttttttttttttttttttttttttttttttttttttttttttttttttttttttttgctcccacggcattattttaatctttattacagactgctttctgctttgcattttcgttagtaattacaaaggtctttttaaaccgtaaatgccttgagacggcatggaccctgtcttatccctgtagttccaggaccttgcacatgggagatgctcagtaagtattaaagtgaatgctggggttcaagtggcattgatagtacacaggcaaaatctcaatcattcatggtccactaaatcatggcctctgctctggaacagttaggcctaattaagacaaggaaaggcaacccaccctattgggaaatggaacctctagacagtcccatgtaatacacacacacatatcctctgcctacaagaaagaacagtttgggagctgactctccagcagatgagagttagggctaaattaaccagggcagaagtaggcgttctggtcatttctgggacctaaacccttctctgctagattcagggcatggctcccctgagccaggcagcaagtctgccatctcttctggctcagaggagcctccttcctcatccccagggtcttcaggcagtgggcagaggcagtggagaggctgggggatgcagggacagaggttttggatggggaaaggaagtctgtacacttgagccttctccctgggcttctgaggcattcgagcctcttgggcagtgaaaggagatggtagcccttgacctaggcctcgctcaagctgtgtgccaggaatcgtgttctccagtaggaagcctgagagtccagccaggaagatgggctgtgtcagcagtgagtgcagtaatacatccaaggggctccagcctgtgctgaacaggactggggcttcccgaaaccatcttggcagcagcaaggccatgaagatgg

SEQ ID NO: 343877 - DNA, 1000 bp, Homo Sapiens
actatgtggaaatgttttattgccaatctttttacttggtaaaaatacttgacttcacagggcctaggtcatgactctccaggccttcactgtgccacactcacagatgacagggcttgcggtaccaaaggctctttatcttccagactacagctcctctttggtaacagtaggaagcaataaagccaaattacagaacttcaaagcattctggttttcctcaagatcagtataacactttgctaagtacatgtaattgggattagaataaccagggcatagttcttcagccttaaggaaattgtgtaaagcttcttgtacagttgaagatggtatttttccaaacagagtagcagccatttttttctcaatccagctcagttttgagacagtatagcagtatctccctttgaggtaatatagaaagggttcctctggtaaaagtttgattgctatatctagatgttccttgaagaggtgcccatagttgattttgttttgtaaaccctcaaactcagatacatagccacacaaaactgcataccacagatgacaatgtccattcatgggtgctctattaatagctctttcacttaaagtttttccaatattagcataatgtttcttttcttgtgtgtttgtagatagttcatacatgtctccataagcacgagcaaatcgccacataaactctatttcatctctaaacttttctttgtggtcacgaagtagttcaaaactctccgacttgccagactcactcatacgtaaatgatctaccttctgaagaaggacatctaaatttaattcctctacacgtgtgttaaatgccttagggactggaaaactctgttcttctgtgtcagtattagctgtaatataccttattttaggaatttcaataggtgaagatctgtcttcatcttgaaacaagacagcaaagtcttcatcttcaaacaggcctgaagttaattcgctttgaggtgggataaagcaacca

SEQ ID NO: 343878 - DNA, 1000 bp, Homo Sapiens
ttttttttttttttttttttttttttttttttttttttttttttttttttttttttttttttttttttttttttttttttaaaatccaaaatctaatttattagcaacacatacaggcatatgagtcttaccactgtgaactctaacataatatctaaaaccagaatggattcaacattttagataaacacagagttaataattcttttgcttgaatgaatgaagtccaaaaatatcacatgagtgttttacacttgatccggtctgcatgccgtagctcatctagaacatttctgatgttctcaacacaaacttctcctctgtgatgcttttttgatgcaagattccatacattttcaaattcttcatcagacagtttgacaccaatgttacacaatatctctgcaatctcttcttttgatctggtcttgaagaagtctctttcaaacactcctttccgggcaaaaatggtaggatatagtagtgaatatgcactaccttcttcaccataattagttctgtcactgatgcgacgaattcggggagcaggaatgtcagatcgaatggttggaacaccacaaatggggtaacaagtagaaggaatggctcctacaattgcattgatctcagaagaagttgtcttatagtagttggaaactttatcacttggtctcagaagtgtccggagagtcttttctgtgcttcctgcttcttttaagacaatatcttctggctttatgaggagagtttgttcaggttcttcaacattagcctcagtagggtttacacaatctggttttctacctttaataatgaccctctcttcatactctttaagaagcattttgtctttccagttaagaaaatttgcgaattccagatagttaatgaagccatcattatccacatcacagtagtcaaatagctggtccaggagcttgtcatctaaactcaagttggcctggtcacaagcttcctgcagctcgtctttatctatcat

SEQ ID NO: 343879 - DNA, 874 bp, Homo Sapiens; identical to SEQ ID NO: 160740

SEQ ID NO: 343880 - DNA, 1000 bp, Homo Sapiens; identical to SEQ ID NO: 160741

SEQ ID NO: 343881 - DNA, 1000 bp, Homo Sapiens; identical to SEQ ID NO: 160742

SEQ ID NO: 343882 - DNA, 1000 bp, Homo Sapiens
tttttttttttttttttttcttttttttttttttttttttttttttttttttttttttttttttttttttactggataaaatgttttatttttcaaataaattataatagattttctctctctcaattatttctgtaataattttatctttttattaaaactaaatatatattaaatacatttcaccttttctcaaattacagactatggtataactgtaattgtcattagcaaccaaagtctatttccagaaatttaaacttgatatagagaaaaattccacgtatcaagcgcttcgtacctgacttggtgctgaggttgaactgttgtattaatgtgttcctggctctagaggccactcctagcttttaaagcaaagtggaacccttagggtcaggcttggctgccagagaaatttctggagggggatgacttgggttttgctttacacaggccagttctttcctgggctagggtggaatctctgggaacagaggactgagatacatactgtgtttaggcatttgtttggagcagcagggaggaccctatttttaatctcacatttctatcagtaattgcttccctattagaacaaagagaaaatgggcagctctgggtccttaatgataccaatattttgcacacagttatttatttctcagttatactaggtccagtgaaaaagaagtgctgagtctactatgaacacaagtagtaaaagtgactgtggcaattttgatagtggcagactgggattttactcttggaaaggtcttccaggtttggtgtattctaagcagccagtagagtgctagaatttagacatactgtgtttggatctaccctcttacttactccattgtcttactttaatttatatattcacaaatagggtgagggaaaaataatctctattgaaaacatctccataaaacctaagatcatacccaaactttccattagggtggccatttatgaactcaaaattaagtaacta

SEQ ID NO: 343883 - DNA, 1000 bp, Homo Sapiens
cccagtcaatgccatttattatacatgtcaaacagcttctaagaccgaagggcccccataataaggttttggggattttttgttttgtttttcattttcttttttgcatcaaacaggttcttccaaaagcctgctcacaaggtagacaaaaacataaatcttcaggaaaatgaaacaagagaagctgaaacaatctacacctgaatgttaaaaaactcatcagacacaaaccacaccaaacactcatcccatttaatttcctgttacatgctctgaggaagccaagaacatcaggccccagggcagcaatgctctaggattccagctcggaccccctctatatgacagattcatgcacacacatccacacaccatagaaccaggcagaaatacacatgcatgcacaggtggctagagaaccatagggcaggatgggaaaaagggctgatcaaggatatgcaatcaactggaaactgggacctagagaatgcttctgttgcaggatgaacatgagttaaaattaaaacaaaggcagaacacaggataaaggtgggatgttcagacaagaggtgggatagatgaagagataaagatgcagggggagttttgggaaagcagcctcagaaggggaggtttttctttattgggaactcaggtgggcagggtcctgtgactccagtgatacactgaggcagaagcaatatgccacagcattacctctgcaatctgtgccctctcccaaagtagagggaaaccatgagcccccaccctctatccctccccattgacactcttaagaactttcccattacccaaaaagaaatgaccccctactacacacacacacacgcaaagttaggtccagcataggccaaagtcaggccaagcacagaaagcctcagtaactcttcttggtggaaccaaagccagagaagcccatcacagctgccatctcatcgtcctcctcaaatgtcaagtcctcctcagccctccttttctt

SEQ ID NO: 343884 - DNA, 1000 bp, Homo Sapiens
aaagcactggtgctcttcttaagtgaaatgttaacacagggctcaatacataaaagagaaagtgaagttgttccatttggggggtcccataaggggcctcatgtttccctaggtgttaccccttcagacacagcacagcctacaaagccatggaattaaaatattaacaatgaatgcataaagatttcactgacaaataaaaaccagggagtgcattcagtgaccacaactttctaagcttctgcttttccacatgcttttctttggttttatcactttagaaaactctttgaacattaattgtctgaatggcagctatattagtcagaagctgtaatgctacacctgggaatttatctacatgatagatgctgctgaataaaatccaacaagaacgattttgtttaaaaaaaaactttgttaaggcagtctattgttcatactaacagaaataaaacatttatgaataaagtccaaagccaagataattcttagaaagatgaagcatccctgctgggcacagtggctcacacctgaatcccagcacttcagaaggccgaggctggtagatcatctgaggtcaggagcttgagaccaacctggccaacatagtgaaatcctgtctctactaaaaatacaaaaaattagctgggcatggtggtgggtgcctgtaatcccagctacttgggaggcagaggcaggagaatcgcttgaacccaggaggcagaggctgcagtgagccaagatcataccactgtactccagcctgggcaacaagagcgaaactccatctcaaaaaaaaaaaaaaagggagtttccaaggaaatgctacattgtgggactgtagcatgtatgtccaaagggaatagaaaagcaataccagctgggcgcggtgactcacgcctgtaatcccaacactttgggaggctgaggcgggtggatcatgaggtcaggagatcgagatcatcctggctaacacggtgaaaccccatctctacta

SEQ ID NO: 343885 - DNA, 1000 bp, Homo Sapiens; identical to SEQ ID NO: 246477

SEQ ID NO: 343886 - DNA, 1000 bp, Homo Sapiens; identical to SEQ ID NO: 160743

SEQ ID NO: 343887 - DNA, 1000 bp, Homo Sapiens; identical to SEQ ID NO: 339117

SEQ ID NO: 343888 - DNA, 1000 bp, Homo Sapiens
ttttttttttttttttttttttttttttttttttgtttgttttttaattaaaaagaaaataagaaaacaaacaacacttcccaggtactcacaaaaacaaggagaaatcccaagagatcacacagagaccccctgtgagggtgggcccaaggcccctcccttgaggccattgttttctcagacaaacatccacctctcctgggctaaaaaaaaggaagcgcttatccaaccttgtttctcttggaagattcagccatctccagctcactggtccatgacatgcacacaggaaactgggctttacaagattttacagatgggcagtgctggggtgggaggatttaggggtacacaccactcctctcactgatccctggatctgctcaaggtttctggagggctggggagcaatgctgtctctccatggggatgcatcgcacatgtcagatgcattgttctgcagggccaccagggctgagtttcctgcactaaggccactggtgacttccttccttgagtggtagcaaaaggagtgtctgcaggtaagttggggcaagcagaataaggacttggaccaggacaagttgtgcctaggctggcactaaatgttggtggacagaaggcagtggagagatttcgctatatttgccatagcaagcttttcacactgaccttccttggctactcaaccaattctccatcctggcctccaatctctgaggatcacatagacctggatttgactcttagctctgccatttactagtttatataaccctggaaatgttacttaacctccttgagcctcagttcctcatctgttcaatggggtggtttgtgaaccttacggggtgactgtcaatagtaagtgtggccagtacagagcctagtacagcacctgccactgttagtgctgctctgcaggcaccagtatttctattgcaaagttggtgagtctgtgtgtgggcctatgtgtgataaacagaagccttaaccagtg

SEQ ID NO: 343889 - DNA, 1000 bp, Homo Sapiens
atatctttatttttttaaataataaatatctataaaatgctaggcaacatgcaaaagaaacatccaagcatggcttttactattgaattgagtggttaattcccaactgagttgcatgactctttcaattagctttagtaaatatatatattcatcactctagtttgtaatgagctataaacaaaaatgcccaaataattttatttttcttctaaaataaataaaccaaaaataggaaacttgatttagacaataagtattacatatcatacattaataaaatattattctatttacttgctcattttcatgatttaaatgttaatatagcatctcaaaccttgctagcaaaagaggtgaataatacacactgacatagccaactgattttaatgacatacaattaatatgtgagaagaggaaggtatccctataaatacacaattgtataaaaagggaatgatccaaaagttggtttcatgataattatctttcctttggtatcattatcatatgtcctcactttataaaataaacctgaagaagaatatggctcagaaacaacatatttaggtactaaaagaaaggggtactaatgcctgtttattacatcctcattaggaacaatatgcaatccttaaatatctgcactactttctttcaggaaatccaccactccacattgaatcccagcctatttgtagttgagtgttggttataggggataatcaaagggaacatgatgctttatcaatgtgttcaataagtgacttttgattaatagtttggtgaaatttcatcattggtactaataaaatgacaatagtctatttgttgccaatgggtcaaaaatatcatgacaaatacaaaaagtggtacattatactatttttagaaagcttttgtcgttcaaggcaaaaattgaacagcaaaccagagataagtcttattactacatatttcaaaagacaagatagccatgacattgtttatttgatgg

SEQ ID NO: 343890 - DNA, 1000 bp, Homo Sapiens; identical to SEQ ID NO: 160744

SEQ ID NO: 343891 - DNA, 1000 bp, Homo Sapiens; identical to SEQ ID NO: 160745

SEQ ID NO: 343892 - DNA, 1000 bp, Homo Sapiens
tcaacttctaaagaaattcctggtttgtatttaaatgcactttaaaaagaccgttaacactcaaatttagttgacaggctacaatgggattcagaaaaggacacagtgaatatagacttaggtgcaagttcatgctggtgatttttcttttttaaaatgtaagccactaatattttaagacaaaaatttaaaccaaaaattgcatattaatattatacacaaactgaaacatgtgacttttagcacagtgtatacatgcttacataaactcaaacacatttaaaacaatttccatttaacatatgaaagttttgaaatacataaaagcattaatactttctataaaactacagttagaacatcaatttgctacaagcatataaaaacatcaagtgctttcttggagtttcaagtttcctctctaaaacacaatcttgctcacatatatagtccttttccaataatcagtatgaacttttctttttctcaagaggtttattttccaggtacattataagctcaagaaaaaagacccaacaattaggcaatataattatgtcataacaacttaattgcacataatgctttaaagtaggtttggatgaagttctcaaacactttggtatatgatcttcagggactttaattagaaacaacagaaattataagtcccttcaatccccattttgctttaaaagggacaagtctttggttaaagttctacattttgggcatttatttttaattaagatggtccccaaaccaataaatggtactgatctattacaaattcacaagacttcatttaacctgcttctgatgcagtgggaggttacagatactcatttactataatatgtcattggatagtttcaatctttcatttataagcagagaaatcaataggtttattacttctctgtcagttttctgttataacctaaactgtacagtaatttgcagtaactacagatactgttccacagtatatataattatg

SEQ ID NO: 343893 - DNA, 914 bp, Homo Sapiens; identical to SEQ ID NO: 160746

SEQ ID NO: 343894 - DNA, 1000 bp, Homo Sapiens
cccctcgagacaagagtctggctctgtcgcccaggctggatcttggctcactacaacctccaccgcccgggttcaggcgattctcctgcctcagcctcctgagtagctgagactacaggcacgcaccaccatgcccagctaatttttgtatttttagtagagacgaggtttcaccatattagccaggctggtctggaactcctgaccttgtaatccactcacctcagcctcccaaagtgctgggattacaggcgtgagccactgcacccaccacattaactttttattacttaacatatctgagcacttcctgtgagccaggcactatgggagattaaaaagcattaaatgtggtccctgacattattgtgaagctctgagaagatgtcatgcaaagacacttgcctatgtgccactgccaccctctgccctgctctttgggtcaaggtacctccaagcgcctcactcctgcagctgcatttttttttatttattttttttttgagatggagtcttgctctgtcacccaggctggagtgcactggtgaaatctcggctcactgcaaccttcgcctcccgagttcaagtgattctcctgcctcagcctcccaagtagctgggactacaggtatgcgccaccacacctggctaatttttgtattttcagtagagaagggtttcaccatgttggccaggctggtcgtgaactcctgacctcaggtgatctgcccacttcggtctaccaaagtgttggcattacggcgtgagcacctggccacgcagctgcaatcttaggcccataattccactgagttccgaagaatatagccttttcctgaagaaactcctttcttcaatgcttcaggccagttgtgagtctctaagtaagtggacaggatatcaaacacttgattgatggccagtatctctgaatgatagtttttcccattctggtttctgaccatgtattcctggattggcaagcgtgcggtcttgacag

SEQ ID NO: 343895 - DNA, 1000 bp, Homo Sapiens
tttttttttttttttttttttttttttttttaatactgctggcatttattttaaaaggtattgagatacaaaaattgtatcttatcttgtaaaaaatatttatttatcaatctttctggcactattaaaaatgtcccattttcactagacagaatcacaaaggtatacccactcaatcataacaatttgttttctatggagcaatattcacagatcctgtgaataaataggtgacaaactccaggtggccccctgtagggtctgttatatttagagttttctggaacacacataattatgaggtttggctctcctacagtcttttgtttgccatttcccttgtctttgaaccaaaacacagctctttccaagcttggagcgttgagagggccctcttctcccattggtgaaggcaacaggttcaccaccgatccactcccagtggccagcatgcacttggtcgttcaaacctatccaaaaggactttctcccaccaatgtcccagagccaccgcatgtgctgcctggagaatacagttacaaggttgcccaggtattgttccctgcaagcttgggcagccgcattccaggtgcctttctgctctgtgatcaagatgtgacagtagcctgagtgctggtgccacccggctggacaggatttgtcttccacatccttggtttggggactccaggctttccaggcgatcccattgcactgatacagcttctggatgccttcttcaaaatggaagagtccctttaattccagagtgcagttctttggaaatgagggcaactggtcctgtctggggaagtgtgagtcagttgtggattccaccttatctgcttgaggcagttctgccactttgattgtcttttgtggctgactaatgatggatactttggccttccttttgtgagttgggaaactgtcatcctccagtttcaaggaaactatcccatgataattatagatgatgtctgttccatttctataaaca

SEQ ID NO: 343896 - DNA, 1000 bp, Homo Sapiens
actgtactggcttgctccattcctgtttcactcatccagccatttgttcagcaagttttgtgtttgtgtgtgtacgaatgtttaggagggggttagtgtccgagttgtagggatgtggaaggaactaggtgcagcaacaacgatttctcaagcgcataactaaaagatgcctccaatggacctgggtcccaatgtcagttctgctgcttctgagctgtgtgattttgggtaaatcatttcatatctctgaatctcagtctaagggccatgtgctgggttctaatgataccatcgaattaaatcctgtcctcagagaactccctgtctagttggggacacagatcaaacatagaccacaatctggcaagagcaatggcagggatgtacacagggtattaagagggttttggatggtggaaaagaggaaggcttccaggaagaggtgatccttgaaatacattttgtatacaggctaaaagagcaaagggcattccaggctgagggcatggcatgagcaaaggtactgacaatttttttctgctccagccacactgagctccttgctgttcctaagacctgtcagacactgtactatgcaactgggagatgggtagacatgaaagagatggttcatcttcagtaggctgacattttagggagaagacagatattaaacaaatactttcacaattagctacaactacaataagtggtccagcagaacagagtgctgtaacagggttgatgtgaagggtgaacagtgcaagtagataagacatggtccttgcccttgaagggcttcttctaatggaagagaaggatgtggccacagacaatatcataatagtagctactctatgtggtataaattattattctcattttaaagatgaagaaactgaagcacagaagggaaaattcatttgcccaaaccagctagtaagtggcagagccattaggtctgtctgcactgtgctgcctccacgtaatggagtgccaa

SEQ ID NO: 343897 - DNA, 1000 bp, Homo Sapiens
ttttttttttttttttttttttttttttttttttaagtagagatggggtttcgccatgttggccaggctggtctcgaactcctgacctcaggtgatccgcccgccttggcctcccaaagtgctggggattacaggtgtgagccatcacacctggcctggtagcaagttttggcatagagtatctaatattttttattgcaatagattatacaaccccaagtttataaatattaaaatagttccaaagagttagaggaaagtccaggacaaaacaacaaaaattcctttttgtttgggtacaatactctggtaactttttccttttgcacagaaaaggatgtctgagatggaagccatgctgactttcacagaacatgcctgatttttgttgacgggcaacctcaggccttcctgtcaggtgtttgtctcccaggttcctgtgaatccagtttttgatgtagacagaggctgtctagcttctgcatatcttctgtaaggccatttctaagatcctcattgtttctcagaaattccttcaccacttccagtcgatttgagagctcttcaggcaacacctcttgttcttctgcttgaagatatatctcttgaagtttctcctttagtaactgcatttctatttcattgacttggctctcactcaggtaagttcccatttcacattcacacccatctcgctgatcttcctcggggatgtgaacagcccagtcagacgtcaacagctgttctattctggagtatactgccacaatctctgggatgttcttgaattcattcagaaaattttggatcttcatctgaaaatctcgaagccacgtagaagatactttcatctctgaagagtgcatgatctcattacgacatttaattacctctgtgactttctttcgatcaaccacgaagtgatcgcaggagttgatgagacttaaaagagcaactgcatcacattcctcaggtccttgtttgtctgctagtcctcggg

SEQ ID NO: 343898 - DNA, 1000 bp, Homo Sapiens
caaatcaaggttttatctagtgttaggaacatttagattactctgtgtgtgtgtgtgtatatatatacacttttatttttacattgtagagatagcatgtaaatgaacataggtattaagccatagagaagaattactatgcacctgatgaatcaggatttgtgtaacacagtaaacacattcttgtggaccagatggcaattacgtatacatacaaggcaagtactgagaagtaccaaaaacatctttgatgccgtcactttaaaaaaaaaaaaaaaaagtgtcatctatcatctggatactaaatcaaagctaaggccaggcacagtggctcacccctgtaatctcagcactttgggagttcaaaaccagcttggatgacatggcaaaaccccatctctacaaaaagatacaaaaattaggcaggcatggaggcacacgcatgtggtcccacctactctggaggctgaagtgggaggctcacctgagctcgggaggccaaggttgcagtgagccatgaccgtgccactgcactccagcctgggtgacagaatgagaccctcccaaaaaagaaaaaaaaaaaagctggaaggctatactaaataggtcactctttcctctatttttccaacttttagaaattcaaatttattcaaaagtttgacatatacaattccataactactatttcatcttcaatctacagaattagctttaagcaactttaaagcttgagctccttctgaatttcccaaagtgtttctgcactcttttgcaagcaggcctcctcttcaagagtcagttttacttttatgaggtctgtgataccattctctcccaggatacatgggacactaaggaatatgtcttcatttattccatagaggcccttacttagggtagaaactggatgcactctcctaagattcttcaaaatactttctgttaaatcagctacagataggctaatgccccaagaagtataacctttcattttgac

SEQ ID NO: 343899 - DNA, 1000 bp, Homo Sapiens
gagacggagtctcgctcttgtcacccaggttggagtgcagtggcacaatctcggctcactgcaacctccacctcctgtgtttaaacgattctcctgcttcagcctcctgagtagctggaattacaggccctgccaccacccccccgctaatttttgtctattttttttttttagtagagacggggtttcaccatgttggccagtctggtcttgaactcccgactgacctcagatgaaccacccgcctcagactcccaaagtgtcaggattacaggcgttagccaccgtacctggcctgctcccagtttttacaagatgttaattcccaataatctgagagcaatgtgttaatatgaatattaattcttctaaatgaatattcatccttatttcctacttgtataggtggatgaataaagatccaatagtataatagaaagactattagtaagaatgccggaaggtcagtctcatgcagcctggtgaaataaaacaaacaaacaaacatgaattctagagcttgtgttgtcagtaaccagctgtggggtaagtgtaagatttaatctctctattccttaagtgttcccatccacaaagtaagaaggctggatgaggtgtgtcaatcctagcacattaacctaagtcatcccccaggttgcctagacctgtcaggagcatggccttatgaagatacaaacatgaaatcctgggttggacccctctatagtttctgatcaccaaacacagtaggagcccagtgtaaaacaggttctggatatctcccacgataaacttcccatgtccctggaagagctgtaccattgtagacacactttagcttcaggcaaacaaatttctggtgtacccagaaccattttcttaaaccatttccatgggtttttatttttatctatttattttttgagatggagtcttgctctgttgcccaggctggagggcagtggcgcgatctcagcttactgcaagctccgcctcgcgg

SEQ ID NO: 343900 - DNA, 1000 bp, Homo Sapiens; identical to SEQ ID NO: 160748

SEQ ID NO: 343901 - DNA, 1000 bp, Homo Sapiens
ttttttttttttttttttttcatacatatctattagatgtttatagtgtaaggttgaactccattctttgcttctctgttgctggtaaatttttgggtatatttttacgaattttgcacattcttttacatattggtaaaggaacagtctgtgatctggatttattcagatccttattcagaattaccaattgttttattaatcattttatcttaaatgtgtctctacttactagtgatttgcagcatattccaagttagttgtaaaaacatttcacaatagactaatttcttgctttcctgtgaaattgtctcaaatttaaaaagtaaagttcttaatattgtaagtagctgccagaaataaaccaattctagcttcaagttcatacttcttacaatgagaattttaaatttctttattcttgggaaatagcagggccttgctgtttttaatagtgaattaactctgaattttttagtttctgtctctcagaaaagatggatttgtttggctttaaatattgagagagtttctagagacccacaggaaatgagaaatttgcacttttgtagcaatggcttttgaaagactagctaacatcctgaagactcagcagaagaaagatattaaactgactttgtcgttttgttgattattaaattaaatggaaaaacaaaatgtaacctttgagtccaatagactcatccccctaggctctctatcatcttcaaatcaatcagtaaaacacagtgtgcctccctgggggactgtggcagtcttaccttcatgtagtaacctaagacgctccataagaataaaaaatcagagctaaggaacagattccacataaccaaaaggctcacaaaaagcattttaaaatatagtgatcaaaaacactaatgtcgttaaaagaaaaagcagaaaataataaagtaatataatgtggtcttgcaaaaaacagtctgtgatcttacatttcaaaacatgtcttgctcgttcc

SEQ ID NO: 343902 - DNA, 1000 bp, Homo Sapiens
tttttttttttttttcagaatacaaggatttttgtttatttagtacacttaatatttagaacagtgcctaatacattgtaagcactcagcaaataatgaatgaacacgacatttcaaggactcaagcaaaatgctctgcaagtcaagactatacaccactacaatcgtgcaaaaatatcagtttgtaaattattaattgcctagataattataacagtatttgaacatttacactagaaggattaattgtacttatggaatggtaaactggaaactttcttaatgctgcagtgatctataaagtcaaaaaggtaaagacatctgtataataataatacagttacttaaatatgtataaagaattttggtgttcagacccttctttttggattgtattaccaatcataacctcagttcttaaattcatactcagtaataaccatcactagtagttttctagcagagaatactactattcagaaggaaagacaggaagatatgagttgactggatttctgtattactaatttccagcaatattaagagattatcgaggccaacagctgccaattcaggaggccaacttaatgccttgagtaacaggtatcaggcaaaataagctaattccatagcttttataagatgaaaaatgtatttaagacattacatatttaggaggaaatcattagttgtttatgaaataggttttatcagacacaagtgcaaagaccaagaaaattgttattgagaaaatggataatcatattgtaacttgtctttacctccacaaaagccacctgaagtgatctcttcttcaaatacatcagagaaaccccttcctgcatttagttttgccagtcgaccatcgataaactgcttaaaaagctggaggttaatggcagtttccaggaactgtttcatcacgcttgagcggtgctttacaaaactctcctcacagaaagtgatgggctcaccaggtttgtatctcagtgcatctctg

SEQ ID NO: 343903 - DNA, 1000 bp, Homo Sapiens
acagttcaaaaaaattatttatttttcatgataaatgatgctactgataactttacttggtagaattgtagttactttggtaatttctacatgtttataaataagcaccacatatactatattaaaaaattagccagtctaagggcttgcactggagaccagggagttacattttgttaaacccagattgaacagagttgaatttagattaatacagagaaatgcatgctctgggtttgttgtcctttgtatttcttgaagcatcagatgaatcgtaaaaagttcaaagagcttcttattactcttgattttggaaagtttctgtaaaataatactgagtttttctagtatttgaagatcaagcttaggggctcgaagcagcacagagcaagtacgaaaaaataaagagttgctacaggcttccaggaaaggctgcaaggatttagattccaccgtcatctggagcaaactatcaataacattagacaggagtcctttactggatattcttagatgacttaatattactggaacagcctgatactccaaaaacaaggtttttccttcttctgtcttcaagtccaaacaaagagaatcaaatgcctgagccaggtaatcagcttgagtgactgttttgagaacaattaaggttgataaaaatctcaatggcaaattggagctcttaaagaaagcagctgtctttggtttattctccacagaatgctgtggagaattatcctgaattcctttagttaccactcctttaaaaatgtcttcacccaatctcctcaatgttgatgtcatagtcgagtgctgtgctccagcatctagctgccttagggaccaatatataaattttacaaaaggctcgtgaagtttgatattcacaaatggcatccactgtagctgctctgtcattagaggcaaaagctttacacacttctcctgaatatcatttctctgggaagcaaatttgagttgtggttttttaccatccatt

SEQ ID NO: 343904 - DNA, 795 bp, Homo Sapiens
gaatagcaaatagtttattggtaagtacacggtttcaacgggagtaataaattcacatgaaaaggagacaataatcaagtcaaaagaataaatgcttactaatcatcagaaaatctgtggccattagggctggcacgtaaaaatccaaaatcactcagaggccaaatcttaaagaagattcgtcctcttattagtccatatggaataggtccatagcacctggaatctgtagaattctgtagattgtcaccttctaaccaaacatgacccattggcacataactatggcttttaaagaaatctgatggactagtggtgaggattttgtctccttccaaaccaattactcttttacaaatatttgattttggatcacttgggctttttgcaatcacaatgtcacctctttggataccataaaaatgtcgactaagattttctgcaaagacaatatctgaattttgaattgtaggctccattgatggtccagaacacatgacaacaccaccaacgtattcaaaagcacaatgagctatacagccatattgaatagtatagccaacaagtcgaaaggttttccccagaacaccacgaagcatagttctatgtagactctgccaccattggcagtaatttcagaatacccaaagtcacaagaagttgtccacctgattgttcaggtctgaaattcctcgggccccaaagaaccctggagaccctcaaccgggacacaggtgggcctttctcacctgggccccgccgaagtcgaccgtcctttcgtagggcgcacttttc

SEQ ID NO: 343905 - DNA, 1000 bp, Homo Sapiens
aaactgttaaactttattataaattaaaatttctttacaaaaaaattgcacataatatttgaccactcttaggttctgatgcactggcatttgcaatagtttctttaatcttcaagttaaacagtctcggcaaggagtccagaacgtagaaagggtaataaacaaccctgatagagcattcaagtgcaactagcagacttgtggccatggcagttacactttccttaagatggactgctatagttttaaatcctgaaatgaagaatctcaaaaaaatttaaaaaggaaaaactaaaagggactgcctgctttttttactgtaaacacagccctggatattaaatcccaaacaggaatctctcaggcatcagagagtgtcaagtgagtcaggaataacacaaaataaaggaatgggggagaaaataaaaaaaaacaaagcaaaattaaaataaatgtcagtcactttgaggaactatacttacgtatatgatgttatgagaatctggcagggcctagaagcaggccaaacaggaagttcatttatccaaccgaagaggatcatgttcattgcttccggttttgaggacaggatattgtagggaacttgatatgatcaataacgcttgtctgccttacacagaccttagccagggatcagcctaatcttgaagaatcattcaaataattttggcaattattataaggacttagaactgactgcacccagtgttcagtgattcttgctttctgttttgttactgtttaaatttaagagctcatttaggctgactccaatctcttggcacttggaaactagttttctcaggttatcagttttacctccttctgatgcttcaaacaagagttgatctttccacagtgatgcacaaagaggtaacttctgtaaggctctctgatataaacggtggacctctctttgtccctttagaacaatctcagcagcaatggctctaagagaaaaaaaaaaaaaagaaatata

SEQ ID NO: 343906 - DNA, 711 bp, Homo Sapiens
ttttttttttttttttgccgaagtgaaacacgcagctttattaagacaggggcggtagaagaaggtctccatgctgaacagattacattatggagcccgggagcctgggaaggatggggcaggagagtgaagggggctttgaggagaggtcctgccaggaacatctgtccctgttgggggtgaagggtaagggggccagggcctcagaagcggccatgccagtgatcaggggaacaccgatggttcctctctcggggattgtggccagtatggaacctcgggggtgacctgcgcctgggtccccgcccatagagctgcctctggaggttctgggaaatgggccgcagatgcatgaagttgcagaagccacctcgggtacattcccgtgcacagcctgcccgttgaaccagcggttactgagttcagccacggcccgctctccatcctcctccctccggaacttgacatagacgttgcccacgacgtggtccccaaggttgtcgcacacattcatctcttcaatctccccatacttctcctgcagttctgtgaacacctcctggctgaatgtcggcttgttgtgaagccgggagcaccggtccccgtgccggcagaccccgatcttaaagtaaaaagagcagttaaccttgtccttctcagtcccgaatatcgaagctaaatattcagccatttttacccaagccccacgct

SEQ ID NO: 343907 - DNA, 1000 bp, Homo Sapiens
tttttttttttttctcgatcaatggagaagtttattttgccaaggctaaggatgcacccaggagacaggtctgtgcctctctcccaagatgatgttgaaggcttcagtcaaggggaaaagccggctggagggggcagagggaggagggtgtggtcacatgactgattgctccatgctgcaggagaaaaggagcaggtgggaacagtcagttacctgtttatctcgtgctcagtaaattggcactttccatgagataaggggcacacagagcagccactagtggagatgctgaccctctcatctgcagctgtctgcttagggcaaagggaaaggcagcttcctgcaggactcagctttcagcttttttcttcttggttgagtgaattggggtgtcgagtttttaatcttcctttcacaggtgctgacccaatgaggccaatcatgtgtgattgggaccttctgagtgacttggtggaaagcagggcccaaccctcctgcccaggacgcttgggaaagccttgctggctggacggaggggaaggaggctctcggcgactgcccccagaggggagtggctctccactggccacagcgatggctggagtgagacctgagccccggaaaaacacgaaggtcccaaagccggcaaaagtagacactgagtttattatttgccagacaaggggaggcttccatttcattacgaaaggtcaggagtgctctctgagctgaaggtgaacagacagctgcggtgtaggaaataggaagttttgtccacagttctgattggcggaaaaagcacattgtaaactctctgaggatcgctcctgttccgatttgtgttgcagaagcaggagcaccgttcctggaagaccgtggcaggtgtggtctgggctgcgtggccccggagcctgctgtctgagcctcttctcatggagtgggggtggtttctctggcacctacatgggttaagagggaggacccctggggccttgcgccc

SEQ ID NO: 343908 - DNA, 1000 bp, Homo Sapiens
ttttttttttttttttttttgatataaattatttttattgtgtgaaaatgtcaaaattcagaattaagaataaaagtataacatataacaaaataggcatttaattgttaaaatacacctggatttacaaaacattttttaaaatgtttttaaaatgcttaaggaataaaaattaatttttgagagagctatataaaatgtgaattctatattatatttaatttcaaaatcatttatttttattaaatgaagccagtagctacactatagtaaacagatagaaaacacaaattttaaaaacacgtatactcccaaacgagataaatattaaaaagatagcaaaagtatgagtttagttttaaaattaagtaaatgttacaaaaagctatgcaattttccctctaaaatccttttcaaagtttacattgtcttttcgtattgcttttcatcacatttcagccacctctcaaatttaggttgttacgaattttagatctgaaatcaaatgcttttacctcactcagtgtggttgctaagtcccatgtacaaactccaagaatatatacagtgctgactagagtacaggtgacctgattattaaagttcagtgagttaaaaaatgtgaataaaatctgatgttctgaagtacaatttttaaagtaaataattatattaaacgacataaaatgtacttaatgttatcagatactagcacatgtctgttgtgtcagtacaagttaccaaaagcaccaatcttaacaaggtggtataaaaatcattctgtttatactattttcattggatataaaggtttgttttcaattaaatgtaacattatgaatctattattaaaaatatacatctagaagttagtctaaatgccaaatacagaatcttatggatgccattcttaagtgcaagagaagtgctatcattttaaattaagaaattattttggaattatttatttataaaagtaattttgggccaacatttttat

SEQ ID NO: 343909 - DNA, 1000 bp, Homo Sapiens
tttttttttttttttttttttttttttttttttttttttacaaaaatacatctttattgtgttccaatgttgttgcattatacagatacctagttatataaacttggtcttcatgttaaatataaacacaaaaaaactagaaacaaatcagcaaaaccatcagaaaatccctctgagccatgaatccttattaaaaatgtatagtggggggtacctgtagctgtatgttgaagcaggaggactgcttgaactcaggagttcaagaccagcctggacgacatagcaagatgccatctctttaaaaaaaaaaaaaaaaaaaaaaaaaagggccaggcacagtggctcacgcttgtaatcccagcactttgggaggctgaggtgggtggatcacctgaggtcaggagtttgagaccagcccggccaacacggtgaaaccccgtctctactaaaaaatacaaaaattagctgggcatagtggcgggcacctgtagttccagctactctggaggctgaggcaggagaattgcttgaacccaggaggcagaggttgcagtgagccaagatcgtgccattgcactccagcctgggcaacaagagtgaaactccctctcaaaaaaaaaagtacagtgggatgatgaaattgtcttcaatcaccacactccgaaaatagttaactgtaaccaaacgtaaatgttgaaagcagcaataaagacaaaagcgatacagaataaaagcatggcggggctcaccatatccaggggattgggcaagtcagatgcttgccgacccctcagcaacctgtcttgtgcaaaaatgatcagggactccatcattaagccccaggttaccttcaccagcacctgcaggggaacaccccagaagacgagccccatggcttcagaacacacatttcagaggaccagaagatgaggaagagatccacttcactccccaaagtctcttgcggagccctaactcaatcactcagtgaccaagagct

SEQ ID NO: 343910 - DNA, 1000 bp, Homo Sapiens
ttttttttttttttttttttttttttttgccttaaaacagcccaattagtcagtataatatcatttaattaatgtatttatttattgaaataccatcattttatagctgaagaaattgacatgtagagagattaagtgacttacttaaagtcaaatgggatttaaaatgatgtatgaaaggctgacactgaacagatacaggactaaagtgcttctgattcaagccattaaggctcttaggttaaacacactcatgcctctgatactccatcatgagcctaaaggaaaagactgtgaacataaaagtgaatactttatacttttacttctcttttattaaaagtaaaatttcatgaaaatctgtaactgtgaagaaactttaaaacagaatataagataatacatgtaaagcaactagtaaaggaactaacatgtaggcactcaacaaatactggctatttctagaagaaatgtaaataggaaatgttagctatgagctattattaagtgtttttatgttccaggcactgttctaagtgctttatattatttatcttactcaatgcttataacaaccctacacattaggtactattactattattgccattttacagatgaggaaataggtgtatagagaattcgggcaccttgcccacgggtacacagcattaatccagggagtctggtttaagggcacaaactcttaagtactaaactccactgctggatggaaaaagatcagtataaatatgaataattttgttctacgcctaaataacttaagttcatctacagtacaacttaatatgaaaggattctgttagctttaatgagaagtaaaacaagaaaccagaatcaagcaaggggccatgatttcttgtctgggatggaaactcggtttctttaaatagcaaatggaataacaccaaatatatatagaaatataatgagtgaaaaataacacaaatttaagcaacagttcaaatacgtaatgttg

SEQ ID NO: 343911 - DNA, 1000 bp, Homo Sapiens
ttttttttttttttttgtagttgctgaaaagaagtttattgctattttcttattttattatacaaaactagatttgcttaaaacatttcccagtctctttaaaggaatgctagttagtgggaggccacagctagtaaattaccctcagtagtggtttcaagtagtccataactataaaaatcgttacggccaggatatgccggaacagaacactccccactggggtcctcagccttggatgtcagcttggcccctcaaggggtccctacacctggaagctgattccactcatcagtctcgagctgggcgcatgtggagttgatgtggagttgtagctgactggctggtggggtcagcctggcctcccagtgtggagcatgggcaccagcctcactgcgtggtcaccctagggcatatgctgcgggctgttgtggcattcctgtggccagcccagaggcaggcaggggctgtctggggtttgccatgtgcaccatcacctgggcttggggtgagctggaggagccactgaggcttagagctctggggatcccagggtccttgtccacgctgcgggtcacactggccagcttgctggtgctctcaccatggtctgtggtgaagctgtggttgtcgtgcgcctggctgggcccgctcacgggtttgttgaagtgcttgaggccaaggtatgcggcctgcaccgtctccaagtcctcatctttcagctgggaccacagctgggctgacctgttggagcgccgccgcttgctcttcttcacgcacttgaggaggcagcaggtgaggaaggccatggacatgagcaggatgatggcacagctcacaatggaggcgatcacggccaccttgaagccaaaggtctcgtgtggtggcaccagtttgcacactggggaccctgaagaccactcagcgatgctccccttccaggtgcaggtgaggagcccagaccccaccatctggtggttggaggggcagcggaacatga

SEQ ID NO: 343912 - DNA, 1000 bp, Homo Sapiens
tttttttttttttttccaatgcattttatcctttattacttcatataatccttttaatactcttgagacagtgtaggaatttgaagtggttgactggatcaaggtcacacacacacacacacacacacacacacacacacacacacacacacatcaaataggaaaattatagtcctaattctcttgcatcccagtcacggtagtaatttataataaatactgtttacgtacaacatgatcaaaggggttgcctagatgctgtatttgacgttctcatggctgcagacattctgggaaatttgaaaaacatgtaatccaaattagaattaggtattattgaacctggctgagaagcaggtgtcacaccaatttctctgccttcctttaaagaccaagtttcagacagaaagatcaaactgggttttctttcctttacagtcatcagcaactgctgggtttgtgtgttcaggccagttaatggaagcccaactaccttaagtacacaatctgggctgatcaagctctcaagaagttttgcaactccatcattgcccaagtgattttgaagcaagttgagtctttctagtgttttgttggtggtaagaacagaggcaagagatcgacagcaggcactggttaacatgcactcttctagcccaatattcaccaacatgcagttgggatgtctcaaaccaccacatagcagctgcattcctgcatcttctattttgttgctcccaatctccaggctcctcagtttttcattagtagcaataactatggcaatatattgacagatatcgctgctaaagaaacagccagacagatgaagctcctctaactgacaggttggaaacagcaagggaaacgtcacatgcaacactccgtaattttttaagcgattcacacacaggtctagttgtcttagagttgggctgaacagaagcactcttccaagggcgctgcagcaattttcagtgagacagcagaagactaacac

SEQ ID NO: 343913 - DNA, 1000 bp, Homo Sapiens; identical to SEQ ID NO: 246584

SEQ ID NO: 343914 - DNA, 1000 bp, Homo Sapiens
tttttttttttttttttcttttagattttttaaaaattttatacaaatagactaactttgatttaaagtaaacatataaaaattgagaagaatattgcttgcaacaatggacttggaaggagaggaatggattaggcaggggtacaaagaaatggctcctactcggtagttccaggcacatgcccagcactctgcagaactctcacagggacaccctctgctgcaccgtgtccttcagcccacaaagtctgactgattttgtaacaacaacttcaggtcaggaaaaaaacaaatgcaagaaaatcggaaggcacaagcacccatgtgatctagaatgttcttggggtgaggaataaggagggaaagggatacttttggttcagcactacagtcaatttcgccattgttgaagaaaaacggtataaaataagggtgtacagaaatggaacaagcacagcccactggtgaggaagaaagctcagaagacagcgcgcagaaatagtgcggagagaaatgaccagtactatttatttggaagtctgcgccatggtgggtacaaactacatcccctgctctgtgggaccaaaatcaaaacagggcaaaaacaaatgaacaaaaatacccccatcccaaaaaagcagcagaaggaatgcaagaagtcttacaggacacactggcccagccctgggtgcagccagctctgcatccaccgctgcgctcgccaacttcagctaccgcccccatggggactccagagggccgggctgcttaaccattttccctgcctctccacgacttccctttccctttatttcctcctccaggattcgagtccacttcctccacgaaggaagtgctgttgctgacagtggggagagcgagctgggatctccagggcactgacgcttcctccaagccttgctgcatgggcgctcatccaggcagcttgacggagctatgcgtaaaaaagaaaaggaaagaaaaaacaaaaacaaaccca

SEQ ID NO: 343915 - DNA, 1000 bp, Homo Sapiens
tttttttttttttttttttttttttggtttttcattttgatttaattattaatcccttttattatttaatgtggaatacatacactgtggggttacaatgaagaaaatggattatcactgtgcggctcactttcaaagagatggcaggcttaaaaaggaaaagtaccagacagacagaaacaaacgtggggaaaaagcaaaattaattaatttgatttccgtgcccttttcatggccatgacttttcatacatcttctgtgagatccaggaggatgcatgtggattttgcaagtaagccaagcgaggtattaaagggaaggggtgtaaggagtggcgagtggcccacagtggctcaccagggagggcagaaaaatattcatcctaagcaaatgggagcctggcaggttgggaaactcagtcacaagctcacgggcctgctccatacgtacagtcctcaataatgggcttggtctgtgatgcaaagctacctgaaaggcactcacctatcactaaccctttcgaatctatattccataccttgaatcgggcctaatatctgccctttaaaaaattgctgaatatatttagactcacttagatacactgggcagagggatattttaaataccatcaaaatggtctttttgtctctgtattttctccaaagaattgaactccccaagcaaaatgccagatctgcctgcgctcctttcagactagaattctgtctccctttaaagatccttacatgaaacaccatttaatccttctctctctgcctttttgtgtttatggtgacctctcagtattttggtttctttaatgacaaagtaaccatggaattagtccacagcatttctagggtacgtgtttctctccagatatcaaaaaataatgcatgaggttttattacttccttaggcttgtggtggggaatcctccaaggatggagttaaaatgaacagccaatactctctcgctcctctgggctacccgagg

SEQ ID NO: 343916 - DNA, 1000 bp, Homo Sapiens
gcaagttataaaatgtttattgatatacattttgtcttttataaaacttccgttggccacattgggccactgtgcaccacagtgccagtccccaggtggccagggcggagccagtgtccactttcgggtgggggctggagccaagaggctgtccaggagctgcccagtgggtcctcatggcctgcgggatacctcaagtgctcccggaggcagcctaggactggctcgtcccggagtcagaaaaggcaggtcaactacccaaggcggccaaaggcccttcctgtctccagagccttgacataaccagaaatccccccatcaaagtcaccaaatgactcgacggggggaagggaggttgtttgcagaaagacttagctacaaggcatgtgaaccagaactttcttccagacaccatttccttcacatttgctcactgataatgccttaagaggatcgaatctctggaacagccctgaatggcagggatgaggctgctggcctggtgctggctgggacacagtcaaggagggctgacccaagaggcagaggtggctaggctgggtgttgacctcctctcttttaccaaccagcctagggcaaggaggggccccaccacctgggggcaacttctgtacaagaggtctctaggggagcagaatgggtgggggagccgggcaggggccacaggtctgtttgctggtggctgcccagtctcccagccacccctggagtccccagcccagggagaaggaggcccgaggagaggaaacagatctttcttctcctgtatggactcagaagcaggtgcccattcctgtcccaaggcgaagggtcttggaggccgcttcctgcccctgcctcctccaggcgctggagtctcaggaggcgttccccgggggacactgcatctccatggtgactgtgttgggcgtgctgcccccggcctcccccagctcagcgccgtcccgcagggcccgctggaagaccaccctgagcggct

SEQ ID NO: 343917 - DNA, 1000 bp, Homo Sapiens
ttttttttttttttttggtttgcaaagtctttatttctggatgtatatgtgattttaacaaacattaatactttcaaaaacaatcttaacaatattattaaagtacaataaacagtataagataaagtgctcaactacctaatcatagtattctagataaaaccctggggaaaacaatggctttatattttaaaaggcacagtagctcccagcagagtcctgttttcaatttgcttctctccaagtgttcaaaatgtaaagaatgctttccgtacccctgaaggcaaacatttccaaacagatttaaaagttcaggaattgggttcaggtgactttttatgaaaacaattcaggtgaccaagcacttcgagtttcacacactgaaggtgggcctttttctgaaaatggaaggcaacatttgacttctgaacaagaatcaggtccaagaatagggtgcagctgaggtgctgctaagacttgaatgtctggacatttggaaatccagcctgaacttttacagttatatttatgagttttctttttcgtaacaactgctgcaagcatattctttaatttcttcttaattaaacctttattggttccttgtctaatatgtttcagtttctttcttggtaactcttgttgatcagggaaatgataggcagcaaggcatttccctagacctatgccttggaatccaagcatatctgaaggaaatattttttgtgtggtaggagggacccattcatcactatcagtttcatggcactcagcaaaagggtagtgattgaaaacgtctggttgtgaaataccagatacaatagggcttctgattttctggctaggtgtttttatattttttggacagcttgggctggcttgctgtttgtcattttcagggaaaatccttattttttcatagttaccatcaagatctgaataaaatacaggttttttgaaagctctgtttatcccatgaattcttgtttggtggaaccct

SEQ ID NO: 343918 - DNA, 1000 bp, Homo Sapiens
gacaagtttgttgagaatttatttgcataaaaatgccagtatttttctgctgtgtctctagagatataccaccccccagctaagagtgggtggtaggcaaatgtgctacgggctcctgggaaatggatcatgaagaatgtggtgtgctcagtggccagaggggcagtggggcctgagtctgtgtctctgagtttgtgtgtttcgagaacaagagcagagggcattcagatgtagaattcctccatgtcgttatccccggggccagccgaccctgggggtggtggcatgtctccatcagtctgcttgactttgggggtatcgcatgggagctgtggggaggagtctgtgagggtggaggtgctgggagctgggggagcagcacgagctgtcgctgaggagctggaagaccttttggtgaagaaagggagggaagcccaggaggcctctgtggtcaccctgctgacagtgggcagtggtccctccctggaatccttgtgagctgcccagtggctgctgcatctttcggaggggaggggtgtctccactgtgctgcagaacctactgggtgcagaatatgcagagaccacagacaggtccgatgaggacagccgcaggcctgtgtccacgtctgtctcctgggccccctctaggtcatcgatggagaggaggtggccatgcctccactctgatgccctgtgccctggggcacctgtgtttgaaaaccactgtggttcagctgaggaggccagggaggggcctcccgtgggcaaacaaaacaaggacttgcttctctggaaagaccagggagggttgggggtgctgttggctcgtccggcaaattcctgctggtgcccaggaggcaggcctgtccggatgggccccgggtgaggactgttgagcggggactgctggctgctgccaggtgtatggcttggtacagcagtgctcggcaaaggagtggaatgacgtttcttctcggaggcatgatgtactctgccag

SEQ ID NO: 343919 - DNA, 1000 bp, Homo Sapiens
tgttttttttttttttttggatttgtaagtctgtgaactccaaaataggcacaggtttattcaaaggaagaaaattatgttcaattaattacacaaactcagggaaaaaagaaaagtttatccaggagttaaaagaagcatacaagcatactgtagttaaaaatattaaaagaccaagaaaagatatattgatgctcacggaactacggtggaagcttactggggcatgccttgcgcatgggatgaatgttttgaggcagcacttgatgggtggacaggacctcctggaccttgtccaaacacatcttgtttgctgctacacctgcttcaaactctcggcgtttctcttccttctctgcttcttgggactgctgctggtaggcgatttgcatctgaagttgcttcctgtactcctgggctaaacgttggcgtcttgcaaaattctccttctcttcacagttaagttctttaagactttcatttatgtgtttctgttccatagcacgttcttcctgttctttagcttctcgttgcaacttttcttgaacttgaagttttcttgtacacatgacctcatccacaagctgtctccttgcctccttttcaagtctcagctccttgtccttctcagccaacttctttgccttgtcttcctctaatattctgtcaaattctttctcctgagctttttcttcctcacgtctctgtgccaaatatttatggtatatcttctgttctcttatcatatcttctcttttttgtttctttttatctgcctcttcctgtaagtcttgaagggccctttgcacgagcttcatgttcaagtcctgttcgtctctgtattcctgctgaatatgttctatcctctcttgtagggctttttgcaaaatggtcctagtttcctgctttgccttctgtttctttagcatatcctgttcattctcatgtttaatctgtgcgttgttactttccacaaggcgtgcctcctcttccttcagca

SEQ ID NO: 343920 - DNA, 1000 bp, Homo Sapiens
tttttttttttttttgtaaagagcaaaaatgtactttattgtaagcaataccatgtatctgctcaggtggggtctccttacttcgctcccatccactctctgaaggtttgggagacttttccaaagtatttcagaaactctattagcatctcttttcaatcagtcttccgctttgggcagtgatctgtggatattcttggattttatcacttgtcctttgtccacctgaatctgaaaccagtgattttcttgtttctttctccaatggtatattttttgaatcttcacctttaacttttgtttgactattacccacttgcattgttgtctcagttttcccctcacttttaagtaacttctcttgatttaggaaatagttaagttgatgcttagctttttcagcttcctgtaaagcctgtttcaattgctcctgaaggactttgttctcaatttccagacgtgctactttctgtacttgatccaaatcttcttttattttaaactctttttctggagacatcttcttttctgaatcctcagattttcctttgtcttttttcttcactgttttcacagctttctttgttcgattatttgtaggcttagttttctctttgtccttcaacttttgtagttcattttccagcaccaacttctcttctgataacaactgaaaatcacactgcatctgtttgtattcagcatctaacaaaacttgatcatttacagctctctccaacatatttgcctggttttcaaatactttcaacatggcattaaatcgattagtcattgaatgagcagtttgtggttctgttgcagaaacatctttaaattcatcagttgagtgggcttctaagaattcttcaattttctgtgccagagcttcacaacttttcactgcttctggtcgattttctttatccatagttttagacaacatgactttcacggaggatttagacctctgtttaaggcgattcttcagttcttcaaatct

SEQ ID NO: 343921 - DNA, 1000 bp, Homo Sapiens
ttttttttttttttttgtttactccaatctggaatcaatccaagttttattagtgctcaaatgtggataaatacattatggtataagtcaatcaacagaatacaataaaacaataaaaatgaataaactacagctacattcaatagtctggacaaatatcataattataatgttaagtgaaagaagccaggcacaaagaagataaattgtttaggtctataaaattcaaaaaaaccatgcaaaactagcctatggtatttggatgtatgcttccacggcaaaaccataggagaagtatggaagtgaatgccataaaattctgggcagtggttacctttgtgtggagagtgaggagactggtattgagaagaaacatgagagggcgtctgggtgctggcaacattccagatttgacctggttggtggttacatgggggttcattttgcggtaactcagtgggcttcacttttctgtatgtttgtcatgtttcacaatgaaaaagttaaaagcaaatagaaaatgatactccggcgcttaaaagaatgcaacagcactttgaacaacttctaacacctttctgtggcctgaattgctctgtctttagccatgatcttgtgccattccttcttgcataggcaatcctcaagccacattgccccttctagaattcctccacattccaatccctcatcaaatctttcagctttgtcttcaaattatatcccaaatatgcttgtttcataccacttttactgctatcactcttgtctaagctaaaaataatttcatttactgagagtggagaacaagattactgagggaggtgtcaaggtgttgggaggatcatctttgtaatactgaaatcaccaagaattaggacaggagtgattatatggggagagtgagagtgagccaggagaagtgaaacccaggggacagaagatgagtagaaccaagaaagctaataggtggcagagtctgaatgacacgatattcaca

SEQ ID NO: 343922 - DNA, 1000 bp, Homo Sapiens
ggtgtgagcatcctctgacattatattttgatggtgctatttcacattctcaaaagcttataaagatctacacaaaacgtcactacaacagtgagctgaagccttcaccctgcccctagcactctggccttgcctggccctgccagcagctccagcaaccacaggaaggatgttgtggtcagccccagccccagcctctcggtggcctccaggtcagcatccttaaagaaacacagtcccctccatgggaatcaaagtcactagttgctcccagcagcccatagttcacttctgaagccagagcaagtgaggggcgctgccttcatctgtgcttcattcttgctggcataattcatggatggatatttcctggaaattcaattgcttcccaaacattgcttctgcagaatgctctgtctggccttgatgaaggcgatgatgtccgagtccgtctggctgtctccggtgagagggatggacgacactggcctcttggggatgctgtctcccagtggggtgctggtgctgctctgtttctggctgtgtggactggggcaaggcgagggcaggattttcctggcattcacatcacagacatcgaatctgccagtgccttgatcttggacttcccagcctccagaacttttgttagagaggagttgggaccgttcatgctggaagtcagatgtctggagaaatggcttcgtgtgatcgagtgaattcactgctggagaatttacctgcaggttggtggcctcctctgcccaccagacttcaaactctttctgtagcttcaccttggctttgtccatgagcagctgcaagtgctcgatctccaccttcagggctttcaggcgagtgaacattgttttataccttctcttttcttcctccagttgtgatcgcagcttctcctcctgctggtctggcatcagaggcacggccatgttttccgagattcctagggctacttgctgtatatgccgctgggtgatttctt

SEQ ID NO: 343923 - DNA, 880 bp, Homo Sapiens
tttttttttttactgggtcagagaatacatttatttttaaaaattttataaaaactagcaacttacttttcaaattgttttaccaattcacacctccatcagcactgcttaagactggcaatttccccacactcttaccagtccagaattttatccggtatgtccatctgaatgcccacacacagacaattccatagctggttcattcagtagctccacaattttagttctctgttttaaccgatttgtagtctatttggctcttccctcatatccacaagatggctgctgcatgtctacagttctcttcttcctaagcctaaaatatttatctaatacagcatccattaggattccagtgctgctgtaacaaaatgccacaaactgggtggcttaaacaacagaaatgtattgcctcacagttctagaggctcaaagtccaagatgaaggtgccagcaggattgctttcttctgaaggctctgagggagaatgtttcatgcctctctaggcttctggtgattttctgtcaatctttggtgttccttggcttgtagacacatcactgtaatttctaccttcatcttcacatggtgttctccttatatgtggacctgtgtccacatttccccttttcacagacaccagtcacattggattagaaacccacctcactcaagtatgacctcatcttgactaatgacatcttcaacaaccctaactccaaacaatgtcacgttgtgaggcactatgggacaggatcccggcatatgacttcttgggagacaccattcagcccacaaccatgtgttaaaaagaatcaaagaaataatgtgcataagttgtttagcacaatgtaaactgtttggtagatgttatta

SEQ ID NO: 343924 - DNA, 1000 bp, Homo Sapiens
ttttttttttttttttttttgccaaatgttcatataaaatttactattaaattggttattcaaaaataaatttttaaaataaaacaaataaattggttattaaaatctgttctgctgaaagagtctacaaactcttaccctagacaagtataaaattccatgcagaggggacagaaatgacgattaacagaaatgaacaaaagcatcagagacatgctagtaaatgctagcttatacattctgctgttcatgtatagatctttatccttcataaataatgtatctatacaataaacctgtatttcatcttcctactcataagatttaatacattcattttttaaacatatttcctatcttctaagatgttttttcacttaatcaatggttttcaaactcgaatatcagtgaaactctttgttccaatgaaatctcatagagaaccccaacatataaaacagttaaaagcagaactgctctgatacaaaggggaagggtgccagtagacacagtttgaaaatcaatgctgtaaattgttcaagaaaagctgaagtaaagatatagccaattggaatttcttcatttccaatgattataaacaatttccccactggttctcatttttaagaacatttgagtacagctgcttatacctcagctgaatgaaataaaagcacagtgccttacatgtagtatttaggtaggtacttaatggtttgaattcttatttcttttatcatactactcaaaactgcaaaattaatataagatataatcccgtaactttagattattaaagtaaggtttgaaaatattcaacatgtgatagaaaaattttctaaaggttatcattgcttcataattctaattgctttagtccaagtccaaacattatcgaaaaggttcttcagagtctcactcaagaaaaaaaaaaaatcactctgtagttactctaagaagtaagagtatcttcctgtgcaatgttgctatattttagaat

SEQ ID NO: 343925 - DNA, 1000 bp, Homo Sapiens
acttacaaaattaattttattttgcaaaactcaacaaatacatgttcagatctggtttctcttcaaaacatgtgtttgtttttttaacaaacatgcaagttaatttggcatgccaaacatctttctctctagctcgccttggaaaaatttttttcataacacaaacaagggtgcaaatattgtccaaacctatttacatttttaccctctagaattacatacattaatatttattgggaggaaagcaaaactgcaaaacgtagtctttggcattcacatttgcttcagcagtataattaaaaccttatatttgttttaaagataaacagtttgaaggaaatttaataaatcttgttttggctctgcaaaggagccactatatcaaagcatttaactggagctgttgagttcctgctggtagaatattacttccagcctatttattagcttgtcttccggtggcccaatacatgcttttttccctctacactgaatgaaagtacaaaaagaaaaccatttcttttctctttttcccccagcatcatgcaaggcaaggcaacaccacaaatacaataactgaatttactttgattatactttagtttcttacacttaaaattattttgtattataatacttacttggttatctaaaatcaacattgttgattttaaacggttataaagccagactttaagaagcatttaaaacaattcatgaactctgtatgaaaggaaataattgcctccagcttattcttttgcatttgaagtaaaagaatttccagtatcatcagtttactagaaaataagacttagggggtccatataatttattcacatctttttatacatcgtaaacaaggataggatacttctgacagtagcctataaagattttttaaaatttatccttcagtatagaataagtgtcaagggagcactttaagcatgattctggtaggtctgttaggagtctattttccagaaaaattttgtag

SEQ ID NO: 343926 - DNA, 1000 bp, Homo Sapiens; identical to SEQ ID NO: 160752

SEQ ID NO: 343927 - DNA, 1000 bp, Homo Sapiens
ttttttttttttttttttgtggagatgaggtcttactatgttgcccaggctggtctcaaactcctggcctcaagcaatcctcctgcctggcctcccaaagtgctgggattacaggcttgagctaccacaccctgccatgactctttaattctgcatttttgtcagatactacaagtgatccttaggtactgtaaagcgtaaggaccattaaaattaaactattttaatatattttattacctcattaggctcagaaacaattaaaaatcttctttccccctaaaatactttaaaaacttgaaggtgttcctcaaggacaggaaagtaagatctggggccctcctattttaaattaaaaacccaaattatttgacccattcttctaagggtatatattgttcatacttcaagcatctgtcttcctctctaaagcctccctagtttcttcatctgtctacttaggagcaacttaaactagactataatctatcacagctcaaaaagaaaagagtacttactaaatgatcccaaattaaactcgtttaaaattaataagtcaaataaaattaataattccattcttcttagatagccagtaggaatagcagcttcttccaagcatgagagaatgggtgtgccttttatgcccaaatcaagaaataccaaaaaacaaacaaacaaacaaacaaaaaactgtcatgaattttagtatcttattaatttctaattagattttaacttctaattttggtaagtagttcaaaataacaacaacaacaacaacaaaaaaaaaaacacctgaaactagtggaaaaaacttccacagctttataataccgtagcattctttacacaaaagtcaattcctaaaccctcaaatttcagaacataaaaataaatttccatttacagatttcccccttccagttccaaaagtagttattctagagtaagtattcaacacataaaatttagctgaatcaaataaaaaacaatcacc

SEQ ID NO: 343928 - DNA, 1000 bp, Homo Sapiens; identical to SEQ ID NO: 160753

SEQ ID NO: 343929 - DNA, 1000 bp, Homo Sapiens
aaacggggtcttgctaatgttgctgctcatgttaaacttgaattcctgggctctagagatcctctcacctcagcttcctgagtagctgggactacaggtatataccactgcacccagctgtaagaccaagccacctttaatgaacaaatatccttcctgttctgctaaagtacagaaactatttctactaggagccagtgggaacctaggggttatctggagcttagctccagctaagtgacaggaaagggagggtctagaccagtccctgctgatgtgctgctccacattgtcaaagcccaaggagagatgaggcctctgggaccagagagggccctggtgctaaggtggtggtggaacagaacccagcagccttcagctggatactgatagcttcatctcctgaaggctttcagatgacagcagctggacccaccgttttacctacctgtgtccactcacatgggctcaggatgtggacttagaggctctcctttaataaatatcttatacaatgattctgtctttggctctgtttttcctgtgcaggcccgcagagtgccaggtgcctctctcccctcctctactattttggctcctgctatgaaaagaatagtaaaactactttatagagaggagacgctttagctggagaacaactctgtcttcctaggaaccagggacagtcaataaccagaaaggacagagggctaaagggccttggctaatcttactatcagatgggtggcagacaagttaccagagagaagcagactatcactttttcacatggtcaaagcagataggcacagaaaagcatctatgatcccctgaaagtccttggagatggcactggatatccccaaattttcttatcagagggtagaaaacttgaaaagagtctttttttgagacaaagttttgctcttttgcccaggctggagtgcagttgcacgatcttggctcactgcaacctctgccttccggtttcaagtgattc

SEQ ID NO: 343930 - DNA, 1000 bp, Homo Sapiens
ttttttttttttttttctttttctttcttttttttttttttgagatgtagtctcgctctgttgcccaggctggagtgcagtggtgcaatctcgactcactgcaagctctgcctcccgggttcacgccatcctcctgcctcagcctcccgaatagctgggaccacaggtgtctgccaccacacccggctaattttttgtattttttagtagagccggggtttcaccgtgttagccaggaccgtctcaatctcctgacctcgtgatctgcctgccttggcctcccaaagtgctgggattacaggcatgagccaccgtgcccagcctcagcctctgttttctaaagtgtaagatactggtaatattgccccatgaactttaaagggtagtggttaaggtatgagggaacataaagtatttggtaaagtataaggcggtaggaaataaattactaaaattattatccttgcaacctagctgacgtgaaaaggggttgtctccataaaggatgcgggccttcaggggcagcattattctgcaggtctcctgcttcctgatggcacaaggactccacatcacccagtcctaccttaaatccaatcggacaccagtccacaaactggttggtgtgcttgctcttgatggtggcgacagccgcactgacatctttcaggaccacatcccctctgtacaacatgcagcaggccatgtacttgccatggtgagggtcacacttgaccatctgattggctggctcgaagcgggcactggcgatcttggccacggacagctgctcatggtaggccttcttggctgagatgaccagggcgtaggtggccagggggaggtggatgtgggggtacggcaccaagttggtttggaattctgtcaagtacacattcagggccccatcaaatcacagggaggccgtgatggaggacacgatctgcccagacgactgaggttggtgtacgtgggacactcgatgtccaggttgtgctga

SEQ ID NO: 343931 - DNA, 1000 bp, Homo Sapiens; identical to SEQ ID NO: 160754

SEQ ID NO: 343932 - DNA, 1000 bp, Homo Sapiens
tttttttttttttttttttttttttttttttttttttttttaataattttttttttttttttttaagggtgggggaaagatctttatttactgatacagaacaatctgtgagatggtttagtctttaaaaaatggacaactgtgtatattatgctaccatttctttaaaaaaagaaaaaagaaaaaaaaagtaaagagaaggaatcaaggattgagaaaataagccacagcctgggaggaaaatatttgcaaaagacctatctgataaaggtctgttatacaaaatatacaaggaacacttaaaattcaacaataagaaaatgagcaatccaattaaaaatgggcaaaacctctaacagatacctcaccaaagctatacagatggcaaacatatgaaaagatgctaaattcatatattattggtgaactgcagattaaaacaattaataccactacatacctattagaatagttaaaatccgaccagatgtggtgactcacacctgtaatcccagcactttgggaggctgaggcaggcggatcacttgaggtcaggagttcgacacccacctggccacctgtgtctggttttcacagatttggcatctcacaccaacaggaaggttcaatggtgggaaattacctgtatgtgactttggtattatataaaccagaactgcaaatctataaagatatagatttgagattcaattctgacattacctgcttgactttgagcaagtcaaacatcttctctttttccttgactctaggatgtgaatagtaactcctacctttcttgcaagggtgcttttagcgttagaggtgcttgtttacattaaaaggcttagcatagcctaaagctccatcaaaagtattctttgatttctttgctttttcatggcttttaatgagccattaggcactccaacccatcagcatccccaagacactgttctctccttcctctgacaagtggctagttgttagtcagtggcat

SEQ ID NO: 343933 - DNA, 1000 bp, Homo Sapiens
ttttttttttttttttttcaagtttaaaagtcagaatatatttcactgaaaatatgtgtatgtgtgtgccttcaagagtgagtgctcctcaagggagactcacacagttccttacaacataaataagaaatagacgtaatggcttcactcagtagaaaactagcagcatcattctgggccatggggcattccccaggggtcaccatccagcagcctctccctgggggcagaggacgcctggtcagaacagctataactcatccatcatggcgagcaaatcgtcccctttgctggtgctcagccttggctgctccgtgatctcaaactcccccatgattcgagccagctcctcgctccgttgctggtcctgggtggcttgtatgttgataacttcataggataactcttctggcctggttagcgctgcttgttcctcttcttcatcggtggtaaagagattcaaccggaatccgggctcagggccactgggtttcttaatctccatccctcccatcagcctggccaagaaattcagctcttctttagcaagagggtttggagcaatgctttcctgggtccatgaggctaagttctttgatgatccagacacatgagtttccacaggctgattcacgctgtacatgttagttcccagtttcaggactcggtctccataaagttcaaaagaaccttctttgggtgcagggacatagtttccaccatgcttgaattctatcctcttcacttcttcacctttgttgttgaacattctgatgagtcctggaacttcagttccccaaggaacaggcccggacaccggcaacacaaagcgaccgttattattctgaactttgtcctttagaaacatggatactcggatgtgcaggtcttggaagaagatgaggagtgtctgccggatcagctggaactcccctgcagagagaccaccatatatttctgtcagctgccgcaaagtctcgtccacttgctgcaggatggt

SEQ ID NO: 343934 - DNA, 1000 bp, Homo Sapiens
tttttttttttttttacaagttttaacattttaattgctgaatatctttaagtgaacatcagtattttctggctatgaaatgcaaaaataacacatttacttaaatacagttaacacctaaaatttaggtagttgtaatgagttgtaataaacaacatacttgtaatagaatttacagaattagaaaaaattttttaaactagaatactctgaaaattttccaagcattgtacattataaaatacatatttacaaataatattagtagtgtattcatggggccaggcatggtggctcacacctgtaatcccagcactttggaagtccactgtgggaggatcactcaccagaattctgagaccagcctggacaacagagtgagatcccatctctacaagcaaatttcaaaattagctgggcatggtggcacacgcctatagtcccagctaatcaggaggctgagatgaaaaggatcatctgagcacaaaaatttgaggcttgcggtgagctatgattatgccactgcactccagtctgggcaacaaagcaagaccgcttttctcttttaaaacaattttttaaaagtgtattcacaaacatttgtccactattttaaacttctatagccttgttaaacattaaacccaagaaatggcaaactatctataaaaataagggcacagctacaaactgattgccaaaaaagtgttataaataaaaagacactagaaaatacaaatacatcttatcttgcaaactcaataatggttcttcgcacaaataataaaaatacaaaaaataaacctcaaaattgtactcttatagaacttattttaataactttccattagtaactgttcttttttgttgatgaataactttgattcagtgtctattcatcttaacctagtaaataatgaatggtggctgtgatttacaaaagaataaaataaatgagtacccacagttagtgcttgacacgtcaacaggtagaaaaaac

SEQ ID NO: 343935 - DNA, 1000 bp, Homo Sapiens
cagaaaagatatttattatttacaccactgaaattagtcctgtaagaacaatatacaccatgtttctttaaaaggatcaattcctttcaaatacaagaactgtataaagcaatattgtcaacacaaaacagtggtcacattacgtatctgcaggcttaagcattgcaaataatatatttttttaatcttatggctagatattttcactgaaacagtgttagcacttagacaagatatagctggaacagaacaaaaactttttgttcatgctttttaggaatgaatcagtgatatgtcccttttaaaaatttattgcctttaactgcttttatgacaatggttttaggaagattctacttagccaccaaaaagagactcattcttgttccttagtttttattcttcagtcttctgtttctcatactaagacacagctgtgtcaagactgacattttccagctttacttggacatgtacacacatacaggcctaactgagaccgctcagaatttagaaatgtaactagtggcatacagaagagaaattgtgtctatgacaaagaaataaaaaattcttggtaattttaagcatagcaaactaggttctttaattaaaaagtttttttttgttttttttttttggtttgtttttaaagggaaaagtactagtttcaacatgggtttggttttagatttagtcagacaataacacaatgagacaaaaacacaaaacataacttgtttccaaagtcacaaaatgacattgttgagtatacatttttctccactttgtgtgtgtgtgtgtgtgtgtgtgtgtgtgtgtgtgtgtgtgtgtgtgtggtgggagggtggggtggtcagtaaccaacgctggagaaaatatttttcaagcgtaacagaatattcatataggggacaagcattttttagcatattgctatcatcttcaaaaaatataaaattaaacttacaaaaaactggaagaccaagtataagcagta

SEQ ID NO: 343936 - DNA, 1000 bp, Homo Sapiens
ttttttttttttttttttttttttttttttaattctcataaagacagaaaattttaataatattggcatatagaattcagtaatatataaaagcacaacacatcatagccaaatggagattattctagggattttaggtagacagaagattgaaatgtaatattaacagaataaaaaagagatatgtataattattccaatagatgaagacatttgacaaaacttcaatacatgtttaaaataaaaagactgacttgaaaggaaagggaacttcctcaatctaataaaatctacaattaacacatacttattgtgaagtactggatattctctctgtgggaccaggaacaaggcaagatgtgcagtcttgctgcacgtattcaacactgtacgggaatcctagccaattcaataagccaagaaaaagaagtaatcgacataaaaattagaaaggaaaaagtaaaactatatttacagataagatgaagcttacataacatattctacataataatgttatctagaatattctaagaaacctagagtaaaatattagtatagacaagtgaatttaacaaatttgagaattcaacatttactgaagatcctgggttaagggctgaagatggaaatataaattaatatgatgatactgataatggtagctattatattccagttaaaaacctactatgttccaaacaccaacggaagccaatttgcatataatttccaacatattcattacaaagtggttgtgtggtaggtataactatccctattttccagacaaagaaactaaggcttaggaagtttaagtaactgacccaaggtcaaacagatattaggggaaggagcagatattgatatcatggtccatgtgagttgacttcccaggagcgaagagtgtggagaacacacagattcctcactgctggccatcatttgtggctgaacacaacaagatcttagccctaaattgtgtgtttccatttgatta

SEQ ID NO: 343937 - DNA, 1000 bp, Homo Sapiens
cttgaacatacttcaattttaatatgcaatttaagaatataaaatgcattctataaagaaaaagagaaaaattgactcaagaacaaaaacagagctgtgagaaatgaagactagtgttggagttatctaaactcagtcttcaacaggactgcgtgcaacgccaaggctcagagacatctcatcagcttcaggaggtatatgggtacttccatcgcaaaatggctccatcggcacttacactaacaatatattgatttcctggacttatgcggatgcgtgtgatgttgccactgtgtcccaccccaacgtgagtcacttcaccctcattataatcccaaactttgaccagatggtcatttccacctgtgacaaagtgcaccccttcctgtgtgatatccatgccatttatcgacccagacagggaaccttccaattctctgattactgtcccatcaaatacttcccagtaagcaatctttctgtctgttccgctggtgatgatctggaactcctcagggtgatagcacacacactggaataaggtgttggctagtatcatctgattcctcctgagacgcacaaggtcccaaatgatacaagtcccatcggtgctggcggtgacacactcctcgttgttcctcttcaccctaatgcaggacactgatgacttgtgttccttcagggcctcctccagcttctgggtctgacagcctatctgccataccctcacctccccttccccaccgccactgatgacccttttacagtcactggtggtggcgatggcagtgacgccgatcctgtgagcattgttaatgacatacatcagtcggcctgtctctggggcgaaggctcggattttaccgtcgttccatgctgaaatgatgcttttgccgtccctcatgaagtcgatgccgtggcaggtcatgttgggcacggtgatccgcagcagctccctgttggatgatgtgtgccacaccctgatatccttcttggcaca

SEQ ID NO: 343938 - DNA, 1000 bp, Homo Sapiens
tttttttttttttttttttaaatacactctattttattttgtcttaaaatagtttaacctttatgctacagacttatttcaaaaaacagaaaatcttatcttgcaccaaaaaatatatatataacactctgttttattattttttctccaaagaccattaaatactaaagggaaacaaaaacgaaataatgaatgtaaagaaccaaattttgttttaaaaactagagttgcacatttgaaaacattaattctaagcaatgatttgtcatcactgcatcaagtccacgctcacactccagcaacagcagatccattaactgccaagtgcattggttcctagccatacaatggctaacatttcattttcacggtaagaggagcaaaaggcttcaatggcctctgtactctttaagaaacaaaacaacaacaaaaatatttcctagttatccagtgatttttttttaagatcactaccttttaaaatttgttaagagaataagaagtaagtagtgttttaaataaaatgaaaaaatacaacagcatcagactaaaatacgtgattattttaaacaaacagtgcacaatctgaggaagtttggttagggcacaatcatttttatatctacatggaagtcacatcatacacatattggagaacagggattggggagcttgctttgccttaaaaaagtttaaaactaaaagacaaaatagtgtccccagctttttcaaaaacctttgtgacagtataaaaagcaggtaacaaacttagttttaagttagttatggtgctaatctgctaaaagtaaagatgaacaaatgactacattagtaaaccagacaattcatattcataattgataataaaagcaaagtttatgggatgtttgattgccaagaataaactgaatgaaataaattgaataaaaaagaatgcattattcattcagtctggcccctaccatcaaaatgaaaagacaattactggagagcagcaatt

SEQ ID NO: 343939 - DNA, 1000 bp, Homo Sapiens; identical to SEQ ID NO: 160756

SEQ ID NO: 343940 - DNA, 1000 bp, Homo Sapiens
tttttttttttttttgtgtttaacagtttattttaaggctactacaaaggatacagatgaacaacagccacatgaaggggtacctggggcaaggtccagaagcatcctgagcacaggacttgctgacttcataaagctggagtgcgtcaccttcctggcacatcaaaatgtttgccaaccctgaagctccctgaactccatagttaacggattatgtcttgttgacataggcctgatggattattgacacaaatctccagcccctctcccctctctggaggtgggagactgaaagtttgaaacttccaatcatgatgtggtctttgtgagcagcccccatcctgagttatccaggtgcccatcaagagtgacctcattagaacaaaaaattctcctatcactgggaaatttaaaggaatttaggagctttgtgtcaggaactggggtcaaagaccaaatactagaacaaaagatgtactccatcactttggaaattacaagggttttaggagctctgaacaaggaactagataggaagatcaaatatatatttcttattatatcacattatcacatcaactcaatgtacatttattacactttcattacaggttgaagtttacagactggtgtacactaaatgcatttcaggtaagctgctccctaaggacctatacgaaagcccaataatcagatgataaactgtctccaaatccagcttccaggaagtttacctatagactgaaatgccatcgatggaatttagacactagtgatctttaagtccaaagggcctgggtatcctaacctcatcagcttgatctttttcttccaatatcacatctgtacccagtctttttttctttttttctgagatggagtctcgctctgttgcccagactggagtgcagtggcacgatctcggctcactgcaacctccacctcccaggttcaagcaattctcctgagtagctgaggcaggaggatggcgtgaacctgg

SEQ ID NO: 343941 - DNA, 1000 bp, Homo Sapiens
cacaatgcaaaaacaagacattttattgaaataatttaccaaacaatgaagtatgataggtataattcaattaacacaggcattttagagattaaattatatgttaagacttaagagaattcacagattcataattgtattaaggagttcaatatctacatttagaaaacaaagtattgttctcaatcactgaaatgcttaaatgcttgattcttcaaggaatcttctcggctgtaaagacttgagaagcttgtctcctggcaagtttctcctctagagaaagagcaccctctactgccaatatctggtattgcttatgttttaaatttcccatagatttccgaagttgcttgagactgctagcctctatgtcttgctttaataatttctgcatttctcgagaaggacatccaggatcaagtattagtaagcataatgttcggttttttttctcttcaattccaataacagttcgactgtgaccttgatgctgaagatagataggaggtttagatgtacacactacctttggactcccttctccctctgaagaataatagttcaatatccattcaaataagcgagggtgtgtacccaaaggaccagttgatttgtgaaaatcaacaatatgacactttacccttagggaggtcaggagtatatatacttcacatgctccaatccaggcctttgttccctgtaacctgttattaagttgagaggccccctgaggatcaaaaccttccttccatgcatcttcaatcatagattgaatttttggaatgcaaggaatcaacataccttttaagcaatcgtcgtaagcatcattttgtaataatgatgaaagtagcatttggaaatttctgtaaccacaaccccaacctttgtcgcctaaagatgaatgaaagtgatccaccactgaagaaagccacacccgtctcacatctgtggcagcattctgataatacctatgaagtgcttcaataattccggaagtttt

SEQ ID NO: 343942 - DNA, 1000 bp, Homo Sapiens
ttttttttttttttttttggagagtgctcaatggacgtagttattattatcatcatcagcacagtgcggggcacatggtgggcattcagggatgatggcccttgtgtcacagccgacactcttgaccagtgagtcctctctcctccctttgttgactcctgaccgtccacaaatgaggttcagaatcctccatccagcatcttccctggtcacatggtcccaaccttttgctccacccccttctctgttccccccgcagtccatgctccagccatcctgactctgtccctggatttctggcttactgacacctgagcctgtgcacaggccctcccttctgtatagagcacgcttcccatcttgtggacttgcttcccatcttgtggactcggagggttccgagcagccgttgaggctgagctcctatgacacctcctccgtgaagcctccctcacttttccattaccagtgaggcctgccacaacctgatttgtactctgatcctggcacgcatgaagccgtgttgccatttgttaacagtctgtcctccactagactgtgaactccaccagggggggaaccaggtctgattgcctctgtgtccccagataccacttagcacagagtcgagcccatagtggctatcagcaagtgctaggcccagcctgccacccacccaccactcacttgggggctggaggcattgcacgcatgcggggcatgtgggacttgtgggggcagctgagcagcgaggtttatagaggaacccagggcggcagcaggaaggatgaaggatgagtgtctgaaactgggttggcaggctcagggcatagccagcctaagctgggggtcaaaggcccctggccccttcactcccccaggggcacacagtgtcggcggcacgatgtgggatgccccaggaagggcaaggccatggggctgggctttcctccatcgacccaggacagagctggtgctgaaggccccatcagcatgactg

SEQ ID NO: 343943 - DNA, 1000 bp, Homo Sapiens; identical to SEQ ID NO: 160758

SEQ ID NO: 343944 - DNA, 1000 bp, Homo Sapiens; identical to SEQ ID NO: 160759

SEQ ID NO: 343945 - DNA, 1000 bp, Homo Sapiens
ttttttttttttttttttttttttttttttttttttttttttttttttttttttttttttttttttaaggataaaataagtttttatttatagtcttatagtaaagggggaagccttaacttgcaagacaattcttcggcagtatgtacaacatactttttatttccatggaatggaatcaaacacgaactgagactacagagtatacactagaaatcagcaaatgccaggaacggagtaggaaaaagacaaagaaatgaggcctaaacacacaaaacccttcactggcatctgctgaccacagccagaaccagggctggatcacacaatggagacaggttccaggacagtaggaaaggaagtgggatgagggctgggaagggtccgcactggggtgcgggtttagtaccaggtaaattgctcttggtatttacatacaaaatcagttggctctatttcttagaaatacacacgggaagaaagaaagatttcatcattactttatgaatctgtcgctttgcaagaccgacatcatcagaaataggtacaattcactcagattcaaatttaagtagcaggaaataaatatcaaaacatcatcactggccctcaatacaaaacctctatgccacccaaaacaccctccctgtcccaaccccaaatggccactccctggtggctgctgcttcactgctgccatctcccatacataccacgagagtgtcacacggccctccgtgaggctggcgccgcaggcttaaacagctggctgagagaagcaggagtgaaacatgccagcgactctgtgctgcgaatctgtccccacttcctttttataccacaaacttctctaaggatctggtctttcaataggagcgatacatagctttttagaaaaaggaaaaaaaaaaaacccttaaaaaggaggagggttcattctgattactccaaaccggtcatcttctcaaagtagagcagttcagattcacaaagtctatca

SEQ ID NO: 343946 - DNA, 1000 bp, Homo Sapiens
ttttttttttaagattgattatgagtttataataaagtcaaatgataaatacataaggatttatttatataggtttgaaattatctattataaaaaaatttctaaagaatagaaaaatacagaaaacaaaatatttcttaacatttgaatagatatgaaaaatcagactaccacaatcccatgggaaaaaccccctacttagaggcttttctgagacactgtcctaagctcttggccccacaggagatagggaagaggccagataggaaagtcagcaaggcccagctccttctgaagcttaagatatgccaacttgctgaaacccagaggaatgctggctgtgtatgacaaaagagcatctgtgattcaggtaatgacaagcagccccccgaggcctccccagtccccacctgcctttggaaaaccaccctctggggaaggccacactcaggccagaagcctcccactgagtctgcctggctgtcagccctgcctagctgctctgataattacgggggaaaaaaagctgattttgcatgtggacctcagtattacagaggagcagcagcagccccgtgtggacatctcagatacatttacgacccagtcagtgcagcctcgtgggcacagctaatgagccaggaagaccaaggagcgtcatttgctaagccaaaattagacaccatgctgcctaacaagaacaggtgataaaaccacgtttcaaagtgggctgagtaatacagctttgtgttagtcattaccatttaccttatttacaatggaaaatgaaaaaaaaaaatctcagtaaaagaatctggtattaagaggcatcagaagacaaaccacattttgcaattataggacactatcaacaaaggacaaactcactcactcagccagggttcaaaggcacagcacaatgacacagcagtcagtccacgctagttatgcagcttccagaactttaaacagaaatgaaacccttaagtgatggcacaat

SEQ ID NO: 343947 - DNA, 1000 bp, Homo Sapiens; identical to SEQ ID NO: 160760

SEQ ID NO: 343948 - DNA, 1000 bp, Homo Sapiens; identical to SEQ ID NO: 160761

SEQ ID NO: 343949 - DNA, 717 bp, Homo Sapiens; identical to SEQ ID NO: 160763

SEQ ID NO: 343950 - DNA, 1000 bp, Homo Sapiens; identical to SEQ ID NO: 160764

SEQ ID NO: 343951 - DNA, 1000 bp, Homo Sapiens
tttttttttttttttggtggggaatgcaggatccacttttttattgcaggaagactatgtctagagcgaaggctacacagaccccacgatgggggagtgggggcacccacatgcggggggagagggggcaggggcggagtcacagcaagcatggcctggcacagtccccagcaccagggatgcccaggcaggatgggccagcagccaggacaggctcgggtcccctcctattgcagatgccctctctccccagggtcgggcagggcctgaggtgggagaggcctggaggtgggcagggccccaaggagattgtgctatcagggtgtgtccctgagaaagggccgcagacccctgcccagccccactctctccggcaccttcagaacccagaagctactgccaggacaggagaggaggcaacatcagctgctggtgggccctgggccagcccaagttttggggggacccagctctgctcagacacaatgccagctcttctgggagcccggtccacgtgctggatagcaacacacacgcacgtgtgcacactccctctctctgagtgtgtccaataaacatttgttgagtaaacactcacacgaacacagaggaaaacaaacatgcttgtaccaaatcagacacgagcaatctgttacctacatagtcccacctggccacatgactacagagacacatgtgtgcaatctctctctctctctcactgcacaaaagggcgtgcgcacacacacacgttgcttcctcacacccaataagaccaaaacctccatctcaccttccctcactaacttagctgccatgctccgagccccgctgtggagagacccacatggtacagaacaaagggcagcttccagccaacagccagcgaggaactgaggccttcagtcttgcaacagcaaggaactgaatgctgcaacaaccacatgagcttctaagaagcaaatccttccccgatcaggccttcagatgagacctctgc

SEQ ID NO: 343952 - DNA, 1000 bp, Homo Sapiens
tttaaaataccctgggcttttattattttattttctgaaaataaactttgaatactaattgtccgcagtctcttctatagaataaataacctttccttctcccatctgcccactaaaaatcaaataccgatacaaaacacaagctcttgactatagctgtcttttaaaaatagcagatattataatttttttctaatttcgcatttgtatttggccaaagttgaataagttttagtgctgctagatgtaactcaaaccatttgctcgatatctgatgtatttgtaacccatctatttttctcccaacatgactaaattaaaatggctataggtgctattttagagtaatgtatttgtagattttgtgtacaaactctaaacaaaaatagaaaatttcctgtctggagtgattcactgatggcctaccatacagactgctctgaggaattcaggataagactggcctttaaaaaaaatgtggtaaaatatactacataaaatttaccatgttacccgttttttaattttttaaattttctatagtttttctttagagacagggtcacactctcagctggagtgcaatggcaagatcatagctccctacaacctcaaactcctgggctcaagcaatcctcccacctcagcctcctaagtagctaggcctacaggcacgtaccaccacacccagctaaatttttaaaaaagttttttcatagaggacaggtctcattatgttacccggactgtcgtgaaattctgacttcaaccctcctgcctgggcctcccaagatgctaggattacaggtgtgagccactgcacccagctaagtctatttctaacttaaaatactttatactttaatttttaatttgtagtacctttaagttataatgcatcaaatgctgttcctccattggaaaacagccatttcatgaataattgtgtagtctgaacctgtgtgtcttgatacattcttgtcttctaatgctatgcatg

SEQ ID NO: 343953 - DNA, 1000 bp, Homo Sapiens
tttttttttttttttttttttttttttttaaagaggccaaacaatacatttattattttcatttaagttgcttatcagggcaaccttccccatctgggaacaatctagcagtcatgtaagaagcacatgcccccacaattagtttgaactccatcctggaattgcagctggttgtgattctaaggtacaggcatgccaggagcctggatttgaatagtcagtgggattttgtcacttagtggaatggataataagccaaccaatggtcatcagtctcacacataaggagtgcaggctcgtagggtatacacagtactttctcaaaagcattgcaaatgactgatttctctatgttgaaatttgaaaacccaacatctatctctctaacaccaaaggattgagccttccttgcctggctggtgagtaagagtgagcctctataccaaggatgtaccctttggctgtgtgaggttttcagaagtatcagaagctgtatacatttcctgtggttgctgtaacaagtgactaccaatttgttggagccttaaaacaagaaagatttattctctctccgttctggggaccagaagtctaaagtcaagacgtcagaggggccaagattgctctgaggggtataagggagaatccttcctgcctgtcccagctcctggtggctccaggcattgcttggcttgtggtggcatcactccagtctctgtctgcatcatcacacgaatatcttgtcttctgtactcaaatctccctctacctgtctctgataagaaccctcgtgatggcattaggttcactgggatgatccataatgacccatctcaaaattcttaattctatctgcaaagattcttttccaaataaagtaatatttataggttctgagggttagggcatgaacatatcttttgagggctaccatttgatccatagctgttcagcggtttacattctcggatttgacagtggcatgcttcacttgtgactg

SEQ ID NO: 343954 - DNA, 763 bp, Homo Sapiens
ttttttttttttttttttcaagctggcttttcgtatattgtgtataaaaagatcagattcaggatgatttggtgggattgccaggggctgaccggagtgttgctgggaaggagcctcagctccgctccaggtcctccaccaggtaggactgggactcccttagggcctggaggagcaagtccttgcaggtccagttccaggctggtgtgaaactgaagagcttccgcatcttgcttgggttggtgggctcggcccgcactgcctggtactgctcatccgtcaggaccttcccgtacagagcatccagcagccactcaacgtttgtgaccctcgcgataagcgcagcccggtgctggtctataaagtgcaggcctggcttggctgccgactgaggaggggcctggatcccagctggcgcggctccagagccctggtgcgtggccgcctgcagcttgaacttcttgagctcctcggcggtcaggttctccagcgcatccaggatggcgtcgcgcgcgcgccccatggctccaggatccccggccgctgccgccgctcaccccgctgcagccgccgaccaggaggaagtcggctccggggcggaacctggactccccgccttcctcccactctggtctcccgactccccgccccggtccgttgccctccagcaaaaggcgcttccttactacacccttggtcccctcccacccaggcctctggattggggccccaggccgtcgggggacgccaggatcgcgccctc

SEQ ID NO: 343955 - DNA, 1000 bp, Homo Sapiens
ttttttgtttgtttttttgtcttttatttttcctttttgtggagaatggggtctcagtatattgcccaggcaggtcttgcactcctgggctcaagctatcctcccgcttctgccccctgacagctgggcttacaggtgtgagccactgcacccggctcaagttcattaaaaaaaaaaaaaattataaacataagtagtggaaggggtccagccatcctctccattcatcatgccactggggggtccccactgaatgctgccagtgccagggaactccctacctcccagaggtctggagagacccaaatcttgctcacactgaggaacggtgggcagctgagagcaggtcttctccaggcagcttgagtaggaggaggtaaggatgagggtgggcaggtaacataacaagccaacattgaggccaggtgttttcagggatagaagtagtctgggggctgctgggtctccatctccatcctggaggctcctgggggaggcctgcagcctgggtctggctggtgtctggggccgcaggggcaacagatattccctcctggagcctcagtggcgggagagcatcatcacaaactcgtcaaagtctacggtgccatccccattgaggtccacttctcggagcatctcgtccagctcaggacccgccagcggctccccgagcagagccggtaccgcctcccgcagctccgccaccgtaattcgtccatccctgtccctgtcaaactctcggaaggcgatgcgcagctctcgcacccccagcatgtgcgccgtctcctccctcagctttgggcctatcagttctacaaactcctcaaagtccacacggccgcccatgcgcatcttgatgtgctgcgagacctccaggagctccatctcggtgggcatgtagcccagggtccgcatgcagtcacccagctcccggtggctgatgtagccgtcacggtcagtgtcaaactcctcgaaggcggcctgaagctcgtctagc

SEQ ID NO: 343956 - DNA, 1000 bp, Homo Sapiens; identical to SEQ ID NO: 160766

SEQ ID NO: 343957 - DNA, 740 bp, Homo Sapiens
ttttttttttttttttttttttttttttttcccggctaatttttgtatttttagtagagacggggtttcaccatgttgcccaggctggtctggaactcctgatttcaggtgatccgcctgcctcggcctctaaaagtgctgggattacagaggtgagccaccgcgcccggcctgctggggtttatttgtctagctggggcagggtagggagggtcccagtcccaacagcctgggccttgggacagggcgggggcagtgatggcccctggagccctactgggggtggtagatgtggtcttggtcttcctccggtcccaggagcacctggtgatttggcatcacccacaaccggggcctctcctcgccctggtcctcctcaggcggagggtggtacaggctgtcatggtcgggctcgggactcaggacacggcccagggtgtcctcggtctccatccaggccttggtgcctggaaggatggggcccctgccctgacctcgtggcttctcctcggtggtcaagagtttcggcttctggacagggaacagcaccaccagctggtcgtccttctccggaggctccaccacacgggcgccccaggccttctctgggtcctgctctgagggccagtgtttgacttgcatcttgatagggaccttgggtgctgggactgcacctgcctcccacagcagcacaaccaccaggctggtgaccaggaggagcctcctcatgtctggggtcc

SEQ ID NO: 343958 - DNA, 1000 bp, Homo Sapiens; identical to SEQ ID NO: 160768

SEQ ID NO: 343959 - DNA, 1000 bp, Homo Sapiens
tttttttttttttttttttttttttggccataggtagagattaagagggctaaaacaaaaatacatatatgaattttaatgataacacatatatgtatatttgaaaacaaggccacataagcatggctggcacattgggccattttactggctggccttcaaaaataaagattacaaaaaatttatccacatacacttttttatatccctaaagattacaaaaaatttatccacatatacttttttatatccctgtataaaattgatgccaacatgtttggcattttagaaagacactcaaacagattctggaaaaagaaattgcttcatgggatgaacagactaggtcgcaaatgaaaaagctaaacatttgttttttaaaccacaccacaaatttccaggtaaaactgattgaaacttatgctcagagatatcttcactgtacttacatgacttgaaaatctgtaagaaccaaagcccctaaattctactgaacatacttcaaacattttgcctagtaaaattttttttaacactctcaaaaaattttaaaaagaaacaaattttctctggaaaggattttcagcatcttgaatatatatattttctcagagtgtacgcagcccactcttctcttgataatcttcataaaaacgtctcaatgactcaggaattctaggtgtcacagtgctcaaggcctgagtgaaatgtcttttcatgatgagattggcttgaatgccttcttccagagccagaagagctgcctctctgcagacagctacaatctctgctcctgagtatgcgtcggtttgaaggatgagttcatccaggtcaacttcattactgacaggcatggagtggaactgcagcttaaatatttcccttcttgttgctgcatccggtaaaggcacatagatgattctatcaattcttccaggccgcatcaaagccttgtctatcctatctggacggttagtagctgccaaaatggtcacatcct

SEQ ID NO: 343960 - DNA, 1000 bp, Homo Sapiens
ttttttttttttttttttttttttttttttcgcctttaagcttatttattaatgggatctggtttcactgtgggtggcacttccactttaacgcaacgatcaaaaacattaagatctacgacaggatggatattgggacaataagcatgacaatgtcattgttgccaagccaaattttacaagaggtgaagggaagcaaagggtaactagaatgcagaggttcttcatcatcatcttcaatcagctgtcacagaattccccactactgaacctcccttacaattcttacttctccccacccctccaggtatctaaaatagaaaagaaaggaaataattctccctgagagatttccgcctccttcttctttcttttcaacagcaacctcaactgttgacagaggttccttaggattcaaagaacaattctgaagctgaaaacagaatagtctgtttttgaataaatcctaaaatattttcatttcacacccttgttccatgaggaaaaaatttacatagagacaaataggttttgttcaggcagtgtgcaataataaagtttaggccaaattagatttataattagatattaaatgctggtttggtactaagtttagggataaaatgaacccatatccacatatgtacttatagacaccaaagcacagaacagataatctagctggcatccagtgtttcttgactttggctgaatctctgttccccagaacagactgtaagctccaaaaggtggggaccatgttttggtcagctttggatttctccaacaccttgcacagtgttcatgcaaagagccactcacagaaattgttgaattcacttaaaaaagaaaacaattttggctgggtacagtggctcatgcctgtaatcccagcattttgggaggctgaggtgggaggatggcttgaacccaggagtttgagaccagcttggacaacatagtgagtccctgtctctatgaaaaaactttaaaaaattag

SEQ ID NO: 343961 - DNA, 1000 bp, Homo Sapiens
ttttttttttttttttttttttttttgtagacaacagccaaagtttatttaacgtgggaatgcttacaataaataaagcagaggggtaaagagaaacagaacagtaccttgaggacaaagaaaccccaaacccaacacaaaaatcaactcctgccttcttctgtatgccccaggctctgagaagccactgttcctccccagggtagagagactgcaaggccggcggccagcagtgcacatccccaagcagcagctgggaccctgggtcctgaggggccactggagacctaggaagcctttgcaagggcaaaacccaatggcaacatgcccacgaaagcttcaagtcagaacgtgggcctgcaaaagacatttctgggctctgctctctcctctaggcccacacacctgctgaacagacatctgtgcccaggcacctcccagaagcccctttattataggacatctactctctgttcctgtcctcactggcccctcccatcatctctctgaagactcttattatggctgcctcctaattcttccagagcagccacacccaggactgtgacgggctctcacccactgtggggtcacagacaggcatggggctggctcccatcccagctgcctcccccagcatcttcagaggtggggtacacaagactttcagggggctggcaaagctgcaggaactgtgcagcttaggtgaaccctggattctgcaagccccagtggagttttctcagcttctggaaccacaggccagagctgccggggcaatggggctcccagctttggtaagggctgttggcattaagtggcacccggtggctggaggggtctcccagggaggacggagcctgccccacactctcccacagtttcctggagtgctagaattggggttctcccacgcaggctcagaaaggcaccaggagttcctcctcttgctcaaaggacacactccctcctcccaggtcctccaagtggccaaaacact

SEQ ID NO: 343962 - DNA, 1000 bp, Homo Sapiens
tttttttttttttttttttttttttttttttttttttttaagagggagtctcgctctgttgcccagactggagtgcagtggcaccatttcagctcactgcaagctccgcctcccaggtccatgctattctcctgcctcagcctcccgagcagctgggaccacaggcacctgccaccacgcccagctaatctttttttgttttttgtatttttagtagagacgggtgtggcggtacacacctgtaaacccagatactcaggaggctaaggcaggagaatcacttgatcccaggaggcggaagttgcagtgagccgagatcgcgcactgcactccagcttaggtgacaaagcgagaccctgtctcaaaaaaaacccgcaaacgtttatttttattaaggttatctgctaataatttgtatgataatgacgcttaatgtttccatattacaaatttacaattttacttgacctttaaattttaacacttaaaaagtgaattatattaaaagttctttgactaatgttcatgttatgcattccgtacacttataaataagagtactgataccagtattttggaattaccttcactaaatgctgagtgtccagcattgctgttcttgctccagtatagcagttactggagcccagcaggacaggcaaggcatggggaacgtgaacacacatggctaagtgtctgggtgcaggacgtgactgctagaaaccagggggtatggagcagagggcagctgagcagctcaaggcttgcttctccgcagtgagactcccaagcctagaccatcctaaagggttctgcaaacatgtctcttgcccccagtaccctcatcaccctgttcttcctctgtatatagcccgagagggcttgctcgtgttagcccaagccgatttctttgtcttgcacagacagtgccctgggaccactttacagtgatgatttggactcagggacattatcttagagaagtctttatatgtttttt

SEQ ID NO: 343963 - DNA, 1000 bp, Homo Sapiens
ttttttttttttttttttagtagagatggggtttcaccatattgaccaggctggtctcgaactactgacctcgtggtccgcctgcctcggcctcccaaagcgctgggaccacaggcatgagccactgcacccggccaaacctcgtattttttttatgacagaactgtcttaaggtcttactggaggtgtgtctctcttaagagttatttccaactctgtgtcctaggtatctgagtgaggccccagctaaactactcccaaaaatttttgctcctgggctactggcatttatttctgaatgctgtcaaatgacagtgactgcagaagcttcagaataattttgcgatggttcccatgatttgagggaaacacatttttaccatgattggattcggtggcttctaggaatcttatgtgaattaagcaatcttctcgccttggcctttcgaagtgttggagctacagggtttttctccagtgtgagtcctttcatggattttaacgctcgaggcacatccaaaggctttaccacattgtttacattcatagggtttctctccagtgtgagtccttccatgtgttcgaaggtgcgaggcagatctgaaggctttcccacattgcttacattcatagggcttctctccagtgtgagttctttcatgatatcgaacggaattgaaagaaacaaaggctttcccacactgtttacattcatacggcttctccccagtgtgagttattttatgtgcatggaggcatgtggaactatggaatgctttcccacactcactgcattcataaggcttctctccagtgtgagttctttcatgtattcgaaggctaccagaatgactaaaggctttaccacactgtttacattcatatggtttctctccagtgtgagttcgtttgtggataagatacaaactgagacacatcaaggctttcccacaaaagttacatttgtagggtccatctccactgtgcattatcctgtgtc

SEQ ID NO: 343964 - DNA, 1000 bp, Homo Sapiens
tttttttttttttttttttttttttttttttttttttttttttttttttttttttttttttttttttttttttttttttttttttttttttttttttttttaggtaaaaagatgtatttcaaagtgggatcagtgaatcttcaactaaataaataaatgtacagccccccaagatgcagaatttcccatccctagtttaacagtcacggttcactttgttttacgtgcgtttcgcagatgagtggtgctctcatcagcagacacaagacttctttggcctctgcttttttttcctttcttctaataaggagactacactctgtctgtcaaaaactctggccatttctaggacacctttgccgaactcattttttacacttgcatctgcccctttgtcaagaagtaactgaactaactcttcatgattatttaacacagccaccataaggggcgtctttccatttctgtccttcacattcacattggccccagcatcaattagaagagaggccaccctctgatttcccgacaccgcagagactctcatgagtggggtccatcctgaaccagtgtccacgacgtctacctcacagccatcctttatcatccactcaatcacactgcagtggcctccatctgcagcccagtgcagagctgtacagcctcccaggtctctagcctgccaagaagcgccatgtcttcggagatatttcacaacatctaggtgtcccgcatagcacgccagcattagactgtccttgccacttccattcttcagattcacgtctgtgccattagaaactaggattttcacaagcctggtgtatcctttctgggcagcaaccatcagagcggtaaagccaaacttattgggaacatcaaccttaacacggcctccttgaagtattcggaccagcaaatcttcatcattcacactgacagcccggtgcaagtgctcactacttatgggctctctggttgtagacactgagacgagtgg

SEQ ID NO: 343965 - DNA, 1000 bp, Homo Sapiens
tttttttttttttttttttgagggtaggaaaaggtttattgctcatataatgaagctttctgagagagcagggcagattcccaagcaggtccaaaaatggtttcagaaaaccaggcaaggaaactcccttagcatttatggtggttagggatggggatggggatggggatgcgatggggatggggatgaaatgtgggtctggtgggagggctagggcttgttgggtatgaatttccagctggtgccagaggagagagcagcaggctttcttagcttgcccagatgtggggcagagggggagagggagggtggaagatgttagcagtcccatatcaaaagtggaggcagactgtttttccctctacaattttttttattatggtaaaatacacaacataaaacttaccatcttaaccattttgaagtgcacggttcagtggtataaaataaattgatattgttgtgcaaccatcaccaccatccatatccacaagtcttcatctttgtgattgcagcaaaaaagttaaccactgagggcaggcaaatcttcaggggatttagctggctcatcactatccgctcaaaattcagactctgaggatactgcaaaccttctttcaggtttccgctcaaaagctgcttgtgtctaaaaacaaaggtgtagaacacagcttggcaggctgagtaaaatggtccatggagagcaacatcgcagaatgcctttgttcccgaatcctggttattaaggtatatgtgcagccagttaaccaaaagatctaggcatggttttacagtaataagagaaataaatttagctcttgccaaaaagcttccaatataatttccagcagcctgcctgatgatggcaggattacttggatcctgcaagtttttccaaagatgttccaaaaatgcctctgcgaatcccatattaaacaatccttccgtggaatctgtcccaccacaagtttgatttgctgtttcttcagcatcttcaata

SEQ ID NO: 343966 - DNA, 1000 bp, Homo Sapiens
tttttttttttttttttttttttttttctggatatcccaagtcctttaatccttagggattctcagtttccatatttgtttaaaaaattcaaaatgtggaaatttcataacaggaaatgtggtctacaaagtgcatggagattctggcccctaagttacctaacatgaatgggaattcagtatagcaataagagcacgatagactcaagacagacagatctgttgaatcctgcctctcccacttacagatgtgtgaccagtgcgagttacttaatttcccaagcctctaggaaatgggaagaaagttagtacttatctcctggggccgttgtgaagattaaatgagatgatgtatacaaagttcttagcacagagcttgccaaagagcaacagctcaataaacaccagctattgctgctattgatgattttgtaatgatgtcactgttcttcctactctgtgctgagctcacagtggcctgctctaggccaactcctctctcaccagagtcacaacattctcccttgaggatatgcccccactgagaaagtaggagaaccactgctgatggggtggattacacatggatggtgtgaaggcacagtgagagtttggaatcactgctcaggaccactgatttaactctaatctcgtaagttgccagtttggctcaaatactgacacagctcttacatgatagcaaatacaaggacagtcaggattctgtgtgggtctttacagaagaaaaacaaattacacttaaaagtgccttcaaatctggatccttagtatttgtaattcacttccaaattacctggtttataccaagataacttccctgggtacacaccaagcttaaaaattggaaagtttctctctagcatacatcttatgatataagatatatacattgagtcctcctttgttgttgaggaaactgtcccctacgacgccttccctcctgcatgggttctccggtgagcactgaagtgggaactgt

SEQ ID NO: 343967 - DNA, 1000 bp, Homo Sapiens
ttttttttttttttttttttaaaatgtgtaatataaatttattctgtgacattttcctcattgaagatattttaacatagattaaaatacatcaatatttcatgaaaaataaattctagaagaatttagataatatctgtaatgtacatgatttgaccctgaatatccttttttttttcacttcaaacatcattttttaaaaagtaacataaaatgataaggactgcaacattcttcatatatcttgtgtctcataaattttaattcaactgcccgttcttttctcaactatgtatgttaatggtatttgctcctgtttttgaataggaagagtatccattttctgtttcttcgtgatatttaggtcttctttctctgattcttcaagaaaatgcttcgtgctgagtttgaatagtaatcgagggtctggattagacagtggtggacaattacacatctctctaattttgagagcctgaggtataagtctatccaagtactcaactcgattgccatgagaagggtgtgtagataaccattctggcatcttgggttggccatgcaggctatcaacgaactccatttgctgccaaaacactgaactggctcttatgtctgcacaagcctttgcagcaagcagtagtccaattttgtcagcttcggcctccaattttctgctgtatggtctattaaacatatactcctgcaatttagactgtatccactggcacaaaagtgccaagctatctcgaggacaaatggcccaaatcattgtgaggaaaatcatacctaggaaatccaacaaatgaaccatgccagccttttctgcagcatgcccaagtactgcatgtgctatttcatggcccagaaggaaagaaagttgatgaatatcggttacactatttaaaaatccagtgaaaacaaacatttgtccatttggaagcacgaaggcattaataattggggaatcaaccacatgaataacccaattgatctgaga

SEQ ID NO: 343968 - DNA, 1000 bp, Homo Sapiens
tttttttttttttttttaaaaatatataatgttttattgtcaaaaatagacaaactttaatttcctttaacaggaatattaatttaacagccttccataagccatcaccattttgtaagcataacaggcaagagagtcaaagataactgttagtggaaaaaggacaacagttctacatcgatgcccaagaagccttgcccagtcagtggtgacaactccaggacagcggcagaaacacagtgaacctttggagcttaacaatagacatgcaaaacaacattgatttatcttggcccaattctataaagattggctttgtagtatctttccaagcatttgaagagtttagtttgttagaacactggctaatttgaacagtgacattttaggtcacttatagtatcagtaacaggatcacacctgtttttcagtaacaccaggatgaatacatctgtccctacgccggtctccagcatgtgaagtggagctaatagctagggcaggaaacctgaataagctccttatccacgacccacagcaaggatatgaaagccttgctgaattgaacattgttgagtggaggctaaattctctcattaacataaaaaaggaaagagataatgatctacttagttggaataagacaaaaaataaggcctttattattccctagtgacaggtatccaaggtggaaaaaatctgggtgcatgcatggttatctggacggtgagtttcattctctaggctgtactataaaccatatctccatagccaatgcagacttcgtaaattgacccgtttcaataattcaaagtggtagtatacagctactacccttgacaattggggttaaggagagatacttcaattcccagaaaagcccagagatgagataacactgccatggtgaaatggttcatctgagattaagcacatgtaatactgaaaagaggatagattactaagtgaatcagagagggactagatctcagaactaatt

SEQ ID NO: 343969 - DNA, 1000 bp, Homo Sapiens; identical to SEQ ID NO: 160770

SEQ ID NO: 343970 - DNA, 1000 bp, Homo Sapiens
ttttttttttttttttttttttttttttaaaggaatatatacatttttttattttggggttggtgtgggctgctctggaggccaagcctggagatcagggacctgggaaggggccctgagaggggcagaagggaggaatgtgcctgggcgcagtggccacgcctgtaatcccagcacttcaggaggccgaggcgggcagatcgcttgaggtcaggagttcgagaccagcctggccaacatggcgaaaccccatctctattataaatacaaaaattagctcggcatggtggcgggtgctgtaatcccagctactcaggaggctgaggcaggagaatcacttgaacccaggaggcggaggttgcagtgagctgagaccgcagcattgcactccagcctgggtgacagagtgacactcagtttcaaaaacaaacaaacaaacaacaacaacaaaaaaaaacagggatgggaggtggggagcaatttgggagtctcagatggagacttggtcttagaactcagaaatccccaccttgaggaacccacgcaccctgagccagcagcctcatcagcctcgaagcatttattgagcactgcctgtacatccacaggagggtgatgacaggattggcacagtgaccgtcctgtccccttgttgggggtctctcctcttccccctctaggagctgagggagctgaggagcggcatgagggacagggagggggcggcagagcttcctggggcctcaaggacaatcctttcctgtacccattcttcagatggggaaactgaggccatggaggcgttaggacgccctgagtcacccagcagggactgaaggggttctgggtggaggttaggacatcttaggctcagtgcccggggatcacgtactcctcttcatccattggggcctggcccagtgactgcaggttacagtagacaggctgggaagccaggtcgatgtccttgtagttgatgtaaaagtcattgtcctctgaa

SEQ ID NO: 343971 - DNA, 1000 bp, Homo Sapiens; identical to SEQ ID NO: 160773

SEQ ID NO: 343972 - DNA, 1000 bp, Homo Sapiens
ttttttttttttttttctgttatcaatagcatttacttcactcttcaaaatacattatatgctaacatgtactatcactttataagcaagtaccaaagaacacttttggtcttggatcatctcagtagaagaatgttctaaggaatggagtttgaaaaaagatgttttaggagcataaaagacatcatgttaaatctcgtttaccaaagtaaaattatagatttgaagggcatatttaatgtcccattaaatattcattactctgtgtccacagaaagtagaatgaaggcaaaactatcatgagcattcttctgtactcactcactcactgtgaaagggtagaggaatatctatttgctgtttctgataccgtctgtagggtttggttgttaacacttcattgaagagttttcttaattcttctcaatatattctcaaaatatttccttccttcctcttccttttctgtcttttctttctaagtgtgtatgtacaaaggaaatagggacctctgaattgtatcttaaagacattttcagacaatgaatatttatgtttgattaatctttggaagtgttcagaaaacattaatgctcattaacaaatggggtaaccatgatatttctatgagaaaaaatgtcaacagatatggttctgagattttgtgcgggtccattatgattctgcaaaataactcaatatgccttctaaaccacaaatatcataataaaagatattacatagggagaaaagcactattcaagggaaagtaggaagctagctaaccttacggtgttcattatcacaagatttggacctagtgccagttctgccattagctgtgtgacttcaggacatttctcagtgtctcaggatgtcaggtatctcttttgtaaatgaaaggaacaagtttagtggttcagggactgctgcagtagtggattatgaagaacaggagaacagcagaaggggagaccaagcacatgggacacccacctca

SEQ ID NO: 343973 - DNA, 1000 bp, Homo Sapiens
tttttttttttttttgtagaaggaaagcattttattgcaaataactaatagttacaaaagcactttttaaatgttattattagatgttaagccgaaaatctagaaactaacatttacccaggttacaaaataagagcttcacatttttcaaagtctctaagggtaaggtacatccccagataaaatgagtataggccagtctcctttggctttgtggattctttccaaaaattttccagactatttagctttccttgtgtagttacagctcaaattagaaactgaagaaacagcaagtggccaggcagggtagaaagcaaataaactgagctacctgtgcctttttccaaatcagtatatgtgcttggctcctgaaaaaaaaaattctgatatgtaggcattctcattacttagtgagatattagtgaagacctttcaacgtataacacacagtaactgttgcatagttttaataaacacttgaattttccaggaatgtgactgctgtgtaaatcagggcaagactgtaaggtgtttttttttttgtttaaaacattaacaagaattgcccaccacttcagaaagtcacatccaatgacaacaccgtgattttctgttgccaatacacacattgattttcatttgtagctggtggctctacatgcaggttcagccatctaatgacttaattttatcttctagggtggttatacccaagcttttttattgaaatacattttattttattaaaagttgcctttttttctgctttatattatagttagggtactatgttcactgcttaaaattatacatgcacatagatgattatattaactttaattttcatttcatattcagaataaaatacttgttataaaagggaacattgagtctgcagggttaaggggggcactaattgtatccaacctcctcaccctatgataaaaccaaggctcagagaagtgaagtaacttgctcagtgccacaaagcaagctg

SEQ ID NO: 343974 - DNA, 1000 bp, Homo Sapiens
tttttttttttttttttaacacttggtatttcccctttatggagtgagagagatctttaaaatataaacccttgataatataatattactacttcctattacctgttatgcagttctacacattatctgacaaattcttaatgtaatctggtgacagagaaaaataatttgaggagaaagtatttagggagtgatgaaacagacagaaaattacttgtggtaaggaccagtattgtatttgactttttaaaaaaccatttttaccctggagctaaaatacgaggttatactgttctgcttaatacaatactggcagcctaaaaatgcttcaagaaaccatatccccaacagcggcagagcatcgggaggagaccctctgtctctgaggcttcggtgcacttctgctcagacggtggcgggagtggaggtcgctgctgaagggtgacggtgtggccatgacacgggcagcacgggaacggaagacgccggagacccagaaggcgcatgactgcctggcctcgagtcactaaaagcagtttgatttcactcttgtcttacttttctagtatggcttcctctactctcttaaacttcttcagttcgacaacgagttcccagtatttgagatagagccacatgagtctgccattctggcgtttgttggtgttccagacatcaccacagtatgtatcatgctgaaatatgtcggtgagaccggctgccatctctaggtcagcggcgacggggtcgacggacgctcgcaccagtaagctcttctctatctccagccgcttgctgcgaggaagaaacagactgcagtagatattctgtctttctgtgagaacagcttcaaattctttcagcaaaagcctggctctcctttgccagttttcttccctttgcaggcagctcaaatacgcacttctcaaaggctgcacctgtcttttttcttgcatcacctgggcccgttcctgttccagaagcttcttttcttctacca

SEQ ID NO: 343975 - DNA, 526 bp, Homo Sapiens
gtctccctttcctaatttacagcagcatattttcttccaaagccatcatatatatatatatttaaacacattatacaaactacacgacataaaggatataaagaaagaaaataatcagaaataagttaattcagatgtacatattcagaaaacaatattgaagttaaagaatatgcgacttaaaaatcaatacagcgtccttttcgttcccaatctccatatcgggtaggttctgggcccctgggtccacctttttctttggtcactggattaacatcatctggaaatttttccagtggttctttctctaaatgggaatcctctggtgcatcaaaacgaccttctggtaacttcggcttcttaagggactgtttgacaagttcagactttcctccttgagaagaacttgttttcctcagagaatgacacagaaggggtgatcttgccgctctccacgccgtggccgagacccagctaagcaaccagggaagcctcgatggggtcatggcgccgactccccgagccc

SEQ ID NO: 343976 - DNA, 1000 bp, Homo Sapiens
aaacagagtctcactctattgcccaggctggagtgcagtggcacaatctcagctcactgcaacctccacctcctgggttcaagcttttcttgtgcctcagcctcccgagtagctgggactccaggcatgtgccaccacacctggctaatttttgtatttttagtagaggtggggtttcaccacattggccaggctggtctcaaattcctgacctcaggtgatccgcctgccttggcctcccaaagtgccgggattacaggcatgagccaccacgcctggcctcattctccacttttgatgtgtaagtccttggcctgcctttagcatgaatcctgttaggtcactttatcaggaatactcctatgtttgatgtctctctttggtaatttcccatcctgtgatgtcctcctcctgctcctggctataaatccccacttgtccttgttgtattcagagtggagctcaatttctactctctattgcaatagagtcttgaatgaagtcctcctggccattttaacaagtgtcagaataatttttcctttaacatttgccatgcactttgtggatgacaaccgtgggtagcccactgccaactgccttctgggtcatgctgcctctcctccctactccaggaatcagatcttattccagcctcttgagctcctcttccacaccagcccctagctgacatgtgtggcaatacagttcttgtagggtcaaacctagagaggatggggcaattctattccaaccaacttcacctagttcattcagtcagtcagataagcaaaacatctgaatacatttaagtggtttctcaacataaataatacattttcaaagagctttcttattcatattacagacataaacaaaatacatacactcaaggcacaaaatatatacactcaaggcacaaaatatctgtcttgtgctatttcaaataaaaaaatcatagcagatatagatctttggtgttccaatggtgccataaaca

SEQ ID NO: 343977 - DNA, 1000 bp, Homo Sapiens; identical to SEQ ID NO: 160776

SEQ ID NO: 343978 - DNA, 1000 bp, Homo Sapiens
tttttttttttttttttttttttttttttgtgaacagtttctgttttaatgtccacaattgtgatcaataaataactgtgacctccagtgtccctgtgtggccccagggacaagcgttggccacggcccgtgggggtctatccacatgcatgcggaggcggggcaggtcccaggcaggtgaggggcaggggctgcaggagaggggccggcatgctgcaggcagagacagtcggacctcaggcgctgcaggtcagacctcggcgccctgggggctctgcaggccacagacagcctcaggggtctgggaactcctcgtcgcaacacaggtgccccagccactgccaggaatgacagggtcatctggggctgcgagggggagccctgggggtgggacgctggagtcggcctcacacttggtggtgtggccagagaagggttggggcgctgcagggcccagcatgccgggtggctcgggggtgcccccggtcaacacgggacccagctcgggccgcccccacgcctctccaagagcctggggccccttggcgggcgcacgtttcacagagaggtcgaggggtgcgtctggcggcctcacggcctgctccagcgcctggtgaatggtgagcagctccaggcggatcttgcccagctgctcccgcaggggtctcggggccaggccccccgcgggccccaactgtcccaggcgctgctccaccctggcgtagtcaccgagggctcgggtcaggtcctcgcccacatgctccgggcttcctggcactgggccccgtggctgcagggggagggggccctcagggccgggggtctcagggccgcctggatccccgtcctcaggccacagcatcacagaggagccggtgggcaggctgctccgggaacagaaccttgtcaggctgggggatgccttcggaagctccagcctgcttcccagggacagcctcctcctggggtcactctgggctgcccgctccagctccccctc

SEQ ID NO: 343979 - DNA, 1000 bp, Homo Sapiens
ttttttttttttttttgcagctgatgaacattttatttataaaaaggtctgtaaaacacagagaagtgctggaataaagtgatggaacgataaggtggaaaaggcaggatacaaagttgtatatacaagataattgctctgtaaaaagaacaccggcaaattatgtgaagaagaaaagagtggaaggaagtacaacaaaacgaaataatgatagtctctggtgagactatgggtgacatttttttcttccttttctttttctcctccatctttccaagttttgcatactgaacaactcttaatttcactttttaaaggaaatagggccagacacagtggctcatgcctgtaatcccggcaatttgggagactgaagcaggaggctcatttgaggtcaggagttcaagaccagcctggccaacatggtgaaaccccatctctactaaaagtacaaaaattagccaggtgtggtggtgcgtgcctgtaatcccagctactcgggaggctgaggcagaagaatcacttgaacccaggaggcggagtttgcagatcgtgccactgcactccagcctgggcagcagcacgagattctgtcttaaaaaacaataataatggaaaaagaaaaaaaatagtagttgtgctactttaccaccacccccgaccccttctccagggggctggactcggagtcaccttcaggtatccgccctgttcctactctcctctgtgttagacacctacgtgcactctggttttctacttttctctctagccaccagaacccataggcaagtaaccctttccagacaaggaaggagccaaggttttcttcatcatttttccaaaggcaagaaggcatggccagggagggcaaatggaaaggcaaccactctctgccggtcctgggcttatccctgcaatgtgcacctgacctgaccaaggcctggacttaggcaggcctcaggggagtccccagctggatcttggtgtcgcagacaga

SEQ ID NO: 343980 - DNA, 870 bp, Homo Sapiens
ttttttttttttttttaagtatttatatttttattccactctaacacctcagagtaaagaactgatgggcaggcatcggcttctgctgacaattgccaaccggcatgagattgctgagctgaggtggactctccagacactggaactggaactccaggcccaatggcctctggtaagaatgctgcaacgtgagacccttgagagagactgacttgttgaagatgaagagaaaaccaagagcctccagtccagttgttgaagagcaaccacgagccaacaccaaggagacaaggaagaagtcgtccttctctcaaccgatgtccgcaagcacaaagaagagtcccaagatagcgaagaaaggaaaataactcaagggagagccaggaagaaaaatgctccacaaaaatccatggctttaagaatacttgaggaagggagcaggccaacaccctctggccacagtgaccagctgaatgaggaactctaacagaatgagctgcagttggagcaacagaggggacatagctggaacaacagagcgaggggacacagccggagcaacagagtgggaggatgccaaccatttcaactctctccctgagcagcgagtaatttcagggcaagcccagagactaggatccatctgagaagtcttcagaggtctgacccagagaactcaacaacaggatacgtcccatggtgatgaaaataaaatgaatcttgtgttcaccgttgtattcctcacgacttaagttaaaaacctgatgaaaagtggttaatctccataatgggtgttagctccatcgttttccaacgttagagataaccgaatgtgacctcaccccgtttagttccggaggcggcggacgc

SEQ ID NO: 343981 - DNA, 1000 bp, Homo Sapiens
ttttttttttttttttgtgtgtgtgacagaggttgttttgctcttgctgcccaggctggagtgcagtggcgcgaccttggctcaccgcaacctccgcctcccggattcaagtgattatcctgcctcagcctcctgagtagctgggattacaggcatgtgccatcacatccgggtaattttgtaccaaatatgtcatttttaaaaaaggacttggcatgtgtcgatttatgtatgcccagggggtggtagaaccacgctcctcaaatattaggggataactgtatttgaaagaaactgaggcttaaaattaaggctttactatgtgtttacattcatagcgtttatctccaatgagaattatttctatctgaaatgaaataacattaaagaatacttccctacatttcacacatttatagagtatctctccagtgagtccttttatgtctatgcaaggacctgagagaactcaatgattttctacatttcttacattcatatgacttctctccagagtgaatcctttcatgtactttttttttttttttgagacagggtctggctctgtcgcccaggctggggtgcagtgcatcttggctcactgcaacccccaccccctcggctcaagagatcttcccacctcagcctcccaagtagctgggactacaggggcataccaccacacctgctactttttctattttttgtagagacatggtttcaccattttgcccaggcaggcctcaaattcctgaggtcaagcaatttgcccaccctaagtgctgggattacaggcgtgagccactgtgcccagcctcatgtacttttaagttaccaaaatgactgaaggcttccctacatattttacactcacagagtttttctgctctgtgagttgttttatgttgacaatggtgttaaaaaaaaaatcgaacactttcccacattccttatatcatacagcatctctccagtgtgagatatttcatgattttgaaag

SEQ ID NO: 343982 - DNA, 1000 bp, Homo Sapiens
tttttttttttttttttttttttttttttttgagacagggtctcactctgttgcccaagctggaatgtggtggcaagatcctggctcagttcagcctcaacctcccagtctcaaacaatcctactacctcagcctcctgagtacctgggactacaggtgtgcaccaccacacctggctaattttttaattatttgtagaaacgaggtctcactgtgttgtgcagtctggcctcaaactcctgggctcaagagatccacctgtcttggcttcccaaagtactcggatcactggcatgaactgcatcaccagcttaacatctgaaactttttgagcactgacttgaaatagtgacacttctgctttctgatggtccaatgtgcgcaaactctgtttcaggcataaaattatttaaaatattgtataaaattaccttcaggctattcagataaggtgtatatcaaacataagtgaattttatgattagacttgaatcccattttccaactctctcattatatgtatggaaatattccaaaatccaaaaataaatctgaaatccaaaacacttctggtcccaagcatctcatctaagggatactcaactcgtatactgtaactatacaaaaaaatatataatgaatgcattgtcaattaaggcttttgtctccaaattaggaagctggcatatcattaaaaaacttcttgggaaagaaagcataattagatggattattttccagtttgcttgaattttaaaaccagaaactacacatccaccttcggtagagataactagtcacaggttaaattaactagtgtgttgcaaacaaaatataagcacaagtttattttcaatttttactaatatttgaacagaatccttcgattctctgttggctagaaaattgaaaaaattgacaattatatatgcttcatttcatctttttttattttgtgacactttcaatttctcttctcagaaaagccaatgtcaaaaac

SEQ ID NO: 343983 - DNA, 1000 bp, Homo Sapiens
ttttttttttttttttgctttagtttgccttttattttaccaaaaataacaacaataaagtcttccctctgtttcataaaaataaattttccaaccctccccctatcccagaaatcagcccttgccacagcctagaatccatcatgcaagtcacagcactctgggaaaagctcctactaccctcgctccacagcctctggcaaagctgccaggccactctggaggcggcagaggcagaagtcccaggcccagctggctgggcccaagagctccatctgtttccccaaagtacaggcagcttctaggccattgagtggggcatgatattggatgcttggctcaggaaacaaccccagccaacccaaggggcagtgggacatgttggcctcaggttagaaattattgctcaaagcagaaacagttgtgtcctagagagggtctgttaaaccctctttccatgtgtatctctatgtagcaattgatgggccctgcggtcaggatccctggtttctccagctccatgaatgcctccctgtgaggccctggacagtttctccctcttcttctcctggcttcagtttccccgtatgtacattgagacagtaagactggatgattctcaggttccctctggctttccattctggcatcccagagtggaggctctgggagggcagaaccctgttcctgcctcagtttccccacctgtgggtctgcgtatagggctgggtatggaggtactgagtaatggagtgctgcgtgaacatcccagtctccctgtggatagctgtgctgtgagatccaactggctggaatgtgtcagggatggctgggaaggaggcaggtacttttaggatggaggatctccatgcctggaagagtccattcaccaactacatcctcaatgtgctgggatgggagacaagactccaaagttcccaattcaagttccacaagctccttggacggggagattattttgtgctgggcttcagatccg

SEQ ID NO: 343984 - DNA, 1000 bp, Homo Sapiens
ttttttttttttttttctcctcaagcatttatcttttgtgttacaaacaatgcaattatagttatttttaaatgtacaattaaatgattattgacagtagtcacactgttgtgctatcaaatattaggtcttatttattctttgtatttttttgtacctattaaccattcccaccttcctcccaaccccactttcctttccagcttctggtaaccaaccttctactctctatgtccaagagttcaattgttttgatcattagatcccacaaataagtgagaacatgtgatgtttgtctttctgtgcctggcttatttcacttcacataagggcctccttttccatctatattattgcaaatgacagaatctcatttttttaatggctgaagagtactccattgtgtatatgtaccacgttttctttatccattcatctgttgatggacacttaggttgcttccaaatcttggctgttgtgaacagtgctgcaataaacatgggggtgcagatacctcttcaatatactggcttccttttcctttctttcgggtatatacccagcagcaggattgctgagtcacatggtcacagcacattgttaatgagcacagactcgcagaatgcaggacacggatggtgcggggggagaacagctgcactctcggagtgtccaactcctcttcaatatctttccctcacgtaattcacagcaatggctgtagtcccagatgctcaggaggctaaggctagagaatcacttgaacccaggaggcaaaggttgcagtgagctaagatcacgccactgcactccagcctgggcaacagagcgagactccgttgccggtaggggtcgtggaagggcagcgccagccaggcgccatgcagctcgcgcatgaagtccagcatctcctggcagctgccgtcggctgacacgaagaccacttcgaagggcgcgggccgccgcgcctcggccaccagcgccgtatagaagtcgcaga

SEQ ID NO: 343985 - DNA, 1000 bp, Homo Sapiens
tttttttttttttttttttaaattttatgcatgtatacacactttattaaatttgcattctaagatatacacaaggccagcatttcacaaaacttcctattattccaaaagcagtaatcatgaaacagtgattatataagtcaatcaagcaaaaaacattatctatagggttgtatcatatcatctcttatacctgttttcaaatagaagcctgaaatatatgatatatattagaataggaagagagaattttactttataacaatcgcttttcaaatattagactttatataaaaataaaggggtcttaacaaagttcatctgtgagttagcatatctctttatttcaaaacaatccctgcaaaaacttaactttccagtccatttaaacaacaaaaactaaaaatgaagcttggtttaaataataaagtgaatcatcttgtctcctagttctcacaccattggaacaacttccatttcctgacctaattctatcccaccattgaatttcaaaaattaatgtaaataccatcatatttcagttatttcttaacagtgttaagttcgagcctaaaaatgatggccaagtgtccctttaaggcaaagaagacagtaggtggataaatatcctgaaagacaaaaccatctattatcattatagaggcagaacattttgacatgatcttttacaaacagaatagatacactgcataccatcgaagaattttttctttataatggcatactaggggacaagcttcataatagatttatgttacgtttgaagaagtagagacttttcccagatgagagcaatacaagaaataaagccattaatggctgttatggttacaatttaaaataaaggacacatcggatgctgtaacagaagtactgcacgctaagtgatgctctcttgtaattgaaagagaatgggtttcccttcaaaccatatgctattactagtctctgagtgccttcaaagcacatactcttcctt

SEQ ID NO: 343986 - DNA, 1000 bp, Homo Sapiens
ttttttttttttttttttttttttttttggagtaatttacggaagtgctagcaccttagttctttctaaagtgacacttctaatttttatttaatcttcattttgatgtttcaaaaatcattacacatatgggatttctatccagtattgattttctaatgttgagtaaggtgtgagcaccagtttagggttttagcacattctttacacttgcagggtttctacctggtatgaattatttgatgttgagtaagggttgagcgtctgttaaaagctttgccacattctttacatttgaaaggtttctctccagtatgaattctctgatgttgagtaaggtgtgagctcctggtaaaagctttgccacattctttacatttgaagaatttctctccagtatggactctctgatgttgagtaaggtgtgagccccagataaaagctttgccacattcttcacatttgaaagacttctctccagtatggattctttgatgtcgagtaaggtgtgagcccctgttaaaggctttgccacattctttacatttgaagtgtttctctccagtatggattctctgatgttgagtaaggtgtgaagctctgttaaaagctttgccacattccttacacttgaaaggtttctctccagtatgcattctctgatgctgagtaacgtatgagcttctattaaaggctttgccacattccttacatctgaaaggtttctctccggtatggattctctggtgttgagtaaggtatgaccccctgttaaaggctttgccacattcttcacatttgaaagctctctctccagtatggattctctgatgttgagtaaggtatgagcctctgttaaaagctttgccacattccttacacttgaaaggcttctctccagtatggattctctgatgttgagcaaggtgtgaactcttgttaaaggctttgtcacattttttacatttgtaaggtttctctccagtatgaattttctgat

SEQ ID NO: 343987 - DNA, 1000 bp, Homo Sapiens
tttttttttttttttgccggtctcagtttttaattgtggcagggcctcatgcacgcgggcacacacacacactcaggccagatcttgttgaaagctgcgatgtcgacactctgcatacactcttcaaacttggtgatctcctcctccagcaagtctgtccccaccttgtcctccaccacacgctgaatctgcagcttccagataccgtagcccacgggcaccagcttggaggccccccgcaccagcccgtccggctggatgaagcgcacacaggcctccaggtgggccgtgtccgtctcatcgtcccaaggcttgaagtccagcaggatggaggacttggccaccagcgcgggcttcttggccttcttctccgcgtactgctgcagccgctcctcattggtaatgccgcagctgtgttgcctcattgtcgctgccaaacaggtcaatgtcatcgtcctcgtcatcctctgctggtgtggctagcttcttggccgggggctccacttggcgcatgggagacatgtgctgggtctgcggggctgtggcccagtggccgggcaagctcttctccagcacgttcagccaggtctctctggttgtccacttccagactggcgatccggacgacgagctcgctgtggtctccgctggggccgctagacgcccctgggcctaagcttccggccagggatttcgggatgttctctctggctctggcaatatcatggaggatcatgctggcctcctggagggaggcgccggccacaggcccgttcatctgttcgtagaatctcctttctgcatcgccatatttgaacttgtggaaccagatcttctcacctactagaaagtttgtagccatttttctgacgccagccaaggacgcggcaaccagggagcaggaatcgggggacgcaggacgcctaaggaaagggtgtgtttccgtccttttttagaaaacgaagcaaaacaaaaccaaaaactccatcctcagtaaact

SEQ ID NO: 343988 - DNA, 1000 bp, Homo Sapiens; identical to SEQ ID NO: 160777

SEQ ID NO: 343989 - DNA, 1000 bp, Homo Sapiens
gttctctcctcagtttaatggtggttagtgagattgccaaaccccctccccattcccctccccaccccgtacaaaatgtgtgtgtggttttttgttttttgttttttgttttttaacaagaaaaagggggcaaaagccaggaatggggagaggggggtgcaatctgatattttcatacagacttttgattttttaatatattatatataaaaccatgaagaccacgaatcctccccaaactcctttccccctccccggggggcctggaggagagatggggaaggcccccccaggagtgggtggacagagagacaaatatggatgggacagacgttgggggagaaggtagagagaaggggagcccaggaacctggggaagggggattggagaaaagggttggggctgtctccctcactgcccccatcaaagttatgacacaaagacacagaatccctatttccacgccctccccccacccatccccccaccgtgcaaacatggctttgcaaagaagtgcccagagctctgtggaactcttacaatggctggcatggggtctaggacccccaaagaaatctgtgttccccttccctgccccccccacccttcccagaaactgaccccctccccacaagacctggttttgtagcctaggggccctggccttcccccagttatcttcccccaacccaatccctactgccctcactggacttggggggtctggacctttggcccctgccccctgggggacccagacctctgggccctcacttctggcccttacagagatccaggcatccaacacccccatccctgcccaagcgtctgaggtgttagtggtggggggagaagcccaccatcccagactctggtaaatgtctttgctggttccttgcagctggcagtgggggggaccccagcccaggcccaggcctaggcctggggtggggatagggtcagatgaagaattcctctttcctcttgtgtccgtcgctg

SEQ ID NO: 343990 - DNA, 1000 bp, Homo Sapiens; identical to SEQ ID NO: 160779

SEQ ID NO: 343991 - DNA, 1000 bp, Homo Sapiens
tttttttttttttttaaagataaaagatgaaatttaatggggggtgggggggcacaagagggtgattgaaaaaaacacagataatttctggaattggatctgttaagccttacacattagtccccgccctcggaagtaagggcctgtcattctgtaaagggacgcagccacacgcagagaaggtggaggtctccaccccttccctcttcgtcctcgcctaggagggaccgtggtgccagtaaaacagggactggctggcccagagccttggggatcccctcctttgtctggaaccctctggctcaccgcatccttcctcggggccgcatggccctgccccacaaagcaggcgtgctgggggctgcttggccaggaaagcggacgcttgcagggaccacgctgctgcctctcttctgcccttttccccttagttttacaagttccctgttcgttcgttctttctctctctcctctctctctctttctctctcctctctcccgtctctttctctccttctccgtcactctcttccctccctctctcctctctcctctctctcctctctctctctctctctctctcctgcgaggagcttcagatttgtgggttgtttttaatgcattccggatgccagatgaaattttggcccgggctcaccagttcctctgctattgggactctccccacctcccctccaggcccaaagccgcaaggagagaaataggcgggcgggcgccatctgttggcagttgcctggagccgcacgaagaggtggagaactaaggcggggcgcaggtttccagtaaagagctcgatccgtgatcctcgtgaaagaattaatgtctacctgatgaaacttactcgagggatggcccgggcagcggctcacgcctgttatcccagcgctttggaaggcggaagcgggaggatctcttgagcccaagactttcagaccagtctgggcaatgtggcgagaccgtctcagccactttactgtga

SEQ ID NO: 343992 - DNA, 1000 bp, Homo Sapiens
tttttttttttttttggaaaataaatttaatcggaaaaaatacttgcaacataccgaaaatctctctctatgtataagtgtatgtgtgtgtataaattaacaattttatgttagatattaatgcatttttaaatgcatagataggtgctatttgacaagtatagttatataaactttacatagaatctctaaagtggaacaatcctgagatttgatttttagaaagtttgatacagatgattaggttaaagtgtttatagtcagttacatttttttgagtatgtgtgtcaaatgttccatttgatcctttctaggcaactgggacatctttgagaataacttgactaaataacttattttcagagtaggcttgcaaagcaagttaaaaaggcagagaatttaggccactgaactgtacatgacttcaatcagaaggtctttggggggataattaagcagtcatggtataaactgtctttctgaaacacaagattttaagcctgggatgcttcaaatttcaaaaaagaaggatgattctactacaatggtgatagcttttaaatgttcgctattttcatttagattctgataaggcataatttacactgtggtgtgtgcactcagatgtcagcaaaaatttgagttcaaaaaagattgtactggggcagggtgcagcggctcacacctctaatcctagcgctttgggaggccaaggcaggaggattgcatgagcccaggagttcaagaccagcctgggcaacatagcaagacctcccccaaaaattagctaggtgtggtggtgtgcacctatggtcccaactctctggaggctgaagcaggaggatgtcttgagcccagtagttaaaggctgcagtgagctatgattgtgtcattgtactccagtctgggtgacagagcaagaccctgtctctaaaaacaaaacaaaacaacagattgtattggaaagtctcaggtcaaactgagtgaaactaggctgacg

SEQ ID NO: 343993 - DNA, 1000 bp, Homo Sapiens
ttttttttttttttttttttttttttttttttttttttttttttttttttttttttttttttttttttttttacttaaatctatttattgaaaaggtcacaataaatagaatgccactaccacttgtcctaaacaataaagtagccaataaaaatataccattaaaacaaaaacagtgctaaaaaagtctggaattttttccacctgccctaagcccaagtcctgctccctaggcagaggagacgtcggcatgtcttccacaggcatcggaacatgttggcatccagctgagatcttctcggcataaaaggattgagagaattgggaagggcatcgctttcttgctctgattttgtgccacttaatgcaggccccataccacctaaaagtatctcgggaaccaacggacccacccacactttggaaatgctggactaacgtctccctctgcctcacgcttaacacaaaggggaaacacacacctgtggtcccctctctgatcataccttcaaggcaccaccagatcccctccaaatatgcctgctctcacaccaaggcccagcaagtccctctcaacaaacccacccctatcagccctcagaggtcaccgctgactcaggtgggacaccaggtagacaaggccaaccaggaggaggccacgaacaccaagcatcatgagcaggaagaggagcaggatggaggtcaccggctccacagcatggttgccgagatgccactgcggaaagcccatgttcaccagctgccggttgaggtcattgaagggggactgagcagcacccagcctggcacctgcctgctgctggcgggggccaggaccccctgggggagcaccatggcccctattgaagaagctctgtcgaggaatgctacctcttggtggctgggtagtggtcctcactcgggggtcgtcatcctgcacgatttccccattggccaagatccgcaccatcctcccaggcgctgtgggtccctgatgggc

SEQ ID NO: 343994 - DNA, 1000 bp, Homo Sapiens; identical to SEQ ID NO: 160780

SEQ ID NO: 343995 - DNA, 1000 bp, Homo Sapiens; identical to SEQ ID NO: 160781

SEQ ID NO: 343996 - DNA, 1000 bp, Homo Sapiens; identical to SEQ ID NO: 160782

SEQ ID NO: 343997 - DNA, 1000 bp, Homo Sapiens
gagatggagtctcactctgtcaccaggctggagtgtagtagtgcaatcttggctcactgaaacctctgcctcccaggttcaagcgattcttctgcctcagcctcatgagtagctgggattacaggcatgtgccaccatgcccggcctacataactaccttaaagctccgaataaagactgtcattgctcctggagggaactggcctttatacatatcacacatatatgactagacacatttaagaaaagtaacgtatgatattcagtagagagaagtgtaaggctatgtaaatctttcttcagacacacacatatgctctatcaagtaatgataactttttttttatccaatacattaaaacttttaccaagtgctgctgcctctaagccagtcattttagaaataaaaggaattcttaagttgaccctactctaaagaggtttgcacctttctttttgaaattgtttgtatattccaaactttttattatttttactcaactggaatgatttggcttcaatcacaccagacttatctctgaatgacttttgtttcaaaaagtcaaacctatcttcatttgataaagatttcctagcattgatatttataaaacactccacaaactctttaatttagaaaagtattctgaaatgtttctgtgcaatggcaccatcataggagtaagtgtgcaacctttcaaggtgatgtgtgctttccttaatgtgaggttaaaaacaaaatcttccaggtatcttagggctcatctctgttcagaaaggagagagactgcctgagtgtgattcttgctccgccacttgctgcgtccttgagtctgtatcaacatctctgtgcttctgtttcttcacctgtgaaatggggatgataacagtacttacatctcaaaaggctgttttaatgtttaaatgaatacttgcaaggcacttggaatactaaagatattttccctgttgtacatttgacaaattccaaacttcatca

SEQ ID NO: 343998 - DNA, 1000 bp, Homo Sapiens
ttttttttttttttttttgctgttaagattggtctttatttgtccaggtctttttgaatgcatataatatagatttcctgaaacttgcttctttaacaagggtatattgggtatattatcatgggtatacttctactgttgtatttttttacttagagatggagtcttgctatgttgcccaggctggagtgcagtggctattcacatgcacaatcatagtgcattacagactcaaactcctgggcttaagcaatcctgtctcagcctcccaagtaactgggactacaggcatatgccaccatgcctggctttgtacagtatttacagctccacctcattcttttcaattagcacacagtatgctataagtacttccatactgacatacatttagtttcttcaaatatttcactagtagaacctcacaatgaatatcctcacaagtgatgtgttctctcagaagtacagagtatttctgttaaatgcataatttatttaatgtctcctctatgatggtcagaaggaataaactactctgcacaatttgccacactaactacatttcatggctctttctttattatgaattttcttatgttgcttaagggctgaacttcggggaaaagctttcccacattcattacatttataaggtttttccccagtatggagtctctgatgttcaacaaggcctgagctgtgccgaaaggctttcccacatttcttacagtgatagggtttttctccagtatgaattctctgatgtccagtaagggttgagctctttgtaaaggccttcccacagtcacgacactgatacggtttatttccactgtgagttttctgatgaccagcaaaggatgagctatacctgaaagattttccacatttactgcagtgatagggtttctccccagtatgcattctttggtgactaataagagttgagctcttcctaaaggcttttccacattcattacactgatatggcttctcacca

SEQ ID NO: 343999 - DNA, 1000 bp, Homo Sapiens
ttttttttttttttttgggagtgatgtattcttttattgaagcaagtatgtccagtcacaccaaaactgacgccctgcattatggtacagcttcatactcagagttcatctcaaataccaaaacatcaaatcagggtatgtatcaaattgggaaaataaagtagcagacagacactgtttcaagtaggtactagaactgatcacccgtgaagtgcacgtggatgtgtacagaaaccgttctaaggctgtattccaaatatatattctcaagttttaagcctttctcatctcaaagacataaacaaagcaatatgtactatcaatatacaatctgtactagctagaacctcagaaagtgcaaacacactgtgacaatacagtggaactattcctgctccacccaggaccagaggcatgggcaacgggcccagggctgcctcctccccaggcccagcctttcccaatgtcttcaggctcttccaggagctttgggaattgggacctggcccatcctcacccaggcttccccattgatcaaggctcctgcggaaactgggaatgcagagagggacaaggatgcggagttcctgcgagggagacggtccacgtggattgaccgtgtgctttctgaaggacagctgtcctgcgccatggtcagtagggcccagggctcacaccacgaagtcagacatgggaaaatggagtgtgctcctctagctgggtgtagaaaacacctctcagtatttgggcagttttatctgaatgggctccagcagtatggcctggcgaattttctgtttccaattccaattagggcgctgcctacccaggtgggaagagggctgttggctgccctcccctctgtagatgataggtttcaagactagctctaaatgtcaccaccctggagtcggccatgtatttttcttcatcacagctcagtgtgtctttcagtcacagcccagaaaactgacaactccatgcttccctcccttacctt

SEQ ID NO: 344000 - DNA, 1000 bp, Homo Sapiens
tttttttttagaaaactttgtgaccacttgagatcaagtcctgcctactaaacttgatctcagggttaaaaacatattcttccattatgtagaaatctgaaggcctgggagatttactgtaattcataaccaaaaaaaaaaaccacatataagcccatattctaaaatattatcccttttagtttatatcagattggaaaactgtctttgttttgaattgaaacatagggcattcttcccccattataaaagatgtatttctaacatgccaccaccatgcagccaaagcttgaaggtatccagacgtcttgcatttacttgtgcattcaaggttcattcaggtggtttaatgtgaagctaaaatgtctggtcctacattcatcttcaggaatgagatgattttaatttcatggtgcagaaataaggccaaataagaaaaagcagacctaaaaaatgttaagtgtttaacttactaatccactagatccttgagagcaattttagattaaaatggtccagaggacaaagtgcataattaatgatgagaaaatgattccttcaagtcccacaataaggagttctgcctgcgttaaccatttgtctagagttttatttatgcaaaagtggcagttacttcttggttctgtctccttcattccagtactgttcagtctgcatttccgtgagtcgggaaattgtgcgctgaaatgcaaagatttcctcttctccggtaaacatggagagtccttctgctgaatcctggctcagccccaaatcatccatcagtattctgctttgctccaactcactgtcatgatgttgatgcaaaaataagcttgatataggagtcgacgcagagcaaattatacgcaccttgagatcataaaagttatcgatgagagttatgaatcttcgaccttgagtcctgtttgccagagtaaattgcggaatgtttcgtaaaaatattgtatcaaaattctttgatagttccaaatagtca

SEQ ID NO: 344001 - DNA, 1000 bp, Homo Sapiens
gatggttaagtaagcacaaggccacatatcattaactgctaaaacaagtcacacaacacatctgtaaaataattgatccgcacaacctgccctctcccgagaatcattcctcagtgcgtaaaactcaaaagccctgacaaaccaagcagcatcaacagaagacaggcagggtagggagggttccattgttgaggaacaccattccctcccacctttcctggcatctggcatggttcagtttaacttccggtacaacattcccagacggacaggtagtcataagttcactgcaatggtggagcagagcctgtggcggcgtttcctgcccacagtctgggattccttgtaaaggttgtatgcatgcttgacgatgaagggcagacagaaaaagtgcaggaacatgtgtgagatttggaagatccagtgcaaataactcagcgtcttgaagtgatctttgatgatcccgttgaggagcaggactatggagaagttgatgagctcgtaagtgatgatccacatggcatagatcagcagccccatgtagatattcttgtggatacaataaaggaggaagcagccgatgatgatggtggtgagggagaggccagtgctgatattagccctgtggaacagggtccaagtgactagctccgactttgagtccacgtagatgctgaacttggcctcatagcaaatgtgtgtcttctggttcaggtcaaagatgaagaactgggtggtattaaggacagagaagatgcccaccatgagggagaacatcctgacattcattttatacttgttttaccagagcacctctcagcagacatctattgtgtatctacaggtgctgggggctgagcttggcactggagacagacaggtaaatatgctagtgtggaagctctgcctctcaaagtactgggattccaggtgtgagccactgaacccactcgaaattgataatcttttatttctgctgtggagaatctccgctgtagaa

SEQ ID NO: 344002 - DNA, 1000 bp, Homo Sapiens
tttttttttttttttttttttttttccatgttatttattcacattcaactagctacatgagggggataagcaaattaataggagctttttggggaggcagaggtatggatggaagggtgggattaaaacaaaataattttcagtggttaagtggaagatttacaaatatccattaaaaaagtaccctctggataaaataatcagaaataaaataaattagccacttctgatcactgcattccccaaagtctctgaaaatggtttgcactttagactgtcatgatttgcagatatttacatgacgcaggtttccaacacagaaaaatgaagactaacactgagtaacagattagtacaatgcagaggaaaatagagcaaatgaaaatagctatcatctggtagcaaaaatagatttatgccggtgttaatatcaaaataaagacattcaaacaaattatgccaatacattggaactattattcctaagaccataaggacaccttcttattgcttctactcataactaaaaggtctgcggagattctgtagtagccagaaggcataacttgtagtgtatgtagtaggggctacatcaaggttcaacagccaaataaaaactttattactttttaggcttgacatctttaacagtagaacaagatcactcatgataaatctggaagatgcagatggaagacagtgcttgaagcccaaacaaatgatttactacaagtaattaaaagcagaatatgagaaaagcagcagtgtaaatgacgtaaacattaaaaaatatattagtttgtatatttcccccaggaagtctcacaggaagcacaggacacctgtgcggctgtttgggcatcctgggtacttcttgccctcaggtgaactcccatctctttagttaggaccagaatccacctggcttgtaggagaggaactacatggagaagctgcattgaggcttttattattaatacctatgactcaaggaatacca

SEQ ID NO: 344003 - DNA, 991 bp, Homo Sapiens
gactacagcacatgccaccatgcctagctaatttttgtatttttagtagaaacagggcttcaccatgtttgccaggctggtcttgaactcctgacctcgtgatcaccctgcctcggcttttctttgctgtggctctttcccctctaaactgttctagattcccaggcgccctgctaggaacaggtgtgggccaccctggggtgagctgcctcccagaggcctggaaggaccaggccttgccaatcaccgacaagggacgtagaagagcacccccaaaggacagtaggtccccgcccggatctggcccacagcacccgagggaccctgcagcactacagaagtcccatggggcagacgggagccacaggcccagactccacagcccctcagtccacatgtcctggagcctgtggtggaagtccctgttcttccatcaccgccgcctctccctgaggacctccgaagaaacaggccagggctgtcccaggcctgggcacacgggccagtgtccagcccaccccgtctgcccctccaggccccgccctcacccggaagcgctcctccagcagggacagctcactgatgaggtcggtgatggcgttggtaaaggcttcctgggggctgtagtccggcgtggtctgcactcggatgatgatcttgtgctccaaggggtgggggactttgtagccagcaaatagcacttgcgggtcttttaggagttgtgatttaatgatgtttcccagtgtgtggtcttctttgttgatggtgaataagcaggccttgggtaccttggtgtccttgttaatggtgatcttctcgccctcgaagagcaagaacgactcgaaggctggaggggcgttcatgctcccgccgccgttgcgtccagaccccaagtgtccgccaccgccgccaccagagccctaataagaggcctcttccggattactccggcggggcaaacccgcccaaggatcggctcatcgccccccgt

SEQ ID NO: 344004 - DNA, 1000 bp, Homo Sapiens; identical to SEQ ID NO: 160783

SEQ ID NO: 344005 - DNA, 1000 bp, Homo Sapiens; identical to SEQ ID NO: 160784

SEQ ID NO: 344006 - DNA, 1000 bp, Homo Sapiens
cacattagaatataagttttttaatttttataaataacttatctgttacaaagatagtttacccagctaaatcacaaaaccatcaactcaagatatccaaattacgttttattaataaaacaagtaaaaactgatttatcaatcttcacatagaactgcagatgaagctgaaaaacaaggcctattttaaaaataaattgcatcaaacgtaagggctttgggtctatggtttaattacctaggattgtcatatttcttcccatatacaaaatgcaaagcctgaaagttagggctctgacattcatagagatcaactgtaataatcccatttaaaacacagccacttgcaaacatttacagtgggtggtagtctatattatcttccatcctttgctctatttcagcacttcccttagccccattctaagcactcatataatttcataattctgtctttttaaatgcatactgttctttttcttgatttcagttatatacattcctgatcatctgaatattttccttacaaaaatatatcatcaaaataaagagatgcttgaggttgcttcagtgttcaagtttgcttgtttttttttccagcttttcttcagttgtcctaaatatggctagccttgttttataaatacacatgatactgtcaccaagtcaggattagaaatggactgccccaacagtaaagcatttaaacttctctccaaaaaaagggctgtaggtactgctgctgttgctggttttgagactgtactttcccaataacaactgcttgtgcaagttctgtgggacaccaagcagatgaagcttaaccttgttgttctgtcagtgggttaaaaatatcttttgttttaagcttccctgtggaagacaaacactgtgttgtgtcacccactgctcaagtcagtatttaatgtgacctacagacatcacttctgtaatatcatctgcaattcactgtgcagcatctgcctgtcttcacacaaca

SEQ ID NO: 344007 - DNA, 1000 bp, Homo Sapiens
tccagcttgatgagtaggtgagtttattgggacttacacacaggtcaatcctgggcggcgacaagacagctctagagatctgagcttcctcccaatgctaaactgctttcatgctaattttctgactgtttacttaccgggtaagagcgatgggactgttttcattggttggttctcacatactctctgggaagtttgggttctcagggacacctgctcctcagctggggaccatggccatggcccaccacctgcccttcagtgttcaagcaggggacatgcaccctttagtaacctggaggggacccatcacatgacaaccaccccaatgaccatcatcaggaagccgctgcctgactgagatatgcccccaggaggacaagggagagtggatgctggaaagacagggcaggggaccatcaccagggaaagacttcattcttcggaggacattgaacctggggctgggtctgtagtggagccgctgtttcttctcctgtatccaactgttctaactcttgggctttctccattttcagctctttcttttcctggccttctcattgctggttccttcaagcctcctctctattcttccgtcaatatattctttttttttttttttttgagatggagtctcgctctgtcacccaggctggagtgcagtggcgatatctcggctcactgcaagctccacctcccaggttcacgccattctcctgcctcagccgcccagttagctggaactacaggcgcccgccaccatgcccggctaattttttgtatttttagtagagacggggtttcactgtgttagccaggatggtctcgatctcctgacctcgtgatccgcccgccttggcctcccaaagtgctcggattacaggcatgagccactacacccggccccccaatatattctttagtctaaagtaaactgcttcttcccattccccacactctccagttcccatttttcccttattgcaggctccaatgt

SEQ ID NO: 344008 - DNA, 1000 bp, Homo Sapiens
tttttttttttttttttaagagaacacgtatgtgtctgtttatttcaaggtgtggaacacagacacatccccagatgggggaggaggggagacaaggacacgggtacaaaaactggaaacaaagccacccgctacagctcagacggcaccgccacgatgtggtttaaggctctgtacgtatatatatgtgtagaggctcacacacgcgcacacgcacacgcagagcggcactgacacggggactgaggccagacgtgaaggctgactgcagctcgcagcccacctaaaatattgcaattatgtttattaaaaaagtgtaaaatgggaagactgtgcatcggtctgagtaaagtggcgaacttgagcctccccggcctgggtgcggggccagctaagccacacccctgcgccccccacacccctgcacacacctgcacccacaaccacctccacctgcgtgtgcccccaccagagcgagcgtccaggtgtgggggtggggtggttccaggacctgcctctgtggggctcccatccaaacagcacagcgtggaataaaaaaccaaaatgccttccccagagtggccctaacctgtccctggcacccaccagtggccccaccagggtggtcccggcaatgtggacagggtctccggaaggcaggcctatgcatctgtgtgtggggggactcctgggccactcggggctccctggctgctcctccaaacctgcccactcactgctgctggggtgtgactgtccagggcccccacaggccctcccaccctaaatccatccatcccccatggcaagtggaggccggacagggggtgacacggcaagatggccaggagtgcgtcgcacagcagaagctgcatttggctttagcattaaggccagcgctgggcggaaggccctgcagagaggccagtgcccctgagaggggcccagcacacctgggcccgcagcgccttgtggccccgggtccctcctgcgcctggac

SEQ ID NO: 344009 - DNA, 1000 bp, Homo Sapiens; identical to SEQ ID NO: 339616

SEQ ID NO: 344010 - DNA, 1000 bp, Homo Sapiens
aacagtttctaaaacatttttattgtaaaaagttcaagaagccatttacaagccaaaaagtatcagaattaaataacacataatttttatagacacatttttctgtacaaagggctgatctttataggaattttaaataaataatctaaaaatcaatgtcactgattgcaaaataggtctctctctcgaccgtctcaaggtgacatgcattctatgcagccaaaagatgaggggtttgacatctgtgacgagcccgggcagtgagtctctggcgaagatttctcactttcttaataagattctgtcccgtggtgtcccattctactgctcttctatttaaagaaatctgtgttgagggatccatttcagaagagtcatttaattgtgaggttctaggcaaacagcttgagtcctgttcattttggaacctgggttcttctttatgacatggattttcagcatgttctacagccgcatttatctcttgctttaaaaaccactttctagacgcatctgaaagagcagaagctttctttgctgatctcaaacggaactcttttccttcagcttccttccacttcttggcttcctcctccaccattgcatttattatctctatttctttccttctgttttccctaaggagtttggctacttcctggtaacatttgtttcgttgtagatcatcacatttttgtttatgtaaagactgaatctgccagtcggtatttaggcatgcttgttcagcctttgccaaattttctttaatcaccttctgagttttctggctctgggtttcacctgcttctatcagcttatgaaacatgtgttcttcaagatccacttttcgtctataggcatctgcatctgctcgcatttcttttgcaagagcttcttgattttcagtaagattcttctcataaagtctcttttgtgattcgagttccagctgtctcatttctaggtctctggctgtggcagcaatttctcgatctctcat

SEQ ID NO: 344011 - DNA, 1000 bp, Homo Sapiens; identical to SEQ ID NO: 160785

SEQ ID NO: 344012 - DNA, 1000 bp, Homo Sapiens
tttttttttttttttttttatctaggcaacctttattaagttccgttcgagatccgctcctcgtcaccagggcgatcttatcccacaatcctacccaagcctcccttcccactccaccagaacaccccttccctccccttcgccaggaaagatttgggcggccgacccaggtggttccaggactccagcagcctatagtggtggggcggcgtggggtaggggcacgacagagcttcccaaggaagttacatgacctcgccttgggatattcagaaatgctagtcaagttctggcagcctgaactcttcctcctccaagctgaaatccgagagatacccttcctcctcttggccatactgcttccagggagagcaagggacttgaattaaaccgtgtagttcttcttcgcatctgacacctacgatgtcttcactgggtctgtactccacagctattttaccactttctagaacaacaatcaacagtttctggaatgcatctgacaaagccttctgaatagcaagcttctgggctgtcttccttttcataaggaatgataatggtccttcctccaccttatccataggctcctccaccaagccaatgccaggactcctgcaatcacaggatggcaacaccacttctaaagcacagaagaacttcaggctttgcttcggaagtggcaccatgctatcttcattttccctttcttcaaggtcagaaagctcctgaagcttgatgatccttttggaacacccattgaaaccaaagtagtaattcgccagttcttggcatttggaactgttcagggcaagggcttgatgttgaactgccttatgtctggtgccaagacgaaccttgactggagatttctgaaaaagctgcttccggtcgcatgccttttgggctctgtgggcagcccttgcagaataaaacttaatgacggcatagaaaccaggatgggccactgcagcatttgggaagacccggactgaataca

SEQ ID NO: 344013 - DNA, 1000 bp, Homo Sapiens
ttttttttttttttttttttggaaaacaatatattaatttattcccaagaaaacaaaacatggaacctcatcgaaaacaaacatcagatacagtagtttcagggcattcccatgggctgtcagaaacccactagcccaaacactatgctcttccaacattaaagtatttaagacacaggagagatgaccaacaacagacatgtaaacatcaattccagaaagatttcttgttctacatgagaaacatccagtgtaaaacggttcctcttctcaggtgctgtcatttaaataagttgaaaagagacaatttttaaactccactgctgaccctgagtgcattcgctatcccctcacctattttgttttgggacaaagtctcgctctgtcacccaggctggagtgcagtggggcactctcagctcactgtaacctccacctcctgggttcaagcgattctcatgcctcagcctgccaaatagctgggattacaggcacatgccacaaagcccggctaatttttatattttttagtagagatggggtttcaccatgtcggccagcctggtctggaactcctggcatcaagtgatctacctgccttggcctcccaaagtgttgggattacaggtgtgagccaccacgcccggcccaagccagaggtcttgtaaggggactcatcccatcatgagggtcctaccctcgtgacctcatctaaacttcccttaccaaaggccccatctcaaataccatcacattgagggttaaggctccaacacatgaattttggggggacacagtcccatctatagccaatggcagtttgtgcttggagcccactctggtcaccttagtgggactggcctctgtgcaagtgacaggttttcacatgtggccttcaagagttccttgtgtgaccagctgtccctattccttaacactttaccacccaaaacaactccatttttttcagtagcaagaaaaaaggttttacttcaaagtc

SEQ ID NO: 344014 - DNA, 1000 bp, Homo Sapiens
ttttttttttttttttttttttttttttttactgaaccaaaattttattttaaattaggtttttagtgcatatgaaaattgttcataacacatgacacataaagatgttggcacatttgaactacaatagaaaatatttttatacaacttttgaaattacgaatatgattatttctcctgtgaaaaaatgcagtttgcttaaatcagctttgttatggaatatcaagtaggtttaaaatttttatattattgtttaataaacttttaataaggctgtgactctccttgatctacacatattttttaatgtattgaatactgtagcagctttttctctcatctctggtggaacacatttaatatctaaatattcatagagtttagatctagaattacacagcatgttaataacagtttcgatgtcatcaattttattacttgttcgtcctactggcaataactgggacttatacattgtttttaatttatgttctgctgctgctgctagagcaaggcttcgttttaggtgatctttagaggcttcaatatcttctctatatgctgggttgctggtgtcactaagaagtgcctgttgcacttgtgaattaatatctaaaatttttttcaaaatgtcatcattattccaactctctgggtgctttccaaactcttcgggtttttctatcgcagtttcacctgagagctgaggaacatcttctgattctgtagagatcccaatgccagtgctcttatctaaagtggtgacaggtgacttgtatgaggtaacatatggacttgtagatgattcagtaacaactggcaacattcttggtgcctcagtttgttttgcagctggctccggctctggctctggctcttcattttcaatataaggttcctctgcatgcaaaacaatggaaacattgtttggtttgatcgaccagaatggggtactttccgtgtgttttttctttcctatttccggtgtgaagcctcctgt

SEQ ID NO: 344015 - DNA, 1000 bp, Homo Sapiens
tggatgagagtgctttattgggcacccagcatgggggcttggcccgaggaggaccatcgggccccaagacaataaataaaccatcatctccctaaacaataaataaatatccaagaaataaatagctggcgaggaccagaggggctttcagttactgggtagagcctggggcagggggctggaagagccctcccttgtccaaggctgatgatgcgaaggctgccctgatgccaagactccagtcctaaagttctaaagggtggggggcagggggctaagaagccaccgatcagggctgggggctcaatgttgggaaccccaagggccagactgagtgcccagccttggacagcagcagcaactcccgcacggcccgagataagacgagctccaaggagtgcagcaggcggtaggtggagaggagctggggccaggacacctgggccgggccctgtaaggcgctgcccagtgcccctgggagcagccccttcctctcctcctcctcctcctcctcttcctcctcctcctcctccgggaggttgaatcctgcagccagcacctggaagcggaggtgccgctgcagatcgcggaggtccagcctcatggcccacagctgcatcctctccatgttggtccagcggccctgggtccccagccctcccagcagggcatggaagggctgaagcgtggtggagatgaagcagagacgctccgggtcagagaggcggcgccaggcctggaaggtcagggaaacatcagggagctgctctcccaggggcaggaggtacaggttcactcctggcaggtgagattccgcaaagcggtgggcctggccccgaacctcggagagcagcttcctggcgagatgcaggctgactgtgaactccctccgcagctcctgcaggctcagctggggcctccctgggggccttgggaatccccagacaccagcttgaaccaggagcaagggaagcagcaacaggctgagccgccagccaag

SEQ ID NO: 344016 - DNA, 1000 bp, Homo Sapiens
tttttttttttttttttttttttttttttttttttttaggtgtcatttttactttatttaaggaaaaaagggtggggggacaacagtaattttcataatacacagtagacaagttagcactgcaaaaaaaagggctgtgtacttgccaccagtctgctttgcagcttttataattagtaaatttaatgcagtttgtcatttgtattactatttagcaaattaataattggcaaaattagggtaagtgtgctacaactaagacgaaaacctaaataacccataaaaagtcacttaaaataaaccataaatatgtggtgcgcattagtgtaacaaaaccatttttgtaaacattttctccaacgtaacatgtgcatgagaaaagagtaaaaaacactgcactcaatacagaaagggttactctgattttaatacagaaaggttattacttgtgaaagctctgactaaacctagagacatttttgttttgtttggaagagcactcctctaacagttcaatgttccttatgtaatggtgtcattgcaatactgttttcttgtgtaattttgccatattggcacttctgtggagaagttactaccctgtaaaaggggggaaaataattcctttcctaaaagaatctaaacatttcgacgactcccaatctttaacggagaaacttcactgggtccctgcatcaagctatagcaactcaatctggttgacaagggggtgaggctaagacgggaaggaaaaaagccaagtaaagcacagaccaggaagcccccgccgagaaggacaaagggtgttccaatttcagtaacttaagcccaacaatggattcaattcagttcaccacaaacaccaccagagtgcccaccgggtgcctggagctgcacaagcaagccaagcacaactcggtgtgagctcagacccctttaccacctatgggaaagccagcaagttctaagcacttggtaattccaatgaaacaccatttgc

SEQ ID NO: 344017 - DNA, 1000 bp, Homo Sapiens
gggatttcagtttctcacccttatcatcaagactcactgcctcccatcatcaatatttattgagcatttacagtgtactaggcacaatagaacatacagaaaacattgtccctgctcttgaggagcttacattctaaaagaaaaaatacaccttttttaaaatggcatttttgtttggtgttttctgcaaagtactgaggaaatattttgtaaagtgagctttgggtataacttagccccatcattatttagagaatagaggaggaagaaagaggaaggattttaaaggcagacaatgacagaccattcaggataggtagggttttaaagggagataaacacagtctcatcaactaaggagagatttgctgcagtaaataggatgagggaaatagtctgtgggatgcaagcaaaggaagcagggtgccttagacactgagtggagccagaaagatcatgcggcctttttccaagtacatggccaccaagtaagaatggttggtgacaagacagaaggctaaaacaggaaggtaatcttgtgcacctgacaaatagaaagaataaaggatcaaaattgaaggcaggctataagagtatcaagaaattcttaaaaaccaaaaagtgatttggaagcacaaaacttacagttaatgctacccaatgtcatgatgggccaagaacattgtggcttcctaagttagaaaatgccatatgccaaaattttaaatggaacacactacatttttttctaatcaatccccccctctcccagaaaaaataggaactcatttttttcagggtggggaggaagagaggggatcatgggacatggaaacagtagttatattagtagtatttttgttatgataaattttgtgtttaaacttggtaagagcccattagctgccaagagggaataaggaataaatttcaaaaaatgtacaatttcctttagagaagtttcagaaccaagactaatttacatgaaaagctgtagaga

SEQ ID NO: 344018 - DNA, 1000 bp, Homo Sapiens
tttttttttcagagaagtctttcatcggtctcatttattgcaatattttctagctttgcatccagtacaacacaatgaagtattacagtgatttttatcattgcatcagcatatacaaatacagatcaaatgcaaataaagtgtgcttacagtggtgatccaaacataaaattgcaaagggaattctctttgaaagtgtaattatttttctccaatgtaccaggtatatatttttctctatgccaggtatacatatttgtcttcatcacatgtgacaaacatttgatgacttgtcactaagtaggattcatttccatagggcaactttgaaatgtgtggtccaaatacagcattccagcacatgacctcagcatcactgggttatagtcatgtacacaaagataaaccaactcgtatatgcgtgagtgcagcccatatacaaatctcactttcagaagccagaaggcaggtgttaatatgccagccttgccagggctcacattgaacttgacacagatctgagagtgtgactttctggaaagcatgctctgtttcagggtgcagtgatgtggaagtttaaggtacatcaaaattcgggatccaaaattgcatcctctgaaaactccgcctgcagggtgtgctgctgcagagggctgcctggatgccaactgcatgagggatacatccccccattctcgcagccaaagttcctcctgggtgcaaaggagaaaccgtctgaacctttgcaggcccatgagcttatacttagttcagagcagttaaaattcactcaaaaataccctcattgcataaagaatgaatatagcctctttaggttactagtgaacaagcgcagaggagttagttaaggcaggacttttttttttttttttttttttttgacatggagtcttactctgtcacccaggctggagtgcagtagtgcaagctcggctcactgcaacctcaggcaggactatttttaattatttttaatacc

SEQ ID NO: 344019 - DNA, 1000 bp, Homo Sapiens
tctgttaagtaacaacagatcttcctgctttactaaatctattcttcccccaagccctcgagaagccctggcaggacccaggctggctactgagctctgggcgggggtaggggggtctggcctgctgcgggccaagttggggcaggacatacagcccattccatggggaggatgaggcccctgggggtcagtgaggcacggctctgcctcaaggccaccccctcctaaggacacagggtgaagccccctcggccacatccggggcagccatgccagagctgagacctcctacgagtggtactggggccttcccacgaagaggcctggggaggctctcgggcctccgtctgccctccctcctcgatgggggggtcgcactcctcctccaggtcgatcttcatgaactcatcaatggtcaactgactggtgggggtgtcttcaaattccgtgagcctcttccgcagcgtggactcacacactttgaccacactgatgacctccttcacagtcctcctgaagtcatgcattctggctgcaaccaggagcgctgctccgcagaggcccgaggggcgccggcctgtgtgcatccagtcccgcttcatcctctgtaggagcctcagggcagtcatggacacctcgtggttcttctccccgaattccagcaggtgcgcaaagcgtggaatatacaggcacgggtctttttctatggaaacagacggctgggacagaaaccacggccacagcagccagcgtgtctttgccagtggggtcccacactatgaaatcgcagctgtggcctcggtgggtgtgtccttggcgggtgcatccacacactttctctcggaactttccggactctcatgcatatgctacagctttccaaacggcttggccgtgcggagttacgcacccacctgcagcaggtgatctccagctgctctgcattccaccaacactacgtgacaagtctcaagttcagccgcctgggggctcgggcacc

SEQ ID NO: 344020 - DNA, 1000 bp, Homo Sapiens
ttttttttttttttttttgtttgctggataattttttaataaagtgaggtttacatcactgatatttaagaatggctatatgcacaaaagaaaacacacctttttggttaaggggtgaggaagttagagaaagcatgagaaacagggagcatgtggggtgaggcggggcaggagtggaaggctgcaggcacccccagctcactccctgcctgcggcagcacccatgacactacagatcaaggggttatgaatgacatggattcagatttctttcattctagacttcaacctagccttaaccttttgtttcagcaccagtctaacagagcagcgcaggcgtttctcatccagcagcaatgctacttcctcacccagggcaggtgcatgggctgaccctgacgggagcctccaggaacactgccttgagaaggcaccaccgaggggctatgaggtccctgaagaccaactggtgcctgtgatctacaaacagacaaatatttgacctttgtcttcaatgacatttacatataaatagacataaataaaatcctccataatttactcttaggtctaggaagatgtggctgtgtgcggttcctgattttcacccaggtctcactgcagcgcaggacataatgaagaagtatcacacacacatttaaagtaaaacatgatacattcacactgttgactgagactgtagtgatgctcagtgtcaatgcgtcagaggcggctgtgagcactcagggctcctgctcaggtctccaccaggatctccaccacgtggtccagctcgcccaggtcggacttgcagctggagctagggcctggggtggccggagccaagccctcgagcccttcgcaggggcccggcctggcaccccccatcatgcctgtcagtactgtgtccaggtcgtagtaggggctgtccacgtctgagaacagctcttccatgcagctggggtttttagtctccagcgtttcaaatatctgatcaagt

SEQ ID NO: 344021 - DNA, 1000 bp, Homo Sapiens
aaatttaaaaatactttattgctaaaaaatgctgattatcaatctgagccttcggtgagtcgtactctttttgctggtggagggtcttgcctcgaggttgatggttgctgactggtcagggtggtggctgctgaaggttggggtggctgtggcaatttcctaaaataagacatcggtgaagcttttcgcatgagttgactcttcctttcatgaaagatttctctgtagcatgcgatgctgtttgatagcattttgcccacagtagagcttctttcaaaattggagtcaatcctctcaaaccctgctgctgctttatcaactaagtttatgtaatattctaaatcctttgttgtcatttcaacaatgttcacagcatcttcaccaggtgtagattccatctcaagaaaccactttctttgcgcatccataagaaacaactcctcatctgttaaagttttatcatgagattgcagcaattcagttacatcttcaggctctacttctaattctagttcttttgctatttccaccacatctgcacttacttcctccactgaagtcttgaacccctcatagtcatcaatgagggtgggaatcaacttcttccaaactcctgttaatgttgacaatttgacctcctcccatgaatcacgaatgtttttaatggcatctaaaatggtgaatcctttccagaaggttttcaatttgctttgcccagatccatcagagacatcactatccatggcagctagagccttatgaaatgtatttctcaaataataagacttgaaggtcgaaattaccccttgatccatgggctgcagaatggatgttgtgttagcaggcatgaaaataacattaatctcctcgtatatctccatcagagctcttggatgactaggggcattgtcaatgagcagtaatattttgaaaggaatcttcttttctgagcagtaggtctcaacagtgggtttaaaatattcagtaaaccatgctgtaa

SEQ ID NO: 344022 - DNA, 1000 bp, Homo Sapiens
ttttttttttttttttttttagcagttttccattttttatgtttaagtggtgtggtacaactcctttacataccttatataataaaatgtatcaggaaaagctattactctttagatgtacaatacatagttacttaggtgataaagagttaataaaattttcaaggtctgctaaagaattttgaagtccgtcattcatatcttgacttctgagaaattttttcagagtatctaaagcagttattgcctcagattttgatggtaaagggagttcagttcctggagatccatcatcatcctcttcatcagaagtgtaaaatccagtttcatccgatttactttctttggtgcatatggaatcaccatttggtgctgcttcacatgtctccaaatcatcatccagggcagcatattcttctatagataaaccttcaggaaattctactcctgcccccagagcatcagcaaccaaatccagaccagtatccttctctgcatttgttatgtcactttctcccttttgagatttgaatcctgcctcttcatagcttttaacaatagtctctggggttacagccctccagcaaagatgcaatgtatcaactgcatctagtagtgaaaatgtaaattctttgctaccttcaacagagcttaaaaatttcttgataagacagtgtcgatatttgattttaaggcttttaataacaccttgtttcatagctatacatttggaagataaacatgatggaaagaatgctaactcaatggattttaggttctttacctctggatgtgctggaaaagactcaacaaaaatcaccactcttcgttgctgggcttgaaattcctcatcaagctttcgcatccattgttcaaatacatcggaggtcatccatgccattctgttagcttcataacacacaggcaatgattttaaacctttgaaacaatgtggagttctcttttttccaatgacaagcaaaggaagtttctctgagcc

SEQ ID NO: 344023 - DNA, 1000 bp, Homo Sapiens
cctcagatttttatttttgcacattcttgtgacatttcccattgtagggaacaggagtttagcaaaatcagcttcttagatgatgtcattctaaatatacatcttaaacaaacaatatcaaaaccaccagtaggaaactgaaaaacactcagtgagtactgttttgtctcagtaacaataaatacaaaaagactggttgtgttccggccccatccaaccacgaagttgatttctcttgtgtgcagagtgactgattttaaaggacatggagcttgtcacaatgtcacaatgtcacagtgtgaagggcacactcactcccgcgtgattcacatttagcaaccaacaatagctcatgagtccatacttgtaaatacttttggcagaatacttcttgaaacttgcagatgataattaagatccaagatatttcccaaagtaaatagaagtgggtcataatattaattacctgttcacatcagcttccatttacaagtcatgagcccagacactgacatcaaactgagcccacttagactcctcaccaccagtctgtcctgtcatcagacaggaggctgtcaccttgaccaaattctcaccagtcaatcatctatccaaaaaccattacctgttacagctaaaacaaaatcagcacatctctgtctgtattagaaacgacaaaaccttacaaagcagtcacctccataccagtctgacaatcactagttcatttggcagatggacaacaaaggtttaaacttgccattccaatcaactttctttccctatctgattcatggtgtttttaaaatagtatcttgaaagctgtgctgcatttctcctccacttatcaatgaagaaaacgtgctctccagaaactacctgcggtagccactcccaggacctggggagacgtgcaccctgggggtctgagggcctccaggtgaatctgagagggaagaccctccagtgctgtcgttgtagcctggctgagggtggtgct

SEQ ID NO: 344024 - DNA, 1000 bp, Homo Sapiens
tgaatgaacaaaagagcttacatttattgagcatgcttgtgctaagccctgggctggcctttgtttcattggcacaacagccttgagaggttggtccattatcacccctcagttcaggtaagtggactgaggctgagagaggtgcacgggtttgtcagggtcacatagcacatgaggacagagccagaccaggagccctgtgacatcctcggccaggatgctaaccctaaggacagtgaggtcactcttcacaccgctgtgaagggagaggctattgctctgcacccacagctcagcaatggggaccatgaacgcctctaggcagcccatgtatggggccgctacctacctggtaactgtccacggctgtccatttggaagagatattgatgtgtttgttttctcctccccagcctgtgggctcctggagccaaggaccccacctaattcatcactaggcacaaaacagctgctcaataaatgtttactgaatgaatgaacgcatgaagaatcaatgaaggaggcggtgaaggaatgaatgagtcagtggagaacctgaattggttcctcaagccagccttccactgccctgcatgccctggcatcttggacatttctggcactaggctgctcctgccacctcactgccaggggtgatacagggctgccggcctctgcaagccggggaggcctacggctgtgccgaggcagggaacagtgtgctgtactcctcctggaagcttaggtccttgaatctccgcacggccagggctgcggtcaggctccaggtgaagatggagaaaaaggagaaggcgatggcggcccgggctgcgtccgtcccttcgttcagtgggttgtccttgggcttggagacctgccactggttggccaggtagcagaatcccacgaaccagaggaaagcccagaaggccgagacaccgatgtcggacaggacggctttcttgcggtccttgacgctgctgatctgcgggaagtacac

SEQ ID NO: 344025 - DNA, 1000 bp, Homo Sapiens
gttgttcttgcatcccctaggcgtgggcctcttgctccatcaggacttggttgtagatgaatggcccacaagtcaccagcctttgagcaagttgtgtccaggtggagacaggaagagggtgggcaaaggggaattctataaagacacagtgtgtggggcagtggcagtcaacattcgcaaacattcatgcatctgatggggggctttgccctcccttgggtattttccattagcctacagtgaccacctgtggtcaggctaattcattactcacattaatggggaagggggttgggggtaggagtaggtagggtaggtgggaagagatccctcttattgctgagtggacagaagggtgctagtttttccttagcgtgtacatattgtgggtttctgggggtttgtgtgtgtgtttagtttttgtttgtttgtttggacagaagaaagtcaactccagcaatgtcttcttaggaaaaccactcttcctcagtggctgcgttatgaggtggggaggatgtacaaccgcactctgggacagccacaagtggtgattttttaaaaagtgatcctagcccttgctccccaacatctgtagtgacccaccctcatgaatatctttaagtaatgaaggagacacccttgtcccactttggggctcacacagctgatctcaatgaatctagtaagcagaaaaattgctttcttgaccctttaaggaagccaagagtagctcatgcagatgaatgggtagggagcaatgccattgcccttagagatggttacaagtagctgggatgggcttacaagggcagaaggagctcttgatgagttctttcaccctgcagatgggctaggaccggctgacgcagatgatgcagtagggctgtactggcagaaccccactccactgggaggagaggagtggtttggataaatggaggatgcaactggcctaaagaggcagctggcccctcccacctactgagggctgagaggggct

SEQ ID NO: 344026 - DNA, 1000 bp, Homo Sapiens
tttttatagtttccttttttactgaatttttaattccaggaaaatggttggctaggagaagattggaaatctgaattcacatcagatcctaatgaaaacaaatcaattttaactaagtcagcgaataggagttgtattatttaattagcatataatttgaaagagttcattagcttcacaacaggcacaatcaacacttaggtaaagtactttattgttgcaaaactttagaacattggtattgcaagttcttggcctccatgactgcgttattaaaacctgaaaatcttccttgcttcttctaaagatttctcatccatgggaggcttccttgggctgccaggctgtagaaacttcttcactgtgggcaggttgctgattctggttttcagggccttcagcagagggaagctggagataagactggagtcaagctcctcgacgtagtagagaagttccaccagatgaatgtcagcccggctcagcttgttgccaacaaggtagtcttgtccatggctctttaagactttttcaaaggcagggaagtagcgattttttattttctctttgatcaaggcaagcttggcatctttttcctcaggtggacatacgggcagaaggaggatcatttcacccaaatctgctataccttctatatacatatcaatcagggctctctcctttatgtctttcccatagaggttgtatttgctggcaatgtagttgagaatggctctggtctgcaccagcttcatcccatcaatctcaaccattggcacttgctggaacatcaaatatccatcatttcttaacttgtccaaatcttctgcagattttataaatttctcttcaaactctactccagctgcagccaggagccaccgggtggactccattctgccccgtgcattgaagtagtggagcttgggcttctctgccatgatagcagtctcctggaggtttctctaagctttgttaaacgctgtcaccgtcctggctc

SEQ ID NO: 344027 - DNA, 1000 bp, Homo Sapiens; identical to SEQ ID NO: 160787

SEQ ID NO: 344028 - DNA, 1000 bp, Homo Sapiens
ttttttttttttttttttttggggaagaatgtgtcattttctgaatcccttctccactgacccactttccatccctccacacaacttcagtaggttgatggcttctactggtctaggccccttgaccccagctagggcctcagggactttcgggccttttccaaaatttcctccctgatcttggggtagtcggggtgctccctgaggacatcgttgcagatttcgatggcctccacaaatttcttgtccttcaggtagttgaaagcaagtttgaaaccaatggcagggttggcgtgatgactgtacttccaggccagtttgtagttggtgactgcatccttgtaggactgctccttctccatgatgaagcccatgtactcataggccttgtagcaggacttgttgtattgcacacagcgccgcagcagttctaaggcgaggtcgaacttgctgccctggcagtaaatgtcagccagcaggagccagctcttctccaggtcctcagcctcactcagcacccagggggtcttggccaggcgcttcaactgcatacgcgccttggggatctgcttcaggaacacgtaggcttgtgccaaggccagcagggcagggacgctgtccttctcagcctgcgctatctggatgaagctgcccagcgcagcctccatgttagccttctccctggtggccagccggcagaggccctgcagcagccgcagctgggtctggctggagtctgaatgtgggtaaaactcacgcagcagtttctcggcggtgctcacaccctgctgctccaactccttcttctctgtgtagttgctctcagctccctggttctcaaaagcctctccgcccacaacctcgttgtctggattcagacagatctgcaccatgtggtagatggcgctctggccccaagtgctgtccttgcgtgccttgttcaggaactttaaggcttcgttgggctgccctatgtgccagcagtagatacctctgcagt

SEQ ID NO: 344029 - DNA, 1000 bp, Homo Sapiens
cattttggagtatttactatccctgaaaattaatataatgggggtgctaatgctaatttttaaaaccaaggttagctcaatgaattctccttttataaaaactagtaccattcactcattaggatacctacataactgcaaaataattcaaagtacacagagacaccctttaaagattcatcatatacttagacgatatgattcataccactttcctgtggaaacactcaaattattcacaataaatagaatgcaatcttacaaagttgatggcagcaccaagtgaagatgggtgcttccttcaaaatacttgatttagattctgccatcttattcacatagaacctaagaaactctttccgtaattaagcagtaattcacaatatatacatctctgaggcacttgttgtttcaatagatggtttgttcctctccgtaattacaaagacaatgagccccaaataaaaagtatcctacatttttagtgactcaagatacacacaactcaatataaaattcttattcactagagctacaaatcataatcactatcagaaaattctataataaaatttacattcacttctcctcctactaatcttacatttatcagcatactaactaagcagagtgtggtaattccacatatttggagctcctctaagccagtttctggagatactctaagatatggttggattttctgagaatgaaatgttttatactttatgaggaacccaaccagacaaagaagtttactatgagtctcttcccttattccaaggactttgatttctgatgtttgcctccatattgtgtaactgtagcaccatggaaaacacaatacatgtattattgtagtaacattacagagttttatcaagaatctctggaaaatagataattttgttgtttgtatactgtcagaataactttaataatgtacgattcagtaattttatttttaaacagggaatctggctgaattaaatgcaggtaa

SEQ ID NO: 344030 - DNA, 1000 bp, Homo Sapiens
tttttttttttttttttttttttttgtgaaaaagaggtgctttttactctagtattccttgttctgggatcacttaatcactatttcgatgatgaaggaactctgaactcctaagcaaaccatgccatgacatactttatatatatgcacaaaagttggataaaacacaaaaccagcattttgacaaattcactttaaaatgttttccacatcaactacttaaaagaagttacagcaatatgatcttccactgctcaggaagacagagtgaacttggatatgatgaatattaaaaacaaacatacagagcacctgggtctggacttgtgggctaaagaaatgcttcctgaatttgtccgaggtgatgtgttgagcaaccgtgccacagttcaccagcagtgacactctagttcttcagtatattcctgttgtgaacctatttctttgaatttaatcatctgggatgattgctgcagtgtgagtctttagcattttgaaaatcccacagaagagattaagaaggttcctcttcccagaagacactcatataaagcatgcttctatagggttaactgttcagaaattgtaaggtgcatggtcatcaccaggtaagcagctctacaggggcccatggcccatactcatccttgcgtgcccaggggagccagcgtgcatatgagcagtagggaagtggcataacaacgcagaagggctcaggacaacttggcatttttgttgttgttaaactcaggcttatcaagagtcataaggactcatctcagtttgtatatacaccttcagacccatacagatagatgcataagaatatgatcatttctgttcttcacagagtactcagaattctgacaagaaacatcacaagtttatataaatgcccatttgcatagcagcttacaaattcaatagttgtcagaggcttgacgcggtgggtcatgcctgtaatctcagcactttgggaggccgaggcgggcagatcact

SEQ ID NO: 344031 - DNA, 1000 bp, Homo Sapiens
ttttttttttttttttttttagatgttgtctgtatttattttctacctttatgaaacaagaacctgctaacaggtaaatcgtaaagtaacatatttttgccctgatgccattagtcacaatgccatggggtaactgctatgtgatttcccatttgcaaggaagcatattaattcagtttctgctcaatatacaattaggttgtagggatatagatatctcatttgagttatctgagtttttcatctttatatctaaaaatctaatctgaaaatagtaaaacacatttaaaaccttagatgctactgtagtaaaagttatgtttataaacatttcagtatattccttcaacttcaagaatcttgaatttccttgctagaaggcttttttcctcaaagattccttttaggcttactttggtgttcaggatctccaattataaatgtagtctctcagcaccacattccgtaaagatgatttcccaagtaacggtatttgactaagttgctccagagtgttagggtgcaaaccacagttagtaagctccttatgaacaacctccatatcaagtactttgtccatttgcaggcagatgttaaatacagcagttggctcgtgtggatacagtactgcagagaaagatccactctgtgaagatttgagcagcatggtcagtgaatgcagagaatgaggcatgataggacctgtaatctccaaactaaattggtctctgtatccagaaagagcttgtgtcttcacattcacactccgtgccttaagcatttgcattgtggcacctcggaaagcaacaggggacaagagggttggaggaagtcctgcctgtggacctgaggtagcaactaaactcttagagttaatcaaaaaattgagcaatgtaaaggtgttgattccttttaccaacacaacagattcaggtctgtgatccatttgtacttcatgtttctctttacgcagcttgatagaaagtatgtctggcttttt

SEQ ID NO: 344032 - DNA, 1000 bp, Homo Sapiens
ttttttttttttttttttttagatgttgtctgtatttattttctacctttatgaaacaagaacctgctaacaggtaaatcgtaaagtaacatatttttgccctgatgccattagtcacaatgccatggggtaactgctatgtgatttcccatttgcaaggaagcatattaattcagtttctgctcaatatacaattaggttgtagggatatagatatctcatttgagttatctgagtttttcatctttatatctaaaaatctaatctgaaaatagtaaaacacatttaaaaccttagatgctactgtagtaaaagttatgtttataaacatttcagtatattccttcaacttcaagaatcttgaatttccttgctagaaggcttttttcctcaaagattccttttaggcttactttggtgttcaggatctccaattataaatgtagtctctcagcaccacattccgtaaagatgatttcccaagtaacggtatttgactaagttgctccagagtgttagggtgcaaaccacagttagtaagctccttatgaacaacctccatatcaagtactttgtccatttgcaggcagatgttaaatacagcagttggctcgtgtggatacagtactgcagagaaagatccactctgtgaagatttgagcagcatggtcagtgaatgcagagaatgaggcatgataggacctgtaatctccaaactaaattggtctctgtatccagaaagagcttgtgtcttcacattcacactccgtgccagtcactcattaaaacatgctgcagggttgcatcatttgaccaaggacttgtctttccagccatttttctatcagctccaatacgagggaacagtggtagccaagacaaagcagggtggagccaatagataaggctctgctggaaggtacaacggagctcagaggagagtttgggatcctgtatacttttaggcaaagtaacttctgttgccctacaatgctggaca

SEQ ID NO: 344033 - DNA, 1000 bp, Homo Sapiens
ggctcactgcaggctcaaccttctgggttcaagcccaagccatcctctcacctcagacttctgagtagcgaggactgcagacatacaccaccacgcctggctaatcttttttttttttttttttgtagagatgggatctcaccatgttgcccaggctggtctcaaactcctaggctcaagtgatcctcccgtcttggcctcccataatgctgggatgaggtgtgagccactataccttgcggtttttatttttaaatggttgaaataaaagaataaaacttttcgacacatgaaaattttatgaaacttaaatttcagagtccataaatagtttttagtggagcacagccatgctcattcgtttatgtatctgtggctgcttccccaccacaacagcacagttaatagctgcaacagaggctatatattgtgcacaaagcctacaactttactactaggccctttacagaaaacatttgccgacccctgctctagaccactgaaaaccctcatgctcatcattctcaacctgaagatctctctaccaaatcctaactttaaaaccttgctcagaaatccatctcttccatgaagttatctttcattatctcacccatctttaatcaatcaatttcactaatctccaaagcacaattacacacataatttcttggagctgattcagttacactttttgtaagtggctttctccttactaaagtttctgtaagaacaaactacagcagctgtattttattttatttttctatttctgagtataaagctctgatacaacaaacactttattaatgtttttgaatgactggctgctcagagtctttcaggttattgtacctttcattgaagactcaggtccgctggttctttgagagccatgagcagagctgttgttggacaccaccactggcccaggactctggcccagggaagggatggtgttaagggtattcaccaatttggccacttcattgctattttc

SEQ ID NO: 344034 - DNA, 1000 bp, Homo Sapiens; identical to SEQ ID NO: 160789

SEQ ID NO: 344035 - DNA, 1000 bp, Homo Sapiens
ttttttttttttttagcatttctttgaattttattgaaaattgacatggacattagaaaggtatcaggctaaacagtgctggttctgggatgtttctcctggagaatgaaagccccagaggggcaatgactggtcacacctttgagcaaaaagaacaaaggagaagaaaggaaaaacacacacagattctggaaaacatgcaaagaggctctctcaagagacactgaacagcagaatggtggtgatggtggtaggggatatatgagaatgagcacactcacatggtattttgatgcaagttaaaccaatgaattcaaggcagatttaccaacatcaaagctctccctccagatcccaggttgagcagaaacctctctcaaaaccctaactggtctcggaaggtggaatggagtaattttgccctcactaagcttaaaccccctcccttctctacctaagtgttagatagtggatacattttccccctttgctggaatctatagaaggtctgcgaatgctgaagaagatacaaatgtcacttgactttctcttgcatattcagaaatgtttaacagtggctgtagacagtcaacccatcgaaccagagaaatgtttaaaagaaaaacataaaactcaaacaaaaccttgtgaacagaacagtactttcatacccacagctgaggtgtcctgccccagtcacttacacttgggtgagtggtcctgtagttgtttctctgaggttacatttcgtccattttccagctctgatggttcttttcctgccttgttagttaggacaagacacttccatttaaaataccatgtgagtcaggaagagagcttcttgcctggacacagggacacatgaacacttgttgagtggtgtggtgtatgtgtgtgtgcttgcagtttgaggggagaggaaattggttgatttctgatttgagacaatatggaaccctaactcttctataatggcagtcttctcctttagacttag

SEQ ID NO: 344036 - DNA, 1000 bp, Homo Sapiens
tttttttttttttttttttcgtagcacaattcaagtttattccatttgttcttgcaacacaaaacttaaaacacagtattatttagcattcggatgtacatgaactaggatacttatgagaaacccaactgcgtcaaaagtatgacattgtggaaaaaatgaactcaaatatatcaaaatgcacaaagcactagtcttcctccattaccgcttagaaagatatgattgtttctccatttacaaaatagaatcaggacaatttaaattttttatattttgcatgcaaaacactgcaattgcttatttatgtaggagggcactctcaccagcttcttctatacacaattgagtatacaatattgcatggaagaaaacagcagctcaactgaaatattagaaaaaaaaatcaaacagatacatacagatttaaaatccagtacttgggaaaagatatcaatgaataaaaggcctacttgtttgcagcttccacacactgcacctacctactacctctcttccatgcttaactgggtttagaaaggtgagctatgcgtagaagaactacttgggatattcaagtgctgtatttgaacgataagcctatagataacagtctgaagctgcaagggagactttgttagtacactactataaacaggtaaactacctgtttgtacttgatatagtgcatatgaaatgactgatttaatacaaaactacagaacatgcaaaattttttctgagatgttaagtattacttcagtggagaacaaaacttacttaacctttcgctaatgcatgtagtaccagaaagcaaacatggttttagcttcctttactcaaaatatgaacattaagtgttgtgaatttgtctgccaagtggttcagaaatacattataaataacctagttaaaaaaagaaactgtgaaccatcttggtcagtctattctattctatgtttatatgttattttctcaagcaatcgcttcataattatag

SEQ ID NO: 344037 - DNA, 1000 bp, Homo Sapiens
tttttttttttttttttttttttttttttttttttttttttttttttttttttttttttttttttttttttttttttttttttttaaaggcatccacagtatttaatttgtttggataacagttacagataaacaggtacaccccatatacaattactaatactttttatacagttcatatttcagtacatcaacactattttatttacactctatttatgcacattaacatctttctaaagtcagtgcattgtcaacaagttttatacagtcatttacaaggtgaatgtggttaatagttaatttaataaattttccgctagttcatgaattaaaaaaattaattacaaccagtataacaaacacagatcaaacaacattagtagattgtgctacctgcttaaataaaacatctgtaaagaaattatttaaaatcttccactttttaatgggacatgtccaggtaggaaaggacagattttatataccgaaaatcttgaactataaagtatgcattttgtctgactttattacattagataatttaggccactcctacctatttgcaattatattttttctgaaaaggatttcaatttaggtagccatttaagataacctttccaaatgctctgagaactagatattaatagttactggcctcagatatcagaacacaaatgcttagttacactggtaattactacctatgaggaagaaagtgtagtggaatctgacaattaatgagaatcaacttgcagggtctaaatgaataaacaaagaccaaaaataaggtgaaacatttccttcaagtatatattaaaaaactacaccaaaaaaattctacctgaaataaataatatttatacttttgtcccagtcttgaatatttagaggaaaaaatgaagtaaacaaagaaacataactttcaatgactactgtaaaattttttaaaaaagactaatatcaaaataaaaaaattagtggacatgcaaacaaa

SEQ ID NO: 344038 - DNA, 1000 bp, Homo Sapiens
ttttttttttttttttttttttttttaagtgcctatgggctaagtcttttaagacttcaaaatatactcaaatgcttaaattatgacagcaaagacttaaggaaggtgttgagaacggagttgatacaaaattaatacgttactttgatagcttagcaaaggcctgcaacagcttttatcaagagtagtgtgacttttgctgaaagcagcagttttcttcatggaaggaattttatagcaggggcaaaatatatagaaacaatgaaaaggtttttagaaaaattcccttaagatgttaattatagaattatcttgatcatttgcacaagaatttttcaaacacttttcaaatgtgtcaactgagcatcttgtcttagcagagaaacgtgcttaaaaatgcaacttgttttatcttccttggtttttctcaacaatttccaaagaaaattctggcttcaaatactggaatatgttcatccgactgaggtctgagaaagaagaaaattaaaattgaacaacttgcttttttcttccttgatttttctgaacagcttccatggaaacttttgcctcatacagtggaatgggttcatccaactgaggtctgaaaacaccagttgataacttctccatcacatcctttaagatacgtagctggaaggattgttaaggtggcaatgtaaaggagaattaaataaaaccattcaataagcagaggatgccaggcaggccactttctcttgtttcaagttttgcactctcagagactcaacatgttaagttagagaaattctgtaggacgtcaagtttagctctttcaaggtgatgtgtgctttccttaatgtgaggttaaaaacaaaatcttccaggtatcttagggctcatctctgttcagaaaggagagagactgcctgagtgtgattcttgctccgccacttgctgcgtccttgagtctgtatcaacatctctgtgcttctgtttcttcacctgtgaaatgggg

SEQ ID NO: 344039 - DNA, 1000 bp, Homo Sapiens
ctgggacggactctcactctgtctccagactggtgtgcagtggcgcaatctcggctcactgcaacctgcttctgtagaagttctaaggaagaggtgcgaactccacggcggtgggcaagggtagctaactagcagcggcccctacaaatgttgctcgggggtcttgagctgccggagttgacacaaggggaggggtctaattagccaccaggtgactgaagggcttgcctgcccacagcttacttggctggggggtttctgaagttcctgccggcaaacttagccttgctgcccagctcctcttcaattctgaggagctggttgtacttggccaagcgctcagatcagcaaggggcaccagtcttgagctgcccaggtcacagccccaccaccaggtcagtgatgaaggtattttcagtctccccagaatgatgaggcaccatgacacaccaaccattggcctgggccagcttgcacgcctgaagggactcagtcacagagcgaatctggttcactttgagcaggaggcagttgcacttcttctcattcacggccgaggctgtcctctttgggttggtcactctgagatcatcctccactacctggattcctgcactggccgtgaacttctgccaagctccccagtcatcctggtcaaagggatcttcagtagacaccactgggtagtttttgatgaaggacttgtacaggtcagccagacagtcaggtgagatgtacctggtggggtcgtcgagaaacttgaattccaggtcatactttccagacctgaagaactcggaggcctctacgtccatgctgacgatcaccttatcagtgtagccagctttcccaatcgcagtcttcagcagctccaggccttctttattctccaggatgttgggagcaaacgcgcctccatcccccacaccggtggcatctttcccatatttctccttgatgacattcttcaggctgtggtaaacctccgctccaatgggca

SEQ ID NO: 344040 - DNA, 1000 bp, Homo Sapiens; identical to SEQ ID NO: 160790

SEQ ID NO: 344041 - DNA, 1000 bp, Homo Sapiens
agcagtttatcaaccgaagtttattttctcacacctttgggggctgaaagcccaagatcaaggtgattgcagggttggtttctcctgaggccccctcctcggcttgcagacggccaccttctcactgtgtcctcacgtggcctctctgtgtgccttccacctaagtgtctcttcctcttcttaggacaccagtcctaggccaggtgcagtggctcatgcctgtaatcccagcactctgggaggccgaggcaggtggatcacctgaggtcaggagtttgagaccagcctggccaacatggtgaaaccccgcctctactaaaaatacaaaaacttagccaggcgttgtggtgcacgcctgtaatcccagctactcaggaggctgaggcatgaaaagtgctcgaacctgggaggcgggggctgcagtgagctgagatcacgccactgcactccagcatgagtgacagagcaaggctccatctcaaaaaaaaaaaaaaagggaaaaaaaggacaccagtcctacaggattagggttgcattcttatgacttcatttaaccttaatcacttctttaaaggtcttatttccaattacagtcacattaggggttagagctccaacatatgaatttgacgcaattcagtccacaacaggtaccacctgtattctatctctttcttcactctccccaccaccactctgtctctattctcaggcaggagtattatagacgcatttccattacttgtaaacatgtacacatttgttaaagggttagatgcatttaagttgggcatcaagccgcaggccaggaaagaactctagtctctaccactaggcaaagtcatagatctaaggagagaaaaagaattggaattcccaggttacacagatcggaaagcaagcagcaggataatgtgatgagattataattttaaatccagagatagaaaagtaaaggaagtttctttcattttcctgtcatgcatatgaccctttcttt

SEQ ID NO: 344042 - DNA, 1000 bp, Homo Sapiens; identical to SEQ ID NO: 160794

SEQ ID NO: 344043 - DNA, 1000 bp, Homo Sapiens
tcaaatcttgtgaaactttattgatggtttaatatccaactgatcttacggcatgcacataggatggcaagagaaagctggatcacacatttttttttaaagttttgtttggttttgttttaaagcagagttgttacagcggattggcaggttcacagcggtgagagttgataacttactgaagtgcgggccacagggcctgcactgtacacatgaggacttaacctatggcagcaaaactactcagggacagcctgctgctgttgtttttatttaaatacaaaacaggaagacccgtgacggataccccaacttaagttaacttgtaaacaggacaacgtggaaagttcaaacagaagtacagacaaactgcaatttttcggctgtgtcactctggccctgcatccgagaaaggtggggagactttgttcttttgggattaagagggtggatgtacttttttctttttttgcatccttctgacaagtgtcctgggccttggagacagaactaaagagatcattttgagataatccttgggggtatgggaaagaggtggaagggcaggatctcacggactgaaaaattgcagattgttcacacaacgcagtcacgtttcaaaaagtaccaagctgatgaaaataccatgattatctctactcaatgattgcaatacttgtaaaatgcttctataaatccgaatatgattatcatgtaattccataaaaattatacgtctgtctctaacagttgttctactaggctaaaactaaagcttcatagactgtttctagaacttaacaactccactgcacagatgtaaattttatacattttttttaactggtacaaagaatttaagtttttattactttctttttttggaaaaaaagaaaaaaatagaaacagtgcttttttatcacctttttattaatgttattttttccctcccataatataaaagtcagcagtgatatcaataatttattatactggaaga

SEQ ID NO: 344044 - DNA, 1000 bp, Homo Sapiens
tttttttttttttttttttttttttttttttttttttttccagaaaaggatattttttttattcaagtaactgcaaataggaaaccagagagggagccccaggctgggacaaatcatggctacccctccccaacagaacagggggaggaggtggcccctacaccctttatggtcgattcgggcccccttgctcactctgctgcagcatcctaggggcagggccccaccttccctgggactggggtagtcggtcacccagcctgccatgccccagcccctcttccccacaaagagtatcttgggggaggggatcgtgggcagaacaggaggcaatgaggatgaacatttggcgctggtagcagcagcaatgacggatgtcgaagaatggaacattgaacaaaaaacaacacaactgtccagaggtagtttgtgaacagaggaaaaatggaaccagaaccttggggggcagggaggagcaggaggggggttgggagcgggcagggtgagctccttgttattggtgccccatctgaggagggggaaatggctgagtggcggaagcaaagtagggttaggggagcagccccagcccacctcaggtggcggccacagggctcttgggcctcacctggacaataagtgactgcatctccatcaccacaatatgtactcagatcccaggcggagggcaagggggctgtggccacagtgaagagggagtaggggactcacccctcctgccttcctgtagccgaagggggctgtccaacctagtacggggactagggaagttggggaaggatgaaaagtgagccccacgtggtgacaaagacagtttggctgggggaatcctgggggccagcacccccctccattggccacacctgctgctgccagggcagtggagtagggcgtgccaggatgagatggggcttgggccccttttaaggccaggggaaccctcccaggccccactatgggaagccagagggaacagtga

SEQ ID NO: 344045 - DNA, 1000 bp, Homo Sapiens; identical to SEQ ID NO: 160795

SEQ ID NO: 344046 - DNA, 1000 bp, Homo Sapiens; identical to SEQ ID NO: 160796

SEQ ID NO: 344047 - DNA, 1000 bp, Homo Sapiens
ttttttttttttttttttacaagatgttataagtttattctgaatctcattcaattgtgttcaatgtggctcaattctttacaaattaaaattcttgaatatatgttaaaaattaaacaatcttaatgtttcttccttaactagactggatacacgtctgtttaactacgcaaaaggtaatgctggcatggcttactgggaccctaagtgtggcgaagggactctgctccagtgaactggcgagtgtggaacctcctgacaccttctgaggacctcctgcctgccatgttgctgtggagctcgcactcctcaggcatcccctgatgttgagtgatacaaactctatcaccggaatcgatgctgctgcaatgacaagacttctttctggttttcagattctaaagtttaaaacaacgacaacaacaggagcgcttgaaagttacggtgcttctccctctccagtgtggactcgctgatgtttggaaagattggacttgctacagaaggtctttccacagtgatgacaccagtagggcttttccccggtgtggattctgtggtgtttattgaagttggagctgtggttgaaggctttcccacactccttacacttatatggcttctctccggtgtggagtctctggtgggagctgaggcccgcatgctgactgaagctcttcccacattcgttacactgataaggcttctccccagtgtggatccgatagtgacgaatgaggctgcctttcccgctgaaagccttgccacaatctttgcactgatatggcgcctcttctgtgtgcattctctgatgtttaagaaggtctgagctctgcccaaaagcttttccacacttacagtcatagggccggtccaccaagtgtgttctgtagtggagggtgaggtttgagctgtggctgaaagctttcccacacttggtgcacacgtaaggtttctccccagtgtgtgttctcctgtgtttggtgagatttgagctatt

SEQ ID NO: 344048 - DNA, 1000 bp, Homo Sapiens
gggttttgtaataaacagctttgtgcaaaacacatttatttttttaaattccctttataaaaatagaatatgtaacaaatacaaaacataagagtagagaatctggctgtcaccacacagaccatagcttctgcagcagaggatggggtgtggattgcagggtgggggtctcctccagggccctggggaggtggggctgaaagaaggagtgtttatgtccttgtgatatggaagagagtgggccatctggaaattcatgagacaagattaaaccgagtccctgcaagttggcatgcgctacggggtctgtgccttctgcatgtgcaatttatatttgcgagttgtgcattataaacacacaaacaccggcgggcaggagaaaatcatcccttctctcttcagatgctcccgcaggtctttcccttgggctagtccatgcccaaggccctcatggcctttttggcattcaaaaagttcttctttttcctgggaggaacgtgcagtgagatctctggctcctttggatttctgaatataaagagcttctctcctgtgtttaatagatcaatggtttctgcccctacaatgggtacaggggccagttcgccaatgggctccagtgacaggtgtggccaacttccttttccagagaatatcatcctctctctgagagggagacatgtcttctttaatatgctctgctttctcttgcgggcccacagcatcttttctaatcctctgcttatcagatctcctcgcagtttgccatctaaggcttgccaccagctctggtgtttcctccgcctgcccacgtcggcctgctccgctccgccatcgctctcagctgcgtggtccacatgtctctcggtggccgaatccagcagggccagcagctgaggctgtgaggctgtgggcagtaccacactcaggagccggcgaagcgtggccccgggcaccatggccatcctcgccaggtacgatgccagtctcagctcctggc

SEQ ID NO: 344049 - DNA, 1000 bp, Homo Sapiens
ttttttttttttttttttttttttttcatacagaaagcaattaaaaactctttaattatttataatacacacatttttctgggtagcagcagttgctcctgtacttgcccttttaaaaaatgtgaaacagaagcaagaaagtagggggaaaaatttagagaagattaagagtagcagcgttaaataaaacagcaaattcttaaatacattatgagtaaagaaagattaaaataaggaaacagtacttactgtgcaactttaaattataccaagtaaagtacaccacctattcactgataacattttccctacgttgaaaacacaaaacctacttatcgatatttttgatattaaaaaaaaggacattcactattgtagccctgacaactcttccagtatttttaaccattcagatgtattatgtgggaatatttattaacataattttgtttaacacatttctttctacacaaactgaatttaaaagtgtctataacattttcaattacagtaataacacatgaataaattataaattaacaaaatcttcatatctactttaaaaaatcatttatcaaatgctaacctccagattatctggaaaattaaagttgcaaattgctataaacctggcatcccaattaaattacagtttttaaaggtatataaaatctccctcaaattccaagttcctctccagaaaattttattttacccttttcttaagtttacagcctgctaaacattttacccaaatgtgagagaactgcctggagatgcaaagcacaataaaataattaagtgaaaagaacaaacaaaagatacccgttaaaacagttattttagctggcagcacttgaaattggtaatctgtattttttttaaattgcatagctgcaagatgattcactgctgattaactgttgagcagttttatttaagaggataagaatatttaataaattgcaattcagtagaatattctatatttaattaaaat

SEQ ID NO: 344050 - DNA, 1000 bp, Homo Sapiens
ttttattggacttcactttattgcatttcatagatatcacattttttacaaattgaaactttgtggcaaccctgtctccagcaagtctatctgttccacttttccaacagcacatgctcatttcgtgtctgcatcacattttggtaattctcgcaacatctcagactttttcattattatatctgttagggtgacctgcaatcagtgattttttttttttcttttttcttatttcaatagttcttggggaacaggtggtgtttggttacatggataagttccttagtagtgatttttgagattttggtgcacccatcacccgaggagtgtacattgtacccaatgtgtagtttttaaaatttattttttttttcgagacggagtcttgctctgttgcccaggctggagtgcagtggtgcgatattggctcactgcaacatccgcctcccgagttcaagcaattctcctgcctcagcctcccaagtaaagtagctgggattacagggatgcgccaccaggcccggctaattattttagtagagatggggggggtctcaccttgttggccaggctggtttcgaactcccgacctcataatctacctgccttggcctcccaaagtgctgggattataggcatgagccaccgtgctcggacccagtgtgtagttttttatccctcacccgcctcccgtcctttccccagagtccccaaagtccattgtatcattctcatgcctttgcgtcctcatagcttagctccctcttataattgagaacatacgatgtttggttttccattcctgagttacttcacttagaataatggtctccaaatccatccaggttgctgtgaatgccattatttcgttcctggctgagtagtattccatggtacgtatagatacaccacaatttctttatccacttgttgactgatgggcagttgggctggttccacatttttgcaattgtgaattgtgctgctataaacatgcgtg

SEQ ID NO: 344051 - DNA, 1000 bp, Homo Sapiens
ttttctaagtaagaaatttatttgatcaaatggcaatatatgaagatattttaaactataaggctctatccagacaaaaagcatctttttataaagtaagtgttatcaatttaaatggcacctaaaatcaaagaatgagtttcctataaatgtctgtataaagctttcataaaatcctcatgtattttaaaactaggttgcaagtataacagaaaaacctataaatagtacttaaaagcaggtttcttaaaatttatgacacctacagtgtgtcactatagacagagtattcggggggctctgtgacaatcaaacatggctgccatgagtaagggagcgtgtcccctgatgagcagaaccgaagcagtgattatgcctcagcctcgagctccccgcacagcatcctaccattccaaattcttgggactttgagttgagttgagaattactacaagaggaggttaggaaaccaggattggaaagagggaagggagaggaaaccaaggcatgccaggatcaaagatatctataaagcagctttataaatgaccaagaaaatgggtttctaaaaaacgcaaaatggtgaggccttggggctgcaacgtggcatctgtgaagaggacgacgccacgcccgctgggaagggctgacctgcatgccaggtgcttggcttggagccaccacacgcaacagcatgaaactttctctggagtgccaagtcattacctggaaacactggggacaggtcagtgtgtagcttataccagctttccccaaagatttttccagcaaccaagtgactcagcaaccaagtgactctgtctttggggccgtgatgggagctgacatggaggaatctgcagctccaggttctaagatcaggagagcttcagacaagtgggaaaaccagatataaagagggtgacatacacacactgttagcagcaaaacgcaaaggtgtccaatgattaaaatgaaattgagtgatagggagaaatgg

SEQ ID NO: 344052 - DNA, 1000 bp, Homo Sapiens
ttttttttttttttttttctcatggccagaattgaaaattttctcatccagaaatttagggcacccaattattgaatacccttatcatattgctttaaatgacagaaagattaaagctggcatcctctatagtatactaagcatgaatgtaaagtatgagaataaataggagactctcctaaatgtcaaattacaaaaccgctcaaaactttgtaattgtgactcatgcaaataccttgttaggtcaacttaatattacaaatactgcatcagctcggtgcctttatatcccttttcataaaaaagaaattctcactccactcctgaagccagcaaacagctctggaggaattacctgtacacccaagtgccacggtcactctggaattttaatacacacacacacacacccttactcatgaacatacacattttacaaacacacaatggtgtacacacacacacacacacatccacacacaccccatctttaggatttgtagctgattccaagcctgcacttatttctattctatatttttctttgtatcatcctgaaacacactggttgctcagcaaaaatagtatctcttacctccttattttattcccattctttctccttccctccctttttctctctctaccttcctgacttttctttcgtgtttcctttctgattgatccaaaaggaatccatcattcttcttcctatctctaaggcccactttataatacaaaatagttataaacacctttttatttcttatcatctacctctccaaggcagagttcgccttttttttcaattattgccgctctaaaaatgcccccaccatcttgaaccaagttgttcaacgcgtacagattctatacgtgtatatactcccccatcccatcataaaaatagttgttgcccactaaatatagttttcctatgaagaaacataactgtgaaaatgtgttctcataaactgcagatcagtgaatattataagca

SEQ ID NO: 344053 - DNA, 1000 bp, Homo Sapiens
tttttttttttttttagaaataacagccatttattttaagtatcagtttttattaaaaagtgcattttgattaatttatgatctaggtaagctgtaagataccagtatactctctggaataataactttacaaagatttaaaacaaacaaaattttaaaagcctttttatttccttcaccattattgttttacaatacaaatatcaccttgtgaatacacaaaaaaatcctacggaagataattctgctgcacgtaaaatacagaatggatatatatacttcttcattcttaaaaaactattttgttctccacattggcaagtatagaatagaatacttccccaaacatatgtatgttaggagtaaaacttagagttacatgcagtttctgcacaaatatcttttaaagaaatagatctcttttttgttgttcaccaacaaaattgtcatgagagtatggataactaattcatagctttcaagttttaggtaagtgatcattttcaaaactctctttaagaaaagatattcatggctgttttcattgagtagttaaaattgaactaccaaatcgacgataaaataatttaagtggtacatgtcattgctacctgatcacaatatgtgaacaggctctgactctaattaacaacctcattatttaagtcattgcaattttaaaaccataagcagtcttctgattcaatttagctataaatgcaaaatttagtagtgtatacatatatttatattttcaaggaatactttattttaaataaaaacatttaagattgcctactgaccatacaatcaagacaagaaaggcactagaaacatagacaaatttctctcccaagatgcatttttaaattttaactctcttctctctgacatgttaaaaatctttaaatttggtgttcataacatcattttgaaaaataaagttaggaaatacttagaaaatcactttataacagaatctttttttttgcactttttg

SEQ ID NO: 344054 - DNA, 1000 bp, Homo Sapiens
ttttttttttttttttttggaacagatcaacaaatctttattaatagaaacagacagatggacagagaatgcagcaggggctgtgtgaaaactgtgatatgtgtgtgtgtgtgtgtgtgtgtatgtgttgtgtgtgtgtaaaaggccttctccaggccaggaagggccccttggaattaggcccacctgtctagatcctctcctcagtggtgggtcctgggctgaaaccagcttccacatcatacccccaaaggaagaatgggggtctttctggaatggaagacgctgacttcaagcattcttcaaattactctcgttccccagctgagctttgttgctgagggggttggggacaagccacaggggcacttgcatagcaggggagtagaatggggataaggcatatggtgaggacaggggagaaggggaagggcatcatagctgcaggtgaagggggcctccaaaaggcagctcctcttccccctcatcccctcaaattgctgctgggttgaggagtcagactgaggcagtataataccctcccccatccttaactctagaaccccggtttggtggggaggaggtgggaagctgtggagctatggaaaggcctcagttagtgagtcaagctgtgatgtgtgtgtctgaacacaactggctcccttggtataccgggggctccctctccagatgggtgtgagtgcatggtcctactgtacacacaggtctcagtatctatatgtgtctcatttgttcccatgggtctctgtgtttggatacataagcatggatatccctgctcatacagcaggaactcaggatctgcatggtgtatgtccctgtctgtaaacatgggctccagcaagtggatatgtgcgggcctgcccgctcctgtccatccgcaggtcttccttcaggcctggctggtcaagggtcctggccaaagaggtaggtggtgagctcaagccggaggccccgagcataggagcgaagagtatag

SEQ ID NO: 344055 - DNA, 1000 bp, Homo Sapiens
gccatggcaacacaggtttatttacaccataccctggatgcaaggtggggcagggttgcggggagggagagggagtacagtgatgtcaagagcacagggctcctggccttcagaccagtcctcagctacattgctgcaggcaaggccggcaccagcccccaggctgagtcatgggtaaaggccaagagctgaaacaagagtttctcatgcaccaggcacatttataaagcaacccatccacctggagcccaaaactgggttgacagattccagagaggcaaggtccttgatgaccccataactcccactgcccctttaacaagggactcttaacaccttatgataacccaaatcctaaacactgttgcctctgccgcctcttccagacacagaaggcatgatcctgctgaacactggcctcgagggaactgtggctgaaaaccccgtgcccattgttcatactccaagtggcaacatcctgacgctggagtcctgcctgcagcagctggccacacatcccggacactggggcatccatttgcaaatagcggagcccgcagccctccggccatccctggccttgctggcacgcctctccagccttggcctcttgcattggcctgtgtgggttggggccaaaatctcccacgggagtttttcggtccccggccatgtggctggcagagagctgcttacagctgtggctgaggtcttcccccacgtgactgtggcaccaggctggcctgaggaggtgctgggcagtggctacagggaacagctgctcacagatatgctagagttgtgccaggggctctggcaacctgtgtccttccagatgcaggccatgctgctgggccacagcacagctggagccataggcaggctgctggcatcctccccccgggccaccgtcacagtggagcacaacccagctgggggcgactatgcctctgtgaggacagcattgctggcagctagggctgtggacaggacccgagtc

SEQ ID NO: 344056 - DNA, 1000 bp, Homo Sapiens
ttttttgtgggttatctcagtctccgccaaagggtttattagtaaagggtcaggagaggaatcagttaaaatcaagtggggcatgggggatggaggtatggggaggtagttccagaatcagacaggttcagcgggcagtcatgaagggtggagatgaatgtggtctatgggcatcagagcatgtgtgaggatcagaggctgagggaccaatggcagtcacttaccagagccccagtgccagggccccagccaccagtcccaggaaagaaaggattcccaaagacgccagcacagctacctgctccacagagtccctgtgatcaagtagccgagggtgtggttggagggagggccttggaggagcagggctgtccacctgaggctccacctctggctgcgtgtgtagctggccccatgctggtatctcctttggtatggtcccagtgctcggagttccccaggcctccgggctccaggtgctccaggtgccagcatctagaaagtcccgggcactgactcgtacagcatggggcagcccagccacagcatctgtgatcacctcctccagtccagctggctccaccgtggaccaggctggatgctgcgccggacggtactgcaaacggaacttgagcaggaagtggggctggcacggccaggaggcagggtatgtccagctggctcgcaggcgtcgggggtaacctggtactgactctacccgcaggccctggggtgggtcagggcgcaagatgctctgcaagctcacatccagcaggcgtgtgctggcacccagtgggttcacctcagtcacattaatccggtactggctccagaactcagccccgtggacaacacagcgggcagcccctaggggatcctgtgggcatggccagggccctgtggatggactcctcctctggctatcagctcctaggactgtcttcttcctgtaggaggtgaggtagcgggtgggtaaaccgctgatctggctgggactcca

SEQ ID NO: 344057 - DNA, 1000 bp, Homo Sapiens; identical to SEQ ID NO: 160798

SEQ ID NO: 344058 - DNA, 1000 bp, Homo Sapiens; identical to SEQ ID NO: 246587

SEQ ID NO: 344059 - DNA, 1000 bp, Homo Sapiens
ttttttttttttttttgctcaataaatgtttattatcatcatcccaagaaactgtatagaactagatttgttggcaactggcaattaactgacaggaaaaacaaagcattccgatttgggaataaatgtgattcttttaacccaaatatccagttagatctttcaagtgctaaatccagatacaggctctcagttcaaggtcattgccacaaagccttaggtaactatcttgagtagatttattgaacaattagcttgtaaattccagccactccagaaactgaaacacatttcctctctttgttaaatgtgagcatgtaatccaatatgtttcaagcccttggtcataattttaaaatttccatattttaatgtgcacattgcagggtgtataaataatgcctctctttaatgacaataatgtcctcttggctagcatgacatgtgctcacttcctccatgtaaaattcctccacaaaaagttaaataggttgggctggaatgagagattttgttttaaaaattctccagttctctggtcagaaagtctgttgtcccctctgcaaatgaaggagtggtgaggaccttgaaattgttcccattgttttctctctgggcttggacatgggctgtacactaatgtccagttaattttagagtgggtgtagctaagaactaagtaagtgttcaaaagcaaccagtaagcctcatgtctcctttacatattgatcttgtagaaggggaagaagggggaagggaagggaattagttgaatgaaagtggaattgtgctccaggtgtgttgcatgcctttttgaatcctcaaaataaccctggggtggatcctctttaattaggtggaaagacacagagaggctaagtaaattattcatgctcacacagctaaaaagaagtgagtgtgataacaacccagttgcaactgaatccaaacccaggtgtgtctgaatctttgaacattacataaccctgatcaccacagg

SEQ ID NO: 344060 - DNA, 1000 bp, Homo Sapiens
tttttttttttttttttttttttgcttattaaaataagttttattaggcatatgctgatatctgataataaactaatttttaaatgtttaataatttttaaatgtttaaaaatgccagataaaactaatttctaacagaaggtgggaaggccatagaaactggaactatgtgtttttttaattgttgtaatcttgtttccttaaagtatataaatggaatttaaatggaattacagcattcaaacatgaaaattaatttaatttctggaaattaaatgcagatgtcactatattagaaaaccattcaaaatcctaggactgaatacatacaaatgagtagcaaaaaacactgatattttaaaatcactgatatgtgaaagcctcaataatcccatggctaaggaaccaataaaactatatgccagattctattacttttgaatattcacagagtatgaaatgagttagaccatcccctgaactcagtggcattatgaaaaggatgcaaatttataactgaaagctcaaatcttttggggattgctttatattaaaacaaagcttgtttgcataatatgcttcagtgtcaagctgagcaatctatgctaaaagtggtagctccaactttaagggtggtagaatagttcacatttgtctgttggattcaggatctatttgacaagttaaatcacattttcaaagagctgcatggagcgcattatgttttcatctttttggcagctttcaatgaactcatctatggtaacaaccccatctttatttttgtccattttctgaaaaaatgtttcaacgtgttgtctgggagcatcttctttgaggacaggatatgtacatttacccatcatatcgtatattgctttcattatatcaagcatttcctctttagtgatgtagccatctttatttatgtcatacagattaaatgcccaattgagtttttcttgtactgtcccccggagcaaaatggaaagacctttga

SEQ ID NO: 344061 - DNA, 1000 bp, Homo Sapiens
tttttttttttttttttttatataaggtttcatatttaatttggtcatggattcataaatacataagtattttgtacacaatgtgcttccttgtttgtattataacacatttcaaatagggacctttgacagggcagaagcatgaaaggacaccaaccacgagtgacacactatactatggctgtcctgtgtcacatgctatttggcctggggatatagcaaagcctaatgtaactaaacaacaaaacccccaattatttcatgtcgtcaggaagcttactttaaaagaatagcttggcctggctggtggctcacgcctgtaatcccagcactttcggaggccaaggtggatcacctgaggtcaggagttcgagaccagcctgaccaacatggtgaaaccccgtctctactaaaaatacaaaaattagccaggcgtggtggcgggtgcctgcaatcccagctactccggaggctgaggcacgagaatcgcttgaacccaggaggcggaggttgcactgagccaagatcgtaccgttgcactccagcctgggcgagagagtgagattctgtctcaaaaaaattaaaaataaaagacaaatcttaaacactgataaggctgacactctagatgcatcttctaggaaggcctctgtggaagggacaagggacctgggaccggactggcaccttctgagccctgaggctgagcgtcctgcacagaaggcccagcaaaggcaaagaccaggaggcagcagcaccctgtgccttccagaagtgcaggggacaacgcgtgggatgccagatggaagtgggagaggatggaagtgcaaagaccagaaaggtcaccccccactcctaaaactccacagacacaacagtctgaatgtgtgatcttcaggcaattctaactttgtcccacccaaaccagtcccggaacaaaacacacaatgccttgagacagaaaagaccaaaaactcctggaatgactacctgcataaat

SEQ ID NO: 344062 - DNA, 1000 bp, Homo Sapiens; identical to SEQ ID NO: 160799

SEQ ID NO: 344063 - DNA, 1000 bp, Homo Sapiens
ttttttttttttttttttttttttttgcctgcaccacagcaatttattagcgtaactttttctttttttctttaaagatttcataacaactgaagtatgtacaaagtcttacagcatttacaccataaaaagtttcctattagctcatgaagtctaaggtagtgctgctgagaacttcagatgtggcaaaggcaatgaggcaaaccacttgtaggtttccctctctgctgccacatcatggtgtcagctgagtgacagctaactgtaccacctggaagacaggttattgggaaaaaaggggacaagttgataggcagcactagagaccatggggtggaaaagctacatagcattgtatttctacagtttcctagagctgtaacaaagatccacagcctgagagaataacatatgcaagacaacagaatcacgctgctcagatatggttcagctaccaagtgtgttcacttttgaatggaaggctctactgatatggctggtatttgacttctgttcatgtcttcagatagctcaaatctgcacaagcctcactcccttcccccaaatcaaataacaacaaagggagagagaaagaaatagcatgaaattagtagttctcgaccaaaaaaaaaaaaaaaaaaaaacaaaaaaccacaacttttttttttttaaaggcattcagtatttgttttagggtggtcattctgtcgaaagataatattaggaatttctgaattatcccaatcagaacaacatcaacaaaacccccaaacacccaacctcctagatttaaccatctttctttgtatctgatcgtctttccttggggtcagtattacatagaaccaccaacgtttacacactgaatcggacacaaaacgtagcattgttaccccaatgactgcttcactaagtggcaagagaatttcaacatgtaaacgattaacgtcaggctcaccactttattccacagaaaacccagcctggttctatgtttggt

SEQ ID NO: 344064 - DNA, 1000 bp, Homo Sapiens
ttttttttttttttttttttttttttttttttttttttttttttgggttgaagcacttttaatcacaaacaaacaatagtataagaccgtgaacagctcacccagtggctgttgccctcctccagccctcagctcaccctcttcccatgctccctccctgggtaccattgagtaaagagcagggtattggcagctgtccctgttgctatcaggtgattgataggaaggggatctagctagggaccacggcaatcctggccatccatccatggttctgtttctatacaacttcatcatgtgacatattccagctgtgaaagaggaacagtacagaaatgtgggactgaacttggctgctccattcagatggtccaggggtttagagtgtcaagagccaagggcaaaaaagaaggagaagtctggagttggcataattcaagatgcagccaaatgtggaactaaggtgggttcagtggggaccagggaaggcctcatggccccagtccacaattgtgccccaaccccggcaatgaaactcacgcatatgcacaaacgcacatcaacaaacacacaaaaacacacagagcaaataacattactgaaagaacctggaggctattaaatacaaaatggcagttttctttcaaagtgaaaatatttgcttctttgatactcctcagtgccttgcagtctcccaatcacagaagagtagatatgggaagggccaagaggagtatgttgccagtggccctacaagtccatgtgtgctgaagtccctatagcaaccaccttactcttcagcccagtagctgcctcccatgtgaccattcacccgattggcaccattgctggagctactgtcacagggactttttgtgcaggtggtcacatcttcttcctctgagctgctctccacatcactgcgatcatccttcgatacctttcccctgatcaaggctttcaaagcaatccgtgcaattaggtaggaccagatgacatg

SEQ ID NO: 344065 - DNA, 1000 bp, Homo Sapiens
ttttttttttttttgagatggagtctcactccgtcgcccaggctggagtgcagtggcatgatctcggctcactgcaacttccacctcccagattgcagcaatcctcccaactcagcctcccaagtagctgggattacaggcatgtgccaccacgcccagctaatttttgtattattattagtttcacatgttagccaggctggtcttgaactcctgacctcaggtgattgcctgccttggcctcccaaagtgctgggattacaggtgtgagccaccatgcccagccggtcacacagctttgaaagggagtttgctgagctgggtttcctggctatgaacaggaacacacttttccattccagtgactagctggagggaagcccttacttccataattggctctgggacaggaagcctacagaagcctgagcctatgtgctgctatatgctttgcacgcaccgtgctcaggagcagagttcaaccttcattcctggtcagccgtacccctgccttggacagtatctgctgaacgtggaggctcagcttgtgggagaagagcaccagccctgctgtctctgagagcacctcttcccctgctgctgctctccatccagggaagtctcaccaaagagagctctagagccctgtggtcagtcctggctgaactgtgtcaccgggcctctgtcttgggaagacttacaggcaggaatgctggccattctactgccttcccagattaactactgcctcctcaatcttgggaatgaggacctcaaaattgagaagagagaagagaaagtaattcatgacgccttctagatgccagcctgggcaggggtgggagtgggagccagtgccacctcctgcctgcagctccagatccccagagtctccagctagggccttgttgcttctattgggcatagaaaggaacagcttcctagagaggccgcaggtgcagggaggcaggcagggcagaaggaagggaatagaaggaga

SEQ ID NO: 344066 - DNA, 1000 bp, Homo Sapiens
tttttttttttttttttttttttttttttttttttttttgcttcacatatttgttttttatttacagcttaaatttacattgatgccataaaaggtactaagtagaaaacctgtcatgtgagagctacattataaagaattctaagctaattgtccccacatgatggatgcctttgtataatctcctttccttgagtgggagtgaaaactgaatgtgatgggccatcactcctatgaatgttacattatatggcaaaacaaaggttatcctgggtgggcctgacctaatcaagtgagccctttaaaagtatatattcttccagctggctgcagaagaagtcagatattcaaagcatgagaagaactcagcgcatcactgctggcttgaagatggaggggcaacatgagaaggcatgtgggtggcctctagaagcttagagtgattgctggctgacagccagcaagaaaatggagacctcagtcatccagtcacaaggaactggattttcccaataatctgaatgaagttggaagtagatttcttcccagagactccagatgagaactcagcctggccaaaatcttgatttctagccttgtgattccctgagcggagaacctagacatagctgtaaatgagtattattttatgctgctaaatttgtggtaatttgttacagagcagtagaaaatgaatacaatagcaaagcacaaattttgaaaaagcctcccaaaacagttcaccagtattcattctcaatttgttgttttcaacctttatatgaatggtgggatttacatttttgtagtcacagatctgcgaatcattgttaaaaatcataaatccaactcaaatcagttttagtcctgcagtttcagggactgaaaccaactttgccttctaaaacttacagtgccttttggggcatcagccttaatccatttttcacgtttgcttgcttgattcatgagtccagtcactgttacaacatcatcttta

SEQ ID NO: 344067 - DNA, 1000 bp, Homo Sapiens
caacagcaacacaggtttattactagcaaaaccctgcggagggggaaaccagcttagtgtcagtgcccactgccgctcacaggctggggtaatcatagcgctgggagggagggctctggacagtatagcttgctgctcagtagaagatgataaggatgttcctgaagtcaggctgttgggcctttgcccagcaggatgtgataaggatgtttctgcagtcaggtggttaggacatttctcacagcccgagttcccatggaatgttttactccaaccaggatctgcaaaacagcaaggggtttaccaaatagtgcagcttagactaacagtaacctctcccaggtagacagttctataaagtaaacttcccttgagcacctacactgtaccagacatggtgctaggacccaggccacaggaggaacaggacagatgaggcccctgccatcctggtgctcttgtctgatgaaggaagctaacaggtcgtaagaccaggtcagatggtggtggtaatgaaagacattaccagagtgagatgagctagaaagaaactgagggagctgttccaaacacagtgacagggagagacccctccaagaggtgacctttgagcagcaacctgagagatgttgggtggggggaggcatggaaaaggagctgcccctgaagccatcccaggagtaaagacccagcacgaggtgggcaacagaatggcctgacctgtgcgtccttcatgcttccttcctcagtggtgcccaaacagaaacatggggcaattccacgcagggtccatggagggagcagaaagcagccgcaatgaagagccacggtggggatgaaatctggcccaacagtgaagctagaagcaggtgctgcttaccactcaccaaaacacaggtcatgaagcatacccagcccctgaaggcacgtccagggccagaccagctggctgggctgccagcatcctagtagagatcccagaagatcagataagcttgct

SEQ ID NO: 344068 - DNA, 1000 bp, Homo Sapiens
tttgggagcagggagaactttattgaggttatgaatatattctacttgaaactggaaggataagtggttatgaatttgtggcttatggtaacctttgttaagcatctttctttttctttttttttttggtgagacacagattcactcttgtcccccaggctggagtgcaatggcgtgatctcggctcactgcatcctctgcctcccaggttcaagcgattctcgtacctcagcctcccgagtagctgggattacaggcatgtgccagcatgcttggctaattttgtatttttagtagagatggggtttcaccgtgttgccaaggctgatctcaaaactcctgacctcaggtgatctgcccgcctcagcctcccaaagtgctgggattacaggcttgagccactgcgcccggcctttttttttttttttttttttttaattattgagacggagccttgcgctgtcaccgaggctggagtgcactggcactgtcttggctcactgcaacctccgcctcccgggttcaagcgattctcctgcctcagcctcccaagtagctgggattacaggcatgtgccaccatgcccagctaatttttgtatttttagtagaggtgaggtttcagcatgttggccaggctggtcttgaactcctgaccttgtcatcctcccaccttggcctcccaaagtgctgggattacaggcgtgagccacgacggccggctgttatgctcatcatggcacttaagagatgcttaacaaacctttcctacaatgttcctcagattttcagagcttatttgatctagcatctggttcctaaattctgagtcacatcagaagccaaacttgaatgcttttggaaagagctagcctcataccacttcagttgggaaggggagtactgaggtgtaccttggcaggacagtggaatgattgctggttcttctagtttgctctataccaagaactgctataacatgtttctaaaccagggctatg

SEQ ID NO: 344069 - DNA, 1000 bp, Homo Sapiens; identical to SEQ ID NO: 342437

SEQ ID NO: 344070 - DNA, 1000 bp, Homo Sapiens
attacataacattctttattttacaagtatttattgaaggcttattattggtcatatatcgtgtaatacatagggaatcaaatggttagtaagatggagttgatccttgccctaatgaagtttaaagaccagagaggaatacaaacaggcaattatgacacagaatactaagccttattatattcagggatcttctgacacatgtatctgcaattttgtactcactgaatcttctcttccataataaaagcatgttgatgcaaaattactcagataaaagaactcattagtaatttttaaaattccatattaaatatatatacatatatattttaaattttttaagttccagggtacatgtgtaggatgtgcaggtttcttacatagataaacatgtgccatggtggtttcctgcacctatcaactcatcacctaggtattaacccatttatgccagaggttgcaatttgttgaatgtgaaaaatcagaccttggcaatgaccttgagcaggatataaagaacttccacatgcttagcattccagaaatggaacactaggcataaatgggttaagcccagaatgcattagctattttttctaatgctctccctcagcttgaccccccaccccctgactggccccagtgtgtgttattcccctccctgtgcccatgtgttctattgttcagctcccacttataagtgagaacatgtggtggttggttttctgttcctgcattagtttgctgaggataacagcttccaactccatccatgtccctgaaaaggacaggatctcattcctttttattgctgcatagtattccatggtgtttatgttccacattctctttttccagtctatcactgatgagcatttgggttgattccatgtctttgctattgtgaatagtgctgtaataaacatacatgtgcatgtatctttgtaatagaatgatttctattcctttgggtctatatgcagtaatgatatttctg

SEQ ID NO: 344071 - DNA, 1000 bp, Homo Sapiens
tttttttttttttttcatgctctcagaactttattaggtggggattgggcaagagaaaacccctgaaacagttgcccacgtggttcaagacaactagaatggagatgtgttgcttggagataccttagatttttaaaggggagctgactggctgaataactcagattatttttttttttttcatggtcagccagtctctagtaagtctctagggacatgaccagaccagaagcccctgttctatatgaagacaaacaggtggccatacttgggtggagggataccgctgctattcccagatgaagatttggtggaaggagaccatgacagatgacaaacggaacagtttctcaaaaacagaggtatgaagtaattacacaggaaagaaaacaatttccaaaggagtgagacaagtcgtgattcttcattggtacctgacccctatacccaaacagccttgaaccagcccttccagagactgcccctagtggcccactgggcagtgcaggctgtgaagaagacctgaaggcagatggggtgggggtgcttattttgctacagtggagaaggggcttgaatggggagggcagacctggctaacatctgccgccatcccccaactcccccccagacttctatcacatttacaaatacatacataaatacattacatacagtagccagtctgggaggcagactccccacagaggcatggctgacacatgtcgggaattctaggaaagggcactgggctcccaaatacgtgctcgtgtgttctctcctgcccaggataagccttgccccagcccacccctctcttctgggtttagtttgtccagtatggagagttgccgtaggcaggtttggaggcttgagacttgggctgcagggagctgggctggctgcgctgacccgagccactctgtgcatcctgcggaaggtggtggtgcagcagctgtgagtggggctgctggtgggctggcaagatgtgtaggaatgg

SEQ ID NO: 344072 - DNA, 1000 bp, Homo Sapiens
ttttttttttttttttttttaagttagtttaaaattttattttttttatttattttttaatatttttatgtaataaaaagtaaaagtccttgtccagccatcctcgtggggcatctgtctgtctctcacacaggtcactcaagttaatgggaaagaaagaacagggggcccaagtctgaagttataaataatagaaaataaaagatcttccgtctccagcgggggaatagatgagaggatgggagggcaagactgggtggggacgggcaggggcagagcaggaaccccccacccctgctggaccctggccctgccctctgtgaggcccctcccattcaaggtgcttggcaggaattccccagctcccctggggaacggggggatggggggctgggagtggtccgagctgctgggggaagagacatagatcactcttccctccactcatggaggtctcaggtcgcggccaggacaatcttcagttccccggggggtggaaggggagcttgggggtgtccgatgtaggggtagggtgagggtgtggaagctgagagtgcaggcaccccactctggggcaccgcgccttgggggggccccccatgactctggggtgggtgcagcagcatcacctggggcgggtggggagccccagggtgagggggcggggctgctgtgattccagtttggacatgggcctgggtaacatgggccatgttggtgaagccgtggggcagctgctggtggtggatggcatacacagcggctggctgggggaagctgctctgaggggactgggcagaaggtcccggtggcagagagggcggcgtgcctgtcagggcccctgggtggtacagattctgctgtggctgtccactgcccaagtgtggggcctgccccgcctgatgctggacaggactgggggccgcatgctgggactgcggctggcttccagtaggcgtggtagccggctgcggctggtgggcatggagctgtgtggcat

SEQ ID NO: 344073 - DNA, 1000 bp, Homo Sapiens; identical to SEQ ID NO: 160804

SEQ ID NO: 344074 - DNA, 861 bp, Homo Sapiens
ttgaaacttcatactatttttattagattagttctaagttcaatttaagacaaatttagaggagttgaaattttacaacagtttgtttcttgtcttgtttttttgaacctttgatgttttttaaaagatattgtttgttctctaaatgtttccaaatgttagcagccaaaataaaggttttccttcgatggcaaacccacacacacatattctcacacaggcatacacacggggacagcttgaaggtgacacacagtgacacgggagcatggctctgcacagaaagggatcccataaccagactcagcagagaacaccctgacaggaagcggagggtgtgctgactgtgaagagctgaggcagaggctggtgcaggggtacggtgtttctgtctggagcccaggaagcaggaaggagcaggtccacatcagggcacacaggggtgcatccgcagggaacccctgcacaatctgcatgttaaccccaacttgggtccatgtgagctgtctgattgcaaatccaggtctctcagcttgtacctttggggagacctttcagtcctctccccatctccctctccgttgactaaacccaaaggagagagggggcctcagaggaggatccctgggaccttggtgggcaggacccagcttcccttggaccctctggtttgctgtggggccagctgggcctggtgtggccgagctccaccgtgtcatcagccatttccaggtccctcatggcctgggcggagactatcacctctctctgcacagttagcagaacaaagtcagggatgctgtttctacaacctggctggctcccctcccccagcacaactgatcttctatcctggttgcc

SEQ ID NO: 344075 - DNA, 1000 bp, Homo Sapiens; identical to SEQ ID NO: 160805

SEQ ID NO: 344076 - DNA, 1000 bp, Homo Sapiens
ttttttagtgggtacagctgtcagctgcctttaatagggcaagcatgcgcgggatgccatttgtgggaacaggtataggggaagaggattttcctaggaagggaagcaagagtgaggaaagtcagatgacagagaagcccctgagagtaagtttagagggaggacaaccgtgtaaaccacaaaataaaggaagtagaatatatttcattttattataaagcagtgctcccaaacttttcacagcgtacacctcgagggtggagaactaacatccaagcacacctggatggtggatgggacccacttctgggtaacctgatgaggaagctctagtgaagaaattcaggacgcggtcttcagagcagagggcttggttcaagtccctgttctgccacttactaactgcatgaccttgagcaagccacttaatttctctgctccttctctgtgaaatgggtacaatgtggtcagcagtaaaggaactaatacatgtacagcactcagcacaaagcctggcacacagcaggctctcaccaggtgccattctcagcacaactgcttggttgagctactgtggcagtggcaggttgtgccccaagggggtgggctcaggagcccgtgcagcaagaggcagtgaccaaggaggcaggggacaatagccctatcttttcaggatctctgccttggacctggagaatggagagactttgctcctatcacgtcccaagttgggaaaactaaggacgaagccggtgactgacatctgaaatggaatcctctgcatctccaagtggccctatacctgacaatatcattactagtgaaaaccaagtgacaaacacactccccgaccccaagttcttccacatgtcccattgaggagagcacagccaataacgcagagtgtatttatgcgcagggctggctaaacaggctggctacgagtccggaacagtgtcaggatctggcttcccattggccgacatgacagaatccttct

SEQ ID NO: 344077 - DNA, 1000 bp, Homo Sapiens
ttttttttctttacgaacattctcatctgtttttataatatattcagaaactggctttccatctttgcctaatactgataatttcctttcattcctatgtttactttttcgttcggttttatcatctgaagaaagctttgtttgttgactttgcttttgaatattttcctctacttttaaacctttctcagaagagtgaagctcagtctcatcacctgttttatgcatacaatcacctttatatttatgtttcacagacaatttgtcttccgatggagttttctctctttcaggcttctccttggaggatttcacctctttcttaagtaggcttttcaaatgtggtgtttcagaatcatctttctttagatgcttttcgtttttaagtgtgcttttctgtttctggggctcttcggtgcaaatttctgagcgttctacttgcctttttacatctcttgtgtcagtctcttcctgtaccccctccatgataacaggggtagatgtccgtcttttatgttctctttctaatttggattcatttttgttttcgtcaactacatgcaaagactctgaaagtctccgggcaggtttacttggttcactttttgcatgaacatgcttcagctcctttgaagaagaaattttttccttttcacaatgctcacttgttttaagggtttctttggaatcttcttcatattgctgtttctttttggagttctcttcaacattccttgaatctttttttctctttttgcttaaggctacttttttttctaaaactttccgttctttaaggacttctttaattctggcggctttaggttccaaactctttgttgatgattcttctaagtccacactactcctgccttgacccttggtttttgaagactttgtcttttctgctttctgttttcgtttttcttcaagtttttctctattgatttgccttcttaaaagcctctcttctttttctttggcctaaaaccacaaaata

SEQ ID NO: 344078 - DNA, 1000 bp, Homo Sapiens
tgcctgttggtactgaatcccaaagggctggcttagtaagttcctttagggctgtctcctttatccatgcttaataaatagtcacagtaaaaatttgtcaaatattcatggttgtggagtggttatgaaggtcagtgatatgtcccttcacgctgaggtttcacaagtcagttctcattccagatcttcagataaaggctcttcttcaatctctctgtcgtcttctaattctggactgtgattagctgttgtcactaaggacattgggcagtcttcatcctctgcaatcactggctcttccttgacgtggattgaatgtatgtgcggctgaggtgagcagcccggactactgtttccattgctgtcaatgtgatccagagaaccattgaggtcttcgtggacggcctgcagtaggccactggatgcattatttatcagtccaggattacttagcaaaggtaaactgctctctgccaaggcagcctgcaaactggcattaagagctgctccatagcctaaactggtaggtatattttttactaaggttggacttcctgttatcttttgtgaccttcgcttctggtattctacttcatccacagtccatactgctcctttaacattttctactcgaacaaaacacttgtgcaggctaagattatgacgtactgcattcttccaagttgctgcattacgcctgaagtaagcaaatgtccgtgtaaaccagctgtaaatttcattaagtgttaactgcctgtcagatgactccatgatagcctgccttatgagagttgcataagtaaatggaggtctgacatctgcatttttataaaattcatagtttggggcaatttctgatgacatgggaatgttgtatttgtctgaatgtcgccttcgtatggctcccacattgggcacactggctggggtgattactgagggtccctgggtaatcggggtgactggggccgttggtgtggtaggggtttgaggtaagctc

SEQ ID NO: 344079 - DNA, 1000 bp, Homo Sapiens
ttttttttttttttttttttgagacagtgtcttgctctgtccccgggctggagtgcagtggcgtgatctcggctcaccacaacctctgcctcccaagttcaagtgattctcccacctcagcctcccgagtagctgggatgacaggtgcgcatcaccaccacacccggccaatttttgtatttttagtagagacaaggtttcaccatgttgcccaggctgatcttgaacttctgacctaaagtgatctacccgcctcggcctctcaaagttctgggattacaggcgtgagccaccgtgcccagcccatcagaagattcattctgaggacagccctcagaggtggaattgcccaggtcgggttcaaatatctttccaccattctttacctacatgatgctaagcaagaagcttaactgccctaaacctcagtctccgcatttgtaaaaccaggtgaagcggtgaagctatcaaatcctctcggggctgctgagctcccaaaggtggcgtgtgtgtgtgtgtgtgtgtgtgtgtgtgtgtgtgtgtgtgtgtgtgttatcttgtactccaggtactccatttagtcaccaaaaatatattttctgacttcggctgtgtgttatatgcagatgtcctgctgggctcggggagtaaagctggtgcctggggcacaggtcacgttctcaaagacactgcttctcaagggcttgccaaacacttgctggtgccacccagggcttctgatgcagaagtggggcctgattctgattccaggatgggtccatgaattcacgcctctcataagctccggggcgatgcaggttctgccggaccaagggctaccatttgggtagcaccatttacaaatactttaaatatcactggcttggccttgcatattttcagcaagttgtcaggaacagacactggttctccagaggccaccactggaaaggtgactgaagctggtcccaccaagccaacctgcggcacgcaggacatg

SEQ ID NO: 344080 - DNA, 1000 bp, Homo Sapiens
ttttttttttttttaaaaaaaaggttggaaaaattactttatgaagccttaagcactaagaataattaattaaactgtaatccaggattagatacaatttaataatagttcaattccaaaataaaagttattgtaggtaagaccatgaaatttcctaacacttgattttaatacattgcgctaattttctaaaacaactcagaggaacccatatttacagtaggcagaatatttatgaaaaaaatctggcatcaggtatatttatatatatgtatgtgtgtgtatacgtatgtgtgtgtatatatatgtgtgtgtgtgtgtgtatcccgagattatatgaactaagaaacaagttgtgtatcttaacagcagtactagagcgcagagtttcagacttggatttataaatgctttcaacgtgtggtgtttggaaaaggagaagacatcatctgattttcaaaacctgaagtttttctcaggactgaagtcaaaatcgtaactgccacagagggaaaagggaagcttttccccttaattgttcatctgcgtcagaaagtccagtatccctgagataggaaccactgtaattagaagattggaatgaacaggtttctcccaaaggaagattgtttgttgctgaattatgcctactgccctgatcatcaggtataaactttgcatcttccaacctaatgcttggcagcaccaagacgtttcagtaatggttcatcataaacccagcattctccatcttcatgaaataaccttgtctcccactgaatttccttctccttcctttctcgggcttctgctctttgtctttcttcaagcctgtgctttgcttcagttgctgcatcaatgtctctgatttttaagttgaaagtgacatccttccaaaggctgcgggattcatactcgttctgatcttccaacttcctcactttcttcttgattataggcaacttcttggtatctacaaagactgtattttcccctgttg

SEQ ID NO: 344081 - DNA, 1000 bp, Homo Sapiens
tttttttttttttttttttccagacacggggcaggttttattgtcacagcagctgacggcttccccggtgctgggttgccagggagtcccaggcagtcctggtgctgctgagatgggcgctgcctcctcccacccacagcgcgtcatcccctcaccagccggcacctgcaggctcccctcctgaagcggactcgggctcacagggaacacccgcacccagaccgtgccgtctggcaggcactttcggcctcagtgccacggccccctccccaggccactcacactcctggggggccacagaggtgtctgcacagcagggcttcctccttccctgggaggcccatgaagggagacagatttggccgcaggacctgctgctacggggcaccgtggacgaataggtacggctgggtcagtgggcgggcccttgacactgaggctgctcccgcccccacagcagcctggcgatgctcacagcctgctgatggtttcttcacaaagcgacctctccagggaacatccgcaaataaaccccgtgtggttcagggagtgagggcccgggcccgctggggacgggggtcagcgactgcttcaatcccccagatgcagggtgctgttcggctgagggagctagagggtgcctgggactggggggttcatcctggcaaggtccctccacccccacagccagggcagagccactggggagcccccagggagaccagccctccacctggggctgctgtggtggacggaccctctggacctgggtacacagggtgggcatggggcagtgctctggacacctggggttgctgtgctcgccaccatggtgaccgcagcaggtgggaagcgggtcccaaggcaggcagtgccagtgatggagtgcggccagcctggctggccacccccacatctgctcactcccaatgacctccaagcccaaggtgtgatagcagggcctgccgtgttcaggagcacacagcagcgtccacaaagc

SEQ ID NO: 344082 - DNA, 1000 bp, Homo Sapiens
catggtacaaatgataaattatatttatacagtaaataagtatcaacagtcaacacaagttcaaaaccagccaccggcctctgggactgagaaacagctgggtgacttcctccaccacggtgcccatcaggagggagcacgatggcacaggtgcaacatgcgtggcagtggccggtggcttcatgatcagtgcagtgggcaacagggacatgcactcgggatggcctgtgccagaagatggggcagggggctgtcttcttgggtcccggtggcccagtggctgtcatgttggggcctcaaagtcacatcatgaaagactcgttacaaaagaatcactgaccccaagtagtcgagtctagtctactgacctgtaaggctggcccaggccctgcaccgtctgaaggaaagcacctttctgggcaagcatcctgcctcccatcccattgcacctccccacccttcccccggcagacgagaccagccaccggcttacccaaatggcagcgggagcctaagacccagccgcaggcctgcagttctggcagaaggtggctggtcaggaactctagacacggctcctgggactggagagggcagcctcaggaacagcatgagtgggtgcagtccccactcagagcctgcatgtcccagcagcccagagaccatttaagatctctcctgtgccggtgcgaagggtaatcttctggaaccagagaggggctggcaggtggtcagctgcccttagagctagaggtgagaaattcccatggtggaaaaagggccagaaacatccaccaggcaagctgcccagacacaggattgggggaatgtcccctccctgggtaaaagcaagtcttttctggtctttaatgcacgacgtaatacttttacagtggtgggtgaggtgaggacagtaggagtttggaagagggaggtaatattagtgcatgtttgttaaaaatccctcccaggtgaatgacttttttcttcatctccaaaa

SEQ ID NO: 344083 - DNA, 1000 bp, Homo Sapiens
ttttttttttttttttttaagaataccaggtgataattttattcacaaataaaaaaggtattacaaaactaagaaaatgataatttacacatttataaattccagtatgcaaaatagtaatgatgaaatctaaattgatataagctactataaagcaatgatggttttcctttctttttcttactagcacagacaatagtgcttaacctaggtaatagcaatattaacacattatctaaagtagaaaaatctctatttaaaaatatattccatatacacaaaattagaaaattcatgactttacttggttgctcttgaaatcctcctcagtcttgtcaacgagcttctgcagcacaagaagccacagtggttatgcccattcagccacacgcattacccgacacagccctcctgacatcggcactctagcagctgagtttattgagtgctatgggatattccaacaaagtgaagtgcaaattgcatttttttcctcaaatgtttccaaggagtgtaaaatataacattgttgtatatttctagagtaggtagggtaaaatgtcttcatcttgataaaagttacccaggatttaccaaattcagtagcaaatgaaatcaattttcaaccctaagcacttctctactgattgaaaatgatgttttgggatttttggccaaagtctcattcccatcagtctggctttctccagccagtgtttgtccttgaagttaatcagggctctacatatggaaaatatatacaggctacacaaaggaacacagccctgcctactttcatcatctctctgtcataacagaaatgcaaacatcatctctctgtcataacagaaatgcaaacagaccagatttcaaacagtggcacgtatgtgaatcatggtgaggtcacgcgaggaaactacttgcattttcatagccattgtgtggtcaaatcctaaatattttacatgtccaaaaggcaatgttcctaagagttcttgac

SEQ ID NO: 344084 - DNA, 1000 bp, Homo Sapiens
gtgatggagtcttgctctgtcatccaggatggtgtgcagtggcacgatcttggctgactgcaacctccacctcccgagttcaagcgattctcctgcctcagcctcccgagtagctgggattacaggtgcccaccaccacagccagctaatttttgtatttttaatagacacggggttttaccatattggccaggctagtctcgaactcctgacttcaggtatctacccacctcggcctcccaaagtgctgggattacaagcgtgagccaccgtgcctgacctccacctcttcccttgtgggttcttttctccctctgcagacctcacagagtcacctgggcttgaggcctcatagaggagccctcagtgctgaccacacactacagtcccctgaggagctacatgacttctgatgccaggtccacccagaccaatgaaataagagtgtctggggttggagcctaggcattgtgcccccaggtgattcgaatgtgcatgcagggttgggaaccattgcactatagcttcaggcacccagaggagaaactcctgcagttctcattcattagaggggcaggactctggggaacctatttagggtcaggtggccacatcctctgaccagaggctggacaagtccctgttgtgccccggtggatgtgcagcaccggccaggccaggcgccgaggggtcagtcccccagcagctccctgccatttgtgtcattcctcccctccctgcccttgactgcagtgtacatggcagtcatctcatctgacttggtttccgtcactttccctctcagagtcaagctcgaaggagaagctgagctgcgttcttgagatctggggacgtggtgggagatgtggtcacaaggcaggtggtggaggaggccagaatggagctggccaaggaaggtgcgtggcagggaaggggaggttctgtgatggatgctttccccagaagcctgatacgcagtggccagggagactgagtcccg

SEQ ID NO: 344085 - DNA, 1000 bp, Homo Sapiens
ctttttttttttttttttttttttttttttttttttttttttttttttttttttttttatatttaaaagggaagtttattaatattggaagggacaaactggagagcacagaacatgcagctgtccaatttctaaggtgactctgctgtgacagtgattggcgtctgtcccctgcagctgcgcaggcccctgtctgagctggtgtgccaacggcaccttgcctgtctcctccacccggcatcctgctctcccctgcattctgggaatgccatcctggacacactgagaggcctaggtgggtttctctccctgccacccacctgagtcctgccagtgctttggcctggcccctggtctgccgccatcccttgtccagttggttgaggcaccgtgtgctggccttgtccctccaggccagagcgcggcagcccttacccccacagcgctgcagccctgcagctggccctcagccctgggaggagccttccttttccagagagacctcgccctgcactttcagcttccctatggcctccgccttcctagaggcctcccggtagcgccactgcctggagggttggtaggagctctcgtcgctcactgggccctgccggccccgcgtgaggcccagcaaggcccggctctggtggaggaagttggggctagagaagcagtagagcacggggtccaggacactgttgaggtaggtgaaggccagggagccatggaagagctgtgtgcagaggtccagggatcggcaggcggacagccagaaagccaccatggaagccatgccaaagatgatgctgggcaagaagcagatggtgtagacggccaccaccatggccagcacacgcatggccctctgcgggcctgcctgcccgcccagaccacggttccggatggtgagcccaatgctcacaatagcaaagaggatgagcgccagtggcaggaagaactccagcaggtacagtgcctggtgccagcggagcgaggccga

SEQ ID NO: 344086 - DNA, 1000 bp, Homo Sapiens
agatgcaaagaccctggaaacattttattctggaatgtggcatctcctaaggcttattcatatacttgacattctttttcgaggcaaagttttagatacacttgtggcattttccctgcatatgtgtgcaaatgcttgtgcctgaagatctttgcttttctgccaggttgcagacttgccactagagctgggattggtcattgtgacattgccgctcatggagtccagtgaagcaggactcagggcaatgctgctcacactatgggaagaataactgtagatcatcttgagaaaggcagactttgtgttaatctcttgcttacaaataataacatagcatttggggatgaatgtgcaatacaggattccatagttagatattaatatgacaataatctccacagctggtacatatttgccaaatgtggtagcatagatagggatgaatgtgatccaagctatgaagtaaatgagcatgccaaatgtaatgaatttggcttcattgtaattctcatatttgcctttgaaagcaaatatgaagcaaatgaaggccaggatggcaatgtagcccagcatggtgccaaatgcaagtatggatccctcctcacactccaggatgatgactctgggcaaggagacattcacctctacagtaggtgctgcaaagattagccagagtgtgcaaatgacaacctggatgcccgtgcaagtgaagataataaggatcggtctatagaggcacttcagaaatttctgtaatttgggatcaaagctgaaggctagcaaaattttcagagacttcgtcaaaatgcaggagatgcaaagagtaaagctcactccaaacattgtctgcctggttttacatgtgaagtcttgtggttctccaatgaaaaagctcgtgctggcaaaattgaggaaatgacagagaaggatcacatagcagactcttaatcccccggatgatttcacaacaggtgtgttcaggtttcttgtaaatatt

SEQ ID NO: 344087 - DNA, 1000 bp, Homo Sapiens
ttttttttttttttttttttattgcttctaatttgatttatttttgctctgcaataaaaacaaacgtatttaacaaataccatatgttgcacatttccatatatgattaagatataattatgcccagtagaaggtgggagaagggaaaggaagaagatgaaatagaaaatataagttgaatctgatgcttaatatgatttttactccatgtatacttttactcaaatgatagctcgtgcacatgcaaggacggactgtgctacttcaaggtactttctatggggaaagaaaagcaggagaaggaaaaagggagggggagatggccatgcatctccacttcctgaaggaaaaagcactttggtccccataggtaggagaaaaaaaaagttaaataaatgggagggaagtatgtgttttgcatggaggcctcattttaacaatatcttttttttgctcttctgcttccaaaccttatttgccaatgtaatgcctttatataaagttcttatgatgaatgaaaaactttcaagtgctgttgcctcattaaatgcattatttattaatttaacttctagtactctcgataaagagccagtgaaatgagttattgagttccagggaaaaaaatgagaacataattttgaatttattatctctctatacacacacagttcataattggattacatataataataatatcaacaagtctatcagtatcgaagttggatactggtaatttctcatgtgaggctcttgtgtcacagtcagcatagatttctggagcatttgtctgttgatcttttggtggcctcaaacctcattaagtggtgtgggagatgctgtttctgccatgtgagaatgtgatggcagaattaacacaaccccaccaggggtacaacagagcactttacatccaaaggcagagagggacacagcaatgcagaattccagcacacttaagaggagcaccatgccatccagacccattaagatggac

SEQ ID NO: 344088 - DNA, 1000 bp, Homo Sapiens; identical to SEQ ID NO: 160657

SEQ ID NO: 344089 - DNA, 1000 bp, Homo Sapiens
ttttttttttttttttttatcgtagagtacgttctgcattttatttctgcaggcaacacttttgctcaccagcaagaacacagcccgaggaagggacccaataacctttcaaaacgcaaactgctgcctgcggtgagggcccagggtcttccacggagaggacaggcatcttcctttcccaccaggaaggagtgagcccggagcctctgctatgtgcaaggcggtgtgcaagcaccggctgcagctttttgctctcttctttctctttggggctgggctgggtgtgcgttctggtgctgatgctttggcctgtgaggctgaggtcggcatctcgacccgttcaattacagcaacgaagaagccaccgctaagcgtggtcttgggggaagcccggaggcagtgctcggcacccgggaacgtgctcaggcctcggtggggccgggcaggcagggcgggagctagcctgaaggcgcccgggttctgctgcagcgcatcttgtaccatgtcttcattctcctcctggcagagggagcacatggagtagacgagccgctgcagggaagggaaagtgagcgcgtggcacagggctcgctgctggaaccctgccagggcatgcagacgcaccgggctaggtgtccctgccccgggctcctccagctgtctgctcggcataccatctcacccgagccactgcaggaaggatccagcaggacatagtggacctcacgatagcgcggatctaagggggagaccgccaggaagtcctcctcagccagctcacagcaggagacgccagcccaggccagcagcgtggccatggatgccagccgcctggcatccaggtcaaaggcaaagatcttcccttggttcttcagaagagcagccaagtgactggtctttattgcctggggtggcacaggcatccatgacatgggagcctggcgggggtccagcagcatggctgggagacagctggccctgtcctgcagaatgaggtgtc

SEQ ID NO: 344090 - DNA, 1000 bp, Homo Sapiens
tttttactttcaaataaggaaggcaatttattgtagtgaaattacattgaagttttatatatgacccccaatgcatataaaatcatttacctccacattataggataggatatcatgaactacaaagatactcaaagtgctatagatgagttaatattgatgtaatacattttcattaatctacccacatttaattggatgattgaaaggacacgttgaagtgtttttcatgatttttgctacggccccagcttttactggagtttttaatgcctttgatgactccagacactcaactctgttccttgcagtctgtttctttcttctatggtggtgattagttattgcaagactgcttatatagagtaatatatagtttactctggtatggagtaaacttataccagagatttaaacatttctccctaaatggagtttgtggaagatgtgaaaattggcatgacatttgaggccacattaaaaaagcgaagataatttttaaacactaaccaagagaaaagtgccccaggaagcaaggaacagcagtgtacttcactgcaagttcaaaacgtgtgcagggattattagacatcctttgcacctaacaccttatctataatacatttgatacatttttacatattgcacaaatccaggtacacagagactatctgatgcgccatggccatggtgtagctatcctcactgaggagggctttccacaactttctcaaggagcttattcaagaccttttaaaaacaatctacaggcagttctttacaagtctcatatttacagatagcacaagctatggcatggcgtatggcctccctcctaaatatacgattctttggcatattggaattggtcagcctcaaagaccggctggctacatcgtcgcacgagacagtcccgcttattcctctgcacggactcggagacggtcctcagcgggaggagctcaggtctccctgggccagacacgtgccccagagagtc

SEQ ID NO: 344091 - DNA, 1000 bp, Homo Sapiens
catttgtttccttttacttttttaatgcggctaatgaaaaacttgaaactacatacatggctcatatgctatttccatcggatgatgctgatcttgaacatcttctgacacacagtaggtaccctacaaatatttgttgaatgaatacatctggaaaacagcggcacagccccatctgggtttgtgtggaggggtctgggttgtggacacagaactgtcatcagagagatggtgcccaccatagcatggatagtgttcgggcatggcagtggtgtaggcctggggacaccttcagtttctcatccaacacatatttactgagcacatactacgtgccatggaaggggagagagcaatgccatcctgcaggagaagtgctttccctacggaagcgaggggcatccagctctgtcttggggtgggggctaccaggggagccctctccttgaaggtgtctgttttcttcccaagtgacaacaataggtggcggcggcggcggcgggagcagcttctgcgcctcttcgtgtgcacggttgcagcggttgtcacgctccccggcgcgcgggcggcccttccagagcaggtggcccagctcggctacgctgagcagcgccgacagcagccccaccgcgaaatagaagagcacgaagacggtcttctcggtgggccggctcacgaagcagtcgaccgtgtgcgggcagggcggaccggcgcacgcgaagtgcggggccacgcggaagccgtagagcagcgcctggccgcccaggaaggtcagctcggccagcaggcgcagcgccacgctcagcaggtagcagcggcgcgcgcggcgggcgcgcagggcgcacggcgcgcactgggcctcgggcagtccgggggcgcactgcgccgccgcctcagcgccgcccgcctccttgcctgcccggtgcatggagtagacgacgaacagcaccgggggcgccgagagcagcaggatgtggaagagccagaagcggtagtggga

SEQ ID NO: 344092 - DNA, 1000 bp, Homo Sapiens; identical to SEQ ID NO: 160809

SEQ ID NO: 344093 - DNA, 1000 bp, Homo Sapiens
ttttttttttttttttttcaatgttttaagaaagtttatgaatttgtgttaggccccattcaaagccatatcctgggccacatgcggcccttgggccgggttggaagcttgccctaggaattttagatggagacgctctgtcttgccgggtgtagcacccgctcctgtggctcctttcctctccacactggccaagcaggagctgaatgctttggaggctccctgggcataaggcccaggtgaccactatgtgttggtgctcagcctttgcacatgctgtccctctctgtggaacacattccctggcccgcacatcttcctcacccccaattacctcccgggctccacacagtgcatttcctcaggtgctgcgctgaccagtgtggtagctgctggccacgtggctatggagcccttgaaatatttgagttccaatcaagatgtgtaagatacactccagatttcaaagcaaaagcaaaaacagctcattcacactttttatactgattttatattgaaatgaaaatattttggatagactgggttaaaaaaaaattaagttcacctgcttctttttactttttgaaatgtgactgtcagaaaatttaaagtcacatatgtggctcacactatttctgtgggacagccctgcctctagctaggggctttggtgagaaccagatgagttgatgggtctcctctgggccctgcttccctggctgctgaggtgcaggaactgtgaggggagggcagcctgtcacggtgcccaacacagggcagggctggacaggtacaagtggaacaggcggataagctgggaagggcacagagaaaaggagctcctcgtgacagcactttcccaccttttattattcaacacatggaagggggtggagacacaaggatagggcaatggtgagtttcaataaataagagaaacaggatggacaggcagtgggcccatgcctgcacggccccacataaataaccaggttgctga

SEQ ID NO: 344094 - DNA, 1000 bp, Homo Sapiens
ttttttttttttttttttttttttccaaagcagagtaccaacatttattaatcctcacaacacccctgtgaggtaggtcagtatgtcctttagagtcgagaactgaggcagaggtcaagcaaacctgccctgggccacagagcagcagatgaagggcctagacctggatccagaagctagggctctcggtccagcattcatccactggtggacatcacatgggcttatttttaccagcgaaggttacgtgaaggacaaaacgcactcagccagcaacggaaactcaacagttcaaacagcactggggaacatgtcagttaaagagacgaaacgctgaccagctcatgaatgaggcaagacaacatgcggctgaggaagtgtggaatcatcacgactggggattagaccaagaacgggcgctcaggagggttcaggaaaatgtaaacaaactaaaaagatagtggaaaaatccaaccacgcaaccttaactttaaactaggaatgacaataatgtgtctaatgttcattcacactagaaaggccgataatgtttgtaatataactactggcgatagtatcctatttgtatgccaactttcatctcaagtattctgcttttctttccccacagacaaacaagtgttgttctttacagcagacctctttccctctacataccaatctatccactcgcataactactaagtggctcaatggcctatgtctcatgcttaattggctgagctaggcgcggaatccgggaaaccacaacagactgtactctgctcctgtatttcaggaataactgtcactaacctgcctctgtccgattccaccttctatgaagtacacacagaggagcagttcattcttttgtaaagggattggtggactttgttcgagatgccatttcaaaagaaatgagaaaaaagaaaaactaagacctgcactgtaaagcataatacaggagtagatttattacagctactccacattttcc

SEQ ID NO: 344095 - DNA, 1000 bp, Homo Sapiens; identical to SEQ ID NO: 160810

SEQ ID NO: 344096 - DNA, 1000 bp, Homo Sapiens
ttttatcaaaacagccttatttaatcaggccccagaggcaagtctggggtatacaggcaggtgggattcctccccgggaggtcatacctgacctttctggggtaagagggaggctggggcggggatgttggggaagcggcctgggagacggctgtcagggttgcagcagggacgctctgggatgagctgggggcaggcggtccctttgggaggtgagacaatggccctgtgtggtacactccctgccccccaccccccacgggccgcttggtctggcacaaaggacacactgtgaggctgggtcctccagctggtgggggtggcatggagtggggcctaaggaacagctattaggtccagagtggcagtcgggggaggtggtcagtttggcagggcctctgggagcataaaagtcccagagcaagcctggccttccctgtcctccctcccatgtctgtcctgcagaggtggggaggggtttaggggcaacatgacttctcccctctccggtctggtaggaaccagctgttaggtgaggggccggctctgcacctaggtggggccctgggaccgtgccccagcccctcacaccttgacctcatcatcctcctcagcatccgcaaattcaaaggtgtttgcttgcactgtgctgggcactggggtcctgctgcctgcctggggcgccctccactcttcgtccaggctctcccaggaggcccgggcttggggcagcacctccacccgctcctgccgcgcatccatctctgggtagtggtggccgccatcccagcctgctccccagtgcctgccgagggcagggccagcaggtcctcggggaccccctcccactgggctggacttcacctcagccactgggcccaacccagctgttaccccattgggacagtgtccatggggtgtggagcttgcggcaggggctgggggatttgcagcaggacccgtgggggttgcggcaggtgctgaggggtttgcagcaggc

SEQ ID NO: 344097 - DNA, 1000 bp, Homo Sapiens; identical to SEQ ID NO: 160811

SEQ ID NO: 344098 - DNA, 1000 bp, Homo Sapiens
cgtttgagacagggtctcactatgttgctcaggctggtcttgaactcctgggctcaagcgatcctcctgcctcagcctcccaaactgctggaattagcacctttgggtgctcatgcctcccaaaggcatgagccaccatgcctggctgatcgccttcttttttagtgtctctgtaccatttcactagatagaaataactgatttatatacccaattcgctttttttatttttttattttttagacagaatcttgctctgttccccaggctggagtgcagtggcacgatcttgactcactacaacctccacctcacggattcaagtgattcttgtgcctcagcctcccaagtagctaagattacaagcgtgtgccaccatgcctagctaatttttgtatttttagtagagaggggattttagcatgttggtcaggctcaaactcctgacctctagtgatctgcccgcctcggccttccaaagtggtgggatcgcaggtgtgagccactgtgcctggccccaattcactttttatgtacatctgggtagtttctaattttttactattaccaataaacagaaataatgatcaaaagtgctgctgccaggcacagtggctcatttctgcaacttatacctaaggaaatagtctgaaatgtaaaaaaatgattttgcaccaagatgttcaccacagcattatttgcagtagggacaaactagaaaccacctaaacgtacaataatagaaaagtagaatgtttgagtctatcacagcccattccacacacagcccttctcatgtctctgtgccccacagcagaccacatggtaccactcccagccatagactggaccaaggggtacactcgcctctagctgcaccaatcagagtttccttctttcagaaatgtggaattgggagacagggatttgtgtcagtctctcctaggggcttgaactggaagatgttgtaaagtcagagctgggacagcccacccagtcc

SEQ ID NO: 344099 - DNA, 1000 bp, Homo Sapiens
ggatcttaaaaaaccatttaataaaaaaaaaatctttgaagggacaaatgggaagttttcacttagagtttgatttacaagacaataggaggaatcagatttgggaacacaacaggcttgaacactttctggagactgagagacagttcagagtcagccctcaccgttagccagacccctggccaggacccgcagcaggctggtccagcgggtctgtggggcactcctgtggggcactcttggtggaaacgatgagccaggtgatggtctccccaggagtgggcaatgggtgaggcctgagccctgaactggctggcttttggacagtccttgaaaatgtggctgctccagaagccactcaagctggaccatggtcacagttaacctcaggcccaacattaaacaaaaatgtactgagtgctcagtcactagagatgattttactgttacacagggaaggcaaaaaatagcttccactgcccaatgcactcttcagtttcacgtatatggcttcacagtttacaaagcgctgcctgtgtcgcagcagcccagccttacagcagctcaagggaccccagggagggcgcctttctccatttgcataaatgaggcagagtggccccctgacttgccaaggtcatggttggggtgaggctggaatgggattccttgtctgggttcctgactcccaggctgcctgagttatagcaccaatcacattgccatccacctctcctcctgcaacttccccaacaaggggcagggccaggagatggattggatccataaggggaattagaaaaccctaaggcattctaatggcaatctgaacactgaccatggcaaaagaggcttgggaccaggcatccaacttctttatgtccacagggtcctggctgactccttgatcttttgggctcagtaatgtttgtggctataagtcctccagccaggttcccatgagcttcttccgtgtataagttctgctgatggggcgcct

SEQ ID NO: 344100 - DNA, 1000 bp, Homo Sapiens
tttttttttttttttgcagatcatagtgctttattaacaaattcatgtgttcttttcccatccctttaatacaaaaaaattattcatcagttattttcatctgacatttcactaagtacagaatgcataatgtcaacattattagatcagccattcaagtgggtcacataagtttatcctcattgtgccaaatacccactcaaaggataagctgaataacagatgcctccaggtgtatacaacaaccttagtttcttgacttgaactagtcctgtttaacaggtcaaactgctagtctttctaagtaaactaaaaaagactcaagtacacagctgtacatacatatcatcagatggtaagttcatttcaacaagaacctctataactaactgtacatttgtacagttttctgctatcattgcaaaagcccctctgaacaaacttatagtttagaatttaaaacaatcctgatgagacaaaacgtaccaggtggcttttctgtagcagaaattaattacaaccatttttcctcaagcaattttaaagacaaacaaagttgaaaataaatatgcaagcatacagtaaacaaaatgtctatactgagaaattcagacacaaagcacagtggagtctataactgtagaagttagaaatacaaactagcaatgaagcaacaatctcttccaaatagcaggaaacaagttctccaataccattatttagataattatttagtgattttggagttttttttttaatcccgtttgctgattatgacatttgaccagaatctcaagaaataccttaaatcatactgcatgaaataaatgaccatttaattcctgattagttgaactccttaatgacttttcagttttgtatataatagaaaggttcaagaacctttgtagatttgcttacaattgctgctggtatttatgaaagcttttaaaagttatgttatattcttctgcatctgttgattccacattaatgtaat

SEQ ID NO: 344101 - DNA, 1000 bp, Homo Sapiens
aagaacctggaaataaggaatttaatcttgttcagcttgaggagtataactaaaattactatcctgagtaacctgtactaaatccatcactctggtagaatcagatcagctgagtttaaatgtcaagaaaaaatagacacacacaaaagtggctttgattacataagtcagaggagggggagcctacaatagctcttccccacatcacacccccaaggctccttcttagggacagcaacagctttgtcaatgacacaaatgcagggtggcatgaggcttccagcagcttaacattttaatttggggtgggggtggaagaaaatacataagttgctttttgctcccccatcctaatgccttggggaccagccaggctgacccaaatggaatccagagcgagagtggggccttgggttccccgaggagtaaagggggcagatccagaacagagcagaaacggtgataattatatagaggtcatgtcattgagggcgtggtccagctcctcgctaatggccttgtacttcagtttctgggcatagagctcatcttccaggtcatcaattgtcttttctagcttggctaccgatctctcagcaaactcagcacgggtctctgcctccttgagtttatcagtaagaatcttgatttcttcctcatatttatcttctttttgagagtacttctccgcctgagcctcaagagacttgaggttgttggtgacattcttcagctcctcctccagctcagaacacttagactctgccagctcagctcgttcctctgtgcgttccaagtctccttcaatgatcaccaacttacgagccacctcttcatacttcctatctgcctcttctgcaatgtgcttagcttctttgagttggatttcctggagttccatcttttcttcatcttttaaggcccggttttcaataaccttcatacctctctcactctcatcagcagctttttcagcttcttccagcttttgcagggcagt

SEQ ID NO: 344102 - DNA, 1000 bp, Homo Sapiens; identical to SEQ ID NO: 160814

SEQ ID NO: 344103 - DNA, 1000 bp, Homo Sapiens; identical to SEQ ID NO: 160815

SEQ ID NO: 344104 - DNA, 1000 bp, Homo Sapiens; identical to SEQ ID NO: 160816

SEQ ID NO: 344105 - DNA, 1000 bp, Homo Sapiens
ccagttctccataaaaattgactttactaattacaaaaaaaattttattattacaaaacatacaatctcacaaaggtacaatttgaaatacggggacacccttctaactaccacccaggtgaagaaacagaactttgtcaggcaccccagaacccctccaagtgcctcatcacaatgacaactccttccctctagaagtagccattattcttgtatagtactgactgtgtttctttatggttttatcttattttttagagacagggtcttgttctgtcacacaaggacaagtggacaggtggagtgcagtggtgttcatagctcactgcaatcttgagctcctgggctcaggtgatcttcctgtcttagcctcccaaggtgctgggattataggcgtgtgtcattgcacttgacctagttttattttttttttgagatggggtcttgctctgtcacccaggtgttgcccaggcttgagtgcagtggcgcgatctcagctcactgcaacctccgcctcccaggttcacgcaattctcctgcctcggcctcccgagtagctgggattacaggtgcccgccaccatgcctggctaattttttgtatttttagtagagacggggtttcaccatgttggccaggctggtctcaaactcctgacctcaagtgatccgcccgcctcggcctcccaaagtgctgggattacagatgtgaggcaccgtccaccgtgcccggccgagttttattcttgaatcgtgcatgtctctgttcactacagtttagtgcaccatttaaataaatttgttgtcttttaagttcatcaaaaatatttcttttgaagcactataataatgctggtgatggaactcgccaccattattccctgggagcttctggcagattctgtcagttggaatctctaattcttttctcagtggacctttttacttgactcccacagttctttaagtagcttctttttttccagggtttcctttgctct

SEQ ID NO: 344106 - DNA, 1000 bp, Homo Sapiens
tttttttttttttttttttagtttaatgagacacaaactctcaactttttatttaaaacagaaatgcagtagtaagctaaacctttgccattcatagggaaacaaatatcagtaatcctctttgttctaaacaaaaattcataattatttatacattttaaaatattatattgtttcaaatgttgttagtggggcaataaatcataaagagatacaaccagtcgaaattagacttttaaagaattactctcaaagacattgcaacaactccaaagtccagggatcttataagactaatttattagtaacaacatttacaaagatagctttttaatgctgagttgtatctgatttaatgcagtcagaaagaaaaaagaaacatttatctcattttgctgatctgtcagattttgcttaagttaggagagcctgcaatttcaagcccagataactgggattccatgaataaacacagaaagacaggagaaaggcaaggaagttcaaaaatcacagtctggggggaaatcagtagagtaagattaccaataagtgaaatattggtcatatgatttcttagtttccattagttatgcaaatattttactgttaatatttagattagtgttttagaacgttttgtagagactgaaaagcaaataaataattgcattagcattgttaagtatcagtgttttctgtttgacaaataatcgtacagctgtgttctcaggctgcaataacaaaacaccagagactgagaagctgaaacaacagaaatttgtttctcacagtctggaggctggaagtccaagacagagtccaagactctcgccagcagcgagagtttgattgtgaggcttctcctcttggcttgtaggtggctgccatctctctgtgtgctcccatgccctcttgtttgcatgcacagggagggagggaacaagctctctggggtctctccctataaggacaccaaccttagcagatcagagccccacca

SEQ ID NO: 344107 - DNA, 1000 bp, Homo Sapiens
tttttttttttttttttttattaggaatttagcttttattcaaaattaaataagcaaaagcaaaaattttaagaaacttttacaaattacttacataaaagaaagttaataaggacagtcacaaatttgcaacaaataattacaaaagtttctagggcagcatgaatataaaccatgttgcagcatggtgatctaactgtgatatgaataaggcataactaacatttgcaccgagaccagaattaaaaacaaaaacaaactttaaaagcttagttctatattaaacttcttctcttttcccagatccttaatgggtttatactatgcatttttttttaaaacaaacacatcatgtcaaactataaattacacaaatgggcagttaatgtgaaaagccccctaaaatgtacaaactaactggtactgaattgagttctccctttacctttatgtacaattaaatgtaaaccatattttcacagttttgagtgttttatgaatagatgcacagtaccatgtcaggtttacaattgttcctgaaaactggctctaggttctgcatccaatgcctgtcggccactgtgatgcaagtatttacataaataagaaactgtgtcatagtcaatggtcaagacagttcagcaagagcagtatttccaacaaagaatgatcctcaacacgatattttacatacttgtgcaaatataagcattaggacagatatatctgaggcaaattcaatttgcaaaaacttgtatcgctactcttgtaaacttgggcaataaatgaccctcggcaagttctgctctctatggcttttttgtttgtttgttttaaaattttaaagccagagaaaatacacacacactacccaacccccacaagcacacacgcacgcacacacacacacacactctctcacagacataaagagttcttatttcattttagagtatggtacatagtgcaacttcacaatgtagaggttcgacacacattc

SEQ ID NO: 344108 - DNA, 1000 bp, Homo Sapiens; identical to SEQ ID NO: 160817

SEQ ID NO: 344109 - DNA, 1000 bp, Homo Sapiens
ttttttttttttttttttttgacttgtatcaccttttattacacaaaatagatttcagccacgttgcacattcattctccctacaaatctggcttttaagaaatccgtagggattcagtctcatcgatttcatgactttcctttcattgatgtcatgcctgtattgtagtcaaagtcctctcaaaggacaaacgcagatgtggctgccttgggtcagctgcacacagtacactcccggcctgcccgctggaggcgcggctcccaccatcacctgcaccgcgacttctagggactggcaaagcggcagcatgccattgccttctccagcccttctccagcagcacaaccagtcctcccagctggtcctgtggggaccagccgtcatggcgacgtggtgacaatgtccccaggcagccgaccatcctgggcttctctttgggcaggcctgggccaggaccttaggggatctctgtgtccatggtataaatctgaatgagatcagacacaatattatcaatgattggcttggtaaggtcgtcattaaacacctgccaccacggcttctcagcctcgacctcggcgggcacctcaactccgtagacctgcagggccaggtagagcaccgccacggcgatgtgctgggcctggaagcggaggcacagcgccccatggtagctgtcccgcagcagggcccaggcggtgacggcaacaggggtccgctgccagctgtggcggttcagccagttctggagggaaaccaggtagtggagcaggtacttgtgtggatgctggaaggagacctggaagcgcagaactctcagcatgagaagctcacactgcacgatgctgtcccggagttcccagaagcgggagtccaattccaggggctcaccgcttgggttaaagtacctgttggacacattgatgatgtcacgagtccgcaggtgctgctcttccactttgccggccaagtaaattgaagacatggcaatcaggtaag

SEQ ID NO: 344110 - DNA, 1000 bp, Homo Sapiens
tttttttttttttttttcctctaaagttgagtatatttaattcccagtgttacagaatttaaaatgatacaaatactgcatgtctttaaaatttcagtctgtttttctactgagttcaaaaagtttaaaagatggaggctaccacaaatatataaaaaaacttcactctattctacaacttacatagatctagtacttttggtgagtcctcttaaaattttttctggcattaccaatctgagagtcactttttatcaatatatgttatcttgttttgcaaaaatgcatttttaaaaggtttccaaagtcaccttgataatcatagtgctcactcacttgacacttactgctaaaaggttgttatgcatcttttatacctggttgaggttcaacttccagctatcagagaaaaatgtccctataattctataattgacaaaagggaaaagataaaaaagggaaagagaacagggtggtaagaaagattgatttttcatttcttatcttgtgatacatgctgcagcagtaaacaccactatctctcaagtagaccctttgaagacagggggagaaaacactccaagagaaagctttaaactagagattgccttcctattctatgtggctttgaccttttggaaagtgcatggcctcttctccttgtattaaataaaacaagaatatgaggactgatgatttgatttggtgagttagttatggaagtagttctggcatctcttatttccattctgttatccattacttctgttctgttaatggcagcagacacttgattaactactgagatttggacatgcaggagatccaaggtggattgtgaagtacatcattagctaaatctccattacatcttcacttcaccggttcctctgtttccagatttctggcagactggcatctaaaggccttcatgttagaagcaggagaggctctaaatatttcaagaataattgaggaaaaaatacacattataacagct

SEQ ID NO: 344111 - DNA, 1000 bp, Homo Sapiens
ttttttttttttttttcgaaatttgacacatttattttatttttgagtttcatttttacaagagaagacacaaggtaaagaaagacaaccactttggagagggatcatggtgagggcaatgtcactgtcatggccatagtacaagccttccaagaaaagggacctgcgttattccctctcctgagcaagctgcccctgtcccacaaaccagttctatctgttttcacatctagagcactgtccataaacatgtccatcttggctgtgctccagtgagatgaactgaaagaaggaataactcataaagtgacctttgttattaagaaaaattcttgtcttcccaaaggaatcaagatctcttcagagaaggagcaactgttggaaaatcagaagtgaccattccctaacctattcctgaccacgaatgccttgtgcaaaagctaagatgtgactctcttgtctttctttcaactgactcttaggagaaggcattcctcctccactcttatcagttagctctggaaagaacaaatgtgaaagccaaagtcagctaagaaactttgagacggcaaagtcaagggcacgatggatcaggcctgaggtaggagggaggagccctgcactgtccgcctctttgcctttttctggcaaagacactgaggcagttcctaggctacagaacaactggttcctcccctgtcacctcagcacccactgctcagtagacccaaagatgcaaggaataaagctacaaggaaatggggaagagagaggagagtggggtgaggctgttttcccagacgtttgtcaggaggagctacagaggcacacacagcagggcaaagaccagactatctccacctgttgttttgcattgtttctgggaaggaaacaaaagcgggtttgctcagcgatttctgatctttagacattaaggcgatgaagaggaaccatttaaattttttcctaatggggcttcagaatgctcctgtcagattta

SEQ ID NO: 344112 - DNA, 1000 bp, Homo Sapiens
gtgagaaaattacaatatttatttacacatttacatatagcacaatgtattggtcaagtactagtaacaggcaattaacaaactaataagaaaatcagcattttaacaatttaaacgcttcatgacagggtaattcatgtccaacatatcaaaaacatatttatagataactttagaaagaaaatacatactttttttgataatcacaagtagcaatgagattttctatattattttcagtctcactttagaaatgttttaattgtctaaatttaatcaattcatcgattaaaggaaagacaataaaatagtaaaattacatgtgtttatatataagtgtgtgtgtttcaaataacaaaacgcaggttgtaaactaaaatcactggaaggcaaattgaagacaaaagtgatgctggtttaagttgtttggttcttcacataaattccagtttccaagttgtgttttacaactctagtaatatccagatagataattcaacctgcaacttttttcttctattcctgtttttctcttgttcacactgtaatttttgtctttttactgatactgattaaataaaataggacttccagtcttaatacgtctcccaggagaagtgaaatgagtttaactaggtattgagtatcattttccattttacttttctatatttatctgatctaaaaacactccaaccatgtagtttttcttccatccttttaagtcacttactttcagtaaaaagggtaaacggaacactgaaagaaccgggccaaaatcaaggtgaaacatacccctagaaatacagttatcataattttggattttagaatggccaaacctattaatttactaaaactaatcatgaattcaaaaatcagcattgttttgaagaggtttttattggaggtcagggcatgatctactgcaaaaagtatactttactcaataccatattagctcaaaagaataccagaacttcatgtggccaaagcagct

SEQ ID NO: 344113 - DNA, 1000 bp, Homo Sapiens
ttattcttaaaaaatttatttatagaaacagacatattcaaatgcaacactggacaaaaacaaagagaaaaagttggaatgccgatgacaacagagaatctcactttcactttccatttctctgaattagcaccattagttcagaaatcacagatgtaattataattgcttctaatatataaaacaccttataaagatctgtaaactacctaatagcaaagttcttccaaaaacgcatttaaaaatcaatcagaatttaccatttgaaactgatgaaaatggtttaaaaatgaatccagttctacagcttgtcaaagggaatgagccataattagttttattggaagaaagtgcctgaattcatcttctagcctccttctaaccaccaagcaggtacagcaaattgaatattactacaggaataagagtcatctaaaactggtcttagaaaatattttcctaaactataaaaatactaaatggcatacaaaaatttcagcatatacagcaaatagactacagcagacaaatatttagaacatacttaaaactatcttgtaccacaatcatcataaacatcaagtattcttctaatcagttttctatgattcattctaattcaatgtttatttaccctcaagttttgttctagtgtcagatacagaccaaattctgtgtttctagcagaagttactggaggaaccattgaataattcttggtattcaactcgttctcaaagtgctggaagtgcaattgtagtatagcctattttttagatgaggggtcagcaaactacagcccaggggccaagtctggtcaccatctgttttgtctggcctgggaacccagctacacatattcctttatgtactgtctgtggtggctttcctgcttcagaaacagagttgagtagttatgacagagactgtatgtggccttttggtccacacagtctgaaatatttacaatctggccctttacagaaaaagtttgccaacc

SEQ ID NO: 344114 - DNA, 1000 bp, Homo Sapiens; identical to SEQ ID NO: 246589

SEQ ID NO: 344115 - DNA, 1000 bp, Homo Sapiens
ttttttttttttttttttttttttttttttttttttttttttttttttttttttttttttttttctgtgaaacacgatttattatataaaacaaggtgcatccaaattcagtgtcagaagagctttgtatttcaagggctaaggactggaccttctcccttaaaacctccttacccaacccttgctaaggactcaggcctggggcagaggctgtcagtctctaaagaccccagccctggaccaggacggggagaacaagtttggtgcatagcgtggggctagggcagtgggtcaggcaccatcccttctgcaagtggccacaggtcaccacagtgggggaaggtggggagcttaaacctccaaagataggttcattgtaggaaaagctagaccaatgccttgggtagaaacacccaaatccctctacaacaactaaagcaagaatgtggaacccatcgaaatcttcccccaaaatgccaaccataaaatagattctacagaaataaagaaaggaatcccagcactttgggaggccgaggcgggaggttcacttgagcccaggagtttgagaccagcctgggaacagcgaaaccccgtctctacaaaaaaattagtcgggtgtggcagcacacacctgtagtaccagctactcactacctgggaggctgtggtgggagcatcttttgagcctggaaggtcgaggctacagtgagctgtgactgtatcactacactccagcctgggaaacagactgtctcaaaaaaaaaaaaaattaaaccaacaattggctgccttctgaccttcacatcctgtataggaatggaaatggtggctaaagtcagcactgaaggtcccacaagctctccctgcctcccctctatctactgcatgatccttcaactgaggccagcccaggtgcagagtagcttgcaaaacccaagggacagactgatggggaaaatccctgggaatgtgggagctgccccaaggcccagcccag

SEQ ID NO: 344116 - DNA, 1000 bp, Homo Sapiens
tttttttttttttttttttttttttaaattgccatttgaaatctttattagttagcaaaaaaatctaacataatcatcagagttttaagtagtagtgacagaagataaaaatgcctccatatcccaaattaacatctccgtataccaagtagctaacttttattgttttacaactaaagtcagggtttttattttcagagacaattctgcaaacttgacattaaagcagtagtttggcatggtttaaaatacattcaaatgtatactaaatgttttagaaaatattccattgttgaatacatttcacatggaatttatgtgaattaattgaattgatagtgaaatattataagcaccatgtgaacatacacaaacatattcttgttgttcacagaggctagaatcaggtacattagatcgaaattaacttagacacaacacaataaatgtcaaccttgcagtttaaacaattatatacactaagaaaaatagtgccagtcttggttcgtgcttggctgccagactttattgtcattcacttctaatcctcacttcaaatcaactttcctctttcttggctcatatttgtgaaataaaattttatttaaaatggaagataattatctaaagggttttgtcattaatcaatacaatgacaggtctatcaatatatttagatagataaatgtttctatctacagatatttagatgtctttgttcatctggagagttccaattttacccctttatgtttataggattagatggttcaggtgggattttgatgggggtacaaggtagtggttttgtagtttctaacattcagggaaaagtaaatggttgatggcccatacaatattctctctttatctaaggactttctttgccctcagtaggctatctctgtaggatccaaagagttattttgaaccccagacctgcatctggcttgtgggatagaggcattttgtcttgttaataggtcttgtggtggtgaat

SEQ ID NO: 344117 - DNA, 1000 bp, Homo Sapiens; identical to SEQ ID NO: 160819

SEQ ID NO: 344118 - DNA, 1000 bp, Homo Sapiens
ttatgtgaataaattttttttttatttttacaccataatccaattctagttatcttaattgaatttgaaaactttttcaattgcattaaatttacaaaaaagttctcccacattacactaaagcattcctcatgtttcacttccagtactcagatactgaatgagtaaaatcattttattggctctcttttaattaactccttcaaatgcacattgtttaaaaactgactaggtcaaaaatagttacgcctgcaggttgacctattcagactttgccaaactcctccaagttcaatataaattgacgttttcagagtacaaagtcaattttacggaaacgctgttcctccttttccatggagccaatctgggtaattttttcattaaaattcttcttctgcctgtttgctgcggaactctttgagctgctgtagccgctcgatagtttcagaaatggtgcgttccccgtggaccttattgtctcttgtgcggatattaacagtgccactgattttctctttttcaccaacaactaaaatgaagttatactgtgctaactgtgcatttcgaatctttttattcaatgtacagcctggatccagatcaatgtctgccatgaatttggcatcgtggaattgttgtcgtaccttttgggcatattcatcacaggttggtcccactggaactaccattacctggcgaggggacagccaaaagggccatttgcccccatagttttctgtgaggatagcaatcattctttccactgatcccaagatggctcgatgaacaatcactggccttttcttatcatcaccatcatggcttacataagtaagattaaatctgatgggcaactggaaatccagctggatggttgcacactggtggtaccgcccaatcgcatctttaatctgtatgtcaatctttgggccatagaaagctccatctccagagtttaactcccacttttcaccaaattcattcagactgttttcaa

SEQ ID NO: 344119 - DNA, 1000 bp, Homo Sapiens
ttttttttttttttttttttttttttttttttttttttctctctccccactgatatatttgataattgtccagaaccagagatggcatcagccggggggctgaaggggagtaaaaaagagcccagggaggtggctggggcgggaggaatggatagaggggtgaggagagggagagaaactgacacagaaaagagagaggagagaggtttggggcaggggagagaagccagccagagtgggggcggcaggagatagtggagggggtgggggccaaggtggggccacaggaagagagggctcctccccccagaatacaaaattggggggactgacaggggcggtcctgggcctgggggacggggaagagatgggcgatgtggtggggctgaggtcagtagtaggtttccttctccacccaaccccctgggttcctgcgcaggatgagtttgcggatttcgtcgtagacgaagatgaggaaactgtaggggaaggcacagaaccaccagctgggcttgagagggtacatgcgcagggccacgtccatgccggggcagtaggacaggaaggcagccagggccgtctcctcaaacagcccgaagatcaggatcttgttcttcatgccctgctggaagaccgagttcctccgggtcttgcagatgatcagatcggcccactggacgacaacgatgctcacaaagaaggccgtgtggcaggtgaactccaccaccttcctctgctcgtatgtccactgctgcccgtaactgtcttccaggtcattgacggtgcggtcatcccagttcagccggatgcccaccaggttgccgggcaagaagccattttctgccaggatcacaaagtaagagaagaagccaccgagagcctggatcattccaatctgcccgtaggccatgctgatgagtctctcattgaccaatttgtccgtccgcgggttcctgggctgtctcttcatgatgtcgctttcggcagcctcgtacgccag

SEQ ID NO: 344120 - DNA, 1000 bp, Homo Sapiens
cgcctggccaagaaaaatattttcaataaatttagtataggttaagtgtgcagtgtttatacaagtctacatgttccaactgtctatagcatgcaggacagtaacatgctatacgggtttgtagcctaggagcaacagactataccatatagcctaggtgtactggtaggctataccatctaggtttgtggaagtaaacaacatgatgtttacacaatgacaatatcacctaacgatgcatttctcagaacatatctctgtcattaagtgatgcgtgactctatttgctcctttatctctaacattacattgtaagggtaaggactgtgttatcaagcctgtattcctaacaaaatctatgtttaagaaatatttattgtgagtttactatgtatcaggtacagtgctaggtactcacaattggagacataattttatagatgagaacactgaaactctgagaaattaagaacttactcaaagtcacacagctggcaaatgggttgcaccagtatacctacctccagaatatatattgggtaaaggatctgtttgcatgaacaaacaaaaaaatcatattcttgtaagtatttttacaccctgtaccagtagatctttctttaaataaattccgaagatgaacaatttttgtcccatctaaaatattcaaagcaaagtccacctgttctgactctagaacaaaaagctacaaatagaggaaataaataagttgaattcaaatgctgctgagaaaaggcaatgtatattatagttctgtggtagtactgataacattcaagtcattcttaggcaccagtcttacgtatatgaagtcactttttcattccattgtacaaaactcatattttgagaaaaatctaatagctaatagtctccaacaccatatgatcataatcctttagcttaagtagagatctacttattaaatgaggcaccatcaacctaaggaaagataagctgtaagagaatgaagacagag

SEQ ID NO: 344121 - DNA, 1000 bp, Homo Sapiens
cgagacggagtctcgctctgtctcccaggctggagtgcagtggtgcgatcttggctcactgcaagctccacctcccgggttcacaccattctcctgcctcagcctcctgagtagttgggactacaggcgcccaccaccacgcccggctacttttttgtatttttagtagagacagggtttcactgtgttagccaggatggtctcgatctcctgacctcatgatccacccgcctcggcctcctaaagtgttaggattataggcatgagccaccgcaccctgcctcccactctataataaatttaaaaatttgctgggcgtggtggtgcacacctatagtactagctacctgggaggctggggtgggaggattacttgagcccaggaagttgaagctgcagtgaggtatgatcacgccactggactccagcctgggtggcagactccatctcaacaacaacaacaaaatacaaaaatgcccattctcagagctttcttataagaaggtgagaaggtgacataaacccacttcttttcaaattatccatcacaacagggcaaaagataaccacatgtatgtgtcagagtactaaaaagtggcttacaaagcagcgtgcaattgctaatatccaataagatgtctgttctggtagaacgctttcccgcagtcaatgattttataggttttctggctgctgtgagttttctgatgtgtgacaagggatgagctctggctgaaggctttcccacattcctgacacctgtagggtttctctccagtgtgagttctctcgtgcctcacaagggaagacctctggctgaaggctctcccacactgcttacattcataggggttctcgcccgtgtgagttcgctcgtgctggttgagagaggaacggtcactgaaggcctttccacattcactgcattcgtagggcttctctccggtgtgtgtcctcttgtgcaagatcaggtaagagctctggcagaaggatttcccac

SEQ ID NO: 344122 - DNA, 1000 bp, Homo Sapiens
ttttttttttttttttttttttgtgttatgcaagtatcccacttcattcaaataaattattctttccttgaagaaaagcatggccattagctctctgaaaaggaaagggtaagtttgggactgaactagtaataacaacaacaaataaaaccttcaaaagttgtggggaaacaaattattttcaaaaacaatttacatagttataccatcctcatatcatctacactgaggtaaacagatagacaagtacaaaatctgaataacatttgctgtatttaaagacaaagatgcccttattggctcttcaaagggcaggtgaggatttacattgatccaattcttatggtcttatctactcatcctttggagccagtaataatctgtatataggatctggttaagccaactgtctccattcctccatccatccatccacccacccaatagttctttgtgtgaggcactgtgctggatcatgaagccatcaagatgagtaaaattagattctcacccattaataagtttacagaacagtaggagaaacagtcaagcaactacagtgatgtcatataatacaggcataaacaaagtactatggtagccccttactgcctggaggaatgaatgaaaggagtcagaaagaaggtgatgtttgagctgaaacttgaagctaaatgggaaacattcccagggaaatgaatcttcagctcctaatctaaaggatagcaaattttgttcctattttaatgagaggaaattaaaattcagagagaatgcttacacctagtagggcctcacagtgacaaggcaaaaccatagtacgactcagaaatctggactgcctattgctagattcacagactaagaacctaagaacacggtccctgtgcattgctagtactcaaaaaaaaaaaaaaaaaaaaatccaactttaaacatctgcttattccatgaaatgatcttgccaggcatgctcaacttctctaagaaggtcattaga

SEQ ID NO: 344123 - DNA, 1000 bp, Homo Sapiens
gagggggacggtacgtttattgctcatcactcacacttggggccaggcccctgctagcatagcactcaaggcccccagcacaggggaaacagaggctcccaacagccactggctgcctgggcagaaacccaggccccctaggcaccagtggcagctccaagggccccatggctgacacaggcactgctccttccttgaggctgtcagacaccagggcgggcgaggagagcccccagcctgggcgtcctgccctctgtccccactttgggaaatgcccctaagcttagcctttaagaggtgatcacataggcactgtccctgggtggtgtcctgaatgcacctcccctaccccacaccgttgtcactgtggagggacctcctccatgcccttggcttctgtgaggggtaggggtacccacatagttccgggactcacaggctggcattcacaccccagccccgacacacttgcctggttgcctgcggcagacaacccactctgccgctcctctccgcagcgctgcctggcctcagcgagtgcagcccatgtcaggggctctggctgggtgggggatgccccgcctcttggacatgagtggacgaaggcctgggctgagctcagtgctgtgacatcagccaggaggccagagagcagggtcacctccctggttcctgggctggcctggtctcctagcgctggggagagcagggcagggattctgggtcagctcaccccagcttctggccaaggtcaggtagccggtgtggcccacggcctccttcatgggcgtgccgctgcggaaggggctggtgtcggagccggcagggccatctgtgcctgtgcccaggtcgggcggtggcaggctgacagtgcgcacgttgtagacctgtggcagcacctccagggtgctcagctctgagaagccgcgcgctgccagcgcctggcatgtgcgttgcacctgctcgatgcacggtgagaaggagcagaagcgcccgcctt

SEQ ID NO: 344124 - DNA, 1000 bp, Homo Sapiens; identical to SEQ ID NO: 160820

SEQ ID NO: 344125 - DNA, 1000 bp, Homo Sapiens
ttttttttttttttttttttttttttttttttttttttgttgaaatctttaatttaaaaaaacagagcaagaagaagaaagatttctggatagaaattaaataatcagctcttaggaccctcctccgccccactcccatcccagggcctgcttggccttcacattaaaaacagaaacattaaagtaacagaccacacccccatcccaaggtcacccttcttgtctgtcaaaaattccagccaccttggggcacacatcctctggggaaaccatgcaggtaaggcaacctaatcattctcccaaaactaagcccagcctcttggtgccctggagaagagagagcctggagcttcattgttctctccaaaccttcactggctcttggtcttggctttgaccttgggcctgatgtaggtctggcagaagaagtgggcaaagaggatgaaataggtcatatacaagatgaaggaccagaataagtgttccatcgtggtgtggcatccctgatcctgcctccagatgtacgtgaggatgctgacgatggctcctacaaacatctgcaagatctgcaggctggtgatgagcatgggcagcatcttggggggcttcacgttggcagccttcagagtgtagtaggtgtacatgatggcatgaacaccaaagttcatggtgacgaaccagcctcctgcaggcactttgttcttgtatccaaagcttgtgtacacgagcactgtgctgtggtggtaccagtgaataaagatgagtggccgcttacgcaggatgatgaaggctgtgtctccgagttctatgaccttgctgagaagaaagacccaggaccagaatttgactgtggaattatcgatgaagttgatgaagcacacggtttgctttaggcccccggtaagtagcacagtccccataatgccccacatcctcactgcccccaggatactgaagattgcaaggcagaaggaccagaggatgagaggcccttgcaggt

SEQ ID NO: 344126 - DNA, 1000 bp, Homo Sapiens
gatgttttaaaactttaattatgaaaaagggataaacaattcaagatgggggaaccagccccaaactggctggggcagagagagaccagtccccagccatacaatagcagcaaggggaagaccccaccccacagatgctctgccccagcccttcccagagaccttaaataatttaaatagcagggatggcggagggcaggttgccctggtgtctgcccaatgctaagatgaggggcagcgccggcccagcctcagcctcgggcagggctctggggctgctgcagggctgggaggtatttgagggcagcagccccatggtggcgggacaagtcctggtggaattcgtccttgagggcctggaggcagtcacgataggtggggctggagcggaagcgggagatgtccaggcttggagcgtggggcagatggatggtgaaggcctcgggcagcaccaggagctcatattcctgggcatccagctccacaatgtgggccactttgttccagccgaagcccacaaagcgaggatcatagcggggacagtctcgtggcaccaccacgtagggttcatagttggccgcccattgcacacggtacggggcctgagcctcccgccagcgggcatagtctgtgggtgcgtggcctcggggccactcgtggtacctgaaggtgtagagagtgcccgcatccagcaaggccaacagctccaccttggaatgggggaagctgaagcggtagcgcagggtctcaaatgccggcaccaccagtgctgccttgcgccggctgcccagccccagctgctcaatggaggccctgaggtagtcgtagagagaataggcaggcaggaagtcaatgtcactgaggaagacgtaaggcgtgagggcctgggccaaggccacgttgcgaagctggttgacggggtataggggcccctcacggtacaccacatggtaggccacgtcctgccgggcagcaagcactggtgaggcctcgacgaaat

SEQ ID NO: 344127 - DNA, 1000 bp, Homo Sapiens
ttttttttttttttttttttttttttttttaagctgaacataatttattctttttcttggacatgatgtgagaaataaaacatcctggcctgggagtcaaaagattaggttttcttgatctcaaggctgagtggtctcgaccaagttacttaacctttctaggcctccttttcctctgacgaaaaacaagggagttgcactggataagttttaaagtcccttttcaaatttcattgaaacactaagtcatgatcttgaacagtgcctcttgactatgaagatcaactaccattagagtgtaaaattaattctagtgtttgcaattttctgatgcttatattatgttaatgggagttttctatacttccaggagccaatcattagaatttggctaataaaaacataactgagattttttttttttacactgtacataaagtttactttggcattcacagggatgatctggagagagctttttgttatacatgttcttattttattctcttattgttgaaatcctattctgttctcaagtgagtggcaaaagagtagcataaaagagagataacttggttaaggtatttcttactgagataaaagaataatagaagtatttttattctttaatttttttacattttaattttttcaattttcagaacttaattttttgaactattgctaacacttaaaagcaaggattttccataggtttaccactactggtaaagagttatgattacttccaaaatattaatatcgtgccaaagaaaacagagtttgttaccatttttatgtatatagcaatgtattttactagttatcttgataattttcagaaatgggacaaaaatagaagactcatgattctgcttttactatttcaaaccagatgttaagcatgttgaattcaaatttagaaaaggactctgtggagtgccagctacaactttgggagtaggataaataatttcttcaacagttatatatgtaccta

SEQ ID NO: 344128 - DNA, 1000 bp, Homo Sapiens
tttttttttttttttttttttttttttttttttttttttttttttttggggtatgaaagcctttgtcattttattttacaataaaaaattctaacagcatatgaacactctgttcccggcagaggctaaggacgtacaaagttcattagaaagcgaagcattaaaataacaacagctacattcaaagcttctgctcagtactttgcccaatgtgtctaatatggttttaaagactcaccggttggggtttttcacccagagttaaagcacatgtacaagtacttacatatcctccaaatcatagacaacaaggacaataacagcaactccagatgaggctagatcttgtgggcaatttcaaatttaggaatttctttatttttccttggcaaaacatggtgtcatggaacatgtgactgtataaattaattcagcagataggaggagctaaaatattttcctggataaaaccgaattacaaaactaataatttagtaagaatggcttcaagtgcttgtcaagccattttcagatacattatgcatgtgctcctcaaaatcaccatgggaagtacagagggtcttatactcatttgacagatgaggaatcagagaccagtttaaagtgagttgatcaaggtctaggatatttatacctttttcacaatttccagtccattcatatgcctctgattctgtttgatacaaatcttttctcagtttgtgtgtgagatgggggcgtgtttaaacataaggaagaaatgaggagaaataagatggggccacagtaatttatgtaaaatatgttgatggcctctctccataatttgcaaaagtctgaccaaagtcagagaatgaaaacgatcaatttttagatttcacttataatggctctcactgaagtatggtttgaccaatggagacagattctgccatatcacaaacttcccattttttttaaacctgcagaatcagagcaactgcatatcttctaaagtaat

SEQ ID NO: 344129 - DNA, 1000 bp, Homo Sapiens
gggacgtatctgtctttattgcaaccactttgcttatttgtgttggtaagtttgccttcactaagctcctatgaatacacagcagcaagaacaacattcccatggtcagtgacttcttctacaaattcatttatgtttgattaaaatttcacttccagtgttatcatttttcattgctttgctgcactttcatctttgttgaccagttctttcgagtgttcacttctatagaatgtcaagtagatgacagagagacagcataactacatgctctgctgtacgtgaactgaattaacagatgcacagggacaaaccactggaagaatttgaaagaaataacatgactggtcacaatcatgaagcatatctgttatttacatagcgatttgtagactgaagagctagcagagaggtttgtacttcatgtaattactcagttacaatgtgctaactaaaattttaacctagattttaacaacaacagtttccttaccagttttctttccttcctggtaaggaaactggtatttaaactaaatctaggtcactgaaatttgtgcccatgggaaacatgcaaatagaggactgcctacaccctacttgtttatattgatccagacaggcttaacgctgactactgaaaaatagcctatctgaatttatatcaaatagtgaatcttaaagcacccaagatgaaaaattagggcacactgagatggttttaaaatctttgtcatatgataatcaagcttaaaatgtatcttagagtaacagatttttagaaataaagacctttaaaggctccatagtttggtaccgcagattatccagcatgtttattatgaattatttctcctccttcaatttcaatttgctcatacagccacttgcggtcacagcggcattcagctccacacttggtagaaccacaggcaggacaagcatagaaacatcctaagcagtcttcatccaggcagtcacagaggtccatcccactaaa

SEQ ID NO: 344130 - DNA, 1000 bp, Homo Sapiens
gtttttctgtgtgggccagggctatttgggggtattagatcatctcttagccttgtagtgtgatctctcagctggatatatgtatgtgcaggatgaagggagtaggaataatgggtaaaaaggttattttttcagcaggtgagggtgagaggtgatgtatatactgctgattggcataaggaagacagacccacacatgaacaaggtctggcccccctggctttcatatggataaaaaagggggctctggatgcctgatcactatctcttgtttccttgttactctctaacccagtgttcaccagagtgtttcatagtcaccagttctgtgggatgtaaatagaaaggatactgaggtcaaatacatttaggaaacactgccttaatagaaacttcagttgggtctactgcagaaattttcagagcctttaatattctaaaatggcctttctgtctatatatagagaaaatataatagtaacagtatgcaagagtgatactcaaaatgtttaacaactggtatagcatagactccaaccaatcagaatggatttcagccataaactgccagtaccactctcctcttgagaacagctcaggctgaatatcagcccatgtaggatgcattgcttcccaaaagttttgcccaaagaactctatttttatgtgctatctcacagaactggtgagaaatgctctggccattgctgggacctcatctttctagggatggggtcagggcttatgattctggccactggggttcaggagaacggcagccctggcagtgactcctggtagcaccggctgatagacttgaccatagctgtagtggaaacagatttcagaagacagatgttcctctgtcccagctgttccggggactttgtccctggtgggtgagcaggtgcctgtccaggtgatgttttcggccaaagctcttctcacagcgagggcactggaagggcttctccccagtgtgggtcagccagtgtctcac

SEQ ID NO: 344131 - DNA, 1000 bp, Homo Sapiens
ttttttttttttttttttttttttttttttttttttttttttttttttttttttttttttttttttttttttttttttttttttttttttttttttttttttttttttttttttttttattataaaaaagttgttcattggcagaatttcccaacaagttagtatagattacatactctttgataaaagcaacaataaagttaattttttttcctctttagtatttgctttaagagaaaaatcctaaatttcttcagaggaggaaaaaaagagagggagggagaaatcattaaaacttgtagagatttccgatgccagtaaaccatgaaatatgaaagtatatttagcaatcatggtgatttagctcatggtaattggcatatgtataattataatttgcattccagttatttaaactgagatattcttgatcaggttgaacacactgtgaatagaagatctctttccccaggaaataggatggagagagtctttggagaatggcctcactgaactggtaagtcagcttcctccggattttggtaatttccccacttcttccgtaatttctgagtgccctggccattttctggtaagtcatggtcttcctgttgccttttcttttcccccaaagctcggcaagtttttctttgttttttgatacaaactgaaagatgcctttggttttatctacccactgaatacaagatgccatctccggattatacagggattcgtgaaggtattcaaacagtcggagcttcttcctgccttttccccccttttgctggagaagagtgggttgtaccagctggttttcagttatgttctgcagagattgatgaatatttccttcaaaatagaagtccgcagcactgttaattaccgttctccaattatagacaggctcctctgtaggcaacactccatagcagctggaatttcctttgacatgaggacgatggttgattaaagccaggtaatttctgtaatctggcga

SEQ ID NO: 344132 - DNA, 1000 bp, Homo Sapiens
atatatataaagtgccggtacaacgctctgaaaaatagttttgtcccaaaatccagcgcctagggtgctccgggcctagcctttgccagtgaggtccaacggctgcaggaatgggggcagcggcagctcgtccagggcctcggggaagcggcctggagagatggcggtgaccagcacctgcatggcgcgcgcgaagagcgagggcggcgccaggcccgccagccactggaacttgtcctcacccagcagccgctgccagcgcggccggtcgcccagcagctcctggcgggccgagccggcggcacccacgggggtgtacagcgccaggaggtccagcagcagcaggcggcgctggcgcggctccccgggagctgaggcgggggctccggcggcggagggagtggccccggcgtcgcggcccagctggcgcagcagcagctcgagaggcgtgaggccgccgccgtcccgcagaccgggcgaggcgccgtggcccagcagcaggaagaggcactcggggcgcgccagctcacaggccacgtgcagcgacgtgccaccgccctccacgcggctgcagccacgccggtccagcacgcgcgcccgctcctcggccgggaagtcgcgcaaggtgcgcaggatgcggcgcagaatgcccacgcggttgtagcgcactgccagcgccacgtgcggcccgggagccgcgcagcagcggaagccggcactgggcggtgcgagcgcgcgccgcgggaacgtggccagcaggtaatgcgcgtacgcttggtggtcgtgcacgagcgcgtagagcagcgcctcagagggcgagtaggcggcggcgcgcccgcgctcgtcccagtggaaggcctcgctggcgcgcatatcctccagcagccacacgggtagcaggtcgcgcaccgcctggtagaaggcgaacgacgacttgcggcactgcttctgcgctcgcgagcgcgccgcgcccgaggcctcgggcccgccgtccgcgcca

SEQ ID NO: 344133 - DNA, 1000 bp, Homo Sapiens; identical to SEQ ID NO: 160823

SEQ ID NO: 344134 - DNA, 1000 bp, Homo Sapiens
ttttttttttttttttcagtggccattggagatgtttattacactgcttcggctggacacgcaaccatgtgacactaatgtgtcatagaaggtctctgagcactttggctcattttgaatataatttttaaaaatatacacaaggctggctttccaatgtttaaaatcattgtagaaaccaacaggttgaacagaaatataaaagtacagaaaatggttttcctgctttggtgttggttgtggcggccgaggaacgtgactgctgctgtttacacaagtccagacgctgccagggcctgttgggatcagctcagtctgtgactaaaacagctggatcatcgactctcttgacttgccaacaccaacccatttgactgcgactcccacgtgattctccacaaagcggatgtagttctgggcctgtgggggcaggtcctcccacctcctggcgcctgtggtgtctgctttccacccaggcagcgtttcatactcaacttcgaccttctgaagcatctcctggttagctgggaaatagggaatccttttcccgttcagcttgtatgagacaccgactttaacctcacccagtacgtccaggatgtccagcttcgtcagggccagcgcagtgaatccgttgaccatgtgagcatatcttagaatcatcaggtcgagccagccgcagcgcctcttcctgcctgtggtcactccccactcgtggccgcgggtctgcagcaggcctccaatctcgttgatctgctcggtggggaaggccccgatgcccacacgtgtggtataggctttcaccacgccatacacgtcacctatgttctgcggggggatgcccaggcccgtgcacacaccgcccacggtgcagttggatgaagtcacaaaggggtaggtcccgaagtcaatgtcgaggagggcggcgttggcaccctccaccaggatcttcttgggggggccgtggagtgcctcatacataaagtaaacaccatctcgg

SEQ ID NO: 344135 - DNA, 1000 bp, Homo Sapiens
ttttttttttttttttaaaactaaaattggttttaataaaagttttggagtcatctaaatgagtaactatacacattcctcctctccagcaagtatacagaaatcttcccttactccaatttgacgctgcaaaatcatacatgcaccccaaactgatctgttattgaaatttctttttctggtctcacccattactttaacatatcagaggaattaacataacagcctagagaacagaaataagagataataggtgcttcagtaccacccaaattatctactaagaccacagtgtgggcaacagaatgcagattcatggtagtagttccttgaatgaaagagttcagacagaatcttccacaaacacaaatttttgcggtatccaaatcttggcagagatggaatggaatgatatgagagccatatggaatcctattatgtaatatggttcgtgcagaagattccaataaagttaatggtgcttgcagctttattactggaaggacttttggttgttcaaaagtatttccaaaaagatccaagtattcaagggataaatttctaaattcactaggcaaaaatggaagcttatttcgagctgctgacaaaaagcgaaggtttattagttgtcctatcttgcaaggaaattgaatcaattcattatcgtcaagttttaaattcttaagttcctggagctggcaaaactgcacagggagtgccttgattttgttcttgctgaggtccaaactccgaagtgacttctggagtgtagaatgacacaaggctacactaaatgactccaagtgattgtcattcaggttaagttcttgaaggtgtatgaggtctccaattgtagctggaagcttttttatatggttgtgactcaagtctaatttcctaaggctttttaagcaaagcatacgcatatcaactcggacaagcccacagtaagaagtctgaagatgttccaaggaatatggaaaattcttacttagaggat

SEQ ID NO: 344136 - DNA, 1000 bp, Homo Sapiens
tttttttttttttttatatttcctttcctttttatttttaaaaacaatttccaaatacaaaacatggattattcaaagtggatttttcctatacatatatataattctgctgcaaacagtggatcaaaaagcagaagtgttcttagcatgattcatctttgaaaacccatagaactattcataaatccaattagaaagaacatgtgcaaaaccaccaacaatgtcagcaaaacctcaaagatctgattttggttgaagtagagagaaaataaacataaagcagtacctgtttacagtaattaaatatgttttttctttatcttctttcttaaatatgtctttttttaaatgtttgcaagaaactctaagggctaaggaaatgcactgcattatgatctgggctccttagagtacaaacctcaccaggcttaagcatcatccataagaaatggtggattacttaatgacttataagtaaaacagtcattaaatgatcctttcatactttaatcctcttatgcagagactgagatacttccatacattccaatatctgcaactttggttctattaaagtatttgataaaagcaaaacaattttgtgaccacagaactctatggaactttttttccttttaaagtgtcaggtgaacctagcgtgataaggcaatgttgcctacacatccgcgacccagcacaggagggacagcacagacagggcatgttccagctcaccatttgttgtataatactgactcccagccaggggtaacactgcttatgttccactgtaccctacatctatttcgttacctgaaaacataattttgtataaaaatatgattgtttctttagaaaataatatatagtttttttaataaaactgggcagatagaaaaaaatggtatatcaaaatatggtaaacaaatgttgtaaaatactaaatcattaaaaatatcttatagaaagacattgtgctatgaagttctctcctgaagtg

SEQ ID NO: 344137 - DNA, 1000 bp, Homo Sapiens
tttttttttttttttttttttttttttttttttttttttttttttttttttttttttttttttttttttttttaatgacaaagacatggctttaatgttatccaggagacatctgattcacatagggttactgaacactagaatctgatcttgaatctctcatgtcaacaacagacaaatgcattacaatttagggacagctgttttctgggtacctcccaggtgtttgcagaagaaggctagaatttgcttccaggcatcttcctgggccttagaatgagccctgggctccccaccccatataacatgtttgttcagtaatctgtgaagggaagctgggcacagggggaagtaaggaggctcgatgtaatgcccagtcccagggtaacagatgatctggggtttttcctttccatgggcctgtaaccgttcagagactgtttgggcatacaactcacttctccagttatggtcatcctgaccaacaatgagcaggatgggcccctgggccttctctattggaatcatgctggggttcttgtaccctcctacgagagcattccttatatccacgatgtccacgaggcctgagaaagctaccttgattctcctcaggtcatagcccaatggtggaatgctactgtgcttatagttgatggctgtgttcccactgatcccagatccattgatggaaactgtggctgagacattcttcaagaatgaggccattgagagacaaatatcagctcctagagaaatgcccaaaagcccaatgcctgggccttttacctggggatgttgaagcatgtagcatacggcttcttcgaagtactccagggatatgttgtccatgttattggggagatcttcaaagttataataagctagagccaacgtggcaaagccatggccagcaaggaggctggctcgatattccaagaggccccctccaataccaaagatgtcaatgatccctgggaagggtccaggtcctggcggc

SEQ ID NO: 344138 - DNA, 1000 bp, Homo Sapiens
ttttttttttttttttcttgaaatgtcaattactgctatgctatcaaaagctgacatttattacaaatttctgaaatccttcataagcaagtatttgattaaacaaaaatggaaaatgttactaggagatatagtttatacctggctgttgagtacattagtatcagagaaattcatgtaactatatttaaacagaacttcagtttagggtcttttcagaccacaattatataacttgttcaaaatcccactagtttcttcttaacagtcttggtaagagatgaaactgatatacttcagaggccatttccctaggagtactgcttttaaaaatcatgcaaaacaaaagccaaatagtgatgttatattttaacccaggctgcagctatttgtgttgatctgaaagcttacaagtaaatccactgttaggaatgagcactgtaaaagctatcagctatcagcgtgaacccttccatggtttcctctgatcacatgacatcattatgatttccttctccttgcgtaagtgggtaaaggtcaagaaatgcctaggcaaatatgaagagaagttattttggcatagaatctcattttttactaccagctcctaacgtttttctcacaatatgcatacctattagcaggagattggatttttatttataggtccacataaagcttcaaggaaataaccagcattagtacctcctcacctgaaaaaggcttaagtaaacactaattaaaacatttaggatcttagttgtatcaatacttctgtacctgaaagctcttttaaatgtaagggttttctttttattgttttatttacctaggattctaagaaactgagaagtcatagctttcccttaaattatacatcatacatacattgtaagaatatagaaaattaaataaatcaaataattaaatattaagttaaatgcatgactacatatattaaatttggaaattcaaagcattaatagaacagagaaaccag

SEQ ID NO: 344139 - DNA, 1000 bp, Homo Sapiens
aaaaaacaaagaacactttattcccttgacagtttctgtacagcgacaccaggctgtgcaaagcccagtgtcgtcttcactgagcacattccccaggacgcctggtgcagccctcctctgccccaggccccaactagccacccctgtgcccactagcaggccctgtgccttcacagggatgaagccctggcactgagaatgcctgggaggcaccgtttgctggggagcagagggactgacctttggcttctttgtggctggaggtgttccaggcctggtgagggggtcccatactgttctctgctgagccctctgcacactttgggggatcctggctggcggtggtaggtgggccggagactcagttgtccgtcagctggccatgtccccattttatggacaggcagcctgaggcccagaggcggaaggatttctccttgccacagctgcatcacacttgaactgtccagacctccaccgctggcctgtttgctccccaccctagtcccgcaggctgatatggtgcctccagcagactccatggcttcccggagggtgcagggtccccagttcaccctccagcaggagtggcagcagctggggtacccctagcagtggcatgtggaggagctggggtatgcagaggatccagttctgtgacaccaggaggcacaccaagttttcctctgtccctaacacagaccagaggggtggcccaccacccccccgggtggtggatgtgtggagttagaggtccctgggtggccccttggttggccatcagagacccccgggagccagcctgcagggcaggagcacaatgacgtggccaggatcccagaaaggggctggagtgtctgcctcagtttccaggataacggtgcaatggcctcagccaggccaggtgctggctgctgctgggaataatctctgagcttcgtgactctacagtgtgggcatgagggtccttatttcatagatgagaacactgaggcaagtg

SEQ ID NO: 344140 - DNA, 1000 bp, Homo Sapiens
ctcagtgcagctggtttttattattaaagccaaggttggaaaatggttgttcccctgccctctaggaccctcccacccacctctaggttgatccctttatatcctgtgaaggtgaaaactagattcgtcttgaagagactcagaaacgctcatgctggaatgagaatgaggacaaatgacataggctcagatggtggtctccgtgtgattgtgttggactccacccaggattcctgggaaagacggcttaggggtggggctggacagcccctgctcacagtgctgttccctagagtccagggtgggcgtcaggaacgaaggcaacggaagaggctgagctggcccccccacactctaccctgctgaagctgggccacaggctggtttttgtaaaaatggttaaaaagaaaacccagccacgagcaccaccctcccctgagcagggcgagaagaggcgccagctctgggctttgaggtctgaagcttgtggcctcctggcctggcgtcgcctccctggaggcaggcagcaccctgagggaggccaggtgggctcctgggccccgcgtgtggcccttggcagcctccagggtcccaggagagctttgagatggctgtctcccctcatctcacccagcccatggcaggctctaggcctcagggaccctgtgcagcttttgctctttggattccaaagatctgaacttgtcctccagcatgggcacagtgggctggaagtggatgacaggcctgatctgaaagacagtgaagccctcctggttcttctggttgaacagacttaccctgtgttccagctcggggctggtttgggccgagcccgctgggctgggccgggcgaggggggctgggtccaaggccttctgggaagggcaggggtcctccgacagggaggacagcaggtcctggactgtggcctcctccacctgctgctgggatggcagcggcgggggagaagggccgggctcagaggacggctcctcgc

SEQ ID NO: 344141 - DNA, 1000 bp, Homo Sapiens
gcctacctaaggtctgaaatgatgtcagaagccattttcaaaagctagttcgtaacaggtcaacaggtcagtcgcacatatgcacttaggcacagaagcccaacatttaaagatgtttgtgtgtacgtgtctgtatacgtgtatacacatctgtgtatatgtttgtgtctacacatgtatacacgtctaggcgtatatgtttgtgtctacacgtctgtgtatatgtttgtgtctacatgtgtctatgtgtttgtctatatgtccatatgcgtatatttgtgtgtgtctgcgtgtgtgtgcatgagtttggctttgactttgtttcaaagttcttagctagagcctgtccacatcttcagcccttcagacacaaatggtattcaggttatcaaggggattctttagccagggcttaaaaactcaactttctttctttccaaaccttgactgactgagagtcacataacagcagtgagcacagtgagaaaagtccctggattagaagttggaaaatatgattcagggtcctggttctgttttaagagaggaagtgaccatcattagcaaactgtcatttcatctgccggacagtttgaattcatttcattttctctccctttaacaacaaagcaacattaatgtttaacctttgtgtcacaccaagaaaagctgggggtgtatttctacaaagacagacagtctccaaccctttatggagcttttgatctaaaagagacagaatgcttccaagactataaaggacacccttagtcaaatcttctacgaagaggatcccattttactcacggaactgctctagatgctcatcactgttggactcaggcatggccgtgatggtcaccaagggacacggattccctcccagcgtctggcagagaacatcttgccggaagtagacctctttgaggttgacactcttttccaggatgtcaagatgagtcatgagggctgtgtaggtatagggatagtggtaggccag

SEQ ID NO: 344142 - DNA, 1000 bp, Homo Sapiens
ttttttttttttttttttttttttttttttttttttttttttttttttttggtttcaccagcgtttaatgtgctctgatgttgaccgtccctctgagtgttctggggaggagggggtggggcggagggtcaggaaagcaggctcagcttccagggtcagggagttgtgggcccagaggggctgtcacagtggatgcaccttgccccctccctcgccagacccgagggtagggcagaggcacctcctcgccagcctgtgggctgcacccacagggaatggaggggaggggcaccattaccactggacccaccaagaccccgccgcctgggtgggctgtccacaggcccttccgcccagcagcagtgacgctcagggccttcccagctgtcagccactgcccgttcctgcgcctctcgtgcacctccacatctggtttgaggtcaggtcatttcctgtctgtgggcccagctgctgtgacacccaaggggagggccggcgcccccgaagccaggtcagccgtgcacccggcagagccccgcagattggctccagcagagcttggggtggggggagctcggtgtcaccaacaggcccttgaggacactcgtgtggagaatccctgggacacgtggaggacccccaactcctgagccccgtactccgtactgcagggagcaggccaggagccacgggccttggggcacagggtccttctcagggacaggttcaggcactggctggaacaggctggacccctctacccagcacatgtgggcatgcgtctgggttccgagggtggggaaatgtggaaaggctcctgctggccggcttaggcctgctgcccttggagccttccatatacagagagtcccacctccagcaagggttggcctggactctccatccccctgctgtgcccaggactcccccagggacaaggcaaccagaggcccagacccctccccagcaaagagaagcaccacgggagctgtctcccaag

SEQ ID NO: 344143 - DNA, 1000 bp, Homo Sapiens
tttttttttttttttacatttactaaaagtttatttcaaatctgcctccaagtccatgtgttctgaaaaggacagagggggccttggagtgcagccagatggaaggactttgaaggctgtccaagtgctgctttcagagtgcaccaagtttttattgtccctgactgtggctccctgcctgtttgtcaggcgggagcctggagcctgcacagggacagagctggtttcatccggcactccctagccctggacaccctccttgtctcgcctgccctcctgcaggccttcactctcccctgaggctgtcctggcccggactgtggggagcacctccaccccccggagcaggtgcacacccaggtaagcaggtccaggggctggggtgggcagggctagcttttggatcctgagtgtcactactctctcctcccagggatgccctggacctaagtgacatcaactcagagcctcctcggggctccttcccctcctttgagcctcggaacctcctcagcctgtttgaggacaccctagacccaacctgagccccagactctgcctctgcacttttaaccttttatcctgtgtctctcccgtcgcccttgaaagctggggcccctcgggaactcccatggtcttctctgcctggccgtgtctaataaaaagtatttgaaccttgggagcacccaagcttgctcatgtggcaacatggcccttcctgtccctttattgatgtcatccagggtcttaacgcccctgaggctgagccctgctgcagaacccagcgctcctggccttgggccagcagctgaagccccatgctgtgtggagcaaagaggtttcctgagcaggcacatcccccggtgggtacctggagctgttgggagtatggcactcaaggtggagggcaggcacggcccaggggtcccaggatctgaggccgctgagctccctgtgtcagtttcctggaagaagcagctgcagcccttgtgcctgtggc

SEQ ID NO: 344144 - DNA, 1000 bp, Homo Sapiens
gatggttaaaaaaatttgggttttattgtttttgctaaataatactaaaaaaaaatttcattttgaaggcagggcttgaattatttaatttgatccatttatttaattaaaaaaaaaaaggaaggggaaagagatcatggccaaaaaaatagtagttaacccccaccccacccccaaagctctagccagtcatgtgagcatcacccacatcccactcagtgcctgatattcggatggtggcatactctgccccaggagactgcctgaaggcacggggcaatgggtgccaattttagctctcagcaggttagtcaaccagacaaactggtgggctaaagtccagaaattctttccaggttttctgctcattggctgagcacatacaaactgtcataagcctgtaaaatttaaggggagttggggtggggcgtaagagcaaaaggacagcaggagaagagaaattacgggtcacccaagtttttcctgggctagtggctctggatatagatttaaagagaggtcagagtaaatggactccaggtttcttatcaaagaaaactatccctcaatgaggagctgagatgtgccatgcaagagagttcttcctgcagaggcacaggagaaagggcagctgactctctcatgtggagagagtggcgaggaaggtcttctagtaccatgaagtaagacaggcagagggagaatcctgaggtttgggccaaatgtgagactggtacacacacagttaaagactaaaaagccatcaggaaccctcaaagccaaattctatctgcacactggctctacaaagttcgcagcaagaatctcttgcaccaagtcaagttagtggcctggctatgatggatggtggggagggcaatacatttttattttcagagggatgaggtgggaagaacagccatgatctagtaaaaagagacctgcaagaagcagaaaatatttagagaacattttaatatatattttcatatatatattt

SEQ ID NO: 344145 - DNA, 1000 bp, Homo Sapiens
tttttttttttttttttttttttttacccggaggaaaatggatttattgctttataaaaaagaagtctaataaaactgaagagaaaataactaaaaatccaaacacaactcacccctctaagcacgcccaggaggtctcaagacacacttctgggggcagtcaaggtgggcgggttggtgggccaggcggacgggcctcccccgtcatcagctccagggccccacggagcccgccggcagggggtgctgtgggcctgtggccttggacaagctcctggccccacgccaggatggctcctgggcactggcccagctgcaggcctggcggctcccgcctggtcagtggggataagggctaactcctagagcccaccccgaccccacacacccctcggacccacccacgtccccaccccggcctggacctccacgtctgccggccacagcctttcgtccacctccacaaaagcagctgtgtgtatgtacggggtgccctggcggcggtcctcaaattcccttcaggtggcagacagaacgagggtgacagtgaaaacgtgtccgcggcattggccctcggggaggaggcgaggggtccacccagcccgctaaaccctctccagggcataagccaggtggggcttctccaccggcctccaacgggtgggcaggccctggacaggcgacagggggctggaattacaaaggaattagcaccgacaacaggaagcgggtccttccttcctcaggcagcctcaggctggccggggagggggtgggggccaggcgcgggcgagacagtgcaagcctttgtcctcaggcaggtacggctgtgggcatgcagccgaggggcaggtggcaggcaggggatggcagccccctctgctttggcaagaggcagaatccagacactggcgggagagcgcctgcctgccgggcgttcctggctcctgctgcaggcaccacagagaccccaggccccgggtccccggggggcggcaga

SEQ ID NO: 344146 - DNA, 1000 bp, Homo Sapiens
ttttttttttttttttgggggtcctcaaataaagctttatttggaatttgtaatactgcaaccagaaccaatcagaatccattttttctagggagggttggtagtataaatgagagtataaacaaagtaaattcaaggtatatgcatgcaatgactgccaaactcaaaccacttcatatttaatcatttacatgatattccacaaaaggcaaaactagagggacaaagaatgaatcagtagttgccaggggctcagggtagaggaagaaatggattaccaaaagggcataagagacttctgggggataatatagtctatatgttgtgtatagtaagggttacattacattatttttaagaatccaaagaactgtatacctaaaaagagtgaattttgccatatgtacattatacctcaaaaagcatgaatgtttaaaaagtgtgatcaagagagtcgctgaagatacatgagaacataacagatagtgataaaaattctactggatttgtcaaaagttttaaaaattattttctaataatttcagaagtcaaatatgcatactgaataatatataatctagtaattttctagcactatcaagtaagactacctaaaattttgagtttgggttaagcttagcaatatttgccttagaattcaaacagaagttatgtaaactaatcttgtgttgttttatattcatattgtattgcttcttacttacctgtgctttaactatcgaatcctgtattgtttttaacatgtaaaccactgcttgcctttctagatctgggcaataagtacatattaaataaaacttacctgcagctttaggaattgtcaatatatcggataatttagtcataaattcttgaatgctaaccttgccactttcatgttcaggtacatgtcttaacattacagtaagtatagcattagctgtatgaaggtccttgtccatcaataatgtcttgaggtcagagacatcaactagatcat

SEQ ID NO: 344147 - DNA, 1000 bp, Homo Sapiens
ttttttttttttttttctgaagagaaccacatattgatcataacattttccatacatacgtaataacttacattttgggacagagggagttggtatggcccaccttggtccatcctaacattttccaatcaagtcaaatactatctttggattaattagctgttgatggaggtttgatagagggaatactgcatgatcttctcatgataagcctgacttctatatctggtagattatcctgcttagtctctaaacacccttcatcagtggctgctaaatgaagatcaaatcgaagagaaacagactttttcctcaatcgagggttatctttaaagaaagaaccttcccattctttaataacttcatccactttctctgtctgaatagtgccatgagcttcagtgctctccttaacgatactcccatttaagattgcctgtttggttactgtttctacattttcattctcatacttttgtgggacttttgtagtaaaagatatttcatttataatggctgatggtaaaacaaaaccaactctacttgtggtaggctttttgtcttttttcccaccttggatacaaccataatatctgatttcttctttttctaggaggtggcgataagttgctatttcttgttccagcctcatcttcgtgttgagaagcatctcgtgctcttgaagctgcttttcgatgccgcgccttacttcctgtagctctttttctagtccttcaatcacagtctctaggtcttgcagctgcatctggtaatgctgctcgctggcatgtagggagttttcaaggcccctttccacagcatggagagattcaatttccacttgcaggtggtgccactggcgtcgggcctccttgagttctgcttgagctgccttcaaagcctcttcatctttgtccatttttttgcttatgtcttcttctagctggatccttgttgagagcaccgtctctatctgatttctggtgaggatcttttcata

SEQ ID NO: 344148 - DNA, 1000 bp, Homo Sapiens
tttttttttttttttttttttttttttttttttttttttttttttcaagaattgacacccaagaccatcctttattgtagtattagttcatggtaactgcatgaaaaaacatttcaggaggaatttacaatttccagcttaaagaacttgcccaccaacataaccaatttatgaaagtcaattcattaaaaggtatagaacctcttgttgggcatgatggcaagggacaaagctacaacttggcctgtgcctttggaagctgaggcaggaggaccatctgagcccaggagcctgagaccagcctgggcaacatagagaatccgtctcaacaaaaaaaaaattttagccaggtgtgctgtgagctgtagtcccagctacaaggtgggaggattgcttaggcctgggtgattgaggatgcaatgagctgtgattgtgccaccacactccagcctgggcaatacagcaagactgtctcaaaaaaaaaaaaaaaaaacccaaaaaaactcaagaatgtaatgaatgatacccaatgtgccttttctagaaaaagttgccaaatatatctcttggatctgctgagcatgtcctctgatacataaggcaagcatgtttctacacccagtgttgatgccagttagttttcagaatccaaactgatggcagctactggtccttgggactgacatcctctgggaatataaccttctcttgggctgagatgctgctgccagctctaaaacagcactctgttctcaaaacctcatggcaggctcctggctccaatactcagctgccaaacatgatgctgattcttcacgaatttgcaacctcgtggctaccccgtcttcagcactctgcagtgggtacgcaatccagttctctcgggtttgcacacccccactgtgggccggggaaccgggtcccggccttcgcagactccaggctctggcagatgtggccctaccacaaaagagtgatccatgagcctcagccacggcag

SEQ ID NO: 344149 - DNA, 1000 bp, Homo Sapiens
tttttttttttttttgtccgtcagaaatctaattttccttccaatgctgactgctttggtgctgtttttgaaatgtcacattattttctcccatttcccccctaatttttcagggctcccgctttgctggcttggccagttcttgggcaccgagctgctgtgcagctgtgaggggaatctgcccctcttggggcttcgggatccccatgagggaaatgggtggacctgaggactcagagctcctgcctttctgtccaggatggcagtgtcaggcgaagtaggcataaaagaatatgttgacacacatgaggaggatggcattgaagccacagacacgggcccagaaggcgtgtttctggggtgtttggccatcacctgctttagttcccaagggcacatcctgagccagggtccaccaggtaaggttctcaatctggacactctgtgggggtggggtcagcaggcttccagccaccacaacagcaccactgagtgcaaagagggcgacagcgaagtgcaggtagtggatgctccccaggacggctggccgcgtgtctggctctccgcacggtggggctgggttcaggaattccaggaccagcctcgtggcccccaccaccagccctgctatcaggccccagaaggccccctgctcgttggcacgtcgccagaagacgcccaggacaaagactgcagtcactggtggggccagggagctggtcactgactgcatgtagatgaagagttgcccgctgttggagtcctgcaggacggggatccaggccacactcacgccgatgagtgccactatgaccagccagagatccatgaccacgaggcctaggagataccgctccaatggtggtgtttcgggcaggaggaagctgagacggctttgaggggctgggggtgttgagggtatcccagtgcgtcccaccagcaggagctcccgctcgccggagcggggacgcagccgcctccagatgtccatagtgaagag

SEQ ID NO: 344150 - DNA, 1000 bp, Homo Sapiens
cacaacagaggtttatgtttgaggtgatcaccactaatacacactttgaaaagtaccatcaccatatatatatttgctttaaaaaaattatgacaagcttcaggtaaaaataatttttaaagggtccatttttcatttacgtacaatcagtacatcttatttacatatatgactggatctttattctattttcttcatataagatattttaactggtaggtaactgctctattctgtttttatagaaagactaaacaccttatttacaggcagttttgatgatgctagtttgtctccaaattacgtactgaatatagttaaaatcttaatgaataacataaaaattaagatccggtattaacagactattttatgggtcacactggatattcaaggagtcagctgcctagtgtgtgtcaattacagctgcaacaaaacagaaatcaagtgtggttctgaagaccttgaaaaagaagtctgacttctaagacattaaccactgcttaatactgctactgatggcaaattcttaaactgggttcatttcttcccttgtaataacactgatttttctagtgatatttaactttaaaaaggtattttacttctttaaccctcagagaactagtatatttcggcaactaaccaaaaaaataatcagacacatgtatctttgcccatagtttccaaagggttaaagtgcaggaattttctatactgctatataaggcaccttattccacttttttcttaaaggaaactttttctttggtttcttgtaacttttcagtgagtctatcttttgtttcttccattttctctgtgataagctcctttgtctcttccatcctgtcctgcagatactccttgacgggtggcggcgtggacatgtagccatgactgcgcagatacttcacagtgacagatgttcctcccaaagtcacggtataccgagcaggtgttgcaatcttaaacaaggcatatgctgtgagggcatttc

SEQ ID NO: 344151 - DNA, 1000 bp, Homo Sapiens
cagaatttacaatgcattgtgtattataagtaatctagaaatgatttaagatatacagaaaaatgtgcctagattatatgcaaatatgctgtttttaatatcagggacttgaatatctctgaatataggtattcctgagggtgctggaatcaattcacctcagaaactagagaagactgtattcaaaagaaactgaagctactaaatgctttaccacattgtttacattcatagtggttctctgcagtttgaaatctttcatgtaactgaaatgagttaggactagtaaatgcatttctacattccttacagtagtaaggtccattgctagtatgttataataaccacctttgaaagtttgctagagaaagaaagttttttcatattcctcacattcattatatatatatttttgaagtatgagtttggtcatgttttcaaaaggtactgaaaaaaatggaaggttttagtatatttttatattcatacaacttttttcagtgtgagtctcttatgtatttgtaagaagctgaaagtacttaaggctttctcacatgttcaacactcataggggttttctctagtgagtcatttcatgtttatgaaaggaactgatacaatgaaatgcttccccacattctttacacttatagggtttctccatactgtgggtcctttcatgtttatgaaaggcactgggacaatggaatggtttcccacattccttacatttatacggcttctctccagtatgaactctttcgtgtattcgtaagtaacttgaatgactgaaggctttaccacattccttgcattcatagggtttctctccagtgtgagttctttcatgtctttgcactgaactgggataatcaaagcctttcccacatatcttacatttatgaggtccatttccagtatgtgttatcatgtgtcttcgaaagcttgagagatcagataatgctttcccacattgctgacaaccatagggtttctctcc

SEQ ID NO: 344152 - DNA, 1000 bp, Homo Sapiens
ggcttgtggtcatatttattactacaatttattacatcctctttgacaacagtttttttagtactggtggttttgggcaacacagcaccataacagcaagatttaacttcggggattataaaagaatgacaaattatggtcaagataaaaattgtggctgggaacagtggctgaataaactatttttaagaaatatgtacagaaatctttgctccctcaaaaatacacattgtcaatcacatataatcaaagataactgaaaatgaactgaggcattacattctcctgtggataacaggaaacactggacatttcctgaccagagcaaggtgttgcttctcacatgagagtcctggatgagaccagtcactgcacagggcagcagagctctcatcaagttggttctgatggcagcatagtagctgtcaggctgaatcaagaacaaggtcactaccagcaggaacaaaggtgcatgtaaacaaatcacacctcctaccaactcaatctgcagactaggggagttgagcatcagagaacattccccacccatgacagtctgcattatctctctggtatgtacattacaatacttaaagaaaaaccaaactgtagatagaacttgaatgtggagcttctggggacatctttggaaacctacacctctgaaaaaaggaaagtcaagagatttggaggatactcttgattgacaagccagagaatcaggaaaatgggctagaatcagggggccacacagcccatgtgaatttggctggctctaaaatgtgactaaggccttcctcatgtctgccttcgaaatcatatgtaagataggccaccagtgaatcccagcgtggcatcacctaactccatctctacattttattgccttcctttattgacacttcaagctgggagggatgcttgaggccaggagttcaagaccaacctggacaagatagtgagaccctgtctctattaaaataaaaattaaaaaatagca

SEQ ID NO: 344153 - DNA, 1000 bp, Homo Sapiens; identical to SEQ ID NO: 160825

SEQ ID NO: 344154 - DNA, 1000 bp, Homo Sapiens; identical to SEQ ID NO: 160826

SEQ ID NO: 344155 - DNA, 1000 bp, Homo Sapiens
acagtgaaagcaaatttattaagaaactaaaggaataaaagaatggctactccatagacagggcagggctgctggttgcccatttttatggttatttcttgatgatatgctaaacaaggggtggattattcatgcctcccctttttagaccatatagggtctaaaggttaacgtcctgatgttgacgtggcatttgtttttttgtttgtttgtttgagacagactctcgctctgttgcccaggctggagtgcaatggtacaatctcagctcactgcaacctccacctcccgggttcaagcgatcctcctgcctcagcccccctagtagctgggattacaggcacgcgccaccatgcccagctaattttgttatttttagtagagatagggtttcgccacgttggccacgctggtcttgaactcctgaccttaggtgatctgccctccttggcctcccaaaatgctaggattacaggcgtgagccaccgcgcctggccagccatggcatttgtaaactgtcatggcgctggtgggagtgtagcaatgaggacgaccagaggtcactcttgtcgccatcttggtattggtgggttttggccggcttctttactgcaacctgttttatcagcaggttctttatgacccgttatcttgtgctgacctcctacctgatcccgtgacttagaatgctttaaccatctgggaatgcagcccagtaggtttcagcctcattttacccagctcctattccagggggagttgcccaggttcaaacgcctcttacagaagcaccggactgttccaaagcaccttctgcttcccttcttgtcctcctcccacgatggggagctcactacttactacctctccagcagtaccatctgtaacaaagtcctctctcagcctgggggagatctgcctgggtgctccctacacacacacacacacacacacacaaacacacacacacacacacacacacaccccttctgaaaccaga

SEQ ID NO: 344156 - DNA, 1000 bp, Homo Sapiens
attagtcttgctagcggtctatcaattttgttgatcctttcaaaaaaccagctcctggatctattaattttttgaagggttttttgtgtctctatttccttcagttctgctctgattttagttatttcttgccttctgctagcttttgaatgtgtttgctcttgcttttctagttcttttaattgtgatgttagggtgtcaattttggatctttcctgccgtttacagtacttttgaaaagtaatcattttcattttcaaatgtgaattttcatgaaaacaaaatcagtagttcatgctttagaaatttatctttggtatagacatttgggcaaaaacattcaaaagtaataaaggagccccttgagttgagaagcattacataaacgccagaaaaaaaccattgatctcaccgagaactcctagaattcctgatcggttgtgccacacagaatatgttgccttgtgggcctctgtgaaattccaaatgggtggctcaagagcactcagtgcccagctcctgtgtgagtccccagaccttcttcatgcagttaccagaacaattgtttaaaatgcagtcagatcgtgatactcttctgcttctggagaggccaaatgtcacacctttgatcttagaataaaatactgattccttcctggctttacaaggccaggtgctctgactcatgccagccccaccatgcctgcctttggtcacttttccttccccttcagctatttgcattttcatccttcggggacctttctgtggactctacttcaacattctgtttatttcctttgaagcacttgcttccatctgtaataactgtgcgtgtttatctgtcgttcatttcttgtctccaccattaggtggcatccccagggggaggtcctcatccactttgctctttgctgtgttcccggtgcctaatgagcattatttgtcaatgagtgagtgagtgaatgaagtgagcaaaggaacacactgagcagtgaca

SEQ ID NO: 344157 - DNA, 1000 bp, Homo Sapiens
tttttttttttttttttttttttttttttttttttttttgaggaagaatagggtttattaggtcttttaaaaaaaaattcactaacttttctctagtggtctcatcttctatctgtaaatggctcttagaaggaaatgttttccaggtacagatacctaaatgggtatctatctcacaatggcctggagttctgttccctcctcattccttaatgagtgcttgtcctgctgtgcccttgcattgtttaatttgttgctcctttttacgaaactcagaaattcttgatccataaagtagggcttttctgacgatccatcatttgtttccagatcaacagcaaaacacaggaaaagtgcatccagcacagtttcaaacacagataaaaaactatgggctactaagtaggcaaaaaaagctaccaataacagagggactgcccacacctggaatgcccgattgtagttaaaagccatgagtcctccaaaaacagtgaaacacaccactaacacctttcctagaaaaattatgaagtctccaaagcagttaatagatgtaaagtgacttgagttcttggacaagattttgaatgcatcttttgctgatgtacagaaatctgtcccattaatagcagttgtagtatatgcattctggttgagatggagcaggtatttgtcaagacaccagaaacagcagtagcagcatcggaacaggtacctggacaatgcaccatgctgctgttctttcagtgcgttttgcatgtacatgacaatgattctcggaatcctcaccacagagattaaaaatgaccctttcacaatggttccttgatggtagaagaagagaatggagagagacgaaaggatgggatgatcaggaggatcatttttacttctgttgaaataacaagtaaccactgccccagctatagtcatttgctggcacgcaaggatgaattcactagtccagatgaggccaattaaatggtacgaccacatgtac

SEQ ID NO: 344158 - DNA, 1000 bp, Homo Sapiens
ttttttttttttttttccaacagagacaggtttattttgggaataaacctgagaggggcttctggccgatttcggtcagggacattctcttacagactaagggcatttaagggtttaggaatggggagcctaccgcaggctgcgaatgtttctgtgtgaaggagagttttattgcagagttggaatatctctggctggaggggaggttattctcaggattggcatgtttctggtcagatgggggtttatctcatggttgaaatgtttctgctcatactgacatgagccattaggctgatgttttgggctggtttttaatcacggagaacttaaaatggccatgtttgtccaagatggcaatgctcctgctgtcacacccacccacccacagggtactggggtcgctgcagaacctggccgccttcgcagacacgttccactgtgcccggggcacccccatgcaccccaaggagcgatgccgcgtgtggtagccaaggccctgccgcgctgtgcggcccacgcccacccgctgctcggaggcatctgtgcgaaggtgcagctagcggcgacccagtgtacgtcccgccccggccaaccatgccaagcctgcctgccaggcctctgcgcctggcctagggtgcagccacctgcctgacacccagggatgagcagtgtccagtgcagtacctggaccggagccccctccacagacaccagcggggctcagtgcccccgtcacagctctgtagagacaatcaactgtgtcctgcccaccctccaaggtgcattgtcttccagtatctacagcttcagacttgagctaagtaaatgcttcaaagaaatcagaggccttgcttgtctgggagggaccagggtgggtaaacaggtagcagtggtcttgggcaaaacagctgcccgggggtgggagagagtgacagctgggagctgatggggagggagccagttccagtcaggtctcctagggtccaatgctagggcc

SEQ ID NO: 344159 - DNA, 1000 bp, Homo Sapiens
gttgggagtatagattatgtttattttctctataatttccagggttttccaaaattttacaacaaacatctataattttatgaacactccccatcttatttttaaaaagaaaaaagttggggggcagagaaatgcccagctcagtactgagatccatcaagtgaggccagccggtatctgtcacaccaggcagaggccccgtgctggaagccctggaggttaccagctccaagcctggtatccaaggcctcctgggcagccttagcctcctccttccctttcctcccaccagaccctgctcctgggatgtccttctcccattaccaccacaaaatcggactaatttttcagggcccaacaccaattctgctaatttttttttggctcaatcttggctcatcacaacctccgcctcccaggttcaacggattctcccacctcggccttctgaatagccgggattacaggcacctgccaccacgcctggctaatttttgtattcctagtagagaccgggtttcgtcatgttggccaggctggtctaaaactcctgacctcaggtgatctgcccgccttggcctcccaaactactgggattacaggcgtgagccacctcgcccagcctggatgaaggtgttttcaaagccctacctccccctgttgggacgaccctctgtctccctccttggaccactggcggcactttccttggacctgctttataatctttatcatgtcctgccttgtcctggagttgtttgcgcccaggtctgtttctcccactggactgaggcctctttgcaagcagaacctgcttatcagctgcctttgtgttcccagctccatccttagcctcccacatgctagacttcaggtgtctgttgaacttacatgaattgaaactatgggatcctaaaagaggggtgcgatgtatcagtttatggcagggctcatggcccttggcacttttgacatctggggtcggataattctatgtggt

SEQ ID NO: 344160 - DNA, 1000 bp, Homo Sapiens; identical to SEQ ID NO: 160827

SEQ ID NO: 344161 - DNA, 1000 bp, Homo Sapiens
ttttttttttttttttttttttttttttttttttttttttttttttttttttatactacaaacctattttatttatataacttcttatgaagtagattttgtacacatggtaggctaaaaattaaaactgcttttccacaaaactgataaattactagattcttggttctttcatgatatcataacattaaatcattaaaaatataaggcaatttaatgtaaactactagcatttacaaaacagtaaagttataaaaaactgtattacaagcaaatgcaccaaataccagtgaacatgaaacaggagtgaagtttgctggagaacattaaaaatcacttttcagtgggttcacttcacattcatgctgcactgggcctgacacgttcagcaccatgaagcagacacttcggcaactagaaatgttacttctgtttgactttttttctaaaatgaaaaagcagtctgtgaaatgcgtgttaagaacgatctatctagagtcgcacagggtccagggccgctgcagttgactcagttgttcccatcctcgttttatttgacaaagtacttcatttggccactctggaagaatttattttcttgatatcaactgggctcagaatcagtgttccatttttgaattttccaacctgtccaatccgtccatttgacaaaatactgggagcggacttctttttggatttcctgtcctcctgtcctttcctcttctttttcttgaaaatatctgtttcttgggccagtctcttttcttcttcctttgctgcctttttttctttaatttgctcctgtaaaaccttgtaattcacataactctttttaggaggcttagcgcccagcataatggcacgttcctgttccaggattctctcctttccttttccataacccgtgataccaaaccggtgcacttctaaacgagctttttctaggttaaattcttgtgtatccacatctctctccaaaacactaggattagcctgc

SEQ ID NO: 344162 - DNA, 1000 bp, Homo Sapiens
tatattgtttggttgtttccacgcactctttttaactgtacatcattttggctatggaacacatgcctttaaatggttaatcttctttaacacattgcaagctcatttaccacttataaatgcagattcctcttggaaggtggttctcatctcagttgcagaagcatctgcggttgcatatcccaggcctttaaaaactcttccactctcttgccacgtcttttgaaaattttttcttacttctttaggtgaatcagagatatctaaaatatgtccagcaatgacatcctcataggttggtggggcatgcttgaagtcacagccagatttgccagcttctgagctatgtgatgaagaggttttcatcttcgactcaacaatttgactctcaaatgcatccatgcctgagaaatgttcacttagagacctggtttcagagcagatcctgggctgcttaacaggaatcttttctcgcagttctctaggatgtttgcaagaaaagtctgtaaaactcgtgtttcctaaagatgttaatccaaattcctccttacaaaatgtacgactttcttgttgtatgttatggtttgtttctccctttgcataaactcttctatttgactttgcttcagaaactgggccatgctcaaattccctgaaccatctgtttatttcattttcagggtcattcacgaaattttcagccatttgaacagttcggttggccgcttcatatctctgtgtgtgctctgacaggcgaggaggcactgcaaccttgcggatgatttcaactgcatcataactttcagtgtcgggcaccatgtgatcagtggaatttagtccatctttatgaacataagtagctctcttctccactttcctgatttcctcttgagcgtccacagattctctgaaggaaccactagcagcatgatttatatttactggtattgtgattgtaggtggagagtccctaccacgagtttctatcttaatttgacga

SEQ ID NO: 344163 - DNA, 1000 bp, Homo Sapiens
cagtgcacaaactgtaatctgttttattaatacttccaagttttctacatgactctggatttatactttgtatcaattctcttgctggttaagaaaaaaaacaagatttattaaaaactgaccataaataatgtgtaaactaaggagagttttgtctttttccttactgaaggacaaggaatcagtaaagaagttctttgctttgcttaatgaagatcaaaacctggtaattaaatttggctaatataatcattccttttctgacaagacttttttcacctttattcacctgagtaacttacctgtttccaaagacacctaggaaattcagaatgttatatatgcttttccttatttactataatttataggacatgagtggatggattctcttcaatagagaaaatgattttctctaattaaaatgcaccaaattgatgtactaagagattgctttagatgaacacatttatgttcagtgaagattatgtggtcttcaatgacactgcaatataattactaggtacaaaacaaaagcagagatccacacacaatggctcactgtcttcgatgacaacacttttaggatctcatttattcattctttaagtaatttttcttttaaaaaaagggataggtggaaaaaatagttgggaaatctttaactaggctaaggtttagacataggtataaattaaaatatttattttgtaacattcaaaaaccaaaaaccaccctgacatactgggtggcaagaaaagtcaagatcagattaaacatttgttttgcactaatcacaaaactaataatccaagtcactatcatcaactccagttgatctcagctctgattatgcatcagaacaccctgtgaggtctattaagttcctataccaaatcccaaacactcttgaatcagtctacaaagttgggacctaggtatctgtacattttttaaagttcctcaaaaaattctgcttctaggcaaatgtaatagatat

SEQ ID NO: 344164 - DNA, 1000 bp, Homo Sapiens
tcagggtaatcccagaaacctgtgaagcatcggcacaaaggttgtagcgcagatgccaacagatgtgtaggtaacaaacttgtaaggcacttcaatctccagtctccgcctggcctccttgttcctggtgaccaccttgaaccatgagtataatacttgcagtgagagattttgtacaagctgacgaaccaagaggatcaacacaattcccactgcaaatttggtcagacccaaaactaacatgtaggtggtgagtggtgggatgttctgaataacagggagagattcagcgggcttggatacaagctggaagaaatggttgatccagaatcctatggtcactccagccccggcagccagaatggtggtggtgtccgcccgggttgggctgtagtaatcagaaacagggtaattgtaacacaggaagaatggcacaactatgacacacacggggaagagggggctggccgagtccaggcagtcgatgaaggtccaggcagggtaggtgaggacgatgaggagtgcggtgatcaggacgccacccagcacatccaggaccgtatgcatcccagtgtagagcctgctgagacacaccaaggtggaaaacaccacggccatcaccagtcccaacacaaatggatactggtatctgtccatagtagagataaggagggtgaaggcaatggcagtggccgccatggcgtgggtggatggcattccatattcagcgatcagtctcttttccagttttacaactggaggggaggagggacggggccacttcaagacatccttggccacttggccaatatacatcaccaaaacccatatgatgatcaatcttctggataaataagggtcaatattccagtgagtgaatggaagaaacgtgatgtagaacacttcttggcccaaagcagctgaaaattggaataggtaatagtagaaataattcttcacgacgtacttctgtacataagcctccggcgccgcggctctg

SEQ ID NO: 344165 - DNA, 1000 bp, Homo Sapiens
ttttttttttttttttttttttttatggaaaagttttatttgattttgtaaaacgtaatgttttgagtatacttactttactctttcaaagcaatgaaagtacaatgataagcatttgaataaaaagtaccctgttttatgagcttattttttaacatagtgaaggcatactctcactgaaagtagaaatatgtgatccaattacaaaacataacatttacgaataaacacacacaactgaatagtcatgaaaaaatagaggattagtcaaaatattctgtttaaaaatattaaattcaagttacatggaaattttatgcataaaaatcatattgtataatcagaatgaatcttcagtggtcatttctgaaaaacaaatactaactttagttaaaaagttaaacttttacttctctttttcaaagtattttcaaaacttcactattcaaattaaataggatattttaataatttacttcaaagatattatataattctgatcccaagagatcttcttgtggtgtttataaataaatctactaacagaaaagagtaagaaaagccaatctaggaaagaaaatcgttgaattaagtgagagtcaaagtgctaattcaatctatggggttttttcctccccatcatttcttttcacgttgcctttggagacagagtaatttgtaggcagctcgccttgatctacattttctctctctaatctctcttggctgtgatatagtacagggaaccactaatatcaccccctccattttcccagacaggaatacctaaggccaaacctcatgcccatcctcgggttgcaacaagtaacgtttacttcagcaacaaagtggacctctctagagattatttgttgtactgtcttgttgccttaatacgaattaatcattaaaaaataaattgaaaaccagaaattcaaactgcccatagacaatcatataaaagttgggaaaatgagaaatggagccttaaccattgaaa

SEQ ID NO: 344166 - DNA, 1000 bp, Homo Sapiens
tttttttttttttttttttttttttttttttttaatagtgaaacattgcagtcctttactctgagatgataaacaaaacaaagatgcctctataaccacttctgttcaacactcttctatttaacaatgcagtaaggaaagccaaaggtgtaaggactagaaagaaaaaaaaatgtcattttccatttaaaatacaaatgtgtgcatgaaaaaacaagaaaattaacaaataaattattagaataagaggatttgccaagatcactgaacataatacctatataaaaatgacattttaaaaactagcaacaaacagaaataaaacaactaaaaaatatgtcatatataacaacagcaaaaatataaaatacttatgaataaatctaactaaggatgtgctaaatgtctatggagaaaactttacactctattgagagacaggaaagataacctaatgaatacagaaatagcccatgttcatggagtaaaagactcaatattataatgatatcatttctcctcatattcatctataggtccaattaaatcccaatcaaaatctcaagaagtgttttatgtgcatgtatgataagctgatttgaatatttatgtaagagatcaaagggagggccaagaatagccaagacaatcttgaagaagaattaagtaggaggacgtatactaccagctatcaagacttactattcataaaaatcaattccatatagacaaaagacaaatataaaaggcaaaaatataaagtctttagaagatactagaggaaaatatcttaatgacctaggggtagagaaggacttcttaggagaagcataaaaaagcaccaatcataaaataaaaagactgataaagttgatacctttaaaattcaactttgaacttttattcttcaaaagacacaataaagggagtaaagacaaatcataagatgagagaagatatccacaacgcataactggcaaagagtttgtaattgggataa

SEQ ID NO: 344167 - DNA, 1000 bp, Homo Sapiens
tttttttttttttttttttaacaagggggcagtcatttaatgcagaaatccagttaacataaagagacagaggttgaacaacaggtcttcaaacaatactgcatagtgtcacgagttagctcttaagcacgtttgatctgtttatcttatgatttcgattccagtacaaagacagagaagagacttaaaaaaaaaaaaacaataaggcaacagaagaagaatcttcctgtgacaaggaacgtccacaaataatgcacaaatatttggtgctgacacaataagacaccatcaggacaagttctgaagatgctgcattaaaatttaacaagcatgatacaatgacaagaaaattatactcgctttgttacgaatccttttgcaagtagaaatgactctcgggtaattgttacatacaaactttctgaaataaatggaaatcatacaaatttttccattgcagtttcttctttctctacacctagaaatgtcccatggcactgctccctattctcacagtcaacgcataaatagtcattaaagcacttgaatccacagtagtcttgtccttagaaaggttgggaggttttgcatgattttctatcagtaatccagaaagggctggcaggcaacaggttggaatgtaaaagaccgctttgtgcttggactcctgaactccgcgctgttcccctcaggagtcgctcgcactgtggacaggcccagtgaggacagtcataccgtggagtctctgccagactttagctgtgcaatcttggtccggctaataaacggataagcgatgcagagacctccagctgccacaataaagcctaaactgcaccaggcgcaaaagatggaccagctgtaaccatgttccacatcagcaggcaggctataaattagctttgggagccggttcaaatcatacgagatactggcggcataagtacagagggaaatggtgcaaaatatccctgtcatgaggaacaggagtccagccacg

SEQ ID NO: 344168 - DNA, 1000 bp, Homo Sapiens
ttttttttttttttttttttctgctttacattgtatatatgttcatagatttcatccaatataaaataaagacagtccttttaaacaaaagatagggaagaggtaaatgtgacactttttccgcttacaaaaagtaatgccttataataaattttaattcaaccatttaggggggtcagctgcagtgaaccttttatttcttcaaaatgctgcttctgccaacagaatttcatgttctcttctttacagatagataggaactccttcaattgtaattctgtttgccctagagtaggcacaaaattcagtgcaaccatggcatagtgttcttctggccagttcccacatctccatttcatgatgatcttcttatttgttaactcctttacagtgaagatgctatacagctgctctacagttgtgtcaaacagttccatcatgtgaagagccacagtgggaatccttacacccagtgccactggagatgaggcctgaacctgcagggtattcccactcagttttcttttgacagtcaattcctgggttgccatagctttcgttggtaaaatcattcccgttgtaaattctcagtgtcatctacttcattttcctcagaaagattgggtatttcaatcaatcccttgtgcttcactccagattctttaacgatgcctttccagcccagtttgatgttccactcatagaagaaaatcagctttcctttgcggctgctgcacgaagcctccccttccacctgcttcaactcgttgatctcgccgcggccagcgtcattctccacaacgatgcccaccaggagctcctggaacttccctttgggcaagctggtggcatcccgctctgtcctgccagggaccagaaagtcgtgaatggaagccccagctgggatccacctgcctgggtgccagggtcacgtccaagcccagcccagatcggcccaagtcctctcaagcagcctcgaaacctgccaacctccaatgtg

SEQ ID NO: 344169 - DNA, 1000 bp, Homo Sapiens; identical to SEQ ID NO: 160830

SEQ ID NO: 344170 - DNA, 1000 bp, Homo Sapiens
acgtatagtttatttttatttcatagccttttaaaaaatataagccacctaatattttgaaaaacatacacagaataatcatttagctgccacaatattacaaaaataaaatgacacagaataaattgcacaagagaacaaaataatctctgctgagtcactctgactaggaacacataatagtcactaggaaggtgaagtggagcagtactgccatttcttcatgatcaattatcactaaaatcagtcacaggaactattcccaggaggtcatccattcactatacaggaatatgtgcaatatatagatgtcaagttaacatcttgaatttaattccaaataccattctttcttttcctctgggagacaaattcaatggcaagctagaatagtgaagaccaggggataccaagcccatgactgacccacacctctcccagctggttctacaacacaagaaagagaataaagtataccgtgctatctaacacaatagctagtagccccatttggctatctgaatttaaattaattacaattaaacaaaatttaaattttccttcctcagtcacactagccacatttcaagtgttcactagccacatgtgcctatatggttaccatattggacactgcagatatagaacatttctgtcatcacagaaagttcttttagacagccctagatgtgggaagtgtttcttctttgcttagctaggatgtaggctgcttatagaagcagctttgagaggcaattcttctcccaggatattcctagactggtggtggagtcacagaaaggagtaaggtagcctttctttgcgtagattcccctcctccatgcatgaaagcgatggtctttctataggaatcaaatacacaaacccagactccaccaaaatataactgacaggaaaattagagaggagagaaatgatacagatgagggagcagcgtaatagaacattctttatcctacaccaaccctccacaaagagg

SEQ ID NO: 344171 - DNA, 1000 bp, Homo Sapiens
aaattaccagttttatttcaggatattagtataatctgcattctaatatatttcataaaagaaaatattttatttccattacataggcaaagtttgttttttcccatatcaaagccaaatattatttgatgtactgaccaataatatatgtagaaagaataacagcaaaatatcttatttctttatataatttaatatataccctattaacaccagtgtgcagatgtacagtactgacagtatactaaatagttagtattaaaaattactttaaaaatgttttcaacattaggtactggtggaaccagagctgttattttgtacatcatatcatttatgtgttgcaaaggaaaagtaaaatttccagtagcattagaaaaaaatgtactgatattttatgtagatatacaaaatctcatgacatctattgaaaacctcacaattctattgtgcactaataaaaacaccttttcaaacaacttgcacttatactgagttcataaaggctactataaaaatattgcaaacgcaataaaaacacaatatcgtacaaagtcttttgttttttaaaagtcaaattttaaaaggactgtatttatataaatgtgcaatactttttagtgaccctgactaacatttttgtttaggattatctgattttagaaaactaagttaaatgtttttccttattttctgtttcagaatgagaagacactaagaatgcacagaggtttagaaataagattgggtaaaagctttatgaagtgggatagcaagcactctacatgttttacttgttgccctaccaaagatacaaatgcctgactgccccaatttctgaaatttaacttgaattctaaatcttaactacccccctttcctttataatctttgagatgaaagtgtaaagattttaggttctctaacaaaacccaaaatatcactaaagccattctccattttcaaagaatatttaaagaaatgcgtatttcaatataaa

SEQ ID NO: 344172 - DNA, 1000 bp, Homo Sapiens
ttttttttttttttttgtttttttttttttttttttttttttcttttttttttttttttttttcctttttaaagtaatatttaatttcatgaattcccatttacaagtggaatggacaggaatgattttaatatttttatattaattaatgatattttgatacaatatatatggcagcaaacctccatatgtgttacccattagtactgtgtttttttaaatggggatgaagcactaataatcactacctgtaaaataaagaacatttattattttggtgagtctagcaatcttttctgagttgtaagttcttaaaaaataaattctaacaattacagaatactgatttgacttccacctttttcgtacttttattttaccccaaagcaagcattaaacacataatcttgctaggagagaccatcttgttagtattatgaaacactggtgggagtaagaaccagtatcattgatatgcaaaattgtgcagttatctctgcaaatcattaggaaaatgttgaaaggttaaaaatcaaaacaaaatatagtggtgatccccaaaactattttgacattattttgacgatgagtaatttagtctcaaccaaaatctttttttcccattcataataatcctcctcccctcaaatgtctttaaaaaatacatgaaacagttcaataacaaaaaccgaagagcacgaactattttcaaaaacagaaaaatctctagtgcagaaagaaacctcaaagagcagattcctttgcagacattaatcaatgcgcttgcaaagattatgaagatttctctttcctctttggcggacagtctactctatttgaagtttccactcccactccgttttctgttctttttttagaagatctcgaccgtttctttttcatacatgaggcctgaatattagaatcttctacccacctctgaagccagagagtaattaagttccatgttacgtaggcttggatcgtgcaactggacgac

SEQ ID NO: 344173 - DNA, 1000 bp, Homo Sapiens
acagtggaatttcattttatttcagaactctaaagcaaataaaaaggtacaatcatttgaaggtaaaatatttcatgaacaccagctatcagagaggtagtttggtgttatactaaggaagataaaaaagaaaagatatgggctattgatgacatgatggagcaaccaaccacaacagccctgaatgggctaccttcgggctttatcaagaaagatgaaacaaatgaacaaaaactctgggggtgtttacgccatggtttttcttgcttctgttcctagcagattaaggtaatctctaaggttttaccatatagaagggtattaactgccatgtaggggatggaagatggactttttctaaaatcaacaaagtctttaaaactaccttagccactggtacctgaagccacaaagccttacacatggatttccacttcactacttgaggttccctgtactccatttataagacgggaatcttaagaaggcaactgtaaaaactgaaataaagcagtatcatctgtgaccaactgcaggctccatgtctgaccagcaaaggaggtgctctctaaggaaggggtctcaggcagtgagcaaaggtcttggcaggggttctccttccctaaatgcaggagagcagaccaggtttcctgagctttgaggagagcttataggaagggcaagatatctgcataaaatggaagaatttgaaatggaagatatgtcaaatatttcctgagtttttttatgaaaagtgatagaaggagaaatggggactggaaactgggaagtcatctaaacaaggaggatgaagttgtcagagtcctgtgtctaggaaaagggagaaaggaggaggcagggctggcaggtgaaaatttgtatctgagctggggtttcaagtcacaaggggcaagtcaagaagcctcagtggtgtgtgaagatttctaaacagaggcagagaatagaaagaagcaagttgcaggatcagtggcgggtggag

SEQ ID NO: 344174 - DNA, 1000 bp, Homo Sapiens
gtatttccatttgattttaatgcctgacttacagctatcatgatgataaactttctcagagtgtcacagtatttaatataagctgatatggaagaagctattttttcagatgacttttcagtgcattgaaagatggttctcaaagcagtcccaatacagctcacagtagatctctgtcaacccagtgttcttccaacttacagcaagccctagcttaactggccattacaaggatgtaaatatgtggatggaaggagaatgtgcttaaaaaacagaaatctccagaaggccttttcttcattgcagtcaggaacattgcacatgtaaaattcatgttaaccatcatctattggaacgactggaaagtgataacctgccaattgtgcttcctttcttcacaccactgaaccaatgcactttggatctaatgttatccaactgaggaaccaagtgcttaaactgtcattttccaaaagaatcagaaccaatcttgaatgatatttttcttctgttatgtcacttgttagttctcccagtctgtgcaaggtaaagcctcctcttcgtcctctgactctggggatgcttctttaattcttctaagagcttcatggatgctccgtgttagagggtctgtatcgggtagaagtgtgaaggattctctcaaaacatccttctgtaccttcttcaattttacccctttccttatttgtgccaagatattattactatcatcttcatcaggaaaaggaggcagagttcgctgttcaacctttttcagatgaaaactaccacgcttcaaggaggctagcacctcatccatgggtgagctcactctcctcctctgcaaaccttcagcagtctttctgagcttcttccgtgcactgaccagctggctgctgtcaaagaggtgtgctgagggggcactggctgactttgggatcctcttctcattcccctcctttctaggcagatctttctccagtgtctctgggccactgtc

SEQ ID NO: 344175 - DNA, 1000 bp, Homo Sapiens
ctgatatagctaataatagccactttttttttttaatagatggggtcttgctatttgcttaggctggagtgcagtggcaattcacaggcgtgatcatagtgcactacagtctcaaactcctgggctcaagcggtcctcctgcctcagcctcctgagtagctgggactacaggcgagtaccaccatgcctggctaatgagagccactattgactgagcatttcttatttctcagacactatgcaagatgcctactatatattatcttattaaatcttcccaacaatcttgggagaaaagtaacaattgttagtcccatttcacagataaggaaaacaagaatcagagcaatcaagtgactttcccaaggtcacccagctggtcattagaggcatggctcaaacctagccctatctggatctgggcttataacccctaagtcctacgctctgccactaatcagtgggtgattactggtcaggttatttttcctgctgtggtctccagctacctcagagggtgataaagtttgagtgaggctaaagtctgtaaaaccttaggtgggttaaaatatgtaacccctatagcaaagtggccacggttattctgggattttccttctttcctcttgagctaagcactggcacttaagagttaagtggttttatctttattggaaggaaatgtgttaaagacagactcactacagtgttgagacagtagtgagtagcacagtaaggagactgcccaggacttgaggtccttggtccctctatagaagtatcaagtgtttgtaaaaggtttagcacccatgtgacagaaagaagccatcatcctcttaatttctcttggttttacttaatatatagaagggcaaactagtgggcctctgagtgcaagatgaggacttcattagaataaagacatattgcctcctggatttctaacccatagctccaagagcctcagtgtcagaacataggtaagggacttgatttactg

SEQ ID NO: 344176 - DNA, 1000 bp, Homo Sapiens; identical to SEQ ID NO: 160831

SEQ ID NO: 344177 - DNA, 1000 bp, Homo Sapiens
cactttagtcaaccacttttatggaatgaacacttgtgagagactgggtgtgagctgatctggttccaagtgatctggaagctgaggtactactttcaggatgaatggtccggggatattttgctgcagttgcttgaggaatggtttgcactgtgactggatgatgtttttccacaacaactgagctcatgggaggagaaactcccattatagctaaactgctgctaattctattttttgaggcaaaatcacatcttcctgtgatccgggctgtaatagttcttcctgctttctgttgtgcagaggttacaactcttggcacatacatttcttctgatgcagcagtagctgcagatcctgcaccaagagcagaaacaggaacgtgaacagaagatgcggaagcagccctggtagaagtcatcgaagcagctgagggaacggcagtcgcgctggctcctccgacggcggctggtggggatggcagcagtggtgatgtaactggtaagggcatcggaggagctgaaggatccaaatgagcagaatgttcttttccttgaacaccaggaccatactcttcctttttattatttgtggagtctatccctgcatcatttctgttttgaaatatagtcatggcttcaagatttaatgcacatacacccctcatgaaagcttttttcatggaatcttcaaagtgctctttttcatgttgcattctttgaatctcagcttttgcattttccaaagctccagataacatagcaactttggcttcataatcattggaaatctggatacaaacttcttcagctcttgcttgacaagctctttctaccacatctttccactgcttttgcactacggaacgccagactttccagactttcttcagtaaagttctctggtagtactggtcagctagtttaccttcataaacatcctgtctggctctgacatggccgattcgccagtggaagaatgttctcatcaactctatctt

SEQ ID NO: 344178 - DNA, 1000 bp, Homo Sapiens
tttttttttttttttttagctcacacactatggttatttttacactgaatgggtcaactttaacctaataaatggacccacatatatatttttttctcctcaactcaaagaaactctattcttagttcatgaaaatagacatgtaaattcacacaaacatcagtttggaatcaatattactttgacagatgtttctttaaaaagtaaataaaaaatataaagaatttttagtctaattaaaacattgattttttaaaatgtccctaaatattaaaaattaaaccagatactactcattttcttccaatacattgtgccaatatattttttaatatccaatgcaaaactctaaagatagtatcaaaatcaccctaaatactacttatgcaaggttatatctgtcaaaaaatgaaaatttcatctgttattagctcatttgctaatataataaataaggcatgttaaagtactttttaaagaaaaaagtaatgcagacttacttgaattgcagatcattttctgaccaacagtttaaatatagaataatgaaacctattttgtgaagaacagaattacactgtataaaattagcaatttacctttcaagaaacaatcatacagtgggggagaaaaggccagttttccccaactgattatattaaagtataggcaactgtttaacatgctatttcagtgtttatcataacaagagacagtgttaacaaaatatgcacaatgtagtctttagtttatatagcagtaaaaatactttaaattttaagacttcattcatgttatcacttagatgtctttctcttcagcatggcaccggtaaactgttcacagggagaaaagtaagtggaatcaggagatgctcaccagtgcatagatataatactccaggtaaccgctcagatgaacagtaaattcggctttctaaatgatgttatccatttacaactgtagccatttgcccctcccatttttttttcctgggaca

SEQ ID NO: 344179 - DNA, 1000 bp, Homo Sapiens
agattcaacagttttattgaacgtcaaagcacattattccgcacagctgctagagaggcactgctgaacccatgcttctcttccatgacaaacacctagtaagcagtcagcataaactcttcccttacaacctctgacatcacccccagggcaggcacacacagaacagcaattgctgaattgcatatgaaaattatagtttattgtctatacaactgaaggtttaactcggactcctgcttctgtcggagctgtataaagaagcaattcttctcttagaacaaataagcacagtacactattgtaatctaagaaacaggcactatttatgtattggaaagccttgctctcaatagggctaacagtccaatggcccataagccactattttagcagctgtagaaaagaaagctgtggaagtcacaaggaatgagatgctaaaagcaacagagacagatgatcccaacaccaacgggaggtttcaagtcccagctgctgccactgttagtttagcaagcaagactcgtaggttgggaccacgtacttaatgttgataaaggcattttctcctccgtagcgctcgaaggcctccagtgtctcctggatcaagtccccaatgttctccctcttctgctggctgtagtcaatgccgtctccggagttcactataatctcagctacttgagaggctgaggtgggaggatcacttgagcccaggtggtcgaggttgcaacgagccatgatcgcgccactgcactccagcctgggcaaagagtaagacccattcatattcttaaagatgttcaggacagggaggatttgacggtaataaggcaccaaggccttgcccaccatctcagctgacacaaccagatgctggaggaccttgagagtgacacagatgacctgtcggtttcggaggttcaaggcattttttatcgggataatgagctgtggaaggacaggtaggatcttgttcccaccgtgttccagcatgtcg

SEQ ID NO: 344180 - DNA, 1000 bp, Homo Sapiens; identical to SEQ ID NO: 160832

SEQ ID NO: 344181 - DNA, 1000 bp, Homo Sapiens; identical to SEQ ID NO: 160834

SEQ ID NO: 344182 - DNA, 1000 bp, Homo Sapiens
tttttttgcacttattttatttgcaagtgagggtaaacagattcgcaagttacgtagtcattacattttcttttgtcaactgcccatagctgcttttggacttttttaaaaaaaattacatccgcagctagttcttattgaatgcttacaatgtaaaagggacaatgtatacatcctttaaaccaatatctactttatgatttagttttattatctaagacattttacaaagaaataacaagtacagcttacacagtttcccctgtcacacatcaagtatcaaaaactaatttaactgatttcaaaaatctatgcacctaaccactcttttgtatcttctctattgacctattcctctatcaatatgtaatattacattaacctcatttatgtcctgacatcacctctaatctacagaatggacattttaatagttgcctaaaactcagcattattctcttcacctaaaattttttcacctcaaatcctccccattttagtaaatgacaccaaccatccaccagtcctaaagttaacaaaaaagctgcaatctttatgctgtctttcactttctagattactctcatcagcaaatcttactaatactaccttcgaatgatcttccaatgcaatcatttctgatttttctgattatttctacttctcatagtcaggtccaagccacaatcattccctttcctgaccaacctacaacagtgtactgttttcatatttttatttttgaggtattatataaagtgtgaagtgtatagacatacaaaatatgtatgtatcaaggatcaagaaaaagaaaacagcatttctaaagtttccccgtgttactttccaaacaatatcctaaaaataaaagggaaaaaaacaaacaatatcctttcttccttccacagagatacctactattcaaactgtaatcaccatagataagtttttagtgctttggaactttagaactgaatcagtttgtactcatttctaccta

SEQ ID NO: 344183 - DNA, 1000 bp, Homo Sapiens
ttttttttttttttttttttttttttttacttgaatatattttaccggcctgtgatgctattaaatttaacatttcataaaaaagaaatgtttgatgcttctttaagttcatctgagccagaaaatacaaaattaaattaatctgaatgataaaatagacacaggccaggcgcggtggtacatgcctacagtcctagctactcaggaggctaaggctaaggcaggaagatcgcttgagtccaggagtttgaggttacagtgagctatgatcgtgccactgcactccggcctgggagacagagcgggatcctgtctctgaagaaaaaaaaaaaaaaagacatattttacgcatagttttcttagattgaaagtgaacaaagtcccaactccagatgttgaatatgactgaggatccttagactcttctaaaagttacatgtgcaatgcatacaaaacaacaaaaaaaggaagattattatgtacttcaatactattagtcattaattcggcagacttgcaatggacagcatcatgaagacactggagattaggtttttttcctactgaaacacaattctgggcttcaaggaaaaagtatacttcaagacatttcctccatttttacttgtgtagtacaaatctgcatggcatagtatatttctgaaaaagcaatagacatattaagaaaatagacactatttctaaatttcgttaggaataagaaggcaccactgatttgaggttgtgtcctgtcatcactgatagttgattttgagtcgttgatttcagcatttgttcttactaaacttttttccaggtggtatcacttgagaccattattgtggcttacggaccacaaacaagacacattcatagtagtatttcatcatagagagatcattcacagtatatgttgacaatacagattctttttccacctctaccttgaatccatactgcagaacaacgttttttatatcctcatagctcaattctatgg

SEQ ID NO: 344184 - DNA, 1000 bp, Homo Sapiens; identical to SEQ ID NO: 160835

SEQ ID NO: 344185 - DNA, 1000 bp, Homo Sapiens
gaataatataacagttttattataaatcaaaacaccaaacttttgcaaactttacataaacgtgtagccatatgactgtataacaagagcccaagagcaaccattgtctaacaggtagaaatgcagacagtttcatgttaagcctttagaatttcctttcacggcaggtttccaaaataaactaacttttctaacatttattctcacaaaaatatatttcaagttagaataaacaactcattggcttcagacatttaattgtatgtatttaaccatactcagataattgtcatatttagccaaatggaggctttttctgtgacctatttccaaattctcagattctggttcatctactccttcaagcagtttggaatgacttgccagttggcatttatatcattggaactattctgcaaataagccattttgataaagcttgcttggtttgagacaactatgtatttggagataaaagactcagaacaaagtgcttgccttttctacagtttatatcaaacgagatgggcacttaagcagtcagcctggattcatatgtctagagtggccaggctgtaaatacaataagtctagctgccttccacatgtggtcagacagctatattaagaagatctactcactgctggttatgaagatagccaggagcttgtctgatttaaggaactattcagccattgaaggatagacactcccaaaaatggaatttcagggaagtgtagaatgaacaatcctgttcaaagcagccaaaattattttctgcatgccaagatgttattcacacacataaatactatatgcagataatcttcatttttgaattacaagttgttttattgcaaaagcaagtatagttataatatatagcaaagcgaatctatctttggttctatatagcagataatttttttgcaaaaataaataggcatggcaagaaaaatacttcaactatcttaagggaaaacccaatattttataaaa

SEQ ID NO: 344186 - DNA, 1000 bp, Homo Sapiens
aaattttcagtatcatttaattctttaatactttggggacatttccttttcctttaacaaaaagaatagaagtgatactatatactgctagtagaaaattaagagcttttctataaaatcctatgaaattaaaattaaatcgtcttatttttaaaaatgcaaaagaagccagacagtagacttaacaaccatgaagcagacccacttccctctgaaccaaggatttcctatgctttctagatatcccttcagaaaaggccttctctaaattaactgaacaattcggaataccaagaagtaggtagagagcaggaatgtgagcagatcatcgaatatatgtttttactccatggtgactaaaatgaagtccatagataggagcaggtgaagaagaaaacaacacaatctcctgatgtacagttgtcactgacccagagcagtctgctgctgtgattctctctgcctgtgacctgagggtcagttgcttcattagatgcaatggaaataaaactgaacgggatctgaagaaaaattttaaaatggaaggtacacctcaatagtttttacttttggtgaagtcatatggtttccaccactgagcaaactgcagtgcttttttcctctgatcctcaaagctttctcggatgcctttcctccaaagtcttggttctatatccagcatcccacctatgatttcctttccaaagtaatgagggaatttgtgctgatcttcaatgacatgggcaaaccctccgtgaaggccaaaatccacagagaagtaaggtaaccctctgggtacagactttctgatatcttttgaagagagatctatcaacttcttgttcatggaccactcttcatcagattccattatggctttcttaaaatagatgggagccatgtcacccacttccttgggaagaggaatacattcataaaccatgtgatactgtttcttcatgctcatattagtttccaaaaaaatgcagtctaatccttt

SEQ ID NO: 344187 - DNA, 1000 bp, Homo Sapiens
ttttttttttttttttcacctgcaaacatatgtttattgcagcactgttcacaatagcaaatacttggaaccaacccaaacgcccatcaatgatagactggataaagaaagtgtggcacatatacaccatggaatactatgcagccataaaaaaggatgagttcatttccttttcagggacatggatgaagctgcaaaccatcattctcagcaaactatcacaagaacagaaaaccaaacactgcatgttctcactcataagtgggagttgaacaatgagaacacatggacacagggagaagaacatcacacactggggcctgtcagggggtcagggctaggggaggaatagcttaggagaaatatctaatgtagatgatgggttcatgggtgcagcaaaccaccatggcatgtatatacctatgtaacaaacctgcacgttctgcacaggtaccccagaacttaaagtataataattaaaaaacaacataatatgctatttacttattatccaaatttatctcctaccatattcctctaagcattgtatattttagctacagttatacttttggagtatattctctcatgtttggaaaaactaaaagaaaaatgtaatcaaacatattttctactttttacttttgaaatatttggagatttcagctttttggaggaaaaactaaaagaaaagggtattaaatatatgctacttcataaatattttggaatatactatcctttaaagcagttattatcaaacaggctgctgtttgggcataaactgtgaagctttttaagggtataactgttagttctcattctttctttctgacactctggtatgtcctcaggggaaggaatagggttaagatagaacagaaaaagctctgcagtttagaaaaatctaaagatgatactgtgtcaaccatcctttgataacataatagtagcattctgatcaaaggaataatattaacatgaccataaaaaactagtg

SEQ ID NO: 344188 - DNA, 1000 bp, Homo Sapiens
tttttttttttttttttttataaagcgattttattaaattgatttggacatactgtaggtcaaataatattttctgaagataacaattatggactttaaagctcgacataaaattagtagcttcaaaagggttagtcatattccccagcaacagcatgataaaataattcaactatgtagaaatatagaactctaggactagctggaaactcggaaatcatttagcctaatgttctcattttgagagaaaactagactcaaagattaagcgatttgcccaagctcacatacctaatagtaataaagctagaaatcaaaccaatttttcctaaaactaaaattctatcaatgatatttcaactggctatcaactaaaagtctaggcttttctctaatgctccacgctattgtgacatgaaagagtgataagacactacagtaaatcgtacttgtggaattcaggcctggaaggggctttggcaaataactaagccagccctctctttgtaaaaaggaggaaaagtatctgaagtgacttaccaaaggcttgttagcagagatgtctggattaaaatccagatattgacaaattcacccccaaatcccatctctagtttcatggcccacccactaaatcatgtgctccttttaaatctcctttatgcgctgaggttttagttatacaaaaaccccttccagtcaaacagaaaaaattaattcaaatatggaaagaaaaatcaaactttcagtattttcgtgactatcttgagtagttcattttccaacctcttagacagctgacagacaccactaacctgatcacctatttcagagcttcaaagatccttaatttccccaaagacttcctgagcaaaaggactacatgtgggaaatcaatgaaaacaggaatgagaagagaaagttaaaaattggttgcttttgttcctgtcattggggacttttggtcttctaaacattccttgagttcctccacatgagt

SEQ ID NO: 344189 - DNA, 1000 bp, Homo Sapiens
tttttttttactctttgtggcttctttttattttgaatcaataatctagaagtgaaggtctccacagcccattatgccttcactgatccacctacttcccatgaacacctgccgaaggaaagaaataaggcagcatgtgctaagatgcagtgctgcttctaaacataatttgtggggggcaggcatgaaacccaagttcagaagtgcttaagtactgaggtgattactcaactatgaagaggtctttcaagcgcacagttgatttttagcaagtacagcgtatgaagaccttcattttgattttataaaagtaggctatgttgcatgagtatctaaaagtggctgaaaaaccgactgcatgcttttaagcctaaaaataaccaaggagtagagccaaacatgtacatttcagcagaaaagtgataaacagaaagcgaagcggataatatgctgaagaatgaagaaagcccacatgatggcttatgctgactttacaacagagtgaaacattcaaacattaaagaagtcaaaacaaatgcagttaggtgtgtacattaccccaaaagaacccatggctattaaagctgccatgaggatcttctgaactgttaaaaccttacgtcatgctaccaatctgactcactttcagtttcaataactgatagaaatttcttaccaagaccctaattttggcatcaaaaatgttaatttgtagatcagaatcataaatctactaactccatattcatttgctaatttatgagacagaaaacatatagttcttaattctaaaaaggccatttaatatctcatccctattactcttccaagaaggagggaaacagagaggctgtttggaattgcagtagaacacaatgtttagaacaacagaaaaacatatgggaaaaaaaaaagcccaataaatattcaatctacaagaaatatagcaaaataggggaaaatactgaaactactttgctgtaccatggagacacatggt

SEQ ID NO: 344190 - DNA, 1000 bp, Homo Sapiens
ttttttttttttttttttttttttttttttttttttttttttttttttttttttttggaatctataaagggaagacagatatattctacattgttcccattaaaatggaaaccccgtggggagaggaaatgcatctgtggaatgtagagtggatttctttcacatatgggcactcagtaaacattattaatgaatgataatgatttgtcagtgattgaaattgtttcagggcaggaacagggaatgaaatacgtagacattcctctatctcatggggaaactgctaggcaggtcatccagatgtattttctttggggagttgtgaattccttgtgtgtccagctatcactatgtaatgatattttacgttctcagtaatacatatcatcattatatatatcatcatcttatatgtatatatataatacccctgtacatagatatatgtacatgtatatatttatatgtataaaattaaagtgtggaacttgtagtttcctgtcgaagaagcttgcaaattgcaattccatcctagcaagtaaaaagctgaacagactgaaaaagcaagtctccttggatccataaaggaagcgaggtctcagagcaaaccactgtccccagaactggagaaaccggcaggagaatgcagcttcacaaggtaccggagcagaagccctgggcagcagcctctgcccgagcagtgacaggcagggaaacctgagctgtcatcaccagagtgccggaggcgcagagcgggcaagtctggaagttaaagatccacgggaaccatgtcgttgtcccctctccctcaccttctggagcttccccgagttctcacagtgaataatggagaaaaatcccctcgtgcctccttctcactgtccgtcatctgccagagtcccaggttgagtaccttgaggcacggcagctgcgtgatgcgctccaggccgcgcttggtgattcgggtgcagccgtacaggtctatgccggtgagttggct

SEQ ID NO: 344191 - DNA, 1000 bp, Homo Sapiens
ttttttttttttttttgggatgaacttgagtttttattaggttattgtgggtagctatgactcattactaagctacaagagccaaattaattctggtttcagttagaactctattcacagttctaaagcatgcaaatccactcagccacctttatgaatttctcacaaagtctaaagtacaactgcttgccagttaacacttccttacggtttgaaggtttcagaaagatgtaacaataatatgttacaaaagtctcgtttgtcaggttataattgactgtaaacaggtttgggggagggagaggcacacatcataagacattacataacaatgttttgtgccagattttttagtccatttgtgcaggtaaaaagctaactcttaaagggccaaagaacagagacatttgtcttccaccttattccactccaaactcaggctgtcttggcagtggaggatactgttctatgtcagataatacagaaatatttggcatcacttccattaaattctttcctgcagcacactgcaaaataaaaaatcacatctgaaaatcagaacaatttgaggttaggaaataaaattttacaatatgtaaaaacactccaggttgggcgcagtggctcaagtctgtaatcccagcactttgggaggccgaggtgggcagatcacttgaggccaggagttcaagaccaccctggccaacatggcgaaaccctgtctctacaaaataccagaaattagccaggcatggtggcacgcacctgcaatcccagctgcacgggaggctgaggcaggagaatcgcttggacctgggaggcagatgttgcagtgagcagagattgcaccactgcacttgagcctgagtgacaaagtgagactccgtctaaaaaagccaagtgaaagtgactatatatttttactcttgatcttttttccagggtttattctacttaaagtcttaaaatataaaaaacaatgcacaaaaaaggccatggt

SEQ ID NO: 344192 - DNA, 1000 bp, Homo Sapiens
tttttttttttttttttttttttttttttttttttttttttttttttttttttttttgagatgaatgcagtctttattttctctaaaaattgaaaggcaaacggaactctttacaaaaagaaaccatctgcatgattgaaatgggaaggtccaggtgagaggaaggaatctaaataggccagggttagccaggatctttgtgtgttggtctagactccagggtggtggcaaatatttttaaaaagaaagagatcaaccaagagttggagtgtatagcccctagaaataggcagtgatggtgctcttcttgcctcagctgagcctctggtgctgatgagggaactgacccaatttctcgggctcttctgccacccccatgcccagcctgggatctgcccagtcctgctgcccccagagggttgctgactttccaggtcttagagaagaacactctataggtgtccacaactcatgccataagccagtctcacaagagtgtcaggtgtgcaaacattcccagaagggtcaagaggatcagagcaggcaggattcgcagcaccagctggccaagaggacaatcctttagggttggccttctccttggtccctgttcattatggcatggattgggcctgataaagctgcagctcttccaccagctactcccaccggattcctagaagctcacagctgacattccataggcgctcagctgttttgttatttcgggcccttggagacacccaggtcctcttgcagtcactgaagtacttgccactcaggggctccaggccctcagccagggcgcagtgcaggctggtctgcgccccctcccgtgccgtcttgacaaagggggagaagagccgccagagcaggcagagcagggaggagtgccggaccagctcagagcggacgacgcctgggtgcactgcgtaggtggtgaccccggtgccttggagcctcttggccagctcacgagtaaaaagcacattggccagct

SEQ ID NO: 344193 - DNA, 1000 bp, Homo Sapiens
agtagaggtggagttttgccgtgttggctggactggtctcaaactcctgacctcagatgatctgcctgcctcagcctcccaaagtgttgggattacaggcgtgagccactgcgcctggcctgttaatctgctactcttcatttgtccatcctctaacagtagccatgactcaaaacccaagttttccctgccttgactcaaacccaagttagctgcttaatatttttcaaaagcagtaattttaagtgtagtgattaagcaagtgatacgagattttctggtgactgatgagacagctcctccagtactttcctggggcttgcaggctgttctagagatccttctaaaccctgctctggatctctgatgctgagttttgtagtttcttggaacctgggaaaatccttgattttggtctctttctcttgaacagcccgggtgccttgacccttgtttctcacaaagtcttcctccagcccagcctgcttcagggtgtctagataccactgttctgcttctttcttggctagatccttggcaacttgttcaaagagatagggccttgtttgtattcgctgcttcatttcctccagttctttcttatattctttcgctcttttacggtcattgttccggttctctttcagctttgctttgaacacttcctccaggcttttatggggatccatggcttttgcacgcaaggtcacagatttggacattgcttgagacttctttctgtgtatctccagccactgaatactctcatctgctttgttctttttttcaagtgcacttctgactgcagattccctcttcctggtggcatctgtgatgtgcacagggagagtgttggcagagagggaagcaaggccgctcagagaacgactccttggcaggggtgtagctggtggctgtggggaatcctgcctccttccggtggtggcagcatcacagggccgctgagggtggcgcaggttggcggtcctcagcaagaagg

SEQ ID NO: 344194 - DNA, 1000 bp, Homo Sapiens
catattacaaaggtattgctttattgcccttgtctatgcagaatccatgacccaataggattcagttcctgaaagtttactattacttagcatttaatataaatccttctccactaggagatcagcgtgtaaagggaatacgttcttagacactttgatgaaaaaagttgggatggtagaagcagataggaccaaattatacaagattatatataaatctcatggacaaaggagtttggtgctatgattttagtcacagtaaaccaaagacggtccaggatatgactgaagtgatcacagtaggatatttggccacaaaaagacaaataaataaattgtgctatgaattctttacagtgctctacagttcagatatcatttatgaattctttattgctattaaaaatggatgattggaaataattttcagctacggtatgcagttgtggactgttaagatgatagatataaaagtcctgagcatttataaagtggactgtctaatgttatatatgcacatctccacatgttataacacatgataatttattagggagaaaatttttcaaaaaatcagttgtatataaatgctccctgaatctaaagtgctggcaacttttgcctcaagggaaactcattttccttctttttagccagtaatttttaaaaggcctcaattagaaatccaaattttggttgggaaaatgtgactgaccacacttgaaaaaggaaaatacaaagtgaaaaaatatcattctttctgtgctagtataagttgcaaataaattagctgcacatcattcatgatctgatattatttggattggtttaccattcacaaggaccaacagtattgtcacttttgtcaatgtttggcaataccaaagagccaaagctgcaggtatgtctgttagataatctgggccaaattgctgtaagaatagagatgttattatttgtaacatactcatgtaaaataacaaattacatttgctttttt

SEQ ID NO: 344195 - DNA, 1000 bp, Homo Sapiens; identical to SEQ ID NO: 160836

SEQ ID NO: 344196 - DNA, 1000 bp, Homo Sapiens
ttttttttttttttttttttttttttttttttttttttttttttttttcctccacagaagaaataattttattccatttgagaaaagtaaaggatacattctttgtctgacaaaagtgattttgtcatggaactccaaggcctgcctggtgaagtgacagtgacagatgttagaggaacctgtggccctcagtgacacagagagcacagacatttggctgggaaagcacttgcatgatcgaaacatttcctattgcagagattcagaagttctttttatcctgaagatcattctggtctctaatttaagattgaagatgatttaatttgctaatggaacccaggccagctgttttttcacacaactgaaaggagagaaatcggaaatcactcttacatggtgagacctttgatacttttctccaggcctcatgagtcaaaggccatcactgtccctccaccgagcatctgggcagtgtctgcctcctgtccagaactcttggaggccgggccagcagccatctcagcccctcccacccctccatgccacagggcagcaccaactcccaagtagtagcaggctctgtcccgcagtccccagcccatccacagcaccactgctgccttggcagcgagaagggctgggaaaactgcaagccccttcctccctcaggtgttctgatcgccttttacaacaagggtcgcctctagcccctccatcaagtctttggtcctggaacattgtgagttacattgcatatagtgttattctaagggcatcacccagagaaaaaggacgaagcggccttctcactctggagctccgaagaactgagccagggaagcagcagggggagcgccctgtgttaggtgtgcacaggggctgcggctctcagcacaggcctgacgaccgcccagcttcagacgccaaccatagtgaggcctcagtgacaggcactcatcctcccctccaaacactggccagcaagagctccttccaa

SEQ ID NO: 344197 - DNA, 1000 bp, Homo Sapiens
ggccttgtataataactggtttatttcacttaacacaacgtttcaaagttcattcgtgttgtagcatgcatctgtgcttcattagttttgattgccaaatagtattgcattgtaactctggtatcttttaattaaagagaggtttaaaattgtaaccttttaaataaaatggctcaaaatagataggaaaatgaatgcctgagaaagttcttctgagtcttagagtgtccatatctttgacttcctctggggcatactaaagtgaggacagggcaagaacttgaagatgtgccatttaaaaatgaaaactccatcttcacggtttgggcttggaaccctgtgctaatgagaaaatccctgcagatttcagatatgccaagctcatcttgagtatgacaaggaggacagttgcttatgttgtgcactgaagaaaaaaatgagaaaatgaaataagatggcaaggcatttaccttagcaaaaaatgtacaggcttccttttaactttcttcagaaaagaatatttgaagatgcagatagtgaaaaaggaaaaagatccactgcttcagaaatgtcaacaactaccagtaatccttagtcagagataaaaatctcttaaagaggcgtaggaggggagcccctcatgcctgttctgtccatggcatagtcttctcacctgttaaagtttgagtcataaacccccgcccccactatcacttctcagtctatttgaccaaatccaaacctatttcctcccacttccaaatcactgcctgccattcaaacccgtgtaggcgaactccagttggcatttggttttgaattaatacatattagtgggtggtaatacatttctaccagtgcatatatttacttgaaatacaattttccatctaatgcattttattcacatcactgcatggtaactgcatccagaataatatctttaatgattattcattactggaataatgtatcggtgccaaacagtagcttttaagtg

SEQ ID NO: 344198 - DNA, 1000 bp, Homo Sapiens
ttacttgggagctgactgtgtcagaagcttttcccgtgcatggatttctccgtgcttattaagggcagagcttttactgaagcacttaccacagtcatgacacccatagggtttctctcctgtgtgggttctatgatgtgcacgtaagtcagaactcttactgaaactctttccacagtcaggacacacatggggtctctctcctgtgtgtatcctccgatgtgcactaaaatgagaactgttattgaagctttttccacactcttcacattgatagggcttttctcctgtgtgggttctctggtgaatgataaggcttgagctctgattgaagcatttcccacactcaccacattgataaggtttctctcctgtgtggattctcctatgggtgatgaaatttgaactgtcacggaaactttttccacagtcaagacatttataaggtttctctccagtgtggattctccggtgtctaatgagtcgtgcactccgactgaagcttttcccacaatcagcacatttatatggattttccacctggtgggatacctgatgcatgagaagggagtttggaccaaagcttttgctgtatttgagatatttatagggtctctctcccaagcaaggtctctgttgacttaggacttcacttaagctcttctccgggagtgtcagttttcctcttttctcccctgaggtctttgcccactgtcttcctgatctacagtcactctcattgcctttaccctgatgaagataccggggaattttcctttcagatcttgcaagtaatgtcctatgcagttgtacttcctcagaaatatcccgttttgaattatcttcattctcaaatccagcttcaaaaccacgggggctttggaataacactggagcacgggttatgacagcccctgggggtatctcagtatcctcttcatcatcatcagaatcttcctctgtggcctcgtctgcttcctcagcttgcttctgagcttca

SEQ ID NO: 344199 - DNA, 1000 bp, Homo Sapiens
ttttttttttttttttttttttttttttttttttttttttttttttttttttttttttttttttttaactttagcaagagccttcattttaatgaaaattgaatttaaacaaaagttgtgtatcttcttctggctcacagttgtacagtaactgagttcaaatcctgggttcattcactagtttagtgacacggattttgcatccctacttataaaatggaaatgatactgcctaaatcaaggttgtgctgagaattaagtattacatgggaatgtgtgtaaagtgcttagcacattgcctgggacatatacagtaactgcttcccaccatacagatactgaaaagcccaatcactaataacaatttgttatatttactttacgtggtgttttttatgtgagttcgcttatgagtaatgagatgcaaattcgacttgaaagttttcccacacacggtacatttaaaaggttccgctagcatgtggctcttctggtggcatgcaagttctgagtccaaagcaaaactttcctcgcatgttttgcacttatggggcctttcctctgtatgaatgttctgatgggaaataagctcagagaaacaaggaaaggtcatgtcacagtcaggacactgtaagggcttgaattttgagaatgagaagaaattgtccccatcatcgctgcagcgttcagagtcctcgtcgtggctcttctcggaaagggcaggatataaggactgcctgaagctcttcatgcacttagtgtgctggtactgggggcctgatacgaatgtttcctcaggcaaagcaagatttggtttctcattaaaatgtttatcacagttagtagattcgtaggtgttttcagcactgtggcttttctgatgctgtgccaatcctgggagccacataaaacctctaccacatatgctacatgtatagggcttctcctttacgtggctattcatgtgtcgggatagatgagagtgctggcgaaagctggc

SEQ ID NO: 344200 - DNA, 1000 bp, Homo Sapiens; identical to SEQ ID NO: 160837

SEQ ID NO: 344201 - DNA, 1000 bp, Homo Sapiens; identical to SEQ ID NO: 160838

SEQ ID NO: 344202 - DNA, 1000 bp, Homo Sapiens; identical to SEQ ID NO: 160840

SEQ ID NO: 344203 - DNA, 1000 bp, Homo Sapiens; identical to SEQ ID NO: 160841

SEQ ID NO: 344204 - DNA, 1000 bp, Homo Sapiens; identical to SEQ ID NO: 160843

SEQ ID NO: 344205 - DNA, 1000 bp, Homo Sapiens
atattggagtttttcactagatcacagcatacagaatcaaaggtttgcatttcgtatggaatgtatccaaagaggccagcaccacggtaggacagcttgcaatcacacaccctgatagttcggacgaaataaagtttgcagaattttatttaaattttttttttgtattcgtagttgtttgtcatcgtaccaatgcatgcaaagcattccactcccagaaacaacgccaaaatgaggtaataggagtaataaaaaaaattagtatcctttctaaataaataaattataattaaaaatgcaaaacaactataaaaataattaaataagaacccacgatatctacaagttagtcataaattatgattgttaaatataaggcatttaaactcacaaaaccctgtaaactagcaacgtgccatgttttttgttttttgtgttttttttttcatttttgtttttctatcagctgaaatcgctctagcatttgctctacgcgcgcaggagatgaaacacaagggggcctgacagacgttgctacagccccacgcagggagtgtttgtcccgcctacaggcggggggcttaggggatttctttaggaaaaaaagaaaaaaagtctggtgcttttttcttcaccattgaaaaactgtgcttgttcattaggcgtaaagagttaagaatacttgcacggaggctgggaacatttgcagaagaggagcttgagtcctgccacaggtggtggccaagggcaactgggtgccgaagggggtcctggccaggtggaggggcagcccctgctcaccctctgcttgcacccaaccaagcttgtggtgttgggttgattgattggcgtcctcggtggacccgcggcggcacagctgctgcagctgctaggacgcccaacttaaaccctggggctgctctcaccccagaaggcactcatgcgtctcagtcaagaaagggtctgagtcccttgagttgagcaggaggaggacttacca

SEQ ID NO: 344206 - DNA, 1000 bp, Homo Sapiens
gagacagactctcactctgtcgcccagcctggagtgcagtggcacgatctcggctccctgcaagcaccgcctcctgggttcacaccattgtccagcctcagccccctgagtagctgagaccacaggtgcccaccaccatgcccggctaagtttttgtatttttagtagagacgaggtttcaccgtgttagccaggacggtctcaatctcctgactttgttatctgcctgccttggcctcccaaagtgctgaggcagaggaatcgcttgaacccaggaggcggaggttgctgcgagtcaagatcgcaccattgcactctagcctgggcagcaagagcaacactccatctcaaaaaataataataaacaggctgggaaaactggctcacatctcttggccatgcttgtttcaaactcttgacctcaagtgacctatgtgccttggcctcccaatgtgctgggattacaggcgtgatccactgcacctggcccaatcctcttatcataaacacctgcatgtcaattaaggcttgaactcaatgttaagtcaacacaaactcaagtcaatgctgaattgactccaatgtcaattaatgcttgatggtttgctatactcactgcattgggaacagttatctcaaaaatgaattttctgatgttctgcaaggagtgacctcggactgaagaccttgccacactgatgacatttgtaagatttctctccagtagggattctctgatgtctaatgaggtgtgaacatgaagtaaaggctttgcaacactcatcacacttgtgacatttctctcctgcatgaattctcctatgttttgcataggatgaagcttgactgaagaccttgccacagtcatgacatttgtaaggtttctctccagtatgagttcactgatgaactgcaaggtatgaacgatgtctgaaaaatttgccacatttattacactcggaagatctctcttcattatggattctccaatgatttgcaa

SEQ ID NO: 344207 - DNA, 1000 bp, Homo Sapiens; identical to SEQ ID NO: 160844

SEQ ID NO: 344208 - DNA, 1000 bp, Homo Sapiens
gagatggagtctcactcagtcgccaggctggagtgcagagcgagactcatcaaaaaaaaaaaagagagagagaagaactagtgttttcctacatcccttacatttacagggtttctctacagtgtgagtttgtacatatctagaaagattcaactgttcaggctttctcacattccttacattgatagtgttactttctcctgtgaatttttacatgttcagttaggcttgaggaaacagcaaaggtttttccacattcttcacatccacagggcttctctctagtgtgttttcaaatgtgcaatacgagctgagaaagaagcaaaggctttcccacactggtcacattcaaagggtttctctcccatatgagttcttaaatgttgaatacgtcctgaggatgtacggaaggccttcccacattccttacatttatagggcttctctccagtgtgaattcgcacatgattagtaagatctgaatgacaagtgaaggctttcccacagtccttacatttatagggttttattttggtgagagtttttaagcgatcatgaaagcacatggaatttcgaaaggaatttccacatgcgttacattcagaggtcttctctgctgcatgagtttttaagtgttgagttagtacacaagacctactgtaagccttttcacatgcattacatttatagggtttatatccagtgtgagttcttaaatgatcaactagactggaggagacaacaaaggctttcccacagtccttatattcatagggcttatctccagtgtgtcttcgtaaatgtttagtaagatctgagcgttctgtgaaggcttttccacatttcttacattcatatggcttctctccactgtgtcttcgtaaatgtttagtaaggtatgagcgctcagtgaaggctttcccacatttcatacattcatagggtttctctccagcgtgtgttcgtaaatgtttggtaagatatgagcacttagtgaaag

SEQ ID NO: 344209 - DNA, 1000 bp, Homo Sapiens
ttttttttttttttttaaggagtgaaaatattttctaatgttgtcatgtgctttaaagatatgtatgaaatgtctgtggatgaaataatatatctggtatttacttcaaaaataacagagatgagagaagtgggtacacagacaaagcaagattggccatgagctgataattcttgaagctggtgatgaggccgctggagttcaatataagattctgtgtatttttgtatatgttcaaattttttcatgatagaaagttttaaaaagttactttttttttgagacggaatctcgctctgttgctaattttttgtatttttagtagagatgaggtttcaccatgttggccaggatggtctttatctcctgacctcgtgatccccctgcctcagcctcccaaagtgctgggattagggattacaggtgtgagccgctgcgcccagccaaaaatttacatttttatctagcatttccacttctaggaatttaccttaaagatatattacacatgtacaaaataatttacgtgcaagggaaatattatgggattgtttgaaagaacaaaaaataatggaaagtccaggcacggtggccacagaatcttttaatcgggtcatttttgtattaggaattgtcagaaatttaacatattttgaatggcaagaagcagcttttctatattcattttttttttagcatagattatctgatgcttaggaaacagtgagtgaggcaaaaagaattcccacatttatttaattttctttgggtgtgagttttctgatgttctatgatggaagtgacaggtgttttctgacattaattacactacattaaaaattacctagtactgagccagatgtgaactccacataaaggcttatctttatcccttacactcaaggctttctaaccagtatgaattctgtagtgttcaatgagttgtgagccaagaataaatgcctgcccacactctctacattcgtaaggtttgatacca

SEQ ID NO: 344210 - DNA, 1000 bp, Homo Sapiens
gagctgctgcatctctttttatttctgagataatcatggctgagatgattggctttctatgtatagtatggttatctttttactttacattatggtttgagtaattactttatgctaggcacgctgctgagcaatttacatgcattatttcattcttctattaacttctgaggtagaaccattattattcccacactataaataagactgaagcttacaaagcacaaactgctgcccccaaattagagggcaggaaatggaagtgcaaagattggaacccaggtctttttgatcctggaatatgtatcttaatcctggataagtattcagagaatgagatggatagtgacacaagatagaaactgtggaaggtaacctggaacaaggtgttagaggctaggtttttaggctattttgaagaatgtgtgctttaacttaaaaaccatgggatgccactgagggattttaatgagggagaaatgagattaaacatatttttaaaaatacaaatttggttgcaatgtggacatctgacagagacaatggtgagtacaaggagaccaattagaaagctactcgagtatcccatgtcaaatatattaatgtgcattggacaaggatgatgggatggaaatggattcaagaggtggattccagaaatattcaggagatgaaacctacaggtcttggcaactgatttgatgtggggggtgagggagaggaaagagtcaagaatgactccatagtatgaattctctcatgatgagcaagatgtgcacgctgcctgaaagatttcctgcaatctttacattcatagggtctttctccagtatgaattctctgatgtagagtaagagatccactatagctaaacgctttcccacaaacattacattcataaggtttctctccagtatgaattctctgatgttgagcaaggcctgcattctggctaaatgttttcctacattccttacacatatagggtttttctccagta

SEQ ID NO: 344211 - DNA, 1000 bp, Homo Sapiens
ttttttttttttttttttgaatgaatgaatgaatgaatgaacacggcgcttcgcaaaaccaggaaaaggcagaggctcacagaaccagggaacgatgggctggggggagcggcaagaattacgcaattatgcaggggccgctgtgactaccaggcaccccctccaactccccccctacaagggctgctctgggtcagagaacgtccaccgcgctgactgctggggctgggggctgggggcgcagatcagaaagaatgggcctgaattgctcccaggctgggcatgtggcgcccgcgtctggggctccagtgggtgggtggcccctcccgcatggacggcgggcgcaggggagctcggtgctgatgtctctctcctttaataaccaccctgcgtgagtggctgacgcagcagccggctgccgctgacggggagtggggcggctgtagtgggggggcccgaggtgcagagggggtggtgatgaatcacacagctgctgcctgggggagggggtcttgagcccatgaggggtcccagagaccttgtcactggagacagcgcccctggctacccccacctcgatccacttgagggtggaagtgagtctgaggtcaggagtggggccgggatttccctgggatgagcagcaaagcgggggtctctgtacgccaacttcccccagcttgtcagcagagggtcatccctccgaagactttctggggcagagaagcaggggtccgcgctggcttcttccaccagggctgggggaggcggcggcatgagatgactcctgggcgaggagcaagtggtggccatagagggccccccagaggctttggggccgccgaagagtagtgagtgagggtccttgtaaagctggttctccagatggcggcggctttaagactcccctccgccaaccaggctcagtaggggaggccgagccttagtttcctccttttcccattgcgattgcatgagggaaaggacggcctcgtaaatc

SEQ ID NO: 344212 - DNA, 1000 bp, Homo Sapiens
ccgactcgcacacatttaataaactgagctcttgcattgcctgccgccatcacctcttcctcaaaatgggctgtgggcgggtaggttcatcgctgtctatgtgctgccacagaattgctgagaccccccaggttagatccctggaagcagagccagaaagcagaaactgggggcacagggtttgtgggcaccccacccagatgggccggggaggcactggctgaggccaggagtctccccctggtcccaagggagggcaggctccagggggtgcacagcaccccagacagggggtccaacctgggcattggtacctgggccagttattatggcaggccccagtgtggggcaggaggcacccatgagccactaggagctgtggctggtgcaacagctgggatggggcagccacagcagccactaccggggagagtcaatggtggacaggggctgcgggagctgggacggccccacgtcaaagccacttcagggagcacagccctggcccagctggggggacaaggaaagctatgactgcaagcagcacagaagtgcagggtgggaagggatggcaggagccggccccctccccaccttccaccctgggacactgccgggacctccctcggccaggtgagcagcttcagaagcatgaccagtgagaagtccctagggcccaggccgggctagccaagtcccagtttctggatgaggcgcctcccaggctgtgtgtggcaggccccctttcttcagggaataagaaacatcttccacattcaagaaacaaagctggctgtgggtctggagagagggtgaggcagccccaggtctctgggtcaggcggacggtccctgcatgcagtgcccggcaggactgagcagggttcccggggtcgccggtacccatccctccccagcttccggggccccgggacggagccgctcacagaggcaccattcagacggccagacacacacgaaagctttatgtgcagggccca

SEQ ID NO: 344213 - DNA, 1000 bp, Homo Sapiens
aaaaaagtagaaaggatcgttatctttttgcttttgaagttattggggtcccattaaactcatatgcttcttgggcatgtacaggcattcttgccaacagagaacatctaacccacaaaaactttccaacgtgatgacaccgtgggggggattctggagccaacagtgaatccaggtggcactatgtctagctaagtagacatttccttcaagcgttcattgattttgattttgcagccttgcttttacgttgtcaaatatcaaagtgtgtggttttacagtttttttttccttccaggtctttaacgttttcggggacctctggaaaacctacaggcgcggccctgggaagctctgggtccctaggaggggaggtgactccgcggcgtcccgggaatgatcctcgcggagctcgcgaggtactagcgccccccagcgtctggattgagaaacgcaccctgcgagggtggagaaccagcccagccccaaagtgaggtggcagaaaaacgaactcacggccaaggactggctgagttagccagaattgtgtaaatgtgttttgtcttgctgggctgccccctctcctggtcctttggctagggagaacaggattttgtttgggatttttcttttgcttttttcgactgtgcctgttggcgttcgcgggttgccagcttcttcaggtccaagcctgggctggagctcgacggctccctgggtccccacgtgggcaggagctcggtcactgtgagccgcaacctcaaccgctactctgccttcatcaagtcgggaagggaggccttcgtgcttggcgaggcgttgggctttctcctgcaagctggtgcacggcgcgacaagcccttgaaccggctggatgcgtgtctagtgaagttcccagtcgtctccatgctccacctgcccgagaacagggccacgggctgcctccagagggactccacctccatgcacaggaagagcctgatttgcgggatgagccaca

SEQ ID NO: 344214 - DNA, 1000 bp, Homo Sapiens
tttttttttttttttgctttcactcttttattaaagaaatattacagataaatataacaactcccaccaaacctttcccacatcccaaaaggcaaccaagtcatatatggatccatgaccaatacacagtactgttctttgcaagatcttattaaattatacaaatgttatactgtgttcctttgtgcattttaattttttctctcaatattatatattgtaatctatccatataactataggtagattttgtttctaaattctgtattttatcacagaaatgatcacacttattcatctattccacaattgataaaaatttgttatatccaattttgggcaatacaaaccatgattcaggaacacagtgatatatatctctttgtgtacatttgtgggtgcctgtgaggccaatacaccaaaattcaacagactattccatgtttacatgttttttaaagaaatcttgttaccctaaagtaacggattctactttcatcatagttttaaaattttgctttttatattctggtctttagttggattttatttttgtatatgatataaagtagaaagctaaaatttttctcctatgaaccttccatttattaaataagccattcattccccagtgatttcaatagcactgtcatacacagaattcctgtatcttcttggatttttgtatgaatgctcactatcttactactgcttgatttattcacttggtaatacattgtttaaatgacagcagctttaaataagtacatgatatatctaataatagagtgtgtcttctctacttgctttgtcaagtttgtttcagctatttgtgtttctttacttttccacataaaatttttggataagtttgtgaagttccttaaaataaaactgatgtaaacttcagaagtatattaaacttagtgatttgggagagaaattatatttttacaatgtcaagtcttttcagacaaaatatcatttttcaggtgttctt

SEQ ID NO: 344215 - DNA, 1000 bp, Homo Sapiens
tttttttttttttttttttttcacgggacaggctttattatttatttttcagcatgaaagaccaaacgtatcgagagctgggctgggctgggctggtgtggctgctgaagccccacagctgtgggctgctgaagtcagctccgcgggggagctgaccctgacgtcagcagaccgagaccagtcccagttccagggggaggcctgcaggcccctggccccttccaccacctctgccctccgtctgcagacctcgtccatctgcaccaggctctgccttcactcccccaagtctttggaaatttgttcttttcctttgaagtcacattttcttttaaaattttttgttttgcatccgaaaccgaaagaaataaagcggtgggaggcagggccattgtgttgagtggtggctcctggagatttgtgtggccccacccctacccccggcaacctcaacacagaggctgggaagggtcgggggcccctggaagtagagccaaggtcccattctcctgcttgggtgaagtttgaccggcaagggcgtggccccctccatagggggacgtggccgtcgtgggggacaagggctgctctcctgtgccgagttctcgctccggggcccgcagggttggtggctgcagtggcagagccacggggaagctggccacgtagaaaactcggcccaggcgcctggccacctgggcccggatcttgagggcgggccccagcttcagccccatgttggtcagcaggtgctcctccgtcagcagtggcagggtctccccgtcgatcccctgctccctgaagacccgagtgtactctccacagccagacaggccccccacgaagctgcagacgtcatccacggtccacttggtgacgtcctcaggggctggggcctcctccccatccatggagagtccccctaccgcgcctgtgtggaagtaggggctgacggcataagggaagcccaggggcagtgtggaccctgggaaaagcccct

SEQ ID NO: 344216 - DNA, 1000 bp, Homo Sapiens
cagagtcgccagtcatttatcttcatataatcagacaataattttgatgatagaatacttggattaaattacctttttttttctgtgctttaagatagaaattcaaagcactaaaatgccaactaagtaagcacgggtatgaattgtgagtaaaatatgaatactgatatttttgtaatagtttgggtctcatcaagaagaggcctatttcaggagcataataaatacatattgcataagactttggtactgatggtgctgggttcagaactcagggaagattttgcaaacagaaaatatttttcacagaaaaagtgcaaggaaagcagatagggataaacagtgttaaaactttctttcttaatgattcctccgattagcctaaatagtcctctatcaacatgcatttttagaagaagaaactcatctcttaaggaggtctataatctgtcttaagccttattataaaataaaaaagcaataatttgataaaatgctaaaatagaaatgacagtgatatttgaaaaatcttaaaatgtgggaagtattctccatgactaaactaattaaatattcccaaagtggtaaaatatttcatcattaataggtgattgcatgtctgaaatgaaaaatgttgttacttctgaatagcctgagaaaaagaacatgccaacaatttagaaattaaaccctacacaagtgttgacagccatagtaagaaaagagtgcatacaacaaatgttaagagctatttacagatttaaaagcagttcccattcttgcagcaaaattggtgacataaaaccatttgtaccagattatcatagtcatctttcacagagaaaaaataccaatgcagttaagagatttctcaaaagattcaccattatattgatcatttttatttaaacctttaagatttttatccatgcttgtaaataaggcaaaagaaaggcagaaaagacatcttgggatgaaaactaaattttaattttagttt

SEQ ID NO: 344217 - DNA, 1000 bp, Homo Sapiens
tttttttttttttttttttttttttttcacatttttatataatttttatttatatctcgaatgaaatcatatatataaaataataagcgtcaaatgcaaaacaactttgcaagataggtaaggttatctccatttaacagataaaaaaacaagttcagagtggttaagaatttctccaacatctgtttgactctgaagctcatgctcttcccctatgctgcttccaaagaaagatttttcattttaaattccattctttctgatgctgtagatccattttcttccatttgtaatactgtccaatgaaatttggaactttgagcaatggagttctgtagtattctgtggcttttgatgtagctattctggaccatgtctggtagtaatcactaaatgaggttgttttaattggtctgatacatttacgtgggtctttaggtaactcctggctgtcatctttcatttgtaatggcctgttgaaaagtcttagaattgttctgtacagagattcatctttaaccagtattctggctgcttccaaattcactggattctctagcactggattagaaagcataacctgtagggcaagtaagatgctgctcaatgtatagtttgtattccacttctcagggttgtccaaaaagtctatacagggctgaccagtgtgtgggtctacatttggatgaaacggaattgttataaatttcacaactggaggagcatagttgtactccgatgtaaaatgtattgtcagttggaagactaaaccctgccaaactgaattctgtagaccttcaatttcaacttcccattccatcatatcttcacttacaggcttagcagtgatacccttataattgttctccttgagatcacagaagtctctgtgcagcaagaggtaagctctgccgtgcatgataggcagcggagggtctgacacttgtccccaaatgcctcaggtttactctgaggcagatgtttgaagttatgggtcact

SEQ ID NO: 344218 - DNA, 1000 bp, Homo Sapiens
ttttttttttttttttagaaatattttttcttttataaaataacttggtatttttctgataatcttccaatagataaataaaaacttttcttatgctacagtacaagttgatttttaaggaaatttgtgcaaacattaagaaacaccgcattggttctgggtgaaagtgccagtctggaactctcttgaaagaccatacagtctactgctaaaccctgggactcctcagacttgcactcagattatcgtttgcctgccctgattttagactctgctaattcaagtccctgttatcttgcttgacatcgacaaggatcaccgcaccgttccttcagtttccacagttccgtcagttcccacggagaatactgaggagaagacagcattcctgtctcacaggtcttctcacacagccacagactgtcctggtatcttttaggtcctatggcagccatccagatgcccatgcttacatcttcaccctgataggtctttaacctccccgagttgcttgccagccacttgacgatgtccttggagatcacatatcctgacccacatgcaaaggcagggtaagcggggctcgggtactccaactcctgccactttccggttcggtcaactgcccaattcagtctgaaatttccccaccaaaaattaggcccatccagattcttttggacaatcctattaaatacagcttcgaggtctatgtaacagtcatcatctgtcttcagcaacaaattgaagctcgttgtttccacagtccatctatagaagttcaataattttgcaggaacattacgataagtgtcgacaacatccacaaaaacaatatcatcatagatgctgctttcctccttcagtaaggcatcttcctcatggagattccttatatgatcaataagtctttgagggcgagaatgaaggttgtgtaagagagcatcaccttcctgaatagtatatataaaaccacctgcaactccctccacaccttcca

SEQ ID NO: 344219 - DNA, 1000 bp, Homo Sapiens
gtcgctgcattttaataaacatagcacacaatgtgttgctacacaaacaccattcataaacctgagtcacaggtttcagatgggagctggggacgtgtataaatagcctgtgtatgttaaacagtagaaaagaaaagaagtttggggaataaggtcaaaatcattgtgcccaatttaaacatcataaaaatctcagccttgtcattatttacaacccccagcataactcccacccaaaagagaatgccaaacggaaaattctaaataagatgatgtcctcacgtcgacctaaacagtacaaatgatgcagcatcataaaacaaagttataattatgttgtctcacttcctggctgccggatgcccacggtacagagcagccactccacaggattttctgagctctgagctgtctggggtttttgtaagaacatagctttgactagcattgaccaattgatttgcatttaaagactctgtgatggtttgaggtggcaaaagaagaatacaacttgtgtggtggagaactaacaccttgatcatgttgcaaacgtttcaaaaatgcatttttcctatattcacccctcctcagctgaaaatagcccagcaggctcaaggctggttgcagctgaagacaaatcccacacaccctccagcccctcccatttgagaaaaagggcatggccatggcttggaagaaaggcaacaagagtcttgggcagccaagacattctcgaggctttcaacaggtccctgcagacttggccttgactctgggtcattctgttccttagcaagcaccttgtggccttccagcctccgctcccaggaactcatttgaacttgcaaggtgctgttcaatgaagtggattcaggaagcagcaattctctctcaggagaggtctagtgtttcgtcacctactcccccacaccactgatgctcagaagggctctaggaccccgtgtgtggaattcgaatgccaaagattgacaaacagggt

SEQ ID NO: 344220 - DNA, 1000 bp, Homo Sapiens
gagacggagtctcgctctgtcgcccaggctggagtgcagtggcgtgatctcggctcactgcaagctccgcctcccgggttcacgccattctcctgcctcagcctcccaagtagctgggactacaggcgcccaccactacgcctggctaatttttttgtatttttagtagagacgtggtttcaccctgttagccaggatggtctcgatctcctgacctcgtgatccgcccatctcggcctcccaaagtgctgggattacaggagtgagccaccacgcccagccattgtttagtaatttcttaagcaaacctacttgttgtggtaaagccatagccagcccagctcctgtatcagtttgtcacagaatctaaggtcagaatctgtgaggtcttaaagagagcaaaaggaatgcttacttgagaataccagttcatatttaattactactaatcacagtagcactgaacatggctctagtgagtgggcctcagtcagttcaggcagctaaagggagggggatttcctcctagtcctctccctagagctaaatatgcatctgggaaaaattaggctctggagcacagaggtatttttctagaggaaaaagaactgaactcccagcactaggtaaaactgcaaaaagaaaaacacctgtgcccaggcactagctacaaggccacaccagaaaaggaaagctgggtcctggaagcttcaggacaggaactcttccttggtcaagttttccccagcacctagcacataggaaggtgcttgatgagtgagtgttaaatgaacctgtgagtgctcaggatgatttcctgataattgggttcaggaatctactgggaggagcttaaacctagaagttccctttttgaaagtctcaaatatggttccctaacttagagaagacagatgatgtgggaaggaggcctgaggagaggatgcaggctggcagaagggagcagggtgcatgcgagcccagaccctgacacccttcc

SEQ ID NO: 344221 - DNA, 1000 bp, Homo Sapiens
gcaagataattcttttttatttcatttttaaaattgtcgtaaaatacatattctgtaaaatttgctatcttaaccattttcaagtgtacagttcatgttattaaatacatttgtaatgttgtgcagccattgccaccaactacccccataatccttttgtcttgtaaaaccaaaactctatacctatgaaacaatcattcctcattcccccttcctgcagcccctgccaaccaccactctgtctttgtgattctgactgctctaagtatctcctaaaagtggaatcacactgtacttatctttttgtggttggccttatttaatttagcataacatcctcaaggttcatccatgtggtagcacattgcagaattcccttcctttttaggcagggtattgttccattgtatagatataccatcttttgcttatgcattcgtctgtcgatggatgcttggttgcttccacattttgactgttgaacatagatactactttatgagaagggtgaatggaaggacaatttacaaatgtgtactcatggtattgcccctggggtggccttttgtaccctcagggagaggtaggggccaatcttcagggctatggctcctttcagtctggggcattctctggaggaggaggcagctgtggtcaagtgcagcccacactcacggcagctacggcatccaccaaacggccccttattatgcataatattatggtgaaaacgttgtacatacatttttaggtgtatctctgatgatttcctaggctaaattcctggaagtagtttaaacaaagagtatattcatagtcaatagatggtgattcaatgaatgatggatgaataaataagagagaagaaggagagagaaaagacattgggaggttgaagggatgaacaaggcacgtagcaggcaggtgtgggactgggttcctggggagagggtcctgctcaccttggtgataggaccggcatgggcctggtactcattga

SEQ ID NO: 344222 - DNA, 1000 bp, Homo Sapiens
ttttttttttttttttttttttttttttttttttttttttttttttaaagtccatagattttaatgaaatttctattcctgtctctgagcggctgctgtgctttgtctgggtcccccaggggacaagagtcaggctggaatgagacctctgtctgccaggcctttgtggaggcctgggaggagaaaggccaaaggctttgatgcttgggaccgatgcccggccactcagctccagacaccagggatctggcaagggggtggggcaagggccagacagaccaacagccttggggtcctggcgagagctcgccaagaccagatctgaagctggctgggccaaagcagctgaggcggcagcggcagacaggtgcgctgtggcagaagccagagcctactcggtgaccagcccttcaggctggggcttggggtgctgcactggacatgggtgtggaagctggcccttccctggggctgcactgaagctgccgtccccagcggtgggtagccgactggcctcgaggtcgaaggtagggctccagaggaggtgcaggcaggcagcactggagaggtgcaaccccgcagaggggaagcgggggtctgaggccctgtgtggaggaccccaagggccgctgcctgtggttgggagagacacaagaaggccccacagatgcctgcagctcctgctccatggccttcttctgttcctttagctctgccagggtgggctccagggctgcctcagaggggtggcaaggcctcaaatactcctcttccaggcagcgctgcaggatgaggatctccctctccaaggtgtgacactcctcctccagaaggcccctcaggtgtctggccacctggtcaatgttggacacgttcagttggtccttgatgatgctgagatctctgtgaccgctgctgggcccaccacctctcatctggaatatctcctgttctggcaaatcacacctgggctcctccaaggcaaagtgcaggaccctgg

SEQ ID NO: 344223 - DNA, 1000 bp, Homo Sapiens
gagtcctgaaaatatattgtttttcaaaattccgagtgacgtgcaactatttcataaactggagcacatgatcgggtgtactattaccccttcctctaggtggtatttcaaagggtacgtatttcccccacccttcatgaattaactccttgttttactttcctagggcggcagtcacaagataccacagactgggtggctgaaaacacagaaatgcgttctttggcagttctggaagctatcatggaatcctgaaatcaaggtgtgtcccggatgtctccagggagaaccgttccaggcctctccctgctcctggtgtcagctggcactgccaggcttcctggcctctccctgctcctggtgtcagctggcactgccaggcgtccctcggcttgtaagggcgtcactcccgttgcaggccgtcttctccttgcccctttacttcaccttccctcagtgtgtgtctatgtctgtatccaaatttctcctttttgaaaggacaccagtcatgctgcactagggtccctgctaatgacctcattttaatcagttactctgtaaaggtcttatctccaagcacggtcacattctaggggactgggaatcaggaccccaacatacctgttttggggggacacaattcaaccctaacactcccattttctaatagaagaggagaggggagggaaggagggaagggggaaggggccggagacctcggcaggagggagggagaagccagcctgccgccctgcgcgcaccggctgtgtttctgtgcgttgtgcttttgttctgcatgctgggcgggcggaacagggtgctggcatccaggctcacccagaggggagggggacctgcagggggaggggagcactcaggggatcaggggaggagagtgtgggccaggtgacctgccaggcgagagaaaatcggggaatccgcacagcattttcagacagcctgacagcagccgctcgctcccctctgagccccagccccc

SEQ ID NO: 344224 - DNA, 1000 bp, Homo Sapiens
cacaggctaatttgtttcactgtctgtctcagatgcccaggtatttgaagtcacaataaagattgtaaaccacaacctgacggagaagttactcaaccgcagcagtgtggagtaccaggacttttctagacaactgcttcacgaggtaaagccacaatgcagacagaaatcttttcttgggtgttctgagtgaggacatcaaacacaagccgttaattcctgcccagctcttcctctgggattgtggcaaaaatacatgttactgcagcttcaggggaggccaaacccaaatcgcacagtgattagtcaaaagctttccccctgcttttatggggtacttaatccagatactgggccaatccatctttaagatatgtgcctttattcaaatggtgtacaccacttactcctactgttggattttctgtggaaccttctgtctgagggccctggcttccagctatggggtagcttcattagtgaagcatttaccaacaatcatggcatccattcctccctcgtgactaaagggagacatcagcagacagccagggagaagcaagccagtgggaagcaccatctatccacagatggtgcattggagggagaagtgacttcctaaactgccaagaatcacataaagtctgaggttttaccctccctgcaaactaacaagtgagtctgccacagtttcatggatgctggcagaagacacgagactcctgggccagagacggaagactgtattactccagcacagcaggcagcatgcgtgtgctgctgtgccggttccccttcctgcacccgagtcccgcagaggtgatgcagaggggaccaggggcatgaagcacacaaagtgggtctgcacctgagctgaggaaccccaactctagggaacctgaatcttttataatgggtgcaagcactggctccagaaggagacattatctgttacatcagacagtaacaaacctgccctttgctctggagggagccaata

SEQ ID NO: 344225 - DNA, 1000 bp, Homo Sapiens
ccaaaaccaattttttatttttatttattttaaaacagtctggctctgtcaccaggctggagtacagtggtgtgatttcggctcactgcaacctctgccacccgggttcaagccagtctcctgcctcagcctcctgagtagctgggattacaggtgcacaccaccacattcagctactttttgtatttttagtagagacggggtttcaccatgttggccaggctggtctggaactcctgacctcaagtgatctgcctgcctcggcctcccaaagtgcctgggactacaggtgtaagccactacatccagccccaaaactaattttttaaaaagcagagagagtgtgtgtgtttggattcaaggaaaatcttatctacaagcaaaggtagaaagaaggactcacagaatctatccaaaaggcccaacatctgactgacaggagttccagaatgagcaggaaacgagaagaaatgttatcaaagaaatgccaggtctcaaggcagaacgtgctcaccaagcgcccagcgtggtgaggaaacacccgcagttggtgtgaccccccagaggtgcagggatcagaggggaccctgcaggcttccggggagaaggccggcggcctggctagctctcaccaccaaggaccacgactggccttccagtcctgttggaaaatgccctcttccccgattctctccccagcctgatgtccagcaggtgtgaggtcagggtaagacgcttctagtcccgtgaggcctttttttttttttttgagatggggtctcgctctgtcgcccaggctggagtgcgtgcagtggcacaatctcagctcacggcaaactctgcctcccagataccacacaaggacttctccgagccagctttctgagggttaactgagggctgaggggttcaagaaggaggacacgggcacagggactcacgggcagtgagaggcagtggggccaatggcgtgaggagcaccagagagcaggagggaacg

SEQ ID NO: 344226 - DNA, 1000 bp, Homo Sapiens; identical to SEQ ID NO: 160845

SEQ ID NO: 344227 - DNA, 1000 bp, Homo Sapiens
acacacagggtaactttttggaagagtactttgtaacaataaagtgctgtgcacagaaaggagaaatgccattatggggatgtgtgtgccgacctgggaccagcagggtgaaagagtctatcattcatgatgagagctgccatttgcgctaagcacacaccatgtgccaggcactatgccaagaaattgttgaatcttcacaataactctgtgagaaaagggctgtcattggacagatgaggacactgatgctcccaggggtccacatcacatgaagaggaggtgacagggctgggccttggtccgaagctccagccttccaagccaaggcctgtgagaggaaccgctgagacctgatgttaggcctgtttttctcatgtgccctggagaaggggactaacaccatcttttgccaaagtttggtgagggatggccaagagctctttgaaactttgccatgtacaatagcactcacaattttttttaaattttttatacagtggtatcggggtacagtggctcatcaacactttgggaggctgaggcgtgaggattgcttgaggccaggagtttgagaccagtctgggcgacatagtaaaatctcatctctataaaaaaagaaaaaaaatgaggcgggcatggtggcaaacatctgtagtcccagccacgcaggaggctaaggtaagaggatcacttgagcctgagaggttgtggctacagtgagccatgatcacactactgcactccaggatgggtgacagagcaggacagtttcaaaaaaagacaaaaaaaaatttacacagtggaatgctttctttaaaaactatcttatgcataagtacaatctagaaaaccagaactgggccacttatagtgaaggtggaagcagaggtggcctgggaccccccaggattcctggagcactgcctgaaggccatttatctagtagattggcactcactgtaagaagcgcaagaggtaccatgatgcttaaggctct

SEQ ID NO: 344228 - DNA, 1000 bp, Homo Sapiens
ttttttttttttttttcgggaactaatagaaatttaatgttgttttaagataatacttaaatattaagaaagctaaaatttaaaatgtgttgactaggtttttctacacaattatatttacataatgactaaggtaaaacctttccacaaatagttgcccaggaggaagaaaaagcaacctacaacagtctctggggcttgcactgccttctcaggccagctataccctagctgagcaaagaactgaagaagcaagtgtccactccccacccctctcccctgccccccttttgttacttgaagtgtttctgagtaacaaatgcaaaactaggtttgaatataaaagctagacgaccacgccaattcaggattgtgtttcatctgaggagacctggcatagaaaaaacaagaattctctctcatttacaaggatactgtgatgaaagtcaaagatcacacataaatttatgatctctgagcaaaggcacagctagcataaactcatctgtaaaatgaggggttttgacttggccatctgtcaaggtccattcagcctgtcaagctagcgtcaaagttcagatcttccacgatgaaagaacttgccctctgctaaggtggatgcagaaagaaaagtcccattatattgtgggaccaaccttctgatataaaaaactatgttgggattaaagtagatcaataaagtataaatatttatcatagttgtagggtaaatattcaaaagtttgaaatttatgtatactgtaaaactggcaaactggtcttaaacacataaagcaaagattttccatggggagagaaaatttgagagtaagcccagtgaattacttaagtcctgagcgtccataatctgcatccatgatgcctctctttttttccaggtcacttggacaagaatatttcttgtcttatgttggttctgaaacaccttttttaaaaaaagcatcaagaaattatgattcaggggtttgaaaccccaatg

SEQ ID NO: 344229 - DNA, 1000 bp, Homo Sapiens
aaaggaaacaaacgtattacaacttctgatataaacattcctcataagtttggaatttttcataactcctggggtaaaagttcttagaatatgtcactttctgggaaatttaacagcaaaagttttagctacttttttttttataatgcataagtgtacaaagttcaacatgtaacaaatataaagatgccaaagggtaaataaagcgatgcaaatttacataacaaagccatttgataaatgccactatcagctattactatatattccatcctataatctcataaatcaaagcttttaactgcctagactcatatgtgactgtattctttccaacatgcattctttcttcttccaggggttgttcaataacagcaggtatgtttctgccatgaagttcacagtgttctagaaactggacacattcttgaataacactatcacgaagcatgattgtgtgttttgacatgttttctaacaaggacaggaagcatcttttggcataataccaggtgtctgttcccagctttttgttgtaaggttccaagcttttgataactcgagaaataccaaagtcataatttcctttggcacaataaagagttcctatcaccaaattcacaatgcagagatggtacattttcttatctgggtcatcataagagagctgctcttcctccttttcaatcttcctcatcaactcctctgcttcttcattttgacttgtcataatataggaaacacagagattagccagtacaatagcactgacattcaggatgttatcataatgcttcttgactatgggttcatagaaaccaatggcttctttgtatttgttttcctgcatgaacagaacatgagccacattcaacttccacacatcatggtcgttacagaattccacagatttgcggaagatcttttccaccattggataattttcaagattccagtagatttttgcctgagccatcaacacaggaatgtatttctccat

SEQ ID NO: 344230 - DNA, 1000 bp, Homo Sapiens
ttatatttttgtgagttataaagtactttgatatattctcattaaatctgtaaatcacctctataagtaagtggtaataataaagcagatatttttgtccccatttaaaaaatgaagaaattaatgcttaatagggtggtaccctggaaaggatctgggaagtggtagaatttctggtctgtacttttacaaatggagcccttgggaggtgggttaggtaaaagaagctttttacttaacgttgtcttatttccagtctaattttacgctgtagcagaaccagatggctgagaaaattctggaactatggatcttgaccccaaggatatattattttattccaagaaagatcaggtaggcgaaaagatgacaggatacagagtcaatccataaactaaatatttataactgttctgaattatacagagtctaaaaatatgtgtcagctacttcattcctgtaaatactcttgctgtgttataaatatggcaagaaataaacatgaccaatatcaatagacttcttgaggctactataagttttgagaaataaggttcaaaaaataagaatgctaacacttaagcacagactagagcttgcttgggtttcttcctgcattacaaggtaaaaatttgttaatgtttgtttttattcagcttgggaaagctttgtgccatgaatacgtcgcatttaataacaagcaacacacggcatatagaaataactttaattaaaaaacttacatagaagattataatatcagacgtgacaaagatttgagtttatttgcctggacaacttgggtttgtctggcttttgttttctttttctttaaaaataaatgtacagtaaaactacaagcaaaagtttgtcagtattgaattgaattttttaccccttaaaaggactagtataatttccaatctctaacaaaaacttagtgtcaaatctcacagataaggccaaatggccaatattttcagttatgtgggtagtacaa

SEQ ID NO: 344231 - DNA, 1000 bp, Homo Sapiens; identical to SEQ ID NO: 160846

SEQ ID NO: 344232 - DNA, 1000 bp, Homo Sapiens
tttttttttttttttgcagaagcacatttaattacaaaaattataaaattatattaactatatgtagtttttaatatctagtatcaaaataccttttctactttggtaactaaatttttgagattaagaacaaactagttcaatcattctcacatacaaaaatttcatgtttatatttattaaaaacaaaataatgcaagttctgttaaagtaacaatatatacaccaagataaatatttggaattgtggaaacagaaatagtaaaaatttcaaattttttctcaatatcttaatgacttaaataatttagcttttttcaggcattttttgttaaaaataaacttacttaattttcaacttaggtcaatgtgcttttttgctttttttaaagacaaaaattagtaaaaatggcaggtactaggtttgcactagctaaaaaaataatgtttacagttgtctagatgtaacaattttaaaaacatacaaattcagtatgtagtatgaaaatacattaaaaaaacacataaggaactatgccccataaaaaatataaatgcaacttctattaattatatgaatatcaaaaattaaatattctgatttaaaagtagcttctataaaagtcggagtagtaggcattatttgctttcctaaatgtataaataagaagtatttctagctcaactaaacagaaatatcagtatttcttagcaaaaaatgtagtacatacatgaaaaggcaagcattgtcctgtattcaagtttgagtttaaattccattaaaatgtttcctacaacttgaaagaactacacacacaaaagtaaaaagatgaggtaaacatcttatactctgaagaaagtacttaatactcagatattcccaattaatctgtatcttaatactcagacattctaaaacaatgctttaaaaggtcttccataatgaggatgattgtgataaatatctgaactacataatgaacagcaggtttctcagtct

SEQ ID NO: 344233 - DNA, 1000 bp, Homo Sapiens
tttttttttttttttttttttttttttttttttttttttttttttttttttttttttttttatttattaacacattttatttggttaaaaggttattgtttggttaaaggctactaggtaaaaagaagcttaaataaacaggaaggtaagttatatgatgaccaaaatgactcaaaaggtttaatgttacaaaatagctattttatgcacatatacctattaataaacattaagaatggacaaatcaacactccatgaaaggccaaagaaacaaaaaaaaaaccttttcattaagcatttcatcttcttgatactatatttctgttttgattccttatgctttgaaaattcagaaaaaccagaatccataaattcacttcatcttctcatcttgtctctgaggcttggctctttaaaatagaaaggagtacaccttcttcttctgcttgtccgttctgaagatagatcttctgacttattttcagattcagcagtgttatttgaaacaaaactggtatttgacaagtcctgtaatggtctatcacctattcctgatttttgggttctccggttgactttaaatttcatcttgttcatcttctcatgctcatcatcacttacttgaaaggctggggagcactccaaggcaaaattttcttttattatcacatttttaccagaagaaacgctcaaaggtactaaaccttcacgaacactgtcaaaggaagaatcttgtatgttaggtgaatgtatctcagacaaagatctaaatgcctttgtgtaaaagtctggcttatttttgaccattttctcattctccaaattgttttccttatcagcttgttcagatacagtagactttccctgaacgctgtcaagtattctttccattacttcatggctctctggagaaggatctatggaggtcttccttttctttgacttagatgtcattttatttacctttttaacctgacactctccttcttttatttcttcc

SEQ ID NO: 344234 - DNA, 1000 bp, Homo Sapiens
ttttttttttttttttgtttttcattttaatcaaaacaaaatggttctaacaagatgaaatttggttgctgacttctgtcacacaaaagaagagatctccaaaccattttgttaatggagaagtgatattctgactgctggcctcacatatcattctgagttaaacatgttttataatatcacaaatgagcgaacatttttcaatatcctcttttaattttttttggccgcattttatgcatttcataatctgatgttttatcatttatatgaactaagcctgatgaaaccattcgacgacttgtaaactttccactgtagctttctcgttgcttgttaacctccggagcagtatatggtcttgcagagtgtctggcatggttatggatatcatctgagctttttcctaaaagccttgatcttgattttacttttttaaggtgtgtaaatgaggtcatgtcatgtaaatcctcaaatttatctgaacaatcctgaaattttggtttgaattctatatattctggtctgaaagatggtgaattatattcttttggtgaaaaagccacctctgatagagatgagtctgcttttaaaatgcttggatagttatcttttaattttacttctaatggaaaaaatacatttttcatttttctgtctggcatgctttctgattgacgttcacctaaaggtggtattctgcctgcttttattgtttcctggttagaaatagtgcacaatgagtgcacttctgtgggtgaaggtgttgattcatcatttttagaagcatcagcagttgaattatcttggtccgattggttcaaagttggtatagtcaggcctttctcagaatcattatccagtaactcatttgcagtagtttcagcttcctcatttacaagagggatatctactcctacaatattttcaagctcctcttcaggttgattacttttcgtgttttcagatgcctcatctatattagtttcctcagaatcct

SEQ ID NO: 344235 - DNA, 1000 bp, Homo Sapiens
tttttttttttttttttttttttttttttttttttttttttttttttttttttttttttttttttttttttttttttttttttttttttttttttttttttttttttttttctcaaagatgatttattagctatcctcactcatgggaaaaagaaaaacgtaaatgaaatcaaaacaaacaaaacaagatgaaaattgatacaaatggacccctggggctttcacgtctgcagcctacgtacaggaggccccatcaaaagaaacgacgctttaatttctgctaaggtctacggtctaacgtggtatgataaggggattttttaaacaaagaaactagaatgcttactagcccatgagtgacatgtcttccaagcccacatggtcacacttgggaattgctgggttcctttttggtttttttttttttttttgagatggacgtctcactctgtcgtccaggctggagtgcagtggtgtgatcacagctcagtgcagtgaactcctggactcaagccaccctcccacttcagcctcccaagtagccgggacaacaagcacaagccaccacacctggctaatttttaaaatattttgtagcgatgggggcctccctgtgtttcccaggctgatctcgacctccgaggctcaatcgatcccccgacctcggtctcccaaagtgttgggattacaggcttgacgactgtgcccggcctgggctcctttttggaatgagtcttcctggtcccgacagttctcctgcatgtcctcgtggtggccagtctctgttctttgatgacgaatttgctttctgagtagagtctggtcacctggagctggtttggtggaataaaggacaatggggttctaggatgtagctgggagatacaagctgtgagtactctaataatgagataagttttcttatgcaggccccagttggtcctgaagtccttcctcaaagaggcgatcctgaaacctacaccaagtgacgtgagcatca

SEQ ID NO: 344236 - DNA, 1000 bp, Homo Sapiens
atcaaacaattgatttttattgcagtaagagtaacaaggaatcccacccctcacatgccctttgctttatgtaaaaacctgtccagcagaataagcaacagtcaccctcaggaggcgatttagccccaagtgcccatagaacagcctcaggccacgacttctgtgctccctcgctgttcccagagccatctgccaagaccaggaattcacctttggagtctaacttgttttctctttttttcacctctcaaaaaataaaaagccttcagtaatacagcccaaggattaccgtgtgtctaaaagaaggatagattcccataaacaatgttgtcagcttgagtgaggtaaacacagaaaggcacacaataaattaaagcagaccttgactcttcagaggccctgcggtgacgtctggggggccagatctgccagtggctgcatttccagcactgacatagtgttgaggactgctctgggggaggagggacccctcctttaataagttatgttagtatacaggtcacaaggtcgactggaggagaaaatcctccccttcctatctggtggggcgcagcccctctaaagtgatgtgtgcttgcacaccagcaagccacagccaggtctgcacaaatccattttatgtacacccttgttagaaaactggtggcacattagtccacaggattccatctgttattgacttaagtaaatcacttagaaaacacaaaattggaggttgcagctccgtaaaataataaagtgctttcgatgagagtagctgttactgatagcttctcatttcacctgaggcaccacaatcaatttttgaaaggtgataagatttatcatgagtaaaaactgtaagagcttctttctactaaaaagcctgcatttctaaatgtacttttcattggtttccacatcttcatcttactaaattttaactcactgcggggtaaggaaatagtttattactgggtggcgggtgggggtaggggtg

SEQ ID NO: 344237 - DNA, 1000 bp, Homo Sapiens
tttttttttttttttttatatgaataaaattttattgaattttagataattagaaagaataaagaaatgcaagataaatgctttctaaacagcatctgatagcatcatcttttcagtgtcatggtattttcacttttctttataaaaagtatagacattcatttatttaaatttttacaaagtaagaaccatcaaatggaaaaaaaaataagtaatgctaaagtaaattcagctttttatcaatactgaaatggttggcaatggttaggttctgagtgtagccttcttggaaaaacagtgtttgcagcagctgttggtttccattcattcacataactgaaaaaaatgtcaggaagccactccctgtgaagactacgcttgcaggagaagagagcaaaaagtatggtggtaagagggagtaagagaacacatccagaaagaaaagacactcttattgagacatgggatgagtatcataagtaatctaggaaacaaatctgagaagaaatttgtgggttgcttaagtgtggttaaggcaagacagtcactaatgcaagtatggccagatctacatagcacaaaataaagtgggggagtttgtaaattaatctggtgaaccgcaaggccagccaagccaggtagtaaccacaaaagtaatctctttacagtgatgtaaaatgcatctgggcaacactgcaaccctgagctgacacaaatgtagggtagacacttccaggagcacaccagaagataacacctttagtctcagtcttacctcttttgcaaaaagcattattttgaaaaacgaaacagaacaaaaaaacgtctgccctccctgacaagtaagttaacttctacttgtcaaataaggagaaagttacatacctcagtacaaaaggcatcaggtgctgccctcattaatagtaacctactgtaatagcaagggagatctgaacaaccttgctctgagaggctgcccagcaaggctacaaccccttag

SEQ ID NO: 344238 - DNA, 1000 bp, Homo Sapiens
gctggttatgttttatttattttttaaaaacttgaatggtagttacaggtatgtttacttcataagaattcagagttgtacgtactttgttctatacactttgctgtatgtgtgctgtattttacaataaagagaataaaaaggttgttctttttctccaattctatacctggcacagcataaaattcagggggtcctctggcttttcatagactaagttttcagtaatctgctggaatatttgcagaatgtggtgtttttccatgtattggagtgaaacttggtaaggatcttcataaactatagaagggaaccttctataagtttgattgcgtatatgataaccctttccttggtcaatttctgaaaattcatcagatttggttactatggcttgagttttttcttgactgctggtatagttcaatttggataagatggaggggagtcttgggaaaagagcttggtcttttgcttggaagttactggtgaatctggcatcaactgggttgtagggtgggatagtggttgcattctgagtttccatttcaactgaaggcttggaattgaggtctacttggctatcctcaaatttgcagggttgtactctgtagtcagcctctttgtcctctttgctgttgcctaactggggaaatattctgtcttcagactggccacgtgtttcatagtaagacagctggtctttatgattagcttgtctgtctgctaagtggtcagtctggtcagattcagtgtagtgagcattgtcaactggaggttgatcagcattactatgagcttggtcaatagcctggtgttcagctagttcagtggcttggccgtacacttggtggtgagtctttacagatgttttgtggtcaacgaggccatacaatctgaggtcagtctgctcagaagttcctgggtcagccaggccagccaatctgtagtcagtcttctcagaacttcttctcctaactttccctgacattctgcggtc

SEQ ID NO: 344239 - DNA, 1000 bp, Homo Sapiens
ttttttttttttttttttttttttttttttttcagttttatctctttattaccaacatggatgccagaaacttccatcgaccatacacctacaaacatgtgggttgcaagtggttcgtttttgccctggagttcttacaaagtttcactaggtgggtctaggtttttctgctatggtcagatggaaaacttaaacttacagaaaagaaagctttatatttcaatcaaaactcatacccacaaagtccacaggggttgctgttacaatttagactccctgggaccaggtatcttgtactggagtctttctttggaggggagaaaaccttttatatacagataaccctccaatcaaccaccttcccactacagttccaagtagcctggcagacctgcccagtgggccagctagaacaatgcagtcctttgttatggcaggatgatttacaacacatgcaggctaccagcactgccccagacactacccctcccttccttgccttttcagaaatgtttcagagcaagagagaaacaaagcctcagaccctatttgcaatgttccctcctcagttatataatcctaaggaacatcaaattttccccacactcataattctaaagcatgtctaacttctcgagcaacttcaaataaaaagagttgtaatctaccaacacttgccaacaggcttttatttagaactaatgaacttgtaggtggaatcaggaagatcacaaacagagggttaaggataaatggaaacgatcactaattggactcgccaaaagacagactgtcgccttcaggaaaataaaaaaactttttttttttttttttaagaatcacagcaatccaagcaaagtacctcactgagtaggtatcaagacccttcaggcagaattccatcattctcgcaattagtgacagggacgctggttgtggaggagtatttggagtggtggcagaaaattgcatcggcatttccagcttgagtaggtcttat

SEQ ID NO: 344240 - DNA, 1000 bp, Homo Sapiens
ttttttttttttttttttttttttttttttttggatttttactagagacagggtttcaccatgttggccaggctggtcttgaattcctgacctcagatgatctacccaccttggcctcccaaagtgctgggattacaggcatgagccactgtgcctggccaaattaatttcttttgcatggttgctttcaccagtaagtggtccagaatacaaaatatggtaacagagaactgttttcatacttattccttggtacagttattaaaaataaaaactcgcattttaggattagggaagtctggaaaaaaatttttttaaacttggagatcacatattgaatagctgtcaaaattcaaactgactagttttgaagaacttcaaaaacgtgttcaaatgaataaagaacaaaaatgattaagaagaaacccatagctgcctaagagtcttaaaaattattaatgtgacactctcatctctcatcaagtgtatccaaaccacttctcatttgctctttccatttaaagactcacagtagcttcactacacatatatttatactgaacatgtacagcggaacataaatatgatgagcatttatgaaaaaactactatctaagtggtttacactgacttgtgcgctgatctagtgagttaggagacctttttgatcttatcagtttcttgacatgctcagtgaaaaactgttgcacagaaactctaagtcccagctggtaatcaggcccatcgtccactggaggcaaagcttctgctgaatgagaagttgatttcagagttcttatattttccccaggcaccaaaaggcactactactgcagtactgttatcctcagtaccgtactgtattgcctgttcagtcaccgcatgggctgcttcgttgggatcatggcactgattgacaaagtcacaaatctcttgactattcaccatgaagttaattccatctgtggtgaggaccaggaagctgtcatcagcatgatgt

SEQ ID NO: 344241 - DNA, 1000 bp, Homo Sapiens
caggaaattatgagtgtttttattctctgtaactctaaaaacaacctcaacatagcaagcctgacaccttttttaaaaataccaatctggtggatccctgctccagagcagctgctctccagtgtggtgagaaacgctggcagatacggtcttacttctcgaggagccccatcctcttcacagatgtggacatggtggggcaggcgtcggacagcgccctgggaagggcctgtgcaaggcagcctcagccgctctcccccaggagacattgtaaggatccgtgcacaatctttatgatatgaagatgctgcgcacgtttcaagcggctgcatctgaaacaagccaggcagtcagctgggggcttccgagtaactgtggcttctctggcgtgtgatgtttatgaaatacggttcatcactgtgaggatgtggagaaagctgggaggaggtgggctgaaacacagccagagcagagaccacagcactgacgactgctggggaagctctccttggtttggcctccccaaccaggcctcggctggcaaggatgcagctcatgaaatcttcttcctcggggtggtccggggtggccgcagctccgcaggcccatgggcaaacgggcagcagtccgtggacagagcgcagccatcagggtgatgcatgaagaaccagcagaggcgggttttgcaggcttcagagagcagtctctgtttcgcttccggttgctttgtcttccacagtgtctcctctcgccagtcgcggatgtgaactctcccattcacaacttggaacacctggtggctgttccggagcagcgtctgcaggcccccacactcccgcttcagcctccgcagggtctccgtgtccagctcgttggctacttctgccagagataggctctctcccccattccaggtcttcaaactcccatttcgagaacttcttgtgtttaattgctttccacctaacagtaaattcgctacttgcaaaaccacttggtc

SEQ ID NO: 344242 - DNA, 1000 bp, Homo Sapiens
ctagtggctattttcctaccacagtgttgagcttcattattatattaaataacttatatgggtaaaaaggagtttgctaaccagcagccaactcaaaaccttgtaggaggagggaggagaaaaatttacaacacagcacatactaaggggaaacaaagtctgcagtcagcttccaaccagtcttacccctctctggcaatactggttgagctaaggtttgggatctaaacgggggggttttagatcccctccctccactcctttcttcatttaagttaacaaaagaaacgtgggcttcctcagagccagcactcagctgggcaagtcccattagcagcaaatgttcaaccaaattaaaaaaaacacacacacacaaaagaaaactccatccaggtgcagagctgtgattcacatggaaattccaggagatgaataatgtgcagagccgggatttttagaggattctttctcaagtgtcttcagtgaacatttcagtctcacaaaatctgagtctatctgtcagctgcaggaaataagttctccatctggtcttgagtgagcttgtgtgctttgctgacccgggtgctccaatgactgcagggtcttcatgagcgttcgtggtacgagatgccagaaaacaaaggccagcccctccatgatctgcaggaagcagcagcagcagcaggcaggcagctcccatgtgttaaactctgcctaagaggctcgaccttaaagacttccatctgtctttctctatatgattttcaggtccttcactctcataagaagccaagtagagagcatcttcactgaagactggtactgtgagcagatactgcaagatcttccggtccctctcaaatggacactccacttgtttccatgtcataaattcactcacttgtttggccagttcccaaaatttctcaaaattgacatggccattgggaaggcggttggcacaaccctcattgaggaaataaatatctttgattaagag

SEQ ID NO: 344243 - DNA, 1000 bp, Homo Sapiens; identical to SEQ ID NO: 160847

SEQ ID NO: 344244 - DNA, 1000 bp, Homo Sapiens
tgaaaagtgttttcccctttattacagaactgatacatatacattattgaacattaaaaaatacaaagaagacattttaagaatgcaattaccaaacattttcccatccaaagataatcacttagttttttggtgtatccttctccccgccacccaactcttagtttgcaaaatttcaaacccacagcaaagccacattgatagtacaatgaacatctgtcgaccagtcacctagagtcaccaagtgttgtcattttactacatttgacttgtctctttctttctttatattcatatgttttatatttttccacttagtcactggaaattcagtggcagacactgtggtaattaatatctaaaaacttcagtatgtttgctaagaacaagaatgttctcctacatagccacagtacaaatgtctcactctgaaaatgaagccaggcacagcggctcatgcctgtacacccagcattttgggaggcccaggtgggaggattgcttgagcgcaggagtttgagaccagcctgggtaacaaagtgagacccccgtctctataacgcacttaaaattgggcatggtgttgtgtgctgaggtgggaggatcacttgggcccaggaggttgaggctgcactccagcctggccgacagagagaatgtcttgggggtagggggtgaagaacacttctttccccagttgtcaaactaataatgtccttggtcccatcattgatgatgttaaatttaatcacttggatgatctggtagatgtctccattgtaaaggtaacctttcccctttcaaacttataagtagtgtataaggttactgctttgagactggaaacagcctgttctccaagactctcaccaataattagatttcacctccaaaagaaaccttcctgtttctcctttttaaaaagaaatttgagtatcagcatgaactcatggattatgtttttattcagtgtgttataatctctcctgtcattattcat

SEQ ID NO: 344245 - DNA, 1000 bp, Homo Sapiens
tttttttttttttttcttttttttttttttttttatttaaataacttttacatcaataataggccaacacatatattaaataccttcttggtagaagcaggaatactaatgacaaagcctcatgaaacttaatacctctcaattcacaatatagcacaataatcaatctgactaagctattgatatttaaagaatgtggttagtcactctctccctggtataacttagtatgttaacattcttatcaactgagtagcaatttgattatctcatactcttctctgtattccttgtctccaggttggaatagccctatgtgggatatgtagaagtggcccagagcctgttggtcctatctttttggttcgttcttcccaacctttggtgggtttgtaaagcctagagggatctctactaacattgttttcaaccttttcttttaattttgccagtcttctttgtttttgtgacttttcatcttcctttgcctgtctatctagaattttcagttcaagtttatgtaaatctctttcttgaaatctggaaattccatcagcagcatttttccttttttctgccttttctgcattttcccttatctccttttcaagcctcaaaaattcttcctgttctttcttctgctgggtataactttctagtagtaattttaacttaaactggcgctggcgttctttctgatgttttttctctttctcttcttcttcttttaactgggaagcacatttcattgacatttctatacttttctgtttcttccaagcttcaactgccaatttctgtttctttctttgttcctctttttgcttttgattatcctcttgtttattatgaaaaagcacaggtgtgttgtctgccttttcctttaacttgaaaatttcctcccttttttgctgctttttagttttccaaatctgaattgactctttttttctttcttctagagccagaaacttttgataccatttttcatgctgttgaa

SEQ ID NO: 344246 - DNA, 1000 bp, Homo Sapiens
tgtggtttaaaagagcgttagtttaataattcacacacctgcaggatcaattatagcaaatgaaaaagcaagctacataaaaggaaattgacttgtaaacacactcaagcaaatataagtgggttttattatttttatgctcagaatgcaagaaagctttgcgccagaaccgttaaacattcatgaactcactaaaaagaaacagaaaatgcccttagaagacgggcggggcgagggggaagacctatgaacatgtttatagaattaatgtctgtactgtagcatacacaggtaattagaaaatattctcaatgcatttaagatattttcactaaagggtttgagattatccaattagctgtactcgaaagtggcaaatacttgaagatcattgatttaatttaaaattctgagtgctgagttcagtttcctactgaatataaccagtgccctgggctctgcatggcagttgacttgccaatatctcaattaaagtgactaggcacagtggctcacacttgtaatcccagcactttaggaggccgaggccaggagcttgagaccagctggagaacatagtgagatcctgtctctacaaaaaaatttaaaaatacatactttttagacaggtgtggtagatcacacctggtgcctggtggctcccagcattttgggaggctgaggacaggaggatcatctgagcccaggagttcaagaccagcctaggcaacagagcaagactccatctctaaaaaactaaaaacattagccaggtgtagtggcacacacctatagttgcagctacatgggaggccagggcaagaggatcgcctgagcctaggagtttgaggctgcagtgagctacagactgcaccactgcactccagccagtagattagaaatgtttgtgagaaggtaccttaatggatgggcaagatggacagcagctatagtaattattcatagcagcactctagaaataaaaactagatcttatgtg

SEQ ID NO: 344247 - DNA, 1000 bp, Homo Sapiens
aagataagtaacattttttaattgcagtaaaacatacacaacataaagttagccgtctgaactatttttaagtgtacggttcaatggcactaagtattcacattgttgtacaaatatcacctccatctacctccagaactcttttcaccttccagaactgaaactctgtacccagtaaacaataactcccaagattaaagttactttttcttaggctatatttttgagagcagttttaggttcgcaataatattgggcagaaggtatagagagttcccacatatcaccttccccaacatatgcacagcctcccccatgtcaacatccccaacctgtggggttcatttgtcacagctgatgaacccatattgacacatcatgatcgcacagaggccacagtttatagcagggttccctcttggtgttgtccgttcggtgggtttggacaaatgcataatgccatgtacccacccatcgtactatcacacagatgtagtctccacaccctaagaaccttatttgtccctttccgacttattttttactctttgctgatctttttactgcctctctattcttgccttttccagaatgtcatatagctggaatcgtacggtgtgtagactttccagattggtttctttcacttactcatatgcatttacatttcctaatgcaatattttttaaagatcaaaattaatgccaaaaaaaaaattcaggatgaacaaaataccattagtgtctgccctgtcttcacacttcagctcacactgctatctgataaagtaacagggtccgtcccctaagaaaactggggcatttccctttgaccatttgctgccaacattttgtgcttatttcaggagatcttctaagtgaattactaagtcggccgtgaccgtctagaaacagagtctggcggctgcgcagaccctgccagagcgttgggtgctttctttctcgttcccacccctcccctgctggacgtttctgggaag

SEQ ID NO: 344248 - DNA, 1000 bp, Homo Sapiens
aatttagcatgtgaaatttaattagaaatactgggtacatacactcaaccatttatatcataaaggataagttttatatttctaaataaagtttgacattcaaaggtactacggcaattcacaataagcacaaaaacatcagctttaccagagtaaagaagtgcagtttatgaaatttaggatcaactattgaaaatgcaagtttcctttaaaaacatacaaacatacgcacaacattaaccatgaaatctgaaactgtgatatttcagtgcaaaaacctcagtatgaggtaattttaatgtaataaccacttgaaaaaaaaatccacacagtggcactcttaaaaatgatagcttccatgacaattgctggctgacaagacaatgtggactaaatgttcttaactgtttaaactaatcttgtcttgtttggacatatatttttccctaatcatttgcttctgattcagaaacacagaaaggcatttattaatgtggaaagggaaaattcccacagccaactaattgatatattcaaagaaaattttctgataaagtttagatagaaattaagataccaaaaggtcaaaaccattttatgagatcaccaacagagggttaattttaggtttttccatataatttgaaacttgtagtgcggcacctccttaacggaaaggtgaggaccctatcaaagttggtttcaacagaacataaactctcttccaagtgcaaaccctttcaaaaaggtgttttaggtcattattgagtattacattgttccttgcttaaataaaacattttgtaaatgaagcctaagtttaagaaaagtaaaagtgaactctcaggtaaatatacttcacaccaaggcccaaatcatacaagaaagttatgaaaatactactttggcaatggtgtttattggatagggctaataaaattagaatacacactttgggggacatctctcccccaatgtctgatgctgtcaaatgagcttt

SEQ ID NO: 344249 - DNA, 1000 bp, Homo Sapiens
ttttttttttttttttggtgctggttaggttttattttaacaggatgttttctcttatttttcaaaatatcagttatatcaatattagaagtgtaaacaggtacaaaatatacagtacatagaaacaattttcttaactagtctatcgcctaataaaagtatgcatgagggggctgaatgaatgggcactgccaggtccctccgtctgcaggggaaacaagaggaccagtggctgcttcaacaaaacaggaatggatatttgtgtggtaggaacagcactgtggtcgaatcaagaaatctgggcccacctttatgatgttagatgctggaatgaacaagccacttggcccccaaacccagcctcgcgagctgtgccctctgagagtgcacacattaaggaggctggggcacaggggaggcggctgctacaagcagaagttcctttgaggcctggtgactggactcttgtcggtgtgggacaaatattttaagagggaaaacctggaaatctctgttcacccacagtgatgttccagtagaatgaggcatctcgcctgttgctcttccccactcatggcacgccacgtgtacccacagtgagaggctgaggtgtgtcccctctgagcagtttgcacctctaaaaagaaatccctgtcctgctgcttcccaaggtcacagtaatgatcaaatgagatgcattttgaaaataagaaactaccacacaaagtgaacaggagacagaagcatctcacggagtgggaggcagccccaggttggggtgggcggccaggctttgctcccagctctgctgagagctagacgtttgtggtgcagctccccagtttcagcttctccatctccccagacctaacgctgggatttcagacaactcgtccttatgaggccagggagtcacacactaggggacaccaccaagtgcccttgggacgggtaccacagatggcccaaaatagagaaaagttggggccagcacttttgg

SEQ ID NO: 344250 - DNA, 1000 bp, Homo Sapiens
tttttttttttttaatgatgaagaaacttatttatttctacataaaagtaggttcaactcaaatgagtttatttattaggaacttttgaaacactgaggttgaacagagaatgggaactagacagatcatttcagcatagatggttactttccctcttgccacagactctgcaggaaatgtcaattactgctttctttctccattatgttcaatcctttccaaggcagtcagagagctctctcccttcccattaagagaggatcttctccggtagcctttgaactgggaagtggctttagtatttgcaagtgtagatatacaaaagctcttcctcctcttaccaggttcatcggaagaaccagcagcagggccctggctgttttctggatctgagacgggaggtgccatctgcggtttttgtctggaggacacagtttcttttatgggagacatactttcaaatccactgctgtcaaatgtacatattgttcttcttttggctttttgggaagtggaaggaagtggaagtgaaatccatacaagaccttcgttttctaaatccttctgtagcctcgtgctacgtcgcactttggtttcactatttctcctctgaaaggtttgctcaatggcatcagacaaatctttaaacagttcagaattttctaaactaatttctacagagctgcccacactggaggatggtgtgtgatttccatttttttccaaatgtaaacttcgaccatcagaataacacatggaacgtcttctatctttcctgtctctgcaactcacaacactgctactttccatgggttttcttcccaaatcctcactctggcttttagattctttcgtattttcaattaagacatctcctaaacaatgacagtctttttgtgaattaggcattaaacgattgcattgcagttttccttctgcagctcctaagaagtcatcctttctttcacactttatgtttaaatctggtgaaattttaaa

SEQ ID NO: 344251 - DNA, 1000 bp, Homo Sapiens
gagagatataccttttatttaaagaaaggtgtgaaaagcaaatttattaacaaatttaacactgcttgcatctagaagataggatttgaaattgtgttgctttctcaagctgattacatcaaagtatattagaaaacaaaaacaaaataaggggccaggtgcagtggctgaacaaggggcctgtaatcccagcactttgggaggctgaggcgggtggatcatgagctcaggagttcaagatcagcctggccaagatggtgaaaccccggctctactaaaaatacaaaaaattagctgagtgtagtggtgggtgcttgtaatcccagctactcgggaggctgaggcagagagttgcttgaatctgggaggtggaggttgcagtgagccgagatcacgccattgcactctagcctgggcgacagagggaaactctgtctcaaaacaaaacgaaacaaaacaaaacaaaacaaaaaacacattttccaacacttgtgaaccatgttgactacatacagctttggatttctgtgaatctaggcaaggaacagacagttaaaatgtaaatgaagcccagcacagtggctcatgcatgtaatcccaacactttgggaggccaagggggactgtggatccctggagcccaggaattcgacaccagcctggataatatgttgaaaccctgtctctacaaaaaatacaaaacttagccttgtgtgggggtgtacacttgtagtgccagctactttggaggctgagagctgggaggatcacttgagcctgggaagtcgaggctgcagtgagctgtgatcacaccactgcactgtagcctaggtgacagagtgagaccctgtctagaaaaaaatttaaaagagaaaaagtaaaggagacattcagtatttggacctgtagagaagcatggaaaagcaagaataaaatacttttattaggtccaatttttaacatgatcaaacaagaataagaaaaataccatagagttaat

SEQ ID NO: 344252 - DNA, 1000 bp, Homo Sapiens
aaaaggggaaaacaaacaggtgaaattaactttaataatatattttttatatccaaagtatcatttaacatgcaatcaacatgaaaatcattaacaagacattttacacgatgttttctgcgctgtctttaaattccagtgtacattttacacatccagcagtgggcaattcagactaaccataatgccgagtggtcaatagccacatgtggctagtggctatcatattaaatagtgcaggtttgaaccaaaaatacttcgctttggttgttttttttttttttcttttagacggagacttgctctgtcgccaggctggagtgcagtggcagatctcggttcactgcaagctccgcctcccgggttcaagtgattcccctgcctcagcctcccaagtagctgggactaaggcgtgcgccaccacgcccggctaattttttgtattttagtagagacggggtttcaccacgttggccaggatggtctcgatctcctgacctcgtgatgcgcccgcctcggcctcccaaagtgctgggatcacaggcgtgagaccgcgcccggcctgctttggtattttttaagagcaagttggtaaatggaggcattatatggagagtgctcgagtatatatagcacaggttagagcagcacgccggcaccttgaagcgaacacgggctcctccactcccgtcaacactgggacttttctgtttttatcttgagtttgaggccgggcttcttagcagacctcagtctgaaactgaaataaacctggacgcagcgtacccttgaatcgcaagaacgccgccttcagtgtttctccggagaaaagcattcacgccaggttgtgacgaaaacattttttgagaactcataatgtttattccttggatgaatccattatatttatttagtgtctcaggaaggatgatgggcatattgcttgcaaaagttgatttgaatcctgatagattccactaacttttttgtcttttttttt

SEQ ID NO: 344253 - DNA, 1000 bp, Homo Sapiens
gttttttgcagtggtagaaaatgctgaataattgtccgtgagtgtgagccaaatattcaggttcattactgagatccccagaacgccaatatttgcaacgcaaacacttagtatcccactgtgtgaagggctctgacacatgcctgcctgcctgcctttcgatggagagtctccattggaagtcctcctgcttccatagaccctgcttttgatacaggggcagctgcacatggctgcctcttaatctagtaatttactgtgccatactgtcttactgattacccacattgacaaagagacagtaatgtgaggggtgggccttcaaatcattttcatgttgaacctcctgggtccagctacctctccttccacaacagcaccattgttttttctgggcacatactcaaggtcaatgctgtttttgtgcttgcctttccctcggctccacacaaaaaggagaagaaaacaaaataaaaccactcccaggaatgtgaagcagcccatagctgtagacaccagtattgttttaaggtccagggaaaaagtattggcattggtgccattggaaatggtgtcattggagtcggtcatgtacataggggtcctgttcgcataaagaaaacgatctgaagcgaatcctttcacagttaaggaggctgtgaaggtatcattcccagcagcattgctagcgatgcaaacatacatcccgctgtcttgatcctgggcaaagcggatttccaaggtgccatcacccaacacggtggctcttccattggacttggtggtgatgaaacgccttcggggtgtcacccaggaaatcacaggctgcgggtctccatctgcactgcattctagctggactgtctgcccttcatctactagcagatgctgcaacttcttttcacggattttgggttttttgcaggtaaagtaaaaagaaagggcagtgctatggaaatccttgaaagacctctcacggatggtgtctgggccagcacac

SEQ ID NO: 344254 - DNA, 1000 bp, Homo Sapiens; identical to SEQ ID NO: 160850

SEQ ID NO: 344255 - DNA, 1000 bp, Homo Sapiens
ttttttttttttttttttaccattttaaaaacatttacatgttatcttttaagacctgtaaggacatgactagtctatttagccagagggcccaaatcactcactgagacaaaacaaagaagagccaaagttccagagggacctgagagctgggttcaggtttcctgcactgtaactctccataggacagtgtcagtaggatgtgccactctgttaagagccaaataagtcacacaaattcagtattctggaaatgaagacttcacaggccaaggatgtttgggatttagccattgcaacaattcttcatctgtggtgactttttggaattggtcccggttagattggtaatggatctgctgtcatccttgtcagttctctttttcacttctcgagcaaggtgcagaacagcctccactatgttagaaccatctttggcacttgtttcacagaataatgccccatacgtcatggccagtttctctccaaagtgccctgggacacatttttgtccctctgtagcagcagtgtcacgaatgtcagccttgtttcctaccagcataatgggaacagtctcatgggctgcatcctcaatcatatctacccattctcgtatgttaagaaagcttttctcacatgtaacatcatacagcagcaaaacaccatctgcctttctgaagtaagacttggcaatacttctgaatctctcctgaccagctgtatcccagagctgcagaactgttcgttctccatccacaatgagggttttcatttggaaatcaactcccagggtggcgcttatattttctcgaaattcattcttgcaaagtctcatgaggaaactagacttccccactgcagcgtccccagcaagtacaatcttgtaagccttctgtgagctaaaagatttagcgttgtcatctaccaggtctgtctggggcgagagtgctgagatgggctttcttgatgaactaacaatgctgccttcactaacagaccc

SEQ ID NO: 344256 - DNA, 1000 bp, Homo Sapiens
attttaaatgcaatgatatttatttatcttctgaaatttaaatacaggcaacaaaatatctctgaagtttaactacccaacaaatccaaaattggctcaacttgtaagctatttgctaaacaatattaattttcacattaaaaaaataaataatctaattagactattacatctgcaagtctttcaaaagacttcttcgccccctaattcaaataatatgaaattcttttgggggaggcaaaatataagaattttctagataatatagaatgccattccataggaaaaaaaattatgtagaccaacagtaaatctctcagatgatagaaaatattgaccaaaaaaactgtttttttgtctcttattcacaagatcatttttccactttaatataaggttgaatctatagcagatgccgatgctaattggggaaaaattccatccttcaagttctgatcaatctgaggaaggttttctccagaggtgaagagctgcctgaattctgaagtgtagtctggactccagggagtaatctttgtagttgttccttgcagtttctaggaactttatggccttgtcaatttccccctggcttttatacaaagatgccaattcaaatagagtgaacggcactaggtagtggtcatacttcagtagcttttcactttccacaacatgattgtaacatagttcagcttgcaagggccgctgtaagttcttgaggcaacatcctttaagtaacttcactaagcactcatcatccacagagaagctgttaaaattttgactttgtaaagctgcctcagctttttcaacagttactaacagattttcagaaaggtcttttcttttgctcactattgaaaaaccattccagacatacatcatttccagggcaggtaagatgagcttcacaggtgcaggtaaggaggcggagtaacgccgagccttcctcacagcaaacttctcagtagggatagatttcccggcaattctctgc

SEQ ID NO: 344257 - DNA, 1000 bp, Homo Sapiens
tttttttttttttaaaaggatttaaaagtctttatttcctctgaaaacttactggtaaagtatacaatttatgaataatcatatattcatgctttttgaaatatatctgaataaaagacaaattattcaatatcaatagcagtaaataacttatttgcaagaaaattattacaattcctactgtaaagaatcaccaaccactatttagcaattaaatttcaacacattttttttggaactctttaggactttagacaaaggctaccaaggctgacaatccaggtaactatggcagtgacagaagtcaatcattaatactgccattattttagacaaagggctgacaatctcagaaactagttctagaaattatcatcaatgtggccattttactatggacaaataaatatgggagatagggaacttgttactccattttcctatagaaaaatatataaattgaccttttatatatacacaggtatgtatacacatacagtatatgtttttctgagcaggcacaccaactaggaaaaaatacaatagcaacataggattaggtattgcttctcatactgatcactaaactaaatggtattatcattttcggttaataagaagcatgcataactaaacagtttaaatacttgaatcaaaattctttaatagcattttctgaaattttaaattagctactgaaaattttccactatgtacaatacattttattaatatgatttcaagcttaaggttttataacaagacttttctttttgatttaaaactataagaacaaatatttatttgcagtaattaggatagctaaaatcaaagctctaagaataatttctgttacattttgaggcaacaggaaatatataaagttcttaaagtcttttatcagttgtatgatattttaatcatcatgaatcatgttcaggaacttttaaacatttcaatcatatttaataaatgacctgaaagagagattctgatgcta

SEQ ID NO: 344258 - DNA, 1000 bp, Homo Sapiens
ttttttttttttttttccttttaaggttttatttcctaggccaattttgaaggaactgttatatcattcttcataactcagttttggaatcaacttcttgaagatgaaaaccaacaacactacccttcagaatagtaataaaatctccaaacatggctcaatcgaaactcaacattttacaggcagacaactgttttttctttcatataaagtagatgtacatgtgaaccaacatagacccaaactggtcatattaatgagaaaacaaactcatgtcattgcctctgctactgcaaggtgtatctttttaggattttaggaataccgggtgggtactaccatatcaaaggcagaatatcaagtaagtcaattggtcctagtttgaaggtttcacagatcatcatgagttacatttttcattctttaaacggagagctgacacctgggcgtctgtgtttctttttatttttttttgttttcacccttctagatactctagtattttgtaaatttccttgtcatgggctgacttttacagggaacattttaaaatctaaatttattatcctgcttagcatctcaaacaactaacctttcaaaaaaatttatatctaatacctttcatttagaaatgaggagggagacagtgcaattcatggtccacagagactcctctgctctggaatgggggtgaagatgggacaatagagggtcaggcctttataataaattaggcaaaaggttcagtgtccagctatagtggacaacatgaaactccataaaaatgactggatagggggactgcttgagacttttcttttgggcattactaacagaattcaaagaaattccaaccacgcttagttttccaaattctactgaaatgagagtgttcataaaaaaacctgagattaataaaaggcaggctgttaaggaacactgagaaacaaaggttaaggtggtttggcattaaatcggtttacattccaaaagaatactg

SEQ ID NO: 344259 - DNA, 1000 bp, Homo Sapiens
tttttttttttttttttttttttttttgatggttcaagggactttaatgtagggactacttacagaggtatatgcaagattatgagacccaacaagcaattttgtggcacccagaggttagcaatagcaggtagctgttaccctaggcctaagagggcaagaggaagaaatagtatttctggagcctagtgagagctagagtcatggaggaggggacttctggaagaagctaaaatcttgaagggatgcagtccctgccaataaaacatagcccaaatcagagtgggagcagtgaagaaatacattgtcttctctcttcttccctccaaagctgtgccagggcattccattgaccaaacccaagcagaagtcaattacaaatggagtctgggggatgcagtcccattaaatgagttccttggtcagagacaactttgtgtaggatactctgatgatgattaaggcattctggaagtccatggagatggtgatgacagaatcattgtcagcaaagaaggtaaatgtgtgtctaaaatacatattcatttccatgaggaaaagtttctgttttcatgatgatgaaaggtgtcccatgtaataatcctaacaccatgggactggctgatgcccctaaggaatggtgtcttataaaggctcatcatcttctctgttgtcaggttgggcacttagtattagtacaagatcagccttggtgagtagaagttcgtgttgttgagtccaggcatagcttccataatatcgatgctaaaatttaatatcatgatttttcttttcatagcaacctgtaatcccagcactttggggggccaaggcaagtggatcacttgagcccaggagttcaaggccatcctgggcaatgtggcaaaaccatctgaaagatctcagaagtgtgctttgcatatacactttctcaggaagctactggaagatatgttagttttgagggctgggaagttcaagactgggcagtcacatccga

SEQ ID NO: 344260 - DNA, 1000 bp, Homo Sapiens
ttttttttttttttttgcagtacatgtaaaattttattgtgaaaattttaaggtagatattacatctaaacacttttcaaatagcatcaacaagtatgaaattactttgaaaacaattccttttcctttgaatacctcaaaaaattcatggaggaagttagtatctacctctctccacaaaaccaacatgtttctttcagtaatatgcaggtaacaatgcagaaataacatttcaatttttgatttgcaaacaaggattggtatgcaataactattattttcaatgcttgctttaatatctgctcgagtctcctttttcagatcgactctccccaccatctactatagatgccacataacttgagctaccatatgcttcacgaggatcagggagcaccctacccagagaaggcggattcctttggtcttttctgcaaacatgctcacgatcacaataatgaaaatcaccacagctcgagtaactctcccaacttctgccatatctatctcgtgtattactatatgcgtggcaggtgcttccaccataagacatccgaggccctcttgcaggtggtgcaccatgagaggtcccgtatctctgaagtgcatctctataagaacttccacttagatgttcagaatgatctctaccaagggcctcaccgtagccatcatgataactatatcctctagaggaatgttcatcccaactagaatgaccataatcacggtatgcatagtctctatgtggtggagcataatccctggtttctcgggaacttggatgatttctatatcctctagaataactttcatgtcgacgagaatgaccataatcacggtatccatggcctctagatggtggagcatactccctagtttctcgggaacttcgatgatttctgtatcctctagaataactttcatcccgacgagaatgaccataatcacggtatgcatggcctctagatggtggagcataatccctagtttctcggga

SEQ ID NO: 344261 - DNA, 1000 bp, Homo Sapiens
cttttttttttttttccctagtcacatgtagtacacatttagtataaatagactaagacaacactgtataaaaagtaagtgtcttctgggaacgctgacacagcactgatatggatgcagctctgcagtctttgccctgcccctgtttccagtttccctggcgagcatccccaggaggggccctgggactgatggaggttggaggagaaagtcacctgtgtgccccagtgggttaggtgggtggtgggccattgtagcgcagcatgagcgtgaaggagcgggcgaagttgttggccagggtgcagctgcggtcctcttccctgattgggagcaggaacagcaggaggaggaacagcagcagaagcagctgcagtgggagcgccacacagcacaccctccggaagagggagcccagtcctcgccaccgccgagtcttttggaatccagtcggctcccctggagaactttgtgtcagcaggtggccagagtccttcagcttggacttgtacagcatccactggtagcgcagatcttccagctcatccgaggtcccccttgctggcccgagacgaaggaggttctcaaagagatgctgaccttctggcacccgagcctccagctcctgcagcttcgattttctggtcctcaagtcctcagctgtagaagttctcattgcgatgattctaaccagcttggagttttccacctgcaaccactgcccaaagttcctcaggagctgggagaaatcttcatggctcccttcttcttcctgtagaagatttgcgcgtcgacgatgcctgggaataggatccatgggattgatgagaaatcctgactttgggatgttgttggtgaaaaccattttcttccccgaatccacttccatcctctgcagatgccagtttctgatgaggctcagcagactttcttccagcagcctcaaggcccgccacgactctgccagctccctgagctcctcctgcaccacggcagcaccctc

SEQ ID NO: 344262 - DNA, 1000 bp, Homo Sapiens
agtttttaatgaggaaacttgtttaaaattgtaaaggaaaaaatgggaatgggacggcaaaatcttagcagcaaagtggttaaacaaattgaaaatattaatgcacaaacattaaaatattaaagcatatatgttgcatataaaatacagtacagaaccaggagttgcactatactgattagtgcttaacagaagaaatgattaaatttgttcctcccagaagtatatacacagttcatttccacagcattttcctatatagccagcaagttattttcttcagttattcacaccttgatcaaacctgaattataaacttagcacttacaaatatgaaaattcattcacaaggaaaaacagtatttccatttcaccaataaaaattttgaaagttaacagtctgttctaggaaaccaagtttagctgaaaacttcagggatgaagatcatctgttgtagcagcattcaaatatataaacagtaaaaataagacttaaaactgctgcctacagtgtcatgttttggatttagttcatccaattgatttttagtataaaactagaaataccctcttcttcataacatctatagttatcaatatattttcttcttttcaatgtgaaataatacttcaagatgatctatatacacaatgttgtcagttcaagctgtcatataaatataaatgctttcttaaaaaaagtattttacagacagatagtgttatatacattgttcagtttgatctggggcaaaagaaaaaagctaacacaagcttaagtgtgatatataaaaagaatgatacataaatgacgtttaaaaacctgcatagaaaatgagcttcaaatagtagtgtgattttaatttttatcacctctgaaacttcaagccattaaaaaaaaggcacacttctcaactttatccctctaagggaatgttcttaaagaaccctttccttggttagagttttaatgtaacacttaagaaaacaacaacaacaa

SEQ ID NO: 344263 - DNA, 1000 bp, Homo Sapiens
ttttttgagatggagtctcactctgtcgccagggctggagtgcagtggtgcgatcttggctcactgcaacctctgcctcccgggttcaagtgattctcctgtctcagcctcccaagtagctgggattacaggcacccaccactatgcccagctaatttttttttgtatttttagtagagacagggtttcaccatgttggccaggctagtctcaaactcctgaccttgtgattcgcccatctcggccttccaaagtgctgggattacaggcgtgagccactgtgcccggcccagaaaggaacttttacaagatttgggcttctgttgaatgattgaggagagtctagggaagcaaggattggctcttgattgggtatctcagcagtctgttcagaggcacgaggaacaaagcgaagtcattggtaagaaagtggtaatcactgaaaagaagaaggttgttaggcattttgcaggtgtggtgtggccttgggaagaagttttctgatggccttgccactggccctgtctgtatctagttggtacattacagtctgattaaaatcagcactgatctttcctttctcagtcctgaactgacttttactttctgacacttgaatgtcttatctattcaaaaactaaggcatattttaaagtaaaaagaatgaaaataaaccttctccacacacttcttgagcctagattaccagttccctagcaaataagaaatttatttggcagacaagaaagtcaagtgtgtgtgtgtgtgtgtgtgtttctgagcaatgctgctccttccgatgatcaaatatgaagaagtaactatcttcagaaaaaagatgaaggcaagtaccccagtactgcagtagctgatgccagggagactggagtataggggtggctctgggcatcatgtccccatcccctgccagggctgagtacttggctcttgaatctcttttttcaattgctgttactctttcccatgatgctgactctaa

SEQ ID NO: 344264 - DNA, 1000 bp, Homo Sapiens
tttttttttttttttttaagtagagtatgacaaaacaggtttattggttattttacacaaaagaatgttagcaatttgcaagcattcaatactttaaaaggctcaatacaagctgccttcctttcaccctaagaaagtatactaactccaggcaaatagaatggagtcaggcttcaagtttatataacagacagactaaaaagaaacccagggtccctgctttgttaggaaaatggacaaaaccagctaaaaataaaggaaataaaaacaaattaaaataaagatattggctgggcaccgtgcctcacacctgtaatcccagcactttggaaggccaaggcaggtggaccacaaggtcagtcaggagttcgagaccagcctggccaacatggtgaaaccccatctctactaaaaatacaaaaattagccgggcgtggtggcacgcacctgtaatcccagctactcaggaggctgaggcaggagaattgcttgaacccgggaggcggaggttgcagtgagcagagattacaccactacactccagcctgggtgacagagtgagactccatcaaaaaacaaataaaacaaaaattaaattattgattcctataacattatttgcctaagagacagacaaaacattcaacattcaaacataaagttaatattatattttaaaaaggaaaaaagtggttactctgggcacactgcctatggtgtagccctgctccacaaggagcggtaaaaaaaaataaataaaacaaataaataaaaaggaaaaaagtactggtaaagttatcaggtaccaattttttaaatgaattgttaatagttttaccaggtctcttcaaaggaatccaaaagtcaagaagcaaaacaaaatttgaaaatgatggagtcttcctgatactaagcccaagattcttcctttcttcaaatcctctaaacccaaattatgaaaaataatgcactctggtcactgagaacatttctacacagt

SEQ ID NO: 344265 - DNA, 1000 bp, Homo Sapiens
ataacagagtctcactatgttgcccaggctggtcttgaactcctgggcttaagcagtccccccacctcagcctcctaaagcctggggttatggggtgtctatgcagtgagcccttccatgcacttgaagttgtgaagaacatctaaagactttaccacattggttacatttatagggtttctctccagtgtgagtccttccatgccttcgaaggtttgagggacatccaaaagctttcccacattgcttacatttatacggtttctctccagtgtgagtccttccatgcatttgaagtcgcgaggcacatccaaaagacttcccacactgcttacattcatagggtttctctccagtgtgagtccttccatgcatttgaaggtgtgaggcagatccaaaggctttcccacactgcttacattcataaggtttctctccagtgtgagtccttccatgaatttgaagctgtgaggcagatctgaaggcttttccacattgcttgcattcatagggtttctctccagtgtgagtccttccatgatatcgaaaggagctcgaacagttgaaggatctgccacactgcttgcattcataggtttttcctccagtgtgagtcctttcatgtctatgaaataaactgggcaaactgaatgttttcccataacccttacattcatacggcttctcttctctgtgcatcctttcatgtatttgaaagaaagagaaattactaaatggttttccacattccttacatgcatagggtttctctcccgtgtgagtcctaccatgtgtttgaaggagtgaggcagatctgaaggctttcccacattgcttacactcgtaaggtttctctccagtgtgagttctttcatgatatcggaaggaactggaagaattaaaggctttaccacattggttgcatttatagggtttctctccagtgtgagttttttcatgtgtttgaagtgaactgggagaataaaaggctttcccacat

SEQ ID NO: 344266 - DNA, 1000 bp, Homo Sapiens
ttttttttttttttttacagcagtatttttattattacacaaaagtataaaaaatacaaatatccatcaataggataaacagcaatatattcttaaaatggaatagtatgcaaaatgaaaatacactactgccacatgcaataatgtacagatcttaaaaaattgagtgaaataagcaagacacaaaataattcatgatgtctgataaaatatatatttataaaattgaaaacatgcaaaaactacgttttgatgttataggctacggaagtggtaactcttaggtaagtaacaactaactgctttttattacagagtgcaatgagaaatatagttcataaatattttctcttatggagattaatacttataatcattgtgtatcttgtctctgcatgtattatataagtatttttaaaaaataaactatttgagtcagtaggaagagcagttgactttaaaatttagcttcatagctgatagagttcaataataatgatcatacttattttatatgctagtaaacagtagacagttattccgtatggtactttaataattattagacttgtgatttaaaattacattaacatgtttcagcatgcttttctttttaaaactaaatgtttacaacagcttgtaaagaattcatataagaaaccacatcatttattgcatttcaatgttttctcccttgtgagttctttgatggacaatgaggtttctcttataactgaaagacttaccacactcattacaaacatagggtttctcacctgtgtgagttctctgatgtacaataagatttgtcttctggcggaagcactttccacattcactacatttatatggtttctctcccgtatgagttctttgatgatgaatgagatatgacttcctgctaaaggctttcccacactgaggacattcataggatttctggccggtatgtattttctgatgtacagtgagggttgctttctggcgaaaggacttccca

SEQ ID NO: 344267 - DNA, 1000 bp, Homo Sapiens
aatttttattatttattagtatgaattccctgatgacgaatgagatccgagccactactaaaagccttcccacattccttacagttatagggcttttcaccagtgtgaattctcagatgtcgagtaaggtttgagcatttattaaaggcctttccacattcattacattcatatggtttttcatctgtatgaattctctgatgctggaaaagttgtgagttctgagtaaaggccttcccacattcaagacattcaaagggtttctcaccagcgtgaattctctgatgttgacgaagctgtgagctctgagtaaaagcctttccacattccttacaatcatagggtttctcaccagtgtgaattctctgatgattagtaagtgctgagccactactaaaggctttgccacattccttgcactcatagggtttctcaccagtatgaattctctgatgttgaacaagctttgagctctgggtaaaggctttgccacattccttacattcatagggtttctcacctgtatgaattcgtgcatgctgaaaaagttgtgagctcttagtaaaggctttcccacatactttacattcataaggtttttcaccagtgtgaattcgctgatggtcaataagatttgagcaataactaaaggccttcccacattccttacattcatagggtttcttaccggtatggattctctgatgttgagaaaggtatgagctacaactgaaggcctttccacattccttacattcaaagggtttttcgccagtatgaattttcagatgccgagtaacatgtgaaccacaactaaagaatttcccacactctttacattcataagatttttcaccaatatgaattctctgatgttgaataaattgtgagttctgactaaaggcctttccacatttcttacattcatagggtctgtcttcattattaattatttgatggagagtaaggaatgtctgttgaataaatgtgggcatgtatt

SEQ ID NO: 344268 - DNA, 1000 bp, Homo Sapiens
ttttttctttggataaactcatttaatcttcacaataaccttatcacaatgtaagaaatttgtaatctgaagtatacagtttaaattacttggtaataaaacagacgtggaaactggtgaaagtataatgatgctgaaaaagattcgtgtaatagataaaagcttttctacattcacaaagtcaacatgattattctctatatgctattctctataagtcaaataaaattttagtggtaatgtttttattaataattgatattctattttttccatataaattctgatgcttaataaattgtgaattatgaggtaaaaaaatttacagtcactggattttcttcacttacaaattgtttgctattccataattgataatttcaaaatcaaggatttcctatattaatcacactatacattatataatgttgagtatattgtgagagtagatctttacacatatcgggctttcattaggcttctcacctgtacaaattctgttatgaaaaagtatagctgagggacaggtaaaagtgtttcccacatttcttatatttctgaagtttctctgcaatgtgaatttggtgatgttagataaggattgttaaataaaaagacgctattcaaatacataagatttgtcccttcatgtatgtattctctggtgctttttcacctatgaaagacaagaagaggccttctcacattcattacattcatagggtttctcaccagtaggaattctttgatgttgagtaagatgcgccctctgcctaaaggccttcctacattcctgacattcaaagggtttctcaccagtgtgaattctctggtgttaagagttgaacaatcaataaaggattttctacattttttacactgatatggtttctcactagtgtgaattctctgatttctattaaggtaggaaacaagcaaaggccttcccacattccttaaactcatagggtttctcaccagtatgaatattttgatgttg

SEQ ID NO: 344269 - DNA, 1000 bp, Homo Sapiens
ttttttttttttttttttttttttttttttttttttttttttttttttttttttttttttttttttttttttttttttttttttttttttttttttttttttttttttttttttttttttttttttttttttttttttttttttttttttttttttttttttttttttttttttttttttttttttttttataaacaactgaggtttatttctcacagttttggaggctgaaagtccaaggtcaaggtgccagcatgcttgggttctggtgaaggccctcttttgcactgtagactgctgacttcttgctgtaacctcatgtggttgaaagagctagctggctctttggcttcttcttataaaggcagtaattccactcatgaaggctccaccctcatgacctaatttcctcctaaaggccctaccttcaaataccatcaccttgggattcgtgtttcaacataggaattgttacgggaacacaaacattcagcccataacagattttatcaaagaagtacttcatgaaatgtaagtgatgagtggtttttccaaatttgtcatctccattgcatcttcctattaagaaatccactaataataatgttgatgataataaaaacagtaatatccaatattaatccaaagcagtttgggccagatagttgttgctgtattatacatgttggaaacaaccacacttttaggtgtgtttcattttacagctgaggtaccaagaagcaaatattttgtctaatatcacacagatagtagagtagtggaaaggcaatgatgataagtatatgctgttgctagaacacttttccacaactgttacattaacagctttattttctagtgtgaattttcctaaatttaatgagaactaagaggtatttaagactcatacatttattaagttaatatgtgtaaaaaaacatcaacacattgacagaacttctggccataaatattttgatattctataaatagagcatga

SEQ ID NO: 344270 - DNA, 1000 bp, Homo Sapiens; identical to SEQ ID NO: 246591

SEQ ID NO: 344271 - DNA, 1000 bp, Homo Sapiens; identical to SEQ ID NO: 160851

SEQ ID NO: 344272 - DNA, 1000 bp, Homo Sapiens
ttttttttttttttttttttttttttttttttttttttttttttttttttttttttttttgataggaaagagcttcacattccagctttactagatcacaaagcactccctttaccaggccttactttgtgcatctctgaaacatctgaaaaacacttttctgtgaaatgctaggctgtagggagtgagcacttttggataccttacagtgatctctagtagaatttggcatctttcttctattaactgactgcttcaactgcatctttaaagacacttgcctatttttgtcccttgagcctctctctggtgttggatgctttgtgtgagtttgccttttgaagttcccatctttgggattcttcctctgtccatttagcactttgtctggaggggaggatgtagcgcgtaagtgatactcatctggggatcctttttgccggtttggcaccatttgctctttatccacctccttctgaagttgtaatgccaataacctgtcctgttcttcttgtttatgtctctcaaacagtagatgctccaaatctatcagtttttgggtaaagtttatttctgtttcctcttgatctggggaagattcgggggacacttttcttctttttgcagaaaagcatggatccttgactgcttcaaaggaagattcttggttttttcttttggaaatctccttactgatcagtaggcacgactcttcattttctgtctcacctgtgttgtttccatttgtctgtgtcacccctgatgtgggggcgcacccactttctgttctgccacaaggcataactgcagtttctttcgagtagggaactctggttttaggtcgctcgtgacttaagacacataactctttcccatgattgcttggtcttgttttgacgtttccttcatggtaccattcggcaccacaggcacataaccatggcataggggactctattgaagaatctgcaccttgttctccaactccaagggatatctg

SEQ ID NO: 344273 - DNA, 1000 bp, Homo Sapiens
ggcaatttgaaaacattttattggacatgttaagtaacataattctaaaatattttatcttagaaatcaaagcacctgacaattgatattcatagaatatatgaaagtggcattatgaacatcttatagttgccaaaaatttaggagaaaaatcgactctggttttcagtggtaaaacttaaagagtccagaaatgagattaaatttactggctaagttacctacaaaaactgaaacagacccatttaccagttccttatctttcagaatctgatactgagcagattttaagaggttcggaatctgttccagtatagaaataaggccaaacggcttctgtgaaacaatcgttaaaagtatagagaatagacctatcattcatattataaaaggaaagatcacccaattcatagtccagaaaaataccaattttactgggttttactactggcagaagctgggttgtcttaggacctgacgcaacataaccactcttcatgtatcgcccaattgcccagaatccgcccagaactgatggctgatcctgccagttcctaagaagacagtcttgacacacacccaatatccatttaggtttgtttcccacttctacttcccagtaatgtcggccagaactaaatctctgagagcctaggacagcagggcagacataaaatctccttgggtcataacaaatgtttcgtttttttctttcatatcgcacagcttttctatcctcagagacaagaagttgaggatgtgctgtgttgagatctagaatcacatctacttgaaatggcttgataattctgtccaagccagaatattgaggaggaagactgaaaccatattttgttaatctaaatgaaaagagttcagggcattttaggttttgatacttgtggtgcatactcttagcttgtgtcagtaattccaggtttgactgcacagacttgccctctacctccctcagtagatgttttaatgtggaaacataatc

SEQ ID NO: 344274 - DNA, 1000 bp, Homo Sapiens
tttttttttttttttcttttttttttttttttttttagcttttaaaagaaaattcaataaatagctattttacatggataaagtcatagtggtacaatttatgaatgtcacatcaagcatgcacaaaaatggtattatacatggcagaagtagtcagaaaatattgaattagatctaaaaagatatgaagaatttacacttatatacaaaaatcttgcaaattattgcctcattttaacaaggaattaaaagtaaacattaccagctagttagcactctctaagaggctaaaatcagattgacatttaaaaatctattaaactagctggaatttatttttctctcataccattttctggattttggtcaaaaatctttatttaaataactaaagtgtccattcaacttgctgataatcaaaactttagataagaaacactgtttccatcttatatcaagaccccagcaatgcatagataaactgaatatattactgcatcagctactgagaatgggcatgttcatttaagtgcaactggtattagcattcagtcatctttgtgtaaattatttatacagaccagccactgtaaacccagagtgaaaattaaggttataacaatggaagattatggccagtatcttactaaattatagaaagtgtactgatttttaataaaagaaataaggttcaaagtttagcacaacaacacagcaataagaagctgacaacttggataaaaatacaagaaagtaacacagagcccaggctacccattatttactgtgtgcatacaggaatgctatacttcagatgtataaattagagactgattttaagttattaatttaactactttttgcccactgtgctaaactaaattttatactaatgtgctactgcgtaaacacttcaaagcaatcttcattaaaatgctgcaaagaaaaacaagaatacacatcatccaaaactaaggatgtcattgcagttcacagtttg

SEQ ID NO: 344275 - DNA, 1000 bp, Homo Sapiens
taaggtggtaactaaaaccgcccaagcagccaattttattgatagtacattacaaacaatctaacacaatgatgtttttacagaaagccagtatctgaacaaccttccatcgttcaaattgtattttgtaagattaaaaggcttttagtttctaacctattatttacatcaaaaagctttcaaaaagttagagcataactgttaagacataggattttgttcattttctcagtggagagtacagagtacagctgacattctagtgggtctttggaagtacagtaatcctgcaaacatttaaactccaattcacaaacatgaatcaccggaaatcctttgatagtcatacccaacaatacaggtagtctttatcctttcgttaacactgagggaaaaaaacagttgctgttcaactacaacaacataaatctagaaacagaatgaaacctgttccaaatgtttctgttcttataacaaggtgaacactacaggtgttttggggttccttttctgctatcagtaaatgtttgacaatttccaaaagagcaccaagaactgtataccaccatgaacagaatcccttgaagtagattcacttatagtctttctccaagcattaaaatgccctataaggtaaaacaaaacattgctataatctaggcaaaaattaaaggttgaatcatttcacataagataaaaataattactaaagaaataaagttcacaaatctacttggttatcacatttactctaaagtctggttttttcattgaccataatatatttagtgaaacatttcctcagtttttgtctaccagcaaaaggtctcaaaataatttgcttaacataactcagcataaatatcttcacctttttccgactaaaacttactcccaaacaaattgttttaagactatgtatcctccattaacatctttaaagcataatgtaaaaagccacatcaagtcttcttttggaaataggcacagtattaaaaag

SEQ ID NO: 344276 - DNA, 1000 bp, Homo Sapiens
ttttttttttttaaatgttttaaagtactgcattttattacataaaagcacaatcaacaaaatgataattaattttaaaatgtttttttctcactatactgcaaaagaatgttagtctgaacatgtacctcaagtagcacttaatattctaagttaatcacaaagagcatctctacattttcctcatgcatcttgtattttaattttcttactcttccacagaaaggggcataaataatgcccacctataaaaaagaatctctcatatctctgattcagcaacaacagatcacttgctttcacatgtgaatataataggaatgaagaaaaacatgaatttgagagttaaattacatcaattgcttttcaaaaaatctgtaatttttttcaagaaaaaagtatactttgaatgtaattataaatctccaaaaaatcttctacttcttttaaagttatatataaataacttacctaacaattttagttttggatctcctatactcaacactctaatttagtgtaatgtctgaagtatcagtgccttatgccttatgatttctactgtgaattctgatatttacatagacttaatttgggattaaatatttttcatatttactgcatctgcaaaaatatattttagtatgaactctctgatgttttccaagctgtagtttttgaaaaaatgtttttccatatttattacatttgcagggtttttctccaatacaaattccctgatgtcgaacaaagtttgagcaactaatgctttagggttttcctctggtacaaaatgtgtacaataagatctatcataaaactaaaggtactacaaccctctttctatttgtaatgttcatcttaagaatactcttcctcgtattaaaggcttatattttctgaaagatttgacggtaattgcattttattaagtatgaactgatgtttttacatgtgagcagatataaatggcttttccatattctttatacaatttttc

SEQ ID NO: 344277 - DNA, 1000 bp, Homo Sapiens
ttttttttttttttttgcctttcatttctaaatattttattgtaattacaaattctttgtcaagaaagtggtaagtccatagtgttttaaagcctcagggttctgtgatatataattctttaaaaatatactgatggccacttgtgctgtggtataaaacatctcagaaatattggttatttgaaaatgccgtatttggtgtacttctgtccaatattgtaatacagtgaagataagcacagtctataactggcaaattatcgggatacaactgtcaggtcatgttgtgatagaaaacgtgatggtcaataaaaactgaaatggaaactcacaaaaaatcataaccaagtggaaatactgaagttttccaatggcctgatccatattaatttaagacagctcctcttctgacacttcaggtaatattggtcatgaattattttcattatgggaagaaaatacatttttaatcccactggtagatttttctagcagtatactcgatgtagtaagtatatatttagatatactgtaaaggtatacagttgttgaataaattatagtgttacgcaaaaattcacacgaagaggcacttgagtggcatgttagaaaatgatctttggtaaaggcaaaatgaaaaacctgcttcatttagttacaatgaaaatattttaacttactgaaatggaatgtttctcaacataaagatgtttttcaaataagccataaaatggtaaatgctatggctataaacctctgcctgtttttttcctgtttgccatttagagtctctttgtagtagatgatgatagaaagctttcacattcagagctggtcattttcattcgttttaacttattttgaggggcaaaaaaccctgtatctgatctcagtagtagttgcacagctgtatggtattgttattcaaatccacaaattaactaaatgttttattatatagatgacaaattactaatgtccagggctttccagaaccatt

SEQ ID NO: 344278 - DNA, 1000 bp, Homo Sapiens
aaaattatatactgttttattgatacacttccaaattccctataattagtctgcatttgaattgaaatttcaaggtataactataatttacatatttaaggagtcattgggtatttaagtcataatttcagtaactgtttaatttttctagggtttgtaacttgaaatattatacccagcttctgattttgtggtctgattgcaccatacacgaggtatttaagtgtaggaaagaaatgagggaaatggggtgagtgtctttctgggtggacagtttagttttcaaccctagaaagatgaaaccccacccaggccacattgttcagcagtgctgtgacctgtgcccactgaatggaccaggatcagagtgagttggtgctgggagtctgaactcacagtgtgaagtctgaacccagctgttggcagatgttcttagagggcggtggggggagaagctccaaagagcagagccgtccaatgcagggactcgaggtatggctacgaactagtcctcccagtcgatgcggatcgggccgcctgttagcgtctggccctgtagaccggctgagtcctctcctcctgccccacgacgcattcgccggtggcaaccctgggcacagcgggaacgctcgtccaacactccacagacaagaacccggcagtgcagaaacacttccttgtggtctttgcccacaaacttgaagacagggacctggaagtgctttgctaggtgatcccgggacgtgtactgctttaccgagtcatctgaaacacagccatcccggatgaggtagtatttcaggacctcgtcgatcttggaggtgggggtggcaaagcagctctccaccaagctttccaagccgctcacgtgcaccacgggctcaatgccaaagtagagggagtcacgaagcttgagggtgggcagagcttcccggtaaggctcttcaaactcattgtccttgaagatctccagagtgaatgggaagatcccatgatttcg

SEQ ID NO: 344279 - DNA, 1000 bp, Homo Sapiens
aaaactcattcatgtattttattatgcatcctacaacaaagactaagaagcaggcaagaattactataaaacacaatctaattacagaaaagttaatttatttttacatgaaaacattttgaaaccaattttgtgtttattgaaggatttttctcatgcatattatccaagatttttttctgtcagagtattagcttcctaggattgctgtaacaaattaccatgaactgggtaccttaaaacagcagaaatacattctcactgttctggatgctagatgtgcaaaaccatgttagcagggttggcaactactggaactctgagggagaatctattccatgcttttttcctatcttctgagggttcccacaatgtatcactccaatctctgcctccagcttcatgtggcattctcccctgtgtctctatcttctctttcttcccttttttttttttttttttgagacagagtctcgttctgttgctcacactggagtgcagtggtgtgatctcgcaacctccacctcccaggttcgagtgattcttgtgcctcagactcctgggtagctgacattacaagcaccacgcatggctaattttatttttagtagagatgggttttcgccatgttggccaggctggtcttgaactcctcagcctcaagcgatttgcctggcttggcctcccacagtgctgggattacaggcgtgagccaccatgcccgccctatcttctcttataaggaacaccagtcatattggattaagggcctgccctgctccagtatgacctcatcttagctacttacaaccacaaccacagtatttccaaataaggtcacatactgaggctccaggaagtacatgaattttggagaggacaccattcaacccagtacattcagtttctatttaacataaaaaataattcccatactatacagggtgaaaaaatgacttatgaaataggtgaaagattgttgaatatacaaatgtgatct

SEQ ID NO: 344280 - DNA, 1000 bp, Homo Sapiens
ttttttttttttttttttttttttttttcgtggtttcgtctatttattaaaaaatatttgagaacaaaacctctgcctctttgagtcttgctctggcatccccagcatctctgattctccctggtgcccccagctcaggaagaaggtggtagtggggagagagggtcaggggggcttggcagggatgcaggcaccatgacttttgtgaccagttcctagagacgcatgggtgtagcctcaggaggaaagcgagaggagctttaccatgggaacgaaggaaagggacaacattgggaggcaaacgttgggagactagtccagaaacttgcagttgaggatacaacagggtcctagtgtttcctccctgggtcagcgtagaagtagagctttttcactgtcgaaggcgggattgaagttagagattgccctggcagaggttggggagagagggactagtaggtggtacatgaatgtcttctctcattctgctaggtccctctcagtggaagatagataggctggtgggtggcttgttctaattggaggctggggaaggagcaaatgagtgccttggagcttgggaaagattatttgacagcctttcccatgatgtggggcccaacaggtagccacttcaagggagggggctgtcgttccatttggatttcggagaactgggcgttctcaagatccttccaggtctctctggtgaggcagcagccatccccaatgtgtttccaggtgggctcgaaaacttgctgccacatgaaggcccagcttccatatggttctgccacatgctcccagaaaaagagcacacctcccggtctcagtactctccggacctcctgcaggaccttccttgggctctgcacagagcacagcaccagagtgcagaccaccacatccatggagccatcagccagctgtctcatgtcctctccaggagccaccacaaaccgctcatattggaggtgcctgttctcagccatgctctttg

SEQ ID NO: 344281 - DNA, 1000 bp, Homo Sapiens
tttttttttttttttgagtataaaaaaaagtctgaaacattttacttcatattacacatactttttttttaaaaaaggcagaaacattgaaggaaacaacactcaacatgaaagaaccttgtgccggagttctagaaggaccttgaaaatcagttttaaaaggccttgctgtcacatagtctttttcatggctgcttgagtcatgctgaagagataggcttcatagattatatttaagaagttgtcatcattctgaatgaggtacagcagtgcctcctggagctggagcttggtgagtgggctgctggtgatcacggagggctccgggctctgtatgggcaggaggaggctggtggcagcagcaggtggctcctggcctcccacaggcaagaggccgctctccctttcctttggcgggacggaggtgggttgtgcgaacaccatgggggacataagcagagacggagctgctgtagcagggatgcgctgaggtgagatgacctggaaaagaggagtctgctgttctgtgttgggtgtcttgttgatccaggattccaagggtttccctgttccagagctctgagcgagcacaggaaacttagcggccaaggctggccggttagaggcatgcagctgctgctcctgctgtacaatctgaagcttcttcagtaactcttgaggggagatcactccagagctgccagtctgactaccagagatggggagtgtttgtcttgggagtgtggactgttctcttccatgagcctgatgtcctactgtctgaggtggaagggagccattgaaataggcctgtggtggctgagccagaccctttcctggagccacaggggtgacagaagtgggagctctgctgcggttcagggcagctgagctggcaggtgctggtgtactagggtcacacttgtttgctgcccctggggtactctgaagtttctcgaacaggttctgagttctggaagcattttgtacaccacgagaa

SEQ ID NO: 344282 - DNA, 1000 bp, Homo Sapiens; identical to SEQ ID NO: 160854

SEQ ID NO: 344283 - DNA, 1000 bp, Homo Sapiens
aggtgaaagccagtttatttattcaacaagtattgaatgcctactgtgtgctaggcagtcttctagaagccaggggtacagcccgtcccggcaaggtcctgactcagcccagccaggacagtttcctgagcttcaaggttactgtctccaatccctatttctatctattcttcctcccctttcttcccttccttctccctcccaccacctcccaggccctttcttctctgctaagcggcagagcccctccctttggtctcctgggcctccaccctccctggaccgcgtcattccagtcctgttgctgcctcctgcttgaggggccttgccctaccatcccctatcccaaagggcgtcaggaccaggtgcccacgctggtgcttgatgcgggcagaactgtcaccaaaacccttgccacactctgcacacttgtatggcttctcccccgtgtgtgtacgcctgtgtttgaccagatctgagctccgggggaactccttcccacagaagccacacacgtggggctggctgggtccagaaggctgggcccgaactcggggtcgaggggccatgggtactgggccaggtgggttatgtggccgcagcagagtggatggtggtggtggccgggcccgttcaccacggtgggtgcggaggtgcttgactcgggctgagctgtcagcaaaacccttgccgcattcaggacagaggtagggtttctcccctgtgtgcacacgatggtgtttcaccaggtcagagcttcggcggaagcccttgccacactcagggcacttgtggggcttgtcgcccgccagtggtgggggtggctccccagcctgtgggcccccaggctctggctccaagccaggcaggccaaaaggctcacccgagtgtgagggacttcgaggtgtcagcggggggctggtgcccagaggaggtgggggtgggctggggatcagagcgggtaggggatagcctgggaagctgaagtcctggggctcca

SEQ ID NO: 344284 - DNA, 1000 bp, Homo Sapiens
tttttttttttttttttttttttttttttcgcagttatcagccacagtgatttattgagtgctttaataatacaagtgtacatcaactgatccacagtcaaaagtggcaggtccctaagaaatttacaagcactttaagtaaatcaaaatacatattattttgttcaatccaacagtcttctgcgggagggacagaaggctagtgataaacagagtctcagtaatgcacagtgattctgattgaagcttttgtacaaaaacttgttcccagtagcatgcacccaccaataaagacttcagtacaaaaaattaaccctaagcactacatttaagtagaaacgagatataattctgaatgtgttttcccaaagatcacataaaagaaaaaaaaatcaaaatcaaataaacaacaacaaaaaaaacaaaaccacacagtaatacaaagctttgtaagaaagctcttactattacagctccaacattgtttgcactgaaaacaaaagttcccatctatgatgaggtgggaaaaaaatcccaaatctttcaagttaacagaaatcaacaagggaataaaatgagagataaaagagagcgtgggagagaggaaggggggcaggaagaactgggatgggaagatggacaacataccatcacaaaatggttccaaatttaataaaaataggaaaataagaaccgaggtctggaggggtgggcagggctaccgatgcacttggtgaatgtgcttgcacaggtcccgcggggcggcaggcagcaggcccctatgtggcgtaccgcttggtccactgtctggccatccggtcatgctctgctctgttggtcatgtactgtgtggcgatgctgcccaccagagggtcagcagggttgcaatctgtaagaagtgagcagatggagaggagaactttagaaatagttaaagccggactccagttgtcctttaagatgtccagacagatcacaccttggctgttaatattacagt

SEQ ID NO: 344285 - DNA, 1000 bp, Homo Sapiens
ggactcagccaacctttatggtttctgtggaatgccatgccaggcgtggggctctgtggagactcaggtggggggtctgagagggacacagcaccactatcaaggcaagaggcagctgggaacacgagggtcctgcctctgtctcaaggaccccaggatttcccccagcagctgtctgcctgcctgctttggtttgcgtttttggtttgggtttttttttttttcttttttggtgtccctaggctgaggtcatcactgtgtctctcggtctgggtggggccatctaccctccctgcaactgggagtgtctttgacctcattctataagagacagttcagcctaatgattaacagtggatttgatcccagcactttgggaggccgaggtgggcagatcacctgaggccaggagtttgagaccagccaggctaatatggtgaaactctgtctctactaaaaatacaaaaattagctgggcatggtggcgggtgcctgtagtcccagctactcaggaggctgaggcaggagaactgcttgagcctggcaagtggaagttacagtgagccaagatcgcgccattgcactccagcctgggtgacagagagagactctgtccttaaaaaaaaaaaataataaggccaaggcaggcagatcacgaggtcaggagatagagaccatcctggctaacacggtgaaaccctgtctttactaaaaatacaaaaaattagccgggcgtgttggcgggtgcctgtagtcccagctactcgggaggctgagacaggagaatggcataaacccgggaggtggagcttgcagtgagctgagattgcgccactgcactccagcctgggcgacagagcgagactccatctcaaaaaaaaaaaaaaaaagtgagttgtcaatcattgtgtgctgtgactatcagtggtgcaactccaggacgggcactgtgtctactgtctggggagcagggtgaggactctggggacctgtctgccta

SEQ ID NO: 344286 - DNA, 1000 bp, Homo Sapiens
ttttttttttttttaactggggtcctagaaagaaggggacagaagaggctccaaaatacagttgggaaatgtggacattatggttcattgtaagtcaccgccattgcctgaggggaaggaagaaagttaacagcatccaccgtattgagggcattcccacatgctgtgttagggacagttagatactgctaggtgagtaacgggagataattgttcatcatcgtgagggaaaaatcaataaggaggatcacaagacatcctgctagaggtgtaataaaagtatcaggagatagaaaccattgtattgcagggggcacaccactgtcccctattctgagggttgtaataagtggtcatcacacagaatggagagtggaccttactagacattgtcacaagtgggaagaggtaacagacaccatgctggagtgaggtgattgtaaaagaggtaatgaggagatctccagaaactgtttccggaattgatgaagtgtgacacacataagagtaaggtaaaacaggaaaaatggccaggcgtcatggccctttccagccctaaacatatggttgtgttggttttcatataagttattaatctgttacatgaaagttacatccttaaggaagccagatactaagcttcaagtcagtgatgagtacgaaaaaaaaaaaaaggcaactgagttggaagaactatgacagcagaagggagatttaagttgtcccagatgaccataaaattcttacctcggaagctttcttgaaggtgatgggagttcacaagacacggtgctgggggtcaaaacacaaagtgctgagggcccgtgaggctgagagacagtcatggtagataatgaggggggtgcaagtcttggtagatgacagtggggactcaacatacattctgaggtttacgtctgtatacataaaggttttttctttttttttttgtagcatctctttcttgatagaaatactgaatgagggttggatatgacca

SEQ ID NO: 344287 - DNA, 1000 bp, Homo Sapiens
tttttttttttttttctggattggttattttattggcatggaggggaaggtggagggtgttgagccgactacactcagttggaatgggtggcctgcaagtcgtagtgctccagcttggccaccagagagccggacagcttgatggtggcaacccagggtggctcgcccaggtggttggtggatgtgctcagccaggcagagacgttgcgtggcaggcggcgatggcgtggctggtggtggcagtaacacttgcagggacaggagttaagcacctggaagggcagccagtggcgcgcagcgcgggtgttagctgccccagtctgagaggccccgctgccaccaccccctccaccactgctgtcaggcacggtagctgtagctcgttcgcgaggaccatctccatgcaagccatccttacgggtcgcgccccgggctgcacgggaacccttgttcctgcgcgtgcgggtcttgatgggcgcagccgcgggtgcgggcgcggacacaggcggcgagggctcagccacggtgggagctggagccggggatggggccggggcctggtcggcggctaaggctgggggcagagcaggggctgcggtgggagccagggctgactccttgtggcccagacccggggtgagcgggggagccaccggcagcggcgttggctggagcgctggtggctgcagtgtgggcggcggtgtgggcggtggcagcggtggtaactcctgcaggcctggaggccccgggcgcatgggctcgccattggtgggtgctgggaagatgaacgtaggcggcgccagcagggcaggtgcgggcctccggggcccgggagctgagtgtatctgctctggtggtggcggaggggagccccaaggcccagagagtgcggccgcacgccgtcgcggcgccccgatgcctccgccagccccgttgaagcggaagtggcgttcagggccgtcgggagcgctaacccagtcgaatttgggcttcgagcctg

SEQ ID NO: 344288 - DNA, 1000 bp, Homo Sapiens
tttttttttttttttttttttttttttttttttttttttttttttttttttttttttttttttttttttttttttttttttttttttttttttttttttttttttttttttttaagcaaataaaggattttattttttaaagaagtggcagtgtgagaatttaaaatcaatcacataaaacaatcaggaaaggggtggggagagaagtgtccagtacaacctggacaaccttgctttctgcccttacttaaaaagacagacggttcaaatctttgctacctcccttaagtatctccataaatgctcttccaagaaatcctccaaaaggcacttagctccatacttatgcattgaattgtttcaccttagcaatcagtttttaagactccaaggtaacaagaaagaaaagatctgattcttttactaaaagctagtgaataggactgttttttttcaagaggcatcacttttacaagaactagctagaccaccattattcctttatcaagaaaaagtttcttttttaaaaaataaataaaactctggctatacatagtacaaagttcatacataatacatctggaaaaaaaccgaagagtataccctgaagcaaaaggtttattggagagagaaagcctcttccattataccaagtctgaagatggcagttttcaaagttcagagggtggcagtgatatataattaatgccaaactgtttgctcatgggtatggcaggatgcaatgaaggaccaaaaaaaaaaaaaaaaaacaaaaaacaaatcattctgcacattacactgagcagtgaccaccacaaaaaaaaaaaaaaaaaaaaaaagaaaaaagaaaaaaaaagaatagaaccaaaatagagagaagaggaagaagaaaaagaaaagtcctaatagtgagagaaagagagcgagcttgaaatcccaaacactcaagcatgcagtctaacacagcacaaaccaggtgtttccattcagcccactgcaa

SEQ ID NO: 344289 - DNA, 1000 bp, Homo Sapiens
tttttttttttttttgtaaattagctacgatctattccaagcacagcaccgccagaagattcacacacactatttggtgtttcatgttggttttcctttcattcttttaaggcaggggtttccacaggtcagttctgagataagaagcatggttcatggcagtttgttttgcaactccaatttgttctctgggaatatctcaaatcattccctgaaattagtgcttttttggttgagaactccaacgactgagacagagcctctgggctcttcctggcacaggatggtttatagctggcgctcttttatcaggtcctcatgctcacgtagaagcaacagttcacctctctttttttctcaggcttctactcaaaagtcatcaagtttgtaggaacctgttgtttgttactttggcaggctgcactcaaatgcttaaaccataacattgcattcattctattgccagcttgaaacttgtacgaatttcctttctcagagtcagtcagcaggaagagatcaggatgttcagggtcatcagccatcatcaccatccatcctatcacagatacgttcttattggatgttgatttgaaatgttttctttcggtagcctttagagatttggcagcatagtaaaaaagctgtgtcccacacaaagctgcccaatattttgtccaagatgctactgtaggctttttgccttcttttaacaaagtttttctcctgagaacaccttgaatagtaacagctcctggatataaatgtactgccaaatcttctgattctgcagaactgctggccttcatgtgacttcgatagccatttcgtgccactcttgtcaccgggccgagagaatggtataatctgttcctttcaaaagcaggccatgaggtctcttcacttagttcagaaccatcgctgctacctattgatattccactagaaagagtagaactttcagcttggcctcgagatggcgcatggggctccatgacgctat

SEQ ID NO: 344290 - DNA, 1000 bp, Homo Sapiens
cattttgaataatcactttaaaagccagaaaatagcagaagggaagggattttaaaagtatccattttttactacatgtcatttttagggaaaagtaagacaccaaaacattttaaaattaaagcattaactggttttccatttgctaaactctttttgatatgaatgataaatcattttttccttaagactacagcattgctaattttctccatatgtgtacaattagtctttgacctttaacaaatgtcctctaggcagtccacttaccatccaagaacaacgccacaacatcattttacttgcacacaaagacttgaaagcttcataaaaataaatgatccgtggcgtaagatacattaaccagcagaataataagctatttcagccctgtaaattttagcacccgtctattcaaaaacctcactgggtcactttagtattaaattcataggagtaaaatggtaactacacatgctttatttgttaaggtgccagccatatattttgtgaaaaagtttgttagcctaggatatttaaaagcaatgtctctttccaataaatgattttatgtgttacagacacatttagtattaagcatcatgtatatttaatatcacaatgtctacttcagtgtcccaaaaagcctttattcactttatagtttccattactgaagagccaactttcggttctcccacaattgtgtaaagtgcaggcaagccacaagagcttctagttttagcttgcagcccgtgggaccacgataattgttatgaagccattaattctacctcagcagtttcaactgtcaggtacatgtaacaataattgcacttaatgaatgctgctcaatttattaagtacaaaatgaaaaccagtattcttttatatgcagcactgaggcacattatttatcatttgtgtataccatgttgaatattctactatcatttattggtcagggtatatagccatagtttttctaaagcttcttttt

SEQ ID NO: 344291 - DNA, 1000 bp, Homo Sapiens
ttttttttttttttttcatatttattaaccactttaataagcccctttatactttcttttttttcaaccactttactccaggtttggttagtataatcatgagactgtctagcctaatagtctagagaaaattctccggttccaagacgatgccttgctatgtagccattaattattaagctcctggtaaaccctgaattagatatagaaatttgcaaaacaatgatatatttccaagaatgtgaaaaacagaggaaatttaaggcagatggtaactctaagaagagtcacacgagtattaaattggccctcaggaaatggctcatagcaaaatctaattttctatcagatgagagggccaggcacagtggctcatgcctataatcctaggactttaggaggctgaggtgggaggatcacttgaatccaggaattcgagaccagcctgggcaacatggcaaaatcccatctctacaaaaaaacacattagctgggcgtggtagtgtgtacttgtagtcacacacacccttgggaggctgaggtgggaggatcacttgagctcaggaggcagaggttgcagtgagccgagatggtgccatggcactccaacctgggcgacagagatcccatttcaaaaaaaaaaaggaacagattgggggctgcattgttaggctacactgaggaaatgttcctcttatggatccacagaagaaaaatgacttttagtgccacgtgccttgcaattatctctagcaaaacagcctagctccctcaaccccactgtgtgtctgggaaaagacagtaaaaacatttccttgagaggtgaagactaaaaggaagctatcggctcactgtgcacaggtgagaaaatgtcacggtaaaagagcaccatgtgttgattttaacagctttttctaactggaggaatctgtcacatgccatagaaaaattgctccctgccctctgaaaaaaaaaaaaatgtcatacagaaaaatcaggt

SEQ ID NO: 344292 - DNA, 1000 bp, Homo Sapiens
gaggaggtgtgggagaaatgagaaagggtagaacaaaacccacaccaaataccctcagccacgtgggacagaggaagccagaaggacaggctggcatgagatcctatggcccagctgtccagcctgtgtttggattccagatggtgactacctcctacctttttggtcagcagggtgagggggcacatgtgggtacttggagggcttcttgatatggaagttcacgttgtccagctccacgttcaggctgatagaagcggctgagtcactgtccactgtggactggaaactgctgactgatgtgcgcttgctaggactggcagaattagccaaattatcgtcaccttcttcagctatctgttctgtgtcactgtcatcaaactttatgtctttaaaccaggatggctcagagtgtccttccacggagttcactgagtcactgtcgggagaaggcgtctcagaaaattctgtactctgcagtggtctatacagcgcatactcatctctgaaaagctggtcgtgatgactaacacaatccagccaacgtccatcaaccattgcttgtccaattgctatagcttgtgcccttgtggcaatatgcccatttcggattagccagttgactaattcctttcctacaatgcagttgggatgcgttctcaaccagtagcggtgatcctgaaactccattccactgctgtgatggcagatttttttccacaggtcttttaactgcacactgtccagaagaattttgcgttcatcctcagtggtctctgtcctaacatatgttcggttagcctggggactgacagatgtctcatatgaaggtaccataggagaaccagatctatccagtgacaggttagtaatgctggctgatctatttcgagcaggagatttcccagcatcctcttgcacagatacaagtcttgttgaaagaggagtatttgaggaatctggatgaatcaaactttgccaggccaaatcatcctctaaa

SEQ ID NO: 344293 - DNA, 1000 bp, Homo Sapiens; identical to SEQ ID NO: 160856

SEQ ID NO: 344294 - DNA, 1000 bp, Homo Sapiens
tttttttttttttttttttttttttttgagacaggagtctgctctgtcactcaggctagagtgcagtggcgcgatctcggctcactgcaacctctgcttcccaggttcaagtgattctcatgcctcagcctcctgagtagctgggattacaggcatgcaccaccacacctgactaatttttgtatttttagtagagacggggttttaccaagttgaccaggctggttgtgaactcctggcctcaggtgatctgcccacctcggcttcccaaagttctgggattacaggcgtgagccgccatgccaggccttggatttctgtagctgcagtttctcaggcaggttctagacgagccttcactgcagacagcatcagccctgttcccacggtgtggctcctcctgagtctccactgaatgtccacagtgatcactggggacccatccccctggctggagcttcagtatgtcatgaccgtgtgcgaggtctggaagttgttcaccttacatgctcctttctcctctttgcctggctttgtggagttttcttctatacatgtacaggctggtcctcagtacagactcaagagaaccctgtgcagatttctggagctcttttctgcagtttcctccttgcgggattctgccctgaaatgccggctccttctgtgtccccagaccctagtgcagtctcagctccgtaagggtgctcagctttgctcaggccctgcttccctccctgtgccggcagcccagaaacggccttcaggcagaaggccagggccccagggttcaccttgcctgtctcccttccaacaagggtggcggtcttgtccgggatctcggactcgtccagggtctcggtcttgttggggatctcggtcttgtttgaccagttgtccaatgtctgcaaacagttgtttcatatactttgtccagttttctagttgttcatggaggaacattaaagtctggtccttgtaactacggcctggccagaag

SEQ ID NO: 344295 - DNA, 1000 bp, Homo Sapiens
attcaacagaaatttattggttcttggaaatgttccactttcccaaccacttggaatactttagtgaacaaaactgacaaattccatgctctccttagccttacattttaatgaagcaagacaataaattgaaagcataatcaggagattatatcttatatcctaagtagataaatactataggaatatacatacttgcatacatatttatacacattatcagaccagcagcttaggaagcttctggtgtggagggaacacttggcagggtaattttctcatgagtcctcatatggcggtggtatgtggatgactggcggtagcttgtcttacaaaagggacatgtataaggcttttctcctgtgtggattctctcatgagaccgcaggttggttttgtggctgaaggactttttacacatgctgcatgtgaaaggcttctttcctgtgtgaattatctgatgcacccgtaggtctgatatctggaagaagcctttttgacactcgggacaaacaaatggcctctcattcctgtgtcttctctggtgagctaataagtgacagagatacttaaagaccttggggcattcttcacatttgtatgatttttggactccatgggatcctttctgatgtacctcacatgtggaatttccctcattgctctggtgggtaagggcagactcaggggaggactgctctggttgagagatacaccctgctcccatcaccatagggacaccttggaaagtgattccatttatggacccttcctgagatctagcagtgactagctctgctctttttgagttgtatgggttgtcagaagaaacacctccctcttcaggcctaggaccgttctcttcctggatgatgattagggaaactatttgattgccttgattagtaatattttcatttactcgagtagttttcgaagaactgttccagccatcttgttcatcttcatatccttgtcctgtttctaaggaagtatcttg

SEQ ID NO: 344296 - DNA, 1000 bp, Homo Sapiens
ttttttttttttttttcttttttttttttttttttttttttttttttttaaaatccaaggcctttaatttagtttttggtaatgaccataaatgccttcgcaaaacctctttttcactgtaaatagaaggcactaggcattacataatacccttaaagcagtgattcctcctgatgctggtagagataaaacatttaatgtcagggtttacatagtaacaaattcttcttaaaaaaaaaagacaaatctaaaaatcacgcaccaaaaattatcagtcactctttcccaggttcccagtgcaaatttacatcatttttacaagtacatagtttgaaattaagagataaactaggtatgatatggttttcaacatgtgttaggtttcagttaaatacagtaaaaatgaagacaccattatcatgctaattggcatcttttgctactgtttagctgtgcaaaatagacttgaaatgatacatcctgtagtggcataatttaaaagatccttgatatgacaccaacaacttacaaattctggtcacaaactgtatataaattgtacaattattaaaatatacctttttgaaaaataataagatgaccatttatacctaaataaggtttcccagaaagttatgaaatacttttagcatataaaagtagttgctccttttctgaaaagtcagctgttgtttcacaaaataactcatatgatccaaggcaaacgatttctttcaaatgccatattctctctatgactttgaggtatgcttcaagagactgtatccataagaacagggcacatttgggtattagaccacagttacaaacgcaaggagtctttcttgggtcaggaatgcccttaagagttatatcgacagagaacaaaagatagcttctgaagccatatcctttacaaatacatacaactaaatttggttatttagaggataattcaagacacagctattaaccacatgctgtgtcatgtgtgcctatt

SEQ ID NO: 344297 - DNA, 1000 bp, Homo Sapiens
tttttttttttttttttttttttttttttttttttttttttttttttttttttgccattccaggtgcaaattatattacagcattgatttgtaatttgtgacaacgtttggttaatacaccagtgaaccttaaaaagatcagaattgttacatgtatgatgtgaaccagtgttatcttttatgttaaccatgtgcactaccacaggctataaatatgaagcaatatttcagcaagatagaagctcctgtgtatctccacatttagagagaagtctgagcggtttccatcattattatattttctgctttcactgtgccataggaagtgtctgccatttcctcttcttttagttttttataagaaatatctgtatcttcatcttcatctagaggatctcgcttgtgcaacatttcacttccatacattttatagattaaaacaaaaatccccgcttctgcagactggaaaagtgcatacagcaaaggaaacatgtacatgcttcctatgaattgcggtggaaaggccagttttagaatggctgtacagagctgcacattctgactacctgtttccagacatacagtcctcttgcagttgggtggaagatggaagagagtagctaaaccataacctgaagcgtagcctgccaaaggcataaaaattgctatcacataaacagctgcagggatacttgccagcagttcaggtcctaacatagtgccggtcattatgaaaaggaccaccagagtcactagcagagaccacagggaaaccttcacaatgtagtcagccacccggctgtatttgtagcgaatgaagacgcccaacccgataggtatgagagtgctgcagagagtcagggtcacggtccctaggggtagtaactgcacgataggggtgttgatccaagcccagctgtagatccacaggcacaggggcatcaagacgagggccagaagcgtggaggagatggtcatgatgatgctgaggttcatgtcg

SEQ ID NO: 344298 - DNA, 1000 bp, Homo Sapiens
cagttttatcttcagaatcagatatgtttaatatctgcatataacttaatatgcatttcttccattacaatttttaagtataatccaaggctttaaaaggtatcttttttttacagtaatttaaaattatagaagatgcctttcctataattgaagttattgatcaattgaaggtataaccagactgaaatatacagcaacttcttgaagaatggcaaaaataaagtgaaagttctaaattcttctctgaatttttcagctattgctaatggaaggtgctgccaatataataggcaacacaggttcgtctaacacaggtcggtctaacactggtccaagtaatcaatcatcatatcttatttcttttctttttcttttttgtttttttgagacggagtctcgctctgtcgcccaggctggagtgcagtggcgtgatctcggctcactgcaagctctgcctcctgggtccacaccattctcctgcctcagcctcccaggtggctgggactacaggtgcccgccaccatgctcggctaattttttttgtatttttagtagagacagggtttcaccgtgttagccaggatggtctcaatttcctgacctcatgatccgccgtgcccggcccttatttcttaagaatagaaaactgtaggaatttgcatagtagatcacctggtgagacctcagtcctatggtgagaaaaattctctataaaagctatatggtccatgatgtcatccaacaccacataagcatataaaatacatgataaggctctccaggaaaaaatattcacaagaaataatgacttctttcatcagcttaaaagtgggaagaacttatttgattaaaaccctgtttaaaatcgattgtcttgttagacttcccctatccataatgaaatcattacagggttctaatgtcaggtggaaaagtgttgactatggagttgtttagcctctgatcctaggataaaccaagcagttaaataatttcc

SEQ ID NO: 344299 - DNA, 1000 bp, Homo Sapiens
tttttttttttttttgtgtataattcagactttattgcttattaattatgtcactccacaaaattttaagtaacagacattgagaaaatatactgggagtgttaaacagatgacggcaatattgatgaggctgttcaagtgttttacataaggtaataagaggtaccaccatcaccagaacccctacaaatttttacatttcatataaaaagagtaaaaatagttcattggcatgtaactagcatcattctctgtaatctatgagccataataagcctgaacaatttcagtctcttcagagcaaaacaaagtattttattccactagcagatgtttctccaaaaacaaaaaacaaaccaatacaaccacaaatactacccacacacaaccctgaaacataagttgccatattccagtggtcctgaattttaacatgttttgctctacattaattcaagaaataaaatgagaaacagctttgaaaatgagattaactcctttgctgtaattatacttactctataattcaaactatttagctgaagtcagttaacgagtaaaaaccgcggatacagctcaaactgctcttaacttctttaaatgtttactgttctatcaaaactcagacccaagctgcacaggtgtaacttgaggcactaacaatcttcctaccagacgtaatagttttatgtgttcttaaagctgggcgcatatacaaaatcactgtacatcacacataaacatcagaaacttttcttggcacaactagaccaatagtttcctctattattattatttttaaatcaagcatgtgtaacagttcagcatttaaaagactcccatgtatatgattaaaaagatgctcaggttgagaaatacatttgaatacttgaaaagacactccaaaaagaaacaagacttgaaatgtggttttatgttgaaccatttaggagacctcagttatccaacaactaaaagcacacaacagcagataaatagg

SEQ ID NO: 344300 - DNA, 1000 bp, Homo Sapiens; identical to SEQ ID NO: 160858

SEQ ID NO: 344301 - DNA, 1000 bp, Homo Sapiens; identical to SEQ ID NO: 160859

SEQ ID NO: 344302 - DNA, 1000 bp, Homo Sapiens
atggatgaataacagatgaatttattagatttttttctcaaaactactcagcaaaatgtacaattcaattcccgtcagtaaaacatgaggcatttagtgccttatgtgatgttctaggcatttgggcagtttcttttcatttaggtgggaatttaagacattttcatatgaagctaggtaataaaatgctgtggcaacattcatatgtttaaatgtcctaagaattgaagaggcatcaaagcttatatcagaaaataaaaaggtaaatgcgggtttggagtgattcaggagatgtgtggaagaacttatgatctgaagcaggcttgagagaagaggcagaaaagcaaagctgtgaaggaaggataagtttggcaggttttaagatgattctgctgaaggcaaagaaatgagagatagtaagagaagtcactggaaaagtgaattggaaccaattgtggaaaaccataaattttggagttcaaattatgggtattatgtcttttgcaaagagggggcattaaaacattttaagtgaaagaaataatgtggctgttaggaatattttctgaagataaatctggcaacaccatcggtaattgattgagtgggtagaaactagaagcaggaggaacagttaggagcctatgacaataattctgagccagataaagataatggtagaaataaaggaaagagataacgggtaatatttagaaggaagaatcaatatcacataatacagatttagtctggtgcaaggagggtggagaagatatctagaattaatccacagtgatacacataggattcagaaaggtggagataggcagagaccatccacttatcagaacttgattaagaatggcatcagtaccataaaaatcacagtgaattatttttaatattttaattataattttatgttcaggggtacatgttcaggtttgttatgtaggaacacttgtgacttgggggtttggtgtacagattatttcatcat

SEQ ID NO: 344303 - DNA, 1000 bp, Homo Sapiens
ttttttttttttttttttttttttttttttttttttatagtttaaaatccatttattattctaaatccatttttttccattaacatgttatacattagtgtttactaaccatgattcatgtaacagtttagtttgttaacttttaaattatttaacaaccataagttattaatacatttttaagtattacacaaatatcttaaaacagacttgggttcatttttgtaatttttaaatagaaaacattttaggcatctcttaagaagaaataaagcaggcatttaaagctagaaaacaagtaattccaaatttaatttttacaaaagttttcagctttattgacaaattatggcaaacatatttgacaaattgtggtttcctatttagagaagcttacacatggaactttatgtgtgtttttttttcttttttaacaaatacaggttaaaacactgaacaaattcagttagctacatacatacagtagctgcttgttttcaaccccattaaaacagcattaaaattaaatttacaaacttaatatcaaacatctttgtctaactaacagatattaaaagacaggttaaaacatcttatctacaactttattatcagctagttcaaaaatcatattacagtcttttagcaaccctaaacaaagtttctgctagttggttgagactcaaaatctgttaacaaattcatgcttttcctcaaaaaaaaaaaaagaaaaagaaaaaaaaaagattacacacaacaatgaaaaacaaccaagagaatatcatcctactgaaaggtttatagactatgcttgctaatgtctttttcagtctgttttgtaaaataatactagtgtcaatgtcacgccaacagtacagagggaaatactagaaatatatgggagtaatcatgagcagttatccctagaatagaaacaaacaaacaaaaaaaggactattacttgtcttgttgctgtttatgtggagaccacaggctatga

SEQ ID NO: 344304 - DNA, 1000 bp, Homo Sapiens
gtagagatggggtttcaccatgttgcccaggctggtctcagactcctgggctcaagcaatccactcgccttggcctccccaagtgctggaattacaggtgtgagccactgcacccgatcataatcccaactcgcagcatctgtgtggcctggggccagttccctcctccccagccttgcttcctgtgagttgggtgtggaggtgagtgtgcaacagctggcacgtagcgcagtgagtgttgaatctgtgctggggccacagcagcccgagcttgtcactagcaatggcagggatggcactttccccagctaagtcagacctccctgcagcccaccctgcggctctgggcccagcctgctcctcctgggggagccgacgggtgtgagttgggggcacagagccccagccctgtgtggggctcctggaggctgcggacagacggggaagctgtgaaaggagacaccgccccgcccggccatgcagcctgcacctgggccaggccagggcccccagggcttccaccctttcttgtggatgctggggattttcagctggaccatctcccagagaaggatactgaggccaggagaggctagagagcttggcgggtgcgctgggcccagatacgtggctcctgcctgcctcatggcctgctcctctgtcggggcctgtcaccgggaaaccccttttttagcagcgatgacgacactggaaccacgctagtctccgtccctcccgctcacatgcgcccacgctccccctcgaggcaggttgagccccggcctggaccgccccacgctgccttccgtccacgcagagcgggctcggccctcagggctttccttcgagtcgtgttggaaagaagcagaagcagcctcacccgtggggcggaggcgtctgagggtcaggaggcagggaggagagagggcctctgtggagccggctgcctggtgtccaagtccctgctctgtgacctcaggcaacttgctccgtctctctg

SEQ ID NO: 344305 - DNA, 1000 bp, Homo Sapiens
tttttttttttttttttttttttttttttttttaacacaccatcagtgtttattggtcagctgtcccaaacgggccagccctggggctttggggctgggcctccgtgaggagaggtcagtcggtcagcggcccggggtggctgccctgagccccagggctggtcctggggtctgtcagtccttccccaggctttccaggtccagaaggctttgtggggtctggggctgtgtcagggtaaggaaagctgccttggtggaggaagagaagtcagagaggtcacacatgtggccttagaacctgctaagtccaacgtcagcatgtgacaggaggggaagtgaggcaagacggcagaacccaggggaaaaggtggcagggagtctgagagtgaggttgggaggaccagcatcttttaggccctgagcaagaaggaggtgaccggagtcttccaggtatccctccctcctagcttctggaagtgggagtcggggagggggctccagtcagtcaggtgtaagctccatgccatggggactctgcaggacaggcaggcttgaggagccactgtgcctggacaggttctgcaggctcccccacttggtccctgtgctggaggggaagcagagaaggggctggcagcctcatccctgcgggaccttcactgagccttcttggtcactctcttggtcttcagcatcacataggagatgaacagtcccacaaacaggagcagcaggaggcctgcagccagtgggatggcgacagcataggctcggggcaggaaatacttgtggatgacatgctgactgtcgatgaatggctggcatcgagggaagagctctggtgtgtcttgcttgccttgccgagcccccaagcccaaacgtcccacctcctccatctaaggggctgacccattcagaggactgggactgcatttgcttttctttaagattacggcatttgggtgtcgtggtttgtttctttccttaatttcttattggt

SEQ ID NO: 344306 - DNA, 1000 bp, Homo Sapiens
tctctaacttgtaaaaatctagtcaagtatatttgatataaatgagagggaggatgcaactcatattatgattgcaactaaccctactagccaaaaatggactgtattaaatgctaaaaatgatgcataatcacagtgccatggttgcagagagaaaagcgattccaacttgggatgaggacagagtcaattgccatgcttgttgccactgttcagggaagaagctctaagttgttcaaataattaattagtgcaagtgaagcaggaagagcacatacatttccgctttattcaaatattgcataaatacagagcagttgggcacatccattctaaggcactgttctggtttgaatgcaattccacaagagagaaaagagaagccattacattctgtatttttcatctctacattcagactcctcctatattatatgtttattgctactgggatatcaatttgagccccagacttatagcagcatcatatgttgacctggatgacaagaattaaagatacatcctgggtctagcaattggtataattggcacttaattacaaactctcttgcattattctccacctgtttcccaactcttgtttaactaaaaatattataaaatctttatgagcctgatccatgaattatatttctttactagcttccactaagcctagaacaggactagttaggcacatagtagataccccccaaagtatttatatcactctcgagaacttcaatggaataaagacatatacttttcctaattgtagttcaaggaaaggatgactgaacatcttcataaagggaaaatgcctgaatgtcttatttcttgtattttataacaaggaactaggctcaatgaatattttcatgttttaacaggtttaactgacaatgagaagtcttcccttgctttgggaatttgagctgttaccatgattacatgagaacatttatataagtagcagtgtgtgtgtgtatgtaattataag

SEQ ID NO: 344307 - DNA, 1000 bp, Homo Sapiens; identical to SEQ ID NO: 160861

SEQ ID NO: 344308 - DNA, 1000 bp, Homo Sapiens; identical to SEQ ID NO: 160862

SEQ ID NO: 344309 - DNA, 1000 bp, Homo Sapiens
agaaaacattcttttttattttaaacagactttacactgattttttagtaacatgatttcttagagcctgtttttgtggtgaagaagaaggagacccaacttaaacctgtccacagctcactaggtggggacacagattaatattgtcttcctctcaaattttacttccaggctggctggaaatgcagccctgatgtcaatggtagcccggggtgagtggcatttcatgaggggaggcttatctgtgggtaagggactctggccacccttgctcctaaactcaggccacgcgagggaaggaggcaaaaattacttggccaaagctgctcggcttaatgaggattttgccgaagagtcccagagttttcattttgctgcatgactttgactttgctccagccgcctcaccacagctgatgagtgtggctgcagtgtgtgagctgctttgccagggtgctgcctccaccaccccgccttgctagataaatactacatgccggaggacctgcagaccctggggtggaggctgggagagggagggtgtactgtggacacgcataaacccattgtcccaccccggtccctgggctagctctggaatgaagaggttgctacaacctgacagcctgacagcctgacagatactctctggcacagtgactagttaatgggttgatgttgataagttaaccatagtccctggcccttcggtggagcagcaaaggtcctagaaggcaaaaaacctgggccattcatgctcaaaatggccctggcccacagcagcagttagttagtgcggggctaggggacttcggatttagataaagaggtgccagggtggccttactgcatggcgagacccacctctcactggctttgctgcagctgcacaggcaggacgttgactctgatagcctgggaagtggggactcccacgcagcgcagtgctctgttgtgggcagcagggctctgagcatgcgcacatgcatgggatcagagc

SEQ ID NO: 344310 - DNA, 1000 bp, Homo Sapiens; identical to SEQ ID NO: 246592

SEQ ID NO: 344311 - DNA, 1000 bp, Homo Sapiens
tttttttttttttttttttttttttttttttttgacacaattcagctttatttttacttaattataacaatttttaaaaactccatgactttgtgctatttctaatatttaaataaaaaacatttcaaattttgcacaaataatttaggccaatacataactagatttgaataaagtcagatgaagcaataattcctcctctgtgtttgaaaggaatgagtgtggttacaaagtcacaggatgagtccctgggatctggggtgggagaaggggtggatcaagaatgacttgggcttgtcactccctagcaggctgagggcgtgacacagcagctcggtggcggagaggtctattctagtttctaacactccaatgctaactttttggatgtatttccttctagcatgtagaaagggcttttcttggctgccaggaagtagggagcagggatgtggcatggtgatgatctgaggacagccaggcatatgctcagacactttggaaaactggggagggggaacagggagacagaatcttcatcttcttccttttgtgaactggggaggagggtgcttggtgacattttcctgagtataaagaaggaatacaggtttgaaaggtttgtaattgtatatgaaaacaggtattgaaaaccaatactgggggaaaaaaggcattgtaaacacttctatttaaaatgaagatttctggaacaactatactatatagtggtatcacaagtctttagctggcaagatctagcactgaaacaactcttaatttttaacttgtgagggttctttttaaagcaccacttaagacctatatattaaaaaaattaaatatagaaagattgttctatctaataaatgagtttgagaatgcacaggaaacaacaaaacccatttttaacctctggtaactgaagtggagcattaaattcaaagccactttgaggatttcctacattgttcacctaagggaaaacaaatgcagagct

SEQ ID NO: 344312 - DNA, 1000 bp, Homo Sapiens
ttttttttttttttttttaaatggaattcttacattttaaaacattttcttaatataaaggataacaattcaaatcatattttacatttctacgtcttcatattgcactaaaattattttacatggaagaactagttgatgcatcataataccttagaaacattttttgatattcacatctatattaataaatatttcacagtctacttaaatattctactatagagcaaatcatctaacaaaaacaaatctatagtgttactttttttttaagagcaaagatattcagtatttttatttctgcctctgggaaacacactgacattttaaaacacatgtaagtcactcatagtacctcataataacatttgagcaagacttagtcgttcattcatttattaagtggggtttcatgatgttgcataggctggcatggaattccagggctcaagtgatcctctcacctcagcttccagagtagctgggaccacatgcccatcccaccatgtccagcttcttcatttatttttgtgtctctacatggctaccttttaaatacaacattaattttatttaaaaaatgaaggaaagaagtgtttttcctattatccagtggagcataattgtgagaagagagataacaaaaataaaatgtcaatgctggctgtttcatagaacttaaaaattcaattctcattattctattgcaatataaccaaccctgtttattttaataataataaacactgtcagtcttttaaaaaccatgataacaattaaaaactttgaacagcatgacaaagctaatggcaacctcttgaaccccgttttaaagctagttctacttccaaataaaactttaaagcggtttagccagcatcagcttaggaatattttcttcaatgttctaaggtataatgtttggcatcaaaaagtatggtaagcagttctgatttgtgactaaagaaaaaataatcaagtactaaaataccagtggctc

SEQ ID NO: 344313 - DNA, 1000 bp, Homo Sapiens
aaattggcattctatatatttgagaaactaatgtataaaaattcaagataattacaattggaaggggaccaataattccactttttaatcgaaaataatctatatactcccaataaactcacagtaaaataagcttcaaaaagccttaagacaccaaaagaggaaaaaaagccagtaattagaacaaaatgtgtaatgtggttaatagtatagatatgcttgcctttagacaattcttatatactcaattcttacatgattgaaagattctgtaataatgctctacctttttataaagaaaaaagtaggtttccaaaagaaaattaaacgtttatgactggagttagcggtagtaaggaattagatgtgagtggttgactgctctttgtgccttcgacattttgcagaaaattctgtcttctttttagtccatccaaaatgactgaattattagatcccagactctgtgtccgtggagaatctattccactatctcctgccatgctgtgattttctgtcccttccaagtgactgtgttcatattggacatcctgagccaacactggcatatgtgaagtgttgaaaagttggaacttttgtgggaaatgttttctcatttcctgattctgaggactctgactccagctagctggcttctttcctgtgtcaccaatagtgtcttgtatgacttcagcttcaaaactggcttttcttgcgctatagtaatcaaagattctttcatcagcaggtgctgaggcctgtacacatttagcaacactgggttcttcttcgtagttaaaaccaaactgggcccctgaatttaggccacaactttcagcagagaggttaggttcttggctttcacctggggtagcatgcagcccagtgggtttgtagcattcatttcttttaagcacctgagactcaaccctctccattgtgctgttgtactcggtcagagatctctcaatcactttttgttttcctaaatgatttccct

SEQ ID NO: 344314 - DNA, 1000 bp, Homo Sapiens
ctcagggaagacggttttatttagtaagagttttcacggtagggaatcaggtactgctgtgaaggtggtggagacagaaacacccctgaacccttggggctgctcttgagcaaggcaggtgcaagtgttagggcccctcagctctctgccctcggcttcgatgtcttcttctctgtgttctggcttgaatgcatctggaggacttgagcttctccaatgtactctggtttttcgctttttgtaaaaggtgatatcttcgttttcttcggggattgactgcagggtggctcttgcttctcttgaggaggttcatgcacttctggaagctggcttaggagcttttctgtagggatggagactaggggctggggaaggagctgagccactgctgtctgcaggagtcccagagcgaggtctttttccttgggcggagcgtagagcagccagaactggattgcgcttagcaagtctgtttccaggatctgacacaggagctccaggaccagcagctcctgatcctgaaggaggaaggcctggactccttcatgtctgctggaagactgactctgctggccctggtgagatctgcggcggccgacagcccgggtggaagcggggatgagcctcccagtctctgctgagtactttgccccctgctcccgcagaggctcctccttctgctccttctctttcttcttcagttcatcctccttggtgaggaaggccacccgggaagctagctccttcaactccttcttccaggcttcagaagaaagctgggggttccgattagactgtgggtctccaatggggacagagatggtgggtatccccatttgacagccggaaaagacagttgactcaggcaagggggctggaaaatccctgacgacacagacaggcttcccggtgagatcttggatgtgggtcacgtgctgggggtgtgggtggtgccgggagaagaaggagtggtgactgaggcgtccaaagcagtaggtgc

SEQ ID NO: 344315 - DNA, 1000 bp, Homo Sapiens
gtactgataccaacgtggcaggcaaatcccagtgaacacagtaagaagtcggtgatttctttgtcatctttccttagagagggcacatacactggaaatgtggccaattccgctggctgagccaaatcaatctgtggtagaaaacacccaaaaatggcccctactcactccagggggaaaaatatacaaaatccttcccaaacctaaacagaacaaaacaaaacaaaaacaacctctccctcctaaagaaaaccacattaaaaacaaatgccctgcaacaagtccttatgtgtatgtttttcacaaggctggtagaggttattttgttttggattccacgtaaattttatctccatccctaatgccaaaggaatgcaatgcccgagagctgtacttcatttcctctgggccaaagggtgcttcatggtcaaaatagtagagaagcatgttgcttgtgggtaattgtactagagtttttaactgtttctttagttctgccactgtttggtccagacgaatgctcatttcttccacctgatcgttaaagtggacttctacttttgcactgctctggggtcttaggtccacttctgtcaaaggctccaacttcccatatttagtgatcagttcatgatacctgaatggcacttcttcctgtggaacatccacatagtaacgaataaaaaatctctcagaatcttctcgttcaccatcagtaacaacgctgccattaagtttggaaactgatggcaatctggctattaccaatttccttcgctcctcggtggtatatggctgcagaagaggaattcctaacaatctcacttcttccagtttgggaaatgaatttagtttatcaatgtcttcccaggactgcaaacctgacctgtggaggctgatggatcgaagattaggaaccaacctggccaatgaatcatcaggctcctcaatagcattcaaatgattgttggccaggacgagggtatccagtgaaggaaac

SEQ ID NO: 344316 - DNA, 1000 bp, Homo Sapiens
aagtatacaatttgtttttatttacaataccctataaaaatgtaaatttagaaacttttattttcattaattagaaccaatccaaacaaaaaagataaagcacagtaaggaagagataataatcaagtattcacttgattggttgtgaagggaaggtaggaaaggcatgtagtggaaatggtcagtagacaacggtagagggaagctaggtaacatcactggggaacagctggtggagcctggggttacagcatgggaagaaatggagatggagaacaggacagctggttttaacagaggatcttactgttgtacaatacatgtatgtgcaaaatgtttattctctttaaataccataacctgtccctcccaccccccaactacattcgaaaaagtaagaacagcagaaagatcacgaaggccatgtaaaattaattcagatttaattttcttcagggctgtaatcactagggatcaaaactccttagtctggttgattgctgaatgggagaggagtaagtgagaaagatcatggcaggctggccctgcaattattcaaacccaggcccctggctgcctgggaacgggacttgggtgagatgaagtagtaaagacagcagttctgcccatggtgtggagactaaaaagcaaagcaggccaaacttagcttccatggttacatttggaagtttctattcatgacaccaaataaaagtggggaagaaggaagcatggcttactgaagtagtctcaggaagacagggcaagtgtgcaaaaagccacactgccaaagcaggctactagtgaggatcatcctgggtgacttcgaatgcacttgaggggaaaggctcaagtaccctgtagttgtagcaggaaaaagacataaccatgtgttgtttcgattaaggtggacagaaactaaggaaataaaggtgggaagaagaaaaaggacttctcagcctagacctgggcataagccaattaagagttctgattttat

SEQ ID NO: 344317 - DNA, 1000 bp, Homo Sapiens
gggaaaccgagacaacctttaatcaggaaacctcagagagacgcatgacacctggcggtacagtcccagtgagtggaatcccagccggacgcaactcttcctccaggagaacttggcagtcccaacccttctcaaaagatgagccagccacgcggtccagggaggatgctgacagtggaaacgacttcctccattcttacagcacattccaaacacttcttgggaacaaggttacatccagccttgggggtcttccatcctcaccagggcccctgcaggagggagcccaggcatccccaccaggttcatccttggagctgccctgcacacaccctgggccactggcagaggtcctctctccagagtctcccggacacagtgacctccttacatggtggactcttccccccgagaagcccccactgggggctgctgggggccagggtgggtggtggctgcaagggctgtggagagtctagaggtggtgggagaaagcacgcgaggcccgaggagggtgatgggggtcttcgaggggctggggtccatcatggaaagtgctgaagcttccgtcaggagggtgccaggcagaggaggccacctggacactatctgggccccagaggctgagaacgagcgctctggagtcacaggaggtggctgaggagcccctggggaagctagaggtagagtgggggctcctggaggggtcgaaggccctggtgagagtcgaggggaggccccaggctcccctgggaaagtggctgtcagccccaaagcgagtgagtgtggaccatgagctcctgccgggcttgtaggtaaagtctgtgttttcatcaagttcgttcttaaaaggagctggaggagatgaagcaccggcctcgagggtgatgctgtcgggggcccaggacaggagctacagttgacaggggcctcagtgtctccatgcaggctccgaccagctttgctgaatgccacatttccgtgaggggagagcccctgc

SEQ ID NO: 344318 - DNA, 1000 bp, Homo Sapiens
taaatcataattaaatatatttaattctcaaacctttaggaaatgtaaaaagagtcacataataataaacacatatcataatgtgaataatatcatacgggctgctataaaggtctgtggtcagcatccctctgaggtaggcattattatcttcattttatggttgaggaaattggggcttgaagaggttaagtaatttcccacaatcacacaagtaggtagtggcacgctagcatcccatttctgttctatgggactgcaaagcccgatgctcacactcattccactataccttctcccttgagttcaaaaacttacaggagttctagacttttcaaactcacgatactaatcaagaacgattttaagtattaagagtttcctctgcttcattctgtttccaaaggaaaatatacgtcgcatgaactcatgatcatctcagcatgaactcctgagtgaagcctctcctcagcgtgactcaggaacatttcctcaggcattatctgtcgcacaggccttgccatccagctcgcttcttcagctctgacacccagtcggggttgtcatcttcctcctcaaagtccgtgtcctcctcatctagcccaggctcaagtcgctctggatccaaaatgacagaatcgtgacctccatcaacactgtccgatgcttctgtttcttcagacagggggcctttcaagaacccttctgaacctggtctatatattgtgtatgtttgaaaagccaagctgagatcagcattcttaaggatgttcaacaaagtgtcaggggtctctttgagccactgcttacgagtagtatttttgctgtactttattacagaaccacctctatcgtcctctgctgttaaactggaggtgagtatggatgcattttccaaagctgtaagagctgtattgggtacatttttctcccactgtcgtctatgaagatttggtgaactggctttcctcagatggactgacttattacctttttcttc

SEQ ID NO: 344319 - DNA, 1000 bp, Homo Sapiens
tttttttttttttttttgtatttaagcagcttgttttgttacccttgtttatgtggaataaagttgtcatttcatttcatcaaaagtttattgagcatccagtatgtgctaggcactctgctggatgctagtaatacaaagatgaagatgaaaacaacacaaaaacaaaccccacttccttacttacccctccccacccccaatttaaggcagatttggcttaagcctggcaagctggcccctcagggattcagcaccagggtatggcatgttctcatctcaccctaaccttcacctgtgcatctcaaggctgaccagcaggtactccttatccaagtcctgctgcctcttccaccttcttgagaaacttttcccctacatgcattatctcattatggatgaggcacctgggaagtttaggggagctgcgaaggcacacctgctcaaatgagcctggggaagtgccgagggacagggagctgagacaggcatgctgtggggttcagggcagagggggcaaactagaaatgtcagtgcctttggggctgagacaaaacttgacctggtgtggaggtgatgggtaactggggccttggaattgctccatgggttgatggcgaatcagagctggagtttaggagactagggatgcaaggacccttggaggcattaaggaggagggaatggaatacacagagggcctccttctctttcagctttttaattgccctctctcctcacacagtagattactgccactcctatgaactgttcaataggcggtggcatgggcatgtcctggctacacagcggcccagcctctttattttgatgttagtgtgattagggagtctgccctttttctgtgccctgggacctgagcatgtgggagcagggcagatgggtggcaggaggccaggggttggatcatgttccccccaaatgctgggaagcaataagcctcctcctccccccaccatttctctggagattaggactt

SEQ ID NO: 344320 - DNA, 1000 bp, Homo Sapiens
atgattgtaaaaattttattctcaataacaattccactaaaattatacaaagtacattcaatacttaagaatggcaaaggtggggagaggaggagaggaagccagtttggcctggaagcatcaacagttgactccaacaaaggaagcccagctgggctggaggaagttgggggtggaggtccggttgtaaaaaataaaaaaggggatcggtaaaaaaaggccacccacaaggaagcagagtgagcgtgcatgttcctgggggagggcaggaggctcagctgacatgctgctgctgggcactggagctcaggcgggctccgagttggtggggggcaggtttttatgcttgaaatactgcacaacttgttggggcagctccgccagcacagctttggccaaggtctcttttgctgcgttgcggaactctcgaaagggaacgaactgcacaatatcgcgggctgcctcctcccccgtgtgggagcgcagcatgcggctgtccccatccaggaactccatggcagcgaagtccgcattgcccacgcccacgatgatgatggacatgggcagcttggaagcctgcaccacggcatgccgtgtctcctccatgtcactgatgaccccgtccgtgatgatgaggaggatgaagtactgcgtggccgtccgctgttgtgtggcctgggccgcaaaccgggccacgtggttgacgatgggggagaaattggtaggaccgtagaagcggatgtggggcaggcaagctgagtacgcctgggcaataccatccacacctgagcagaaggggttggtggggttgaagttgatggcaaactcatgggagaccttccagtctgggggtaactgggccccgaatcccagagctggaaacatcttatcactgtcgtagtcctgaatgatctgcccaacagcccagatggccgacagatattcgttggtgcccatagggttgatatagtgcaaagaggaagggtcgaggggattcccg

SEQ ID NO: 344321 - DNA, 1000 bp, Homo Sapiens; identical to SEQ ID NO: 160864

SEQ ID NO: 344322 - DNA, 1000 bp, Homo Sapiens
atcttttaaatgggatttatttatgtttacataaaggtagcaaatgttacataagttgtttccttaagaacatttattttgtacaatcacattgttatcaagcaagacttatggaaaatttcctgggtccacaacactaaactttgaaactactgtagcatcctcttttccaagtttaaacatgactttgtgcactgaagaagtatggcttcgcattgcacagtggtcacatgtgacaacctgacaccaagcgagaagccttttgatgaagaatgttttatcttttgttgagttacaaaatggtactttcatgtgtgtgattatcaaacccatattttttttcagttcatttctgctacaataaaaataaaccagttaaaactaagcagtatagcaatgtaatcgaccaactatctatcatgttatatcttatatacgatgtgttaggtgatattgatgctttatattacacatctgtatttaatatactttgggcaatacaaagttagaacatgtctggtaaataaacaaacaaaaagatttccctgaaaattgatgcattgttttaacaatcacaaaaacttaggtttattcttcagaagtgtggtggaattgcttaacattaaaataaaacatcttgctgttgtcatttttttcatattcccattttatacatttttagataacagaataatcctgtaattttattgctaaaacattattacttggttagacatgattatcagattttgggctgactttgttgttctcatatttgccaacattaattatttcactgtttacttttgcaagcatgtgcttatgctaaagatccaaaaactataatgggaagtcactggtaataatcaatgtacaatgattggttaggacaatgactaacctatgggctgaagttttggctgctatgataagagctctgactatcctgttagattaactgtacagaggggtatttggggattgggaaatgcttatttcc

SEQ ID NO: 344323 - DNA, 931 bp, Homo Sapiens
tttttttttttttttggaagcttaagaaaatcatgtttagactctgtttaaaaacatccaggctggctcccattctatagcatgaagggcaagtccatgttcttctcgccagtgcccacgtagacgtagccatagttcttggtgcggggagcatggtagaaggtgaggcccggccagagcaggctgcgcagcaccaccagggcattgcccctctccatctggatgctccaggaccctttgggaatgtcatgctccaaggagtccatgaaatccagggaggggtccaggtcagccttctcaagcaaggtcttattctttagctcaacaggctccctgaaatggaagtaggagctgagcttcttggcctcagacaaggacagtccttcaaaggtccgattgacatgggtgggtccaaaaggggtcttgaagagggcgcctcgggggatgatggccacagccttgtcaatctggtcaatgacagacaccaagcgggtctcttccttgatctggaccactatttcttcttcaaagactttttcaccttcattcaccttctgcagctcagtgtgttcatattcgtatgatgggtcccccatgaagcggcccttcaccacagacgactgcgccaccatctcctctgtggcagggggcaagaggctccactctgtgcagttcaggctatagagcgtcttgcgcggtgcgagctggtcctcactcaggccctgcgcgatgtagtaatcggcgacgaggccaaggatgcggccccagaagagaacccgatcatagcggtagtcgcgcttaaccagcataagagacgtgagcagcgaggcccgacggtccgggctgaggccctgcccactgccggacgccagctccagagacagcaggaggctgtcggcgtccatcaggtcagcggctccgctcaacgccc

SEQ ID NO: 344324 - DNA, 1000 bp, Homo Sapiens
ttttttttttttttttggaaataataacaatttaatagacaaacaaaatagtatcacagtgaataaaatattaaagcattatttttttatcattcaatagcatgaagagttttctggtgtcatacaaagattgctctctaaagccaaattaactagaaaaaaagactgccacaatacacggagacacaagtttatcactgtagacattatacagagaagcaaaacacatcgtacccatgtccagagctttctagaaatctcattatataactcaccaatttactcaatgttacatttcaaacaaaacgaacatttttttaaaaaaaccttacaaatatataaatccaaaccacaaaacatcttctaaacatggtatttactctaaacacaaatggatttctggaaattgcatcacaatgctatctaaactagattttatgaaatcataaatgtatttagctgtatcttggggcttaaattcattggaccatatcccatgtatactattctcatcctacttactttgggcatacatattcccgaagtttagttttacgattaaaatcaaactgctattccagttggaatgggcgcactgtacctgcatcacacaacaaagatttcataacaagttaaagtcgtcttagtaatgccccctttctaagagttacaaatattttaatgttaatcattagtaatgggttttagagactagaatgttttcttaaatttttgcctagtttctgtgaacagtctattttgccaacttgtaatctgctaaacaaattcttcttagaaatatatacattcaactttccctacatcatgaaaagaagttcattaactcaaatcacctagattatgcttgtattcaaaataaattgtgtaagaacttgaatccattccaaaaccaactcaaaaacaacagggatagcaacatgttaagctgcactctgcccctgccattttacttccttgaagggtcttttcaagcagggct

SEQ ID NO: 344325 - DNA, 1000 bp, Homo Sapiens
tttttttttttttttttttttttttttttttttttttttttttttttttttttttttttttttttttttttttttttttttttttttttttttttttttttttttttttttttttttttttttttttttttttttccaatacattaccatttatttgcagaataaacatggactcaaacactgaaacatggagtttgtgaaggatgtgggtggcagaggtcacgagatgagcacccccccaccttgttttttttaaaatttggtttaagaaattgatactgaaaaaactcaacagaacccaggcccatgaagtctcacatcctactcaagcaccctcagtcccctgccctgcatccagctggtccatttctgagaccagatgcccccacccctccccacttccaacttccttcaaaccccttccccagctgcaactctaaactcctcattttctctgttggggctgatcaccagccccagccttagagggctggagactataccttctaaggaaaccacactccctcctaaataaatacccccaggcccccctcccattaccaaatgaaaaaataaatattgtgaacacccacccacctctgatgaaaatctcctggatttggggccccagccattcacctgcaaagtcccttctctaccctctctgcagcccccttcgactcctccccaggcccagctgaggggggaggaggggaaagggccatgaacccttctgatgctagggcacccctcccccgttatcgaggtccaagcagggccagggctgagagggagagaatgaggatggtttgggtgtgaaaaccaatagatgcccccccactcctgctccggccctggttgtagcgggcactgccacctcctcctttgcccccagaaccatcccttctaggagggtatggaggccgaggaggccgggctgggggagccacagccccagccatccagtcatctgcatactgctgtccccctccagagccgc

SEQ ID NO: 344326 - DNA, 1000 bp, Homo Sapiens
tgaaactcaactttaagtgttttatttttatgtacatttcattttttccagaaataaaatatctaaatacagacagactgtaatgttgtatatgtatagctttcaacaatacttgatctgaataaatgctctgtacattaagtttgtctttttaatggccttcacagctacattgataaaatgaattcctcatatccttttttcttaaccaataacaagcagagagacaagtacaagttaatattaataagcagctcaaataacacttggttaaactatgtacaatacaaaccattcatacaaatgaagactaggatattgaatttgttacaatatgtgtagtaaagataagacagacacttataacttacatggtgtctgccaggcatttcccttcttatataatgatcagaacttattttaagcagccttagctggtgtcgacttcacaaaagtccaatgattggtgatgaaagttgttatcccaatgtctgcccacatgtaaattccaaatgtttgctcatctttactgagaacaggcccctttcaaagaaaaaagagccatcttggaccactttgaatgtgcctactgtatgctggaaaaaagttactacattttgttgtgtttgtaaaataaagaatactgagctctaaagacacatttttccattttaacaagcagatactcctacagtagtatttaccagtacagctactccaagcagtaggaatgcatgagtggagattattgattagcatgtactcaagactttaaaagagatttccataacagcaactgttagaaacattctctgtctagttaatccttccgtttgatgatagttgatcctgaaccattatgagtcagacaatgaaagccctctcaacaggaatcatgatagacgcaagctgaaatgtgcatgacggtgtgtttgtgtacctctatatgtgagagcatgtcttcaggtgtgacttcaaaatctgtgatgatttacaatta

SEQ ID NO: 344327 - DNA, 1000 bp, Homo Sapiens
atggaaaaatgaaaaatttattgtcttcattgctcaccattttttagtagaaaagctgttttaaggtcaggaaaataaataatgggaaaaatataccttaaaaaaattttaattttccccaaaatataaacaaagaaaaaacataaattggatcataatgcatatgctcacatgtgccttccaaatcacacttgttatgtagacatcataaagaataaaagttacccattaattatatggcatgcatcagcagtgcattggtgggcttaaacttggttttcagttatgtgtatatacagataaatctcttcctgagttgagcttcatcttcagttgagacccaaatcatttgctttcctttatttggcaaggtacttgaccatgtgataaggcaatcaaatgtttcaatctccttcccttttcagcggcatggccctcctctgtgagatcaccaatgtgacaggtatgaggacagaccctaaaatatggtcctgtaaaactagagcaggtttctttgttcattagtctcaaggctacagcactgtctcttcatatatttggggatcttgaggttttcagttgaacagattcaaaatggtcttctttttccttggttgccaaagatttgagttttcctagtagtgactgtttattggaatatacaacttcctcttcattatcttctccttccatgatagcacaactgtctgcagccgggagttcacactcttttgagttagtcgtcattactaacttggaatatttgtattccagtttttgattctttttccagaagtagcaggtcagagccaccagcaaaacggcagtaaaagctcccacaccggctcccaccttcagccaaaagtcaaccgtttcacaggttgccaactttttctcaggcaaagaaattcctttaatgcaccatttaggttcattccacacatacaaggtttcctgaaatcctctcttgcaggctccctcaatctcatggaagtcatgc

SEQ ID NO: 344328 - DNA, 1000 bp, Homo Sapiens; identical to SEQ ID NO: 160868

SEQ ID NO: 344329 - DNA, 1000 bp, Homo Sapiens
gactcctttatttagtgttgagtctcctgggggagcagtagcctaggacagtcacctagaaatgaacctgagctgttctgtgagttaccaggagagttaaaaagaaaaaaaaaaaaaaaagaaatgaacctgaggactcagttggtagcctttgattgattgggactacagctttgggggaactagagtgagaaaacagaaaataattttataggcaacacttggattaagggcagaatgtgtgcaggctttgggcttgggcatggacttgattcttcttccatttgattctttcttccttctgaaaaacagtagttgaggaagctaagcttgaagtcaacttcaaagggaagtgaccagagccaggcaaatatctgatgccttctgtcttattcttggctcccacagctttgtctctggcctcgggaccctgagtcagcccatccccaggtggtatgtcctggtcctcttccatgtgtacaccaggggataacaggatgaagacagggaaaagatggaggttttccctacttggggtagagaatcactgaccagttccattggcctctataatcatgaggtccacactgactccatggagaggcatagggatagcaagattggtttagcaaacataggtctctctcctttctgctccatcaaatccccagaattactttcctacacatcagatgcctctgcgcaattaccctggattaccacagccaagggctctaggtggccagtggtggcatagagacagatcagatgctccagcactcaaggttcatgagattcaaaaccgattttcttccactccaaacatacactcttttctcttgggcagctataaatagggttttgctaatagaggaagaagaaacaaaaacaaaaaacaaacccagaaaacaaaaacccctccgtctagacaacatagaaagactcaaaatgattgcacttattaggtgtggacagggtgggcaggaggctcgccaagtgc

SEQ ID NO: 344330 - DNA, 1000 bp, Homo Sapiens
ttttttttttttttttttttataatcatagaacagtcatgtttgcattttattataatacaaccaaaatatacatttaacaatttttaattatttcatactacaagactacatttcttttaaaatagcagaattataaattcaaaattgattgctaaccactcacaataccagaattaaattacatgattaactagggcatctgacacattttgccctttcccaaaaatcatctatctcaaaccctttccataaatactttatactataaaatatttaaatgagaggtataagtcatgtgtatgatcctgtctttgcactcctaatgtatggaatctgggaatcgattttattttacctgacttgtaagatgaattatttaaaattgtgatcatttactatgataaaaatacatctcctataaaaacacttcaaatatctttttttttttttggtttgtttctaaattatccattcccaataaggttaaccaattccaaaatgttttctaagaaaaatgtgacattctaaagggaggctatttcagttttgatttccatttgtattatataaataaatatgaaatacaacatttaagtttaagaaaatcagtatttaatgaatgctcttattattttttggacagctgaatgatatcaagttgttcttggaaattcaattatgataatgaaaacaagtgactactaataacttattgtttagctgagtctgtaaaattcagcaggaacaaaacatactagaatatgaagaaccaaaatatgaaccaaaagcaaaattcaagagtaagaccattttgtagccagcatattgtaaagagcattattttagccaacagaatgatgagactttatgaattttaattcttccactactgttgtggcttttgcaaattactaaatttctctgtgactacttttccatttcttaagtaatttggttggtttccaaaagtcaataatgtggatgtagtgttttgagct

SEQ ID NO: 344331 - DNA, 1000 bp, Homo Sapiens
ttttttttttttttttttttttttttttttttttttttttttttttttttttttttttttttttttttttttttttttttttagaaaaaaagaaaaaagtttaatagcgatatagaaaattgagcacctataaaactatatggtgggctctgggttacattgagcttaagtagaccaagtatctatcccacctaaattatcagcaactccaggccatgacccagtgtcccattctccttcacggtttgctggtgtgtagcctcctggatacaggcaatgtatatagatcgcagagaatgtccgttctggcctcttccttggaagggtctaaaaacagaccttaaggagctaagtgacttccccaaagcccacagctccagtgccactgctgacttttgggtgggggtgggatcagttaaagaggaaagctttcagtactgtcagcacatacacctgccaattaaggggctggatagagttcatctctaggagcaggacctccacccccaccctccaccccagaagccatgtcatgctgtttcaccaggatcttgcctgaggttagatgggagagaacagctacaagcttgggtggagtcactcataaacacaccctgaaagctgtggagcagggagagtgcaggctttagagggctctccatgatcccttcccctcctgggggctcaaaggcaagggtcaaagatcttctcggtcaagtttggggtggcttcctgtcttggtcatcttgtctcccccttcctcttcctcctcttcctcctcctcctcctgctcttcctccccttctgttttctcttccccatctgtgatctcctttccagtccaagtttcctgtagacatgcagtttcagcagctgggagcacatgaccttcacagagaaaattttgtaggggctgctcctgatggtggaagtaccagtctcccacaatgtcttcaaactcctccaacatggtctcacactgcttcttgaggtatgtgac

SEQ ID NO: 344332 - DNA, 1000 bp, Homo Sapiens; identical to SEQ ID NO: 160869

SEQ ID NO: 344333 - DNA, 1000 bp, Homo Sapiens
tttttttttttttttttccttcctttttttttttttttttttttttttttttttttttgagtgaacaatttttattgaaaccctcaaagattaaagaggaccaaatggtgagtttgggtaccataacagaaaatctcacctaactgtaccatcatttacaggaatgaacaaacccaaacacgacaaaattcaaattctcatgtaattgctacaagtgaatgtaaatgaactaatcattttatcataaccttcctttaatcatacgaaaaagggaatttacatggcataacaaaagatatgcaaaacttaatgaaaacacaattctcttaaatttcttaaacttatttttaaaggatgcagaatgcacttgaaatgattaaatgacttaagctgattcatttttttttattgcaaactgttttaacatcagcttaacccccatgcatggtattcaaaaagaacacagctttcgaattagaaagatcacttaaattaaaaagagaaattaagtactaaaattaggaaaacgctggatttcttttgaaaggaatcttcaagtaccaatacgtatagagaaatactaattttggttacagtttcctccttactgttaaatatacaaactataatacctttcaaaataaaatacccacataaaatagctttaataagaaatattcaagccagaacttggaaaaacattaagcaagaaatttactgggctgataatgtcttaatttgtgatcattcaaacatttgatgatgtgtctcctcttgtagaccccaggctctctcccttttggtccccacagttaagagacattcagttggttgtgcttgagacaacctgtgataatttcattcagaggaaaaatattttgcaatataatgacagaccaagaaggaagagaaggtgggtgctctggagaaaacttatatgagaaaaacacaaaattatcacttgaaaataaaaagatttttttttccaaaggaatgctgc

SEQ ID NO: 344334 - DNA, 1000 bp, Homo Sapiens
ttttttttttttttttcacaaacaaagctgactttatttttatttgaattggccaagtaaaatgttccatacaaggcaaacagttcaacatgaaatatttaaattaaaaataaattacttccatcctatataaatctctagctgccacatacaaatgaaagataccagttataaatgaaataagttaaaataaatggttgtaaggagctaggtgtggtggcatgtgcctgtcatcccagctttcaggagactgaggtgggaggatggatctcttgaacccaggagtttgagaccagtctgggcaacacagcaaaatcctgtcttaaaaacaaacgtaattgtaggatcctctgttacgaccagcataggttactggtttgctccctaactttgttctggactccaacatctctattgaatgagacttttgaacagtcctctgggatagccccttcttaaaagagcacttgatgcccaggtctccaaatcactttcagatatgaggatctggtgttcagagtctaaaacaatggttgaagagcagagatagcaaggtggaatcccagaggcccaggcctctcagccaccctctcgcttctcatggattcacctggagatatggaaatagggaactcagcaaaaaagcaagacataggcacagagcggcagtcacacatagcagttgagtctgagacctgtaatgtggccaaacacttctttgtatcaacatatggcaatttccagcactgtcttaggctaaatttcccataggatctctggttttattaagtgggctagattaatttaaacctctgaattagaaaacaaaccttcaggggcagagtttaggccacagatgacaaatatacaaggcatgtgtcactaatccctccatgggcaagaattactaattgaccacagcattcttctatctcagattccatctttacacagtacttcgggcagcctctacccatcaatcatgtttagtgtttgggat

SEQ ID NO: 344335 - DNA, 1000 bp, Homo Sapiens
tttttttttttttttttttttttttttcaaatacaattgtgtttacttcacatcatttattcagaacatcagttccctcagttattgtcacaaccttcaaccctttaaggagttgtaccaaaattaaaaaccattaggtttgataataacaagtgagaaaaacaactccttaggggttaaatgtcataagccaaatataaatggttaagaaaacatttacaagtattatataggtaatataattaattacaaattgttttctgttcattacaaatatctgttttaaacttgaaaatgatgcacaaatagggtctatgtgatgtttacgtcttctgagggtctatgtgatgtgtgtgtcttctgtaatgctaatattacccattacacagatttgggctaatactgcaccacagtactgagaatgtgctggatctctaatgccatcaatggaagtggactggataccaaagtactggatttccaatctctcgtccaatgtcagttcttctttagttagtaggaggtgaagcatctaccttccccatggcttcctcattgaagagcagctttcgaagtatatttgcataaaatggtccatacacttgtttgttgagattcacaatgtttgcatattgagagcctagggcttctagctcctgctgaatgacagctaggcctcctggcataggaggcatgcatttttgagggcttggaagacaaagtagccttctcatgtaaagcttaattcgtttatcaatcaaggaccagataggattgtcctcctcttcaatgcttgaaaattgacctataagattagcttgaatctcagcatttaaagtgggtaaacctctttccatcagggtcttgttaacctcaacacaagtctgaataccaatagaattcaggacttccttcaagttaaaggtctctttgttcatgccttcaagtagaacagctgaaatccttgttaacctgcttgcaagctcaggcaggcctcctg

SEQ ID NO: 344336 - DNA, 1000 bp, Homo Sapiens
ttttttttttttttttttagtttcaaagcacatcattttattatagacatgtcagtagagttatcatttcctgttccacttccaaaccattgtgtgtgtgtatatacacatatgtgtatgtatatgcatatatatacacacatacacatatatgtttaaaatttccaaagcgagcccaattttattcttttatgcttataatactctacctatttgatatggtccaaagtataccaccactccagtttcacatagtttttctaatttagtatcaccttactttcttccaagggtaggctcatactaaaactataaggtagtcacttaaaacattccagcatgtggttcaatgtattgtccaaattaaagtttcaagcacttgaacaatgtcttcctaacatcccccacttatctaaaaaagaatcgccgcacatcccaagtaaatcattctaaactcaattctgaaaatactaggtagaaataatcatatttaaaaatatatctatacttggttaaacatacactgtaaactatttgaataattgtgatgatggcatctctttttaactatacatcaaagcagtgatatgtctccttttgtcctttaatgtgttatgttatagatcagttcaaaaggcattacaacatttttctgatgtattataattttgtattgaacaagcatgtttatagagaaatgctactgaaaattagagtcagtgtttattctttcagtacaaaactacatccttgcatgaattcaggaggaccatacacacacaaatatcttcatgatgtaatttagattttcattggcaaagatcatgcctgtttgtggcattgaatgaatagttatgatgttgattcactatatgaggttgcatttatggacaacttctgtaatctactaggcaatgaagttatccaaaggaattgggagacttcaaaaagtgcaccaaacaagcagagtccagttatttctgttgaatagatgacagcc

SEQ ID NO: 344337 - DNA, 1000 bp, Homo Sapiens
tttttttttttttttttttttttttttttttttttttttttttttttttttttttttttttaagtatttatcctttattttgtggttatatgttgggaaagaagaacgtggaaaagaagtgaactaacaaattttcaggtattaatattacaattcagtacattctgacaaaaagaattatttcctatgaaattacacccattggctgggtgcagtggttcacggctgcaatcccagcactttgggaggccaaggtgggaggatcacttgaggccaggaattaaagactaccccgggcaacacagcaagacccaattcatggagcgtttcactgctttggcccagttttccagactcatttcatattcttgacatttcttctgtggcttgaaaaccacttcactttgtctcagtttctttagttcctccttgtcagtccaaaacccaacagcaaggccagctagagaagctgcacccaggcatgacatgtcaatgtcggcaggtctgtctatattctcattaatcaggtctgaagtcatctgcatgacaaaaccattcttacaaactcctccatctgcccggattttccttacaggaatatgaatctctttcttcatcatctcatataactgtttgtttctgaaagctattgactccaatattgctcgtacaagatggtatttactggtagaaggcttcaaacccataaaagaggcacatgcccaggggtcatttaatggagcctgtaatccactaaaagatggaacaaaacaaactccttcagaatcctccaaacttttggccattttttcagtctcagcagcatctgtgaaaaggtctgcaaaaacaaacaaacaacaaaaaaccctaactgctgagcccattttatggcagtaccagtgtctcctgcattgctttcagctaagcatacgacttcttgcccaatcttccacccaattaatggataaaagcctccagtagtctgttgaaggctatttcc

SEQ ID NO: 344338 - DNA, 1000 bp, Homo Sapiens; identical to SEQ ID NO: 160871

SEQ ID NO: 344339 - DNA, 1000 bp, Homo Sapiens
ttttttttttttttttgcaaccaattcagatttttactggacattcatgacagaatgagatgtgcatccagctgcatcgcccagcccatccgctgcccagggcagctgacgagcagaaacacactctgcagtggcccttgtccgtgccggggccctcgcccgcagcaccgcacgttctttgtaggagcagaacccgaaactcagagcacagcttgccctgataactgtcttcccagctggcagccctctagaagatgtgggaaatgacacattcctgtccagacacaagccacagtcacccccctcccgagggcgtccacggcctgagggacccggctccattcagcagagccgcagcgctcaggtcctctcggcaacccacgatcacggcccacgtggtcctgcccatgcccccgctgcccacgccccctgctgcccacgcatgccccccgctgcccacgcatgcccggggaacgagcagcaagcaggcagaaccaccacccagcgcctgctccccaggccgcagcaggcaagatggggccaggggccaccacgcaagtgagacccaccccgcttccacgtgggcaaagctgccgccaccccggcctgtccaggatggctgcagaggccccacctcgccctgcaaaggagggtgcctgccacgccccccactctgccagatgctcctgcccgagggcctgcgtccggcagttccccagtgcgggctcccagtcccttcaaccaggtgcctggtcccctgcccactgccggctcatccctcagagccaccgcaacacccccgcccgagagccacccgccgacccccagtgggccttggcagcagcaggagtggccgtcaggcctggctgggcagcgtcttgtaggggttgaggatgcccttggggtccagcagggccttgagctgctgcatgagctgcagggcccccggtggcttgctgtagcccaggacgtccctcttcctgaagcccactccgtgctc

SEQ ID NO: 344340 - DNA, 1000 bp, Homo Sapiens
tttttttttttttttttgggacattaaaatttatttactggaaatttgagacatcctacatattaagtatattacactcatatcagaattttttaactctttttttgttcttaatattatttttgactgacaaatcataattgtgtatatcatattgggtatcttgaagcactcccaaatggctccccttgctcaaaagtaattccctttcataatccctcttataattccctcttataaatccctgttataattacattataagaacaactttctttggttaaacatttatatttaatgtgtccctgataaaaggcatatactgtttgggacagataatgctttcacaggataaggttcaaacaaatataacttactatgtcatactaagaatatttcaaccagtctacttccacaatggtccagtggccatgtgaaaaattctagcataaactcattgatttggtgtttctaccttgctggaggactgctgggtgaccctgaatagccagctgtatcagcatggtttttttccgtacatcataaaagatttttgtttctctatgctctttgatatcatttattcggcatctgtaatagatgattgcctgcattagatgtaatcctcctgttgatggtgaagaagctgagcctccaagtagcatgttcaaagtcacagatggaggaagagagagaaccaggatttgagtgactgatgatctgtcgctgggtctacactctttcctctaagccatgttacatcttgtacaatatccactgctaactgaatatttccttttgaggatctgatcctggccaaggatcagctagagttccaagtgaaagaattttgctaaaagtaggaagttagcagaggaagagataccaagatgcagctggctctttagctgaagaccatcacctggctgaaggctccacaaacctgtgacacatgcaagctcaagccattgcatttctcctcttttgggagtcagcacat

SEQ ID NO: 344341 - DNA, 1000 bp, Homo Sapiens
ttttttttttttttttttttttttttttttttttttttttttttttttttttttttctcctacatttattttagaggcaagtagaggtgaacaaagaaaatggaatccctaagctcagagctcaggccctggtaaaggctccagagagcagaagcccctctcctcttgcccttatgtgaaacgttgctgccctcaggataccagccatcccgctttggaacacggctgccccaggggatgccttcagtctattcctccagaggcttctcactctgccccagaggactggtcctcctcatcctcatcatcagtgtcctgaagaatcctaagtagtttgagctcagagttccagcctgtgctagccataatttctgaaaagttaaaggagatcttcttttgcctggcagcctgggcttctggcacagcgtccactggagcactaatgtccttgttagtgggttctgtttcatacaattcaggactttttacactgtggtggaaatccgcatggtcatagtagttcatctttggtctctccgtggaatcctgtttcgaagtggttcctttttccatctgctgctgctgcttcatgtcactgttctgacctggcagagttctgtaaccatagagacggtcatgaacggtggtaactggatgtttatgtgaagtgctctggatccctggatcactcttggctttctttttagcctcctgtttcttaataggtgttttcaccttcttctgttgctgctgctgctgctgctgccgctgctgctgtttcctgtaaccttctgtcttcaggttatgtaatttcttcaaacgttcaggatatcgcagtgctggtctttccagggtgaggcggtgtatagatagaaacatcttagaagaaatcacactgtcaggtcggttcttttccaagggaagattctttttcatcatggccaattttatcttcatctctggacagagcatggtttgctttccacctggcaaaagttcc

SEQ ID NO: 344342 - DNA, 1000 bp, Homo Sapiens
ttttttttttttttttgttaacatatgcaagtaagtttttattgaacagttaatattgatttcagctaaattaggattatggcacaaagttttatctgtgctgtaaacatcatgaatttatcacaaaattggaaggaaaaaaaaaaggccctatggactgcaaaagtttaagaaccacagctgagctcaagatttccaaatggattttggaatggacttgcatttggcatacattcactgtgctactggcaaagcgcagttttacgagaatatcatttataaaatcatactttgtaaggacttgttattttgaaaaccaatggccttaataaaaacatgcagtaacttaaaaaaatgcatctcttatgtggcataagtaggtcttagttaccagtgttgatagagctcgatgaatcacactgtacaagccaaaggcatcttaccacctctgattgtacttttaaacaaaggcatgatatgcctagttcctgactgctacaaatcacattttaaaacattttgtttgtgtgcatgtatgtgtgttggaaattacccctgaaaaaagcagcaattacaaatacccttaattaatttgcccccccccccccccaaatattctaggtgctttttcctgttgtcctctttagtaggaagcaatgggaagaagcacggggagccttggttttccagagagcggtgaccaggtaagtctgctctgggaattcacagtttgcataaactgtaacatttcatactatgattcaaagtactactttaaaaaataagggccactcagcagtaactttaacaattgggattccaccacagaagagctcttgacttctgtgtgtacattctttcacagagtgaatcctttcccagtttcaagtatccctttctatctctcactctgtagtgagttaagaaaggagaaaaaaaagacctccccatttttcctttcgtgagcacaacgacgaccacaaagccattcctcctcccc

SEQ ID NO: 344343 - DNA, 1000 bp, Homo Sapiens; identical to SEQ ID NO: 160873

SEQ ID NO: 344344 - DNA, 1000 bp, Homo Sapiens
ttttttttttttttttggagaattatttttcaactaaatgtttatttgcaaatgaactacagacacactccttgagtgtccactttcaggataaggaactcataaaggcaacaccatatttacaactttgatcagatctctctcctggtgtgacttttctgaagcactgcacatgaattcatttgcaggaggatgtcctacattacacttatactgtttttctgtagtgtgtattctcacatgtcgccttaaggatgaggaacaattgaatgctttcccacaatgcttacattgataaggtttctctccagtgtgcagtctcatatgtattggtaaagatgatggccatttgaagaccttcccacattccttacattcatagggcttctctacagtgtgcgttctcacatgttgttgcaaaagttcaggccaactgaaagctgtcccacactgcttgcatttatagagtttctctgcggtatgtcttctcatatgtttttgtaaggatatgtggcaatagaaagctttcccacatagcttgcattcataggatttgtcttcagggtgcattctcacatgttctcgaaagcaagcagacaagctgaaggctttcccacactgcttacattcatagggtttctctctagtatgtgttctcatatgttttcgtaaagatatgggccaattgaaagttttcccacattgcttgcactcatagggtttctctccagtgtgcaccctcatgtgtcctcgaaaggaggaggggtgactgaatgctttcccgcactggttgcattcatagggtttctctccaccatgagtcctttcatgtcttcgaaaggactggggataaatgaaggtcttcccacactgtttgcattcgtagggtttctctccagtgtgaatcctttcatgtcttcgaaaggactggagataaatgaaggttttcccacattgtttgcattcgtagggtttctctccagtgtgtgttatcatgtgt

SEQ ID NO: 344345 - DNA, 1000 bp, Homo Sapiens; identical to SEQ ID NO: 160874

SEQ ID NO: 344346 - DNA, 1000 bp, Homo Sapiens
ttcatttatgagagtttattcattcaaaacatatttactgtcgggcgtggtggttcataccagtaatcccagcactttgggaggccaaggcaggtggatcgcttgaactcaggagttcaagaccagcctgggcaacatggtgaaacctcgtctctacaaaacatataaacatcagccaggcatgatggcacatagctgcagtcccagctacttgtgggagctgaagtaggaggatcacttgagcccaggaggtcgaggctgcggtgagctgtgtttgtgccactgcactccagactgggtgacaaagtgaaaacccaggggctcattcaggttcaggagtggggtgctggggtcctgagctatatctaaatctgtctccactgcctcagtgtctttcccggaggtgaagagtctgtgcacattctcggtgcccacaggtagttcatctgggagatcagccgaaagaggactttgggggtgccgtgtggccagcggggtgctgggagtggctgctactgaagccccatccaggatgggtcccaggaggcgacggaggtcagggctgcagaaacggcgggggtcagcggccagggcagcctcgctcagggaaggcgggtgcaggaaggcaaggatccgggggccaggggtgtcaaggctgtccccagggttaggggtgtccttctgagagggggcgccccgctgaatgggtctgcgagagtgttgctccgtttgctccagggacagcaccactccggtctcttccacctggctgattaaaaaatggacacagacgatactctccgactgggggccccgtccccctgacaccactgtggcctgggtctgggtccacaggtagccaccactccgggccaggaagcgatactgccctgttactgcctggcccttgctcagcaaggtgtggatgctcttgctgaccgcatcggagtccagcgcgtggatgtactcgtaggcggaacagccgatcaggtcatcggga

SEQ ID NO: 344347 - DNA, 1000 bp, Homo Sapiens
tttttttttttttttttttaaagtgaaagaaactttattttgagtaatatacatatcattcattccatttaattttcatagtgcatagctatgtgtagaagtacacagggaagaataaacattagaaatacctagccatgaaaatatacaagtgaagacatttgatatatccatggacaggcttggaagtattataaaacaggatccattaggaaagaataaaaaccatgcaaaaaaaatcttatctaaatcatggcaggcaagtgcaatcaatataaatcatagtctctgggtacaaaaactatacatgttctttggattaaaagcaaatgggtggcttggcttttatgtccaagccaaaaatcatctatacaagtaaaaagtgtgtgggtcaggcatggtggctcccacacctgtaatcccagcactttgggaggccaaggcaggcggatcatctgaggtcaggagtttgagaccagcctggctaacatggtgaaaacctgtctctactaaaaatacaaaaattagctgggtgtggtggcatgcacctgtaatcccagctatttgggaggctgaggcaggagaattgctcaaaataaaaaaaaaaaaataaagaactaaaaagtgtggatactgttatgccacatgtgataataaaatattcaaggccacagatgcaagtcaccaacttacaaagagaatactgaaggtagggtacattaaaaaaatagagaaatgcaataaagaaaatgccacctctgcctaaatcaggaaagagtaaatgcataggcattaaaacagcagctctgcatactacactgcatttctctttgtcaaaaagaattcactgtgtatcattacaaaggtcagtgaataagacgaggcaataaacgtagcgccttggtattagggcaaatttagttttcttttcattttacacatgagggggaaaaaagaagtgtagaactaggaatgctcatctttccattcagtacactaa

SEQ ID NO: 344348 - DNA, 1000 bp, Homo Sapiens; identical to SEQ ID NO: 160876

SEQ ID NO: 344349 - DNA, 1000 bp, Homo Sapiens
ttttttttttttttttactttataaacaagaagtttaattgactcagttccacatggccggggaggcctcgggaaacttacaatcatggcagagggagaaacaagcaccttcttcacaaggcagcaggagagagacagtgacagcaggggaaactgctgtctttaaaaccagcagatcttgtgagaactccctctctattatgataacaacataggggaaaccacccccatgatcccatcacctcccatcaggtccctcccttgacacatggggattacaatttgagatgcaatttgggtggggacacaaagccaaaccatatcagatggtgaaaatgttatactaaaaatgcacagtctctacaaactccctggtttcttttctgtcagtgaagtcaaatatctacacaacggccctggacaatgctacagggaggacacattaccttaatcatctttctgtcccacttctcagccacaaaggcccgagaggggcatgaacttggctggtgagctctgcacctcaacattctcttcccaggcttgtctaatcaaagataactgttccaattacattttgaattggtaactttcagaaatgcacaattaggcatgctatccagatacaatgcacaatcagtattcccttattgaacacctatttttaaatatctgggtctctaaccacctgtcattcttaaactacaggtccacatttgacaggaaccaagagccactgggcaggagctattttataaagtggatattgcaaagtaacagtatgcctgtcctaacagaactgggagcattgtgttcccaagcacctaaatcaacagaacaccaggacattaggaaagacacgcttctccatggagtgttgacttcagggcttccattctgttttcagtaaagcagcccataactttgctagagagggcctagcctcttgtgaattggttcatcaaactgagatacaacgtattttccaagagcttccttc

SEQ ID NO: 344350 - DNA, 1000 bp, Homo Sapiens
ttttttttttttttttcggttttttttttgttgaaactcactttatttaaaaaaaaaagtcatgaacaataaattacaatcattttccccttttataaattcttcataaaatatatttgacaattttaacagaaaatttcaaaagttgctttcatttcttaagtgctgatgacttattttttgaccattttgtcatgctggtgaattactttgtagctgctacaatagtttgattgataacaatttacaattaaaaacaacaacaacgaagagaaaaaacagaccagcagaaagaactattctgtgtgctatttatctgacacttaacacttacttcatcataatgacaaagtatcccttagcaccaaaaaatctacaggaaccccatctttctaagtgacaactagtgcaaaataacattctaggaactaactgtacaaccccatattttcactggccacagctgcctataagctcatttgaaatatttggtcttttttcaattaagacaaatttcaaaaaacaccataaatcatggcaaaagactctatgaggaacaattgcttattgagtacctattatgggcaaggcactgtgtacgaagttttgctttcatttttcctctagcaaatatccaggtatttccaaatatcactaaccatcttttcttactcctggctgaaaaggcctttggctaaatgccattttttaattgtcattttatcaacaaacctttagtgctgagcacacagtaggtacttaataaatacctctgactgaaagaacaaagacaaagaatttactatcattttgcttggctattttagaatacaaggacttgataaaattccagaagaaacttcctgatcacctcatacccttacccccaatgaaagaatttcacttcacaggtaaaatctttccaagtaaatgataatcattaactattttacatgaggcaggaccaaaaactatgcgcttaggaaactgtggctccaag

SEQ ID NO: 344351 - DNA, 1000 bp, Homo Sapiens; identical to SEQ ID NO: 338579

SEQ ID NO: 344352 - DNA, 1000 bp, Homo Sapiens; identical to SEQ ID NO: 160877

SEQ ID NO: 344353 - DNA, 1000 bp, Homo Sapiens; identical to SEQ ID NO: 160877

SEQ ID NO: 344354 - DNA, 1000 bp, Homo Sapiens
ttttttttttttttttttatattatcattttattacacttttttttaaatagtagagacggggtcttgttatgttccacaggctggtcttgaactcctgggaccaagcaatcctcccacctctgcctcccaaagtgctgggattataggtgcaagtcaccacgcccggcctattttattccacttcggagaccgccccccttgtccctcagatgcatccaaatcaggagttagggatcatactccactgtggtcctgaattatagaataatgaagtcctagatgtcagcggcccctggctgcatgatagtaagagtatggctgagcctgtcttgcagatcatccagtacctgtacaggccaggctacactgttctccagcactctctgtagccaagtgccagtaatcacagactaggctacctctgctgggccagaaatagctgcctgaaccaggagctcacagcaccatccactctcatcaccaaagctatgcccaggagaagtcccacgctgctcacaatgaagcccacagcctcaaatatgaacttaggggcaaacactttccagaccatgagatgcctgcgaaggatggaggctgccaaggcacaggccagaatctgaataccaaggataaagaggtacttgaggcccagctgcagcagtgctgcatagaagtgctgaggcgcatcccggagccgcatctccatcagtggctcctcttcctcctcgggtctgactctggcatcagcttcattccctgggggctgctgtctcttccgcagcccttgactctcacacaggaaaggccagagcaggagcagtgggcaacctactgcaaagaggaggtgggaggcaaaggtgttggctcccactagcaaagcaggcagccaagtacaggagccatgaccctctgggaatcccacgaaggctgcatgccaatggatggctggaaagacaggctggtggcctgtggagtagaaggtctgtgtggccatgagg

SEQ ID NO: 344355 - DNA, 1000 bp, Homo Sapiens
tttttttttttttttttttttttttttttttttttttttgcagacttttcagcttttattacaaaacaggacgtgatcccagcccaattttccaacaaaagtcaccacctcaatttgatttggtcaagccctctctggctggggagtgggctggccgacaagagcaaggccccgtcccagccatccaacactctgtccttccctgccccaggatggacacccaacatgtggagaagttgctcttgaagctgctcactgggcctcgttgaagcgggtcaccattgtcttgtgcagtgtctccttgtaggactcggttgaggtgaccccgtaggagctgccccgtgcacccaggccggagccccgcacccgtgtttgggcctcgataggcgttacaatgccctgcttcttgcggcccaggccgctgccctctttccagcccatggcctgcagcatccgactgccaatgttgtcactgcccagcccgtcccgagtaggctgctcgaagtctacagaggctgtggatatgccgccgtacttcctcctcttgggctctggcggctcggggatgccatacttttctctgcgttcagctgcacggtcccggtacttcatttgctccatgtcattcttctctagtgcttctagctcgttttctgacaagtgggctcgccggtgaatctcaaggttttgcttgtggagccctgagagctgctggtgccggatgagcgcctctttgctggggaactggcgtcggcagagcagacaggccagcttctgccagtcggtgagcttctcctcccgctcagggcccccacgctcctgctcctcctcactgtcactctccccgctgtaggctgccaccagtcctcgcggagggcttgggcggtcgtcactggccaatttcgggagatccatgctggtgtgctgtctctcggctagtgctcccttcttctcgaggatggcatagccagcatctgcagtggctgactcccgcctctcg

SEQ ID NO: 344356 - DNA, 1000 bp, Homo Sapiens
ttttttttttttttttttttttttcaaatccaacttttatttattaaattaaaaaaaaaagactccacaaagggcatgatcccttccattccacaatgttctctccccaagctccagcggctttaaccctttaacttggggccttgagacagcaggggacagaaaaggaggatccaacgttacaggaaaggcacgaagcggctttaaaagtcactggaggtggagatgggagcatccaaagtcccagggtgggggtgcgtggatgcaccaccagatcagcttgggggcctctgtcctcctagctctttaagttctttctcagggcttctaggcaccagatctagcatagtgccttgcacagagtaggcactcaatacatacttatttgaatctgatcctagagaaagccttccccacccattcttcaggaggtgcacccccaaaccaatgtcctcctgttagatgggcttccccaaagagcacatctaagatggcagctgcaagctctccataaccatggcaacaggggattaacctgatggggtcatggtgtctaaggggtggggcagtggaggaacctgctctgcagtcaagggagatggggtacattccagtccttctcccctccataggacttgaggtttcacagcttctggctggggctggggatattagggatccccctaatcaagagataccccatcaactgtttagcagagatgtagctaacccaatttgtagagacttcattacaagagaaaccctatcaactgagattctgatgatagacattctattaacaagatcttctccactaacattttgtctatacagagatgcatttgactagaatttccttagcagaaatggatccacttccctccccagctcactctacctgacccgtcatcataacttacataaatagaattattactattcattactcctggtacataggggttaaatatacaggcctgggggcagcctccctgaccct

SEQ ID NO: 344357 - DNA, 1000 bp, Homo Sapiens
tttggtgtctccatctgtctccatttatagatatttacaaaagaaagtcatgagcaacaggccacagtcatgcaaaagaaacgcacccccccctccccaaactaaccccctgcccaccctgaaaccccgagatgtcccccgcccagcagtccagccaccttccccaaggttctgagagcaaagagggcacgtccttgaagagtcagtgggggaagggtggtggatccggggacctagagccaccagaagtaggcgctggcggaactcaggctgatcggggccgagctcttcccaggcctgggtgctggagtcaggaggaaggggtcccccagtctttgaaacccccaccttcctccagaaggtccacggagccagggttggctctgtcctgagtgtgggagggggtgtcctggcatcccacccccggcagaggctcttgtgggcagtggtgagggccgggcctggaggtcagatggcagactccctgcggtaggagatgttgtccagcgggagggaagcctgcatgcgctccaggtccaggtggctgccgaactccagcatccggatgatgcccgcctcctccttggaacccgcctccaggcccaggcctgcggccaccgcggccgccgcagctgcctcctcctccatctcctcttcctcctggctcataagggccagctcgttctcgtagcagaaggcactgggagggggcggtggggcgggcagcacggtgatcttactctcctgcagctcccgggccgagcagcagggcgtgccggccacctcgtaggtcttgtgaaaacgtgagtagtccaccttgtagtggctcttctcctcgaagaccacaggctcaaagcggtggccccacaggatctcgctggccaggtaggagctgcgggcctgggtggtcatggccgtggcctccaccatgccctccaggatgaccacgatctcaaagtcctccgactccagctcctccttgcccatgccataaagcggg

SEQ ID NO: 344358 - DNA, 1000 bp, Homo Sapiens
ggaagatcaaaaacaggcttgttttatttatacacagaacaacttatgtacagcactcaggtatggactatgtacatgacaatacaagaggcgtttgtttccacggtggtcactatataaattaagattataaatacgagggggtaagccccacctgagggcacagaaccttttctccaagactcttcagggatccttcctgcctctctctgcacagcagaccatgaggcccgtctggcaacaccacaaggggacctgggccggggcagcagagcagcccccagacagcgaggacaccccagtgcgggacgccagcccagcaccaaagggcaggttcctaaacactcatgttcattccttcctcacattctaacttgttagaattagaaaaatggtttttatgtaaacagtgttgttctaatcactgacaacatattaattttaaacacttttgatccaaacccaactccttgccaggagtaggacactgaggacttggggtggccctgatgtccttgaagccacagtcagctgtttatcctcctcatgtcccctccccacccaagttccagcttgcctggggcttgttctgggaccctaagaaccccaggatgcccacatcgccaggccagcagggccaatggtcatgcagggactgcgggacaggttcccatcatctcctgtgttagcccattccacctgggaaaccaagcgactgccgtggctggcttatttctccctctgccaacccccatctacaatgttctggggaaaacaatgagaggtggaaaaggtaacatacaaccaccttccacccacatcacttccagtgaggcagctaagtccaccaacagagcgtgggagagtctttcatccaaaaatcccaacacgtcgcatgcagcgacaggaggctgtgctggggaaacccaaggcctggctcagcctccatactctaagggcctcgggccagaacgaccacgagaggggagcacccaaaggc

SEQ ID NO: 344359 - DNA, 1000 bp, Homo Sapiens
caggttgtaaaaaaggcttatttattgagagcagcgagtgtaaaaacaaaaacaaaaacaaaaaaacaaaacaaacaaaaaacgacaacaataaaagtgtggggtaaggatggcccaccctcctcatctccagggcccacccctacctcccatgcccacccaccccacgctgcaattacatataaaagccgcccgtggtgcatacaaaaagggcggtttatatagtgtcaaaagctcctgaaaactccttcatctgccaggcacttaggatgaggaaaggagagaagggtggggaagacgtgggtctgggtcagtgtgcacaagcccagagtggggaggactcacttgctgtgtcctctataatcctggtctagacccccaagtgggaccagtgggccaagagactcattaaccctgtgtgcccagaacttgagaatattaaggaactccccacaaacccagctcatcccaagcctagccctccccaggcaaagttggcagatgagtggcagagttggacccggtcaaggggagaagttgaaggccagaaattggggttacctgtggcacccacactgtccctgatagaggaagaggtggcagggaaaactgcccagctcaaagccctagtcgcccagtttgggtccaagtcagcctcccaaaggatgagggtgaggaagaggaggaaaggccaggccctgctcagacctcagcaatgcctgttgcactagggcaggggcctcagggcccaggaggacagggatcttgcccatcatgctgtgagcttccctctagagatgtcctcccctgcccaggccatcctgagcgggctccctcctcacggcttgctgtccacggtgctgtctcccagggcgctggcaatctcactgaaggagggccggtccttggggctgagggcccagcagcgctgcatcagccgatagagtttggaagggcagccctcgggctgaggaagtctagccttcccagcctgcaaatc

SEQ ID NO: 344360 - DNA, 1000 bp, Homo Sapiens
tttttttttttttttttttttcaagagaaggaaacttggatttattgagcacctgttcaggcagggcatgtcgcatacacacatgcacttgatgccatttatttcagagacagagccgccttggagatacaaatttcccagctctggtcagtgccctggccaactgcccatcattagggaaacacaagtggatggtcaccacatccacttgttttataattaatataattgaaaccaacaagaggaacttgaaggggccttacacagtttagaagacaaattaacactcaagggctgcctcttcaacataggttttcccatctttggccaagacatatgatcccacaaagccattgccaacccacagacattatttcacttctgtgagcttagagcactgaggtggctggagtgcaccctgagggctgattctgtgttttccaaatgcacgtcccgtcgggaggtgggaacattcctcatggttgcaaattctttctctttctgcttctttactctctctggacagtggtggtgtttgtattatttctcctgggtgatctccgggcatgactgagaatgaagcccattggctcattttcttaaagtttttcttttgaagaaagaggtaaatttgccaagtgtctggtcagggttttgtagcaccaagagtttccttaaaatgggcagttacgcgtcagatgggggctgtcagaagaatgaagaaacaatctcctgccccacgaatcaagttttcccaactttaaaggagtggaaaagaactcacaaagcatcagcatatgaaataataataataattaacaacaacaataatattaataataatctgaccgaccggcagcgtctgttggatttaataattttgaggtctctcaagaaaataaaacaaaaagcaaacgataaaagaaagaaaaaaaaaaggaacacatggctgaagtctttcaagacctctggcttcccactgggctctgagttcaagttt

SEQ ID NO: 344361 - DNA, 1000 bp, Homo Sapiens
tttttttttcagaaagtaacaaaatacatttatttcaaaaccatgaccgcccagctcaccaaagtcccataaaacctgtgaccgcattgcaccaggggctctgttggcatggagcctgaagacccagcgtcttgccagactgagaccgaaggtggcgcctgggtagggccagccgcgtgggagaggagaggagacccgatggcagtggaaggcagctcccacctggctcccgggacggccccatcgtgaggccagccaagggagggctttcgtccttggccgcagctgtccttgccagggtgggcgaggtggggaggacacaggctcgggccacactgacaccggtgtcagcattatgttctgatgcaccatgaacaggttcaggggcagggctgacccccaaaatggcctttaaaagcctaaaaccctggttatcaagtccttgcccatctacggggcctggagaggtgcctgtcagctggagcaagtggaggaagcaggcctcaggcgacaggccgaggcaggcacacgcgtgcagggccacctgagatgggctgcccccaagcctggccaggtgtgccctgcgcccgctggcccggcggccaggtgagtgcacgcagtggctcttgaagaggggtcctggggccggcagcacctgcattccccgggggtcttgtcggaaaggcacttgccccgcgtggccacaggacctccaggaccgctagagcagccgcaggtaggagggggcggagtagttgaaaagcaggaagtccatcttgtagaggtcgaagaggcgccgctggtagaaggggctgatgtcccggaagaggcgcgctgccaggtcgcgggaggcggcggctccccggggccgcggcggcccagggaagctcaggtcggatgcgcccgccaggcccagcacgaaggccgcgtcctccgccagcgtctcgaacttgcccacgacgtcgtagcggaggcgacacgggtggcagagcgcgtgcgc

SEQ ID NO: 344362 - DNA, 1000 bp, Homo Sapiens
tttttttttatttaaagcacatttttattatagataggttaagtgtggtttgctgtggctaaagatatatttataatggatgaacaagcttttctagataccaagaggtataatatttttctttcagtattgaactaacatttctctgataacaaggagacattgaactggctgagcctattttaaatgggaaaagactttttttttctggatgttgctttaaagactggtaaattaaaaattttaaagtactaacactaaatttaagtacagtgaaagaaaatcaatgaatactacaaaacatataatttctacaaagcagaaatataaaggttttataatttaaaacagcagcaatttcaaaaaatttgctgaattaaaactttacaaaatatatatacactaagtatcattccagatgatcatgaactttaaaaacagtatggcacaacccccaatctgtaccccaaacctactactagatgtagctggcctataataatttttacaacaatttaaaaaataaaacaaaaacaaagaaatctaattcttttgcgtacaagcacaggttacaatgtgctggctttgattccaaatacacaaagagaattttaaaataaaacaaggacttcacataaatagtttcacgtgttattaagtgtgtgaccaaacaaattaaaataagtactaacaaccaaaacatatcttgatgtaaccagtacatacacttttaaagaatgacaaagatgaaaaaggaaatagtctatgaaagccataagcaccttgttttcgaaagagcaccaagcaacacaaagaggcaacacgtaagaggtagtgtatcaccggctaagatgtatatgcccatcggggacctgaatacagcttagtgttttggaaaataagacatattagactgtggcttgtaatttttagacagaagcagtgcacatctggaagcattagccagtattgctccatagtgctctgcatctccagctgt

SEQ ID NO: 344363 - DNA, 1000 bp, Homo Sapiens
ttctgatcataaaatatttattaaggtatactttagggaatatagtgaatataaaatttaggatcacaatatgaagcaatttcaaatcctctcaaaggtcagcacagccctcaaaactctgcagatgtaaaaccactggtgagacactaaaagcagttcgactagtagagaagtggattttcatgaacatttacaactagagcatatgaatacctcttttaagtgcaaaaccacaccacattacactaatgcagcaacaatgcattcattattgttctcattagtcattagtagtcaacttgcataaaacaccagaaaaaagcacaatggagttcacaaagtgggctaaaaaaaatgaacctgtccttgcaaaacacacattgtaatggaagaagagacgttaaaaaagtatatgcacactttagaagctgtgttcattccaaggatctcaagtgtcatttccttttctgtaaaatcaaattacaagaaccaggcacaactaatatttgggaggcagtgtgtagctaaaatttcatttaactagttattcaatgatttttaaaatccccataaatcttttctgtcctgaggtagttgcaaaataaatcataacttggatatcaactagagctgaggctttgactttttactcattaaaactagttgttacaggaactacctttagatatttaaaagacagttgagaaatgggcctcttactacacacacaagatgatggctatgtgggaaagaggattagctgcttcagaacgtgagagatacagtccaccatttcttccaccctccccacccattttagattctttattgtccaaaaagccaccatgaacaacacagtgaaagcaggcagatcatcgtcctttgctgtagccagggaagaaaaggtcaagtagagtctgcagaatctcattgggaatcatgatgtaattctggccaagatcatgccggcaagcagggcaggagaaaacctgtgccttaa

SEQ ID NO: 344364 - DNA, 1000 bp, Homo Sapiens; identical to SEQ ID NO: 343262

SEQ ID NO: 344365 - DNA, 1000 bp, Homo Sapiens
atagaaatagatgtatttaatagcatcatttttaatttaaaagaaaacaaaagaagaaagtgatttacaagacatgcaaatttaccaagtctttttaaggaaagaccaagaaaagccctgaaagccttaatgttgctcgggtttcacgtaggagcacagaccggaaggagccaaaccatggtcaggtatcaagccagttcctggcctcaaaagaagaagaactttatttccaccagcctgaatgagctcaattgctcgagtatgtgtgattccttgtgtaggttccccattgatttcaacaatctggtcaccaacatgaattctgccatctttgatggcaggaccatcttcagcaagacgaaggatgaacagccccatgttgtactccttcccccctcggaggctgaatccaaagccccgggggcctctctccagctctactggataacaaccaaggttctgattgtgccgactgcctacaactgaaattactgcggtgtcaggctgtgcaaggtgcttgtggtctggccaagaatgtctgtaagaagtggagacatcttttccaatttcaccttctagggcacttctgtccccaggtatgtggttggcctgtgactgtcccatgggcctgtgctgcagggctgggctttgcctggctgagtttgttcctgatggtggaccatgatgctcttcttcagcaatgaccgttagtgtgacggtgacaccagcatctttgatcagctgaacaatgttatcatgagacagttcaacaatggactgcccattcactgcagagatatgatctccaactttcagttttccacagcggtcagccggacttccttctatgactcggccaattttatgaggaataactcctggaggtggtttgtttttggaggtgaggatgacaaagccaaatccttcattttcttttcgttgcaagacaacatcatagggctcctggggtgcaggcctggctgggacctctgcccggttc

SEQ ID NO: 344366 - DNA, 587 bp, Homo Sapiens
ttttttttttttttttttttttttttttttttttttttttttttttttttttaaagtctgccatgaatatttattgggcagtggaagaataaatgacaggtgcaggggctggaggaggcggggtctggaggcacggaggcgtccttggtccccgaggtggagacactgctgttgtcttacgcgactggtgcgcgcgtggggctggcttcacaggcgttgcattactccttttgccttgacccgcctccagctcagagtggccctcacgcagcccgctgcagccgtgcggcctcctccaacatgcgcatgtcgcgcagcacggccacgacgagctcggctgcgtagtcctcgtagtaggaggcgaccagcttgtcggtgaggtccacgatatctagctgcccgagcgcgccccgcgggatgcgctcaaagccctcgcgcagcggcaccgtccccagcttcatcttgaacttcttgagctcctccggtgtcaggttctccagcaccttcaggatggcctcgcgcttcgttcccatggctcagccctgcgcctctgagcctccgagggcctggagccatcagctcgagcc

SEQ ID NO: 344367 - DNA, 1000 bp, Homo Sapiens; identical to SEQ ID NO: 160879

SEQ ID NO: 344368 - DNA, 1000 bp, Homo Sapiens; identical to SEQ ID NO: 160880

SEQ ID NO: 344369 - DNA, 1000 bp, Homo Sapiens
tttcagaacttcattttattctccaaataaaagacagctcaatcttctgaggaaaagtaaaaagagggaaacatcatctttgatcatgcagtaagctgatcccaaaatgtggacaaaaagcagagactcgacggcaatgactctgagaaacagagaatgtcacaaggagacaactgggctctttataaagaggcaatttctcctctacacattccccctttcatctagagatggctgcggctcccaatcatggcaagagctgggctgtctttcttccaccaaatgctctgctagctgacagagcccagggagggaggggcggctctgctggtgaccaccctgccgtggccctgcacatcccccagctccttctgcaaccgggcattcttctcctcctcctccagcagtttcctcttcacggtgcgcagctcctgctgggcctcacacttgatgtcattggccaccaccactgcggtctgcagatccgcctggaaccgcctccattcctcggtctcctccttcatctgcttggtcagagtcttcagctgcctctccaggtctgacttctgttcctccagcttgatcacactactttctagctcactgatgagttgattattgtgtaacttgacagcccggtgctgttccacctgatcttccaattcaaatatggtttctttcatgtctttgatctctgcatcactctctgatgctttttcttgcagctttaggctggttctgctcagctgttcggcttggtgatcacatatctccttcaggtatgaataatccttttccaccttggccagcagactggaaacatgtttaatttcaccgtttgcctttagtaattcttgtctgagctcattgcaagacagttccagtagatctttctctgctcgggctactttcaacatttcttgaacttcgcagctctctgccgtctgctccacagcactggcctctgtggctttctgcttctcaccctgcaaatgagact

SEQ ID NO: 344370 - DNA, 1000 bp, Homo Sapiens
ttttttttttttttttgggtagatgacatactgtacaatttttaatataaaaatatacatatttttaagatgaaacagttgttggtataaaatcccatcacccttttactcttacttgaaaaacattttttccctggaggccatgaaaacaatactgattctatgtagttctgtgttgccagaaacttcccaaattacagaacattaaggtattcactgaaatttcaaaagtgggcccgtaatcttttgttttcttctcgtagtctttcaatttcagccactaaaccttcattcactgagtatctttccagcaaagaatgcatttcattcagttgcatatgaaactgtttaatcatctccacttgcaaattcacaatgtccctatggcatgcttctctaaagtcatccaacgtttcctgtatcatgttctgaataaaacgaatttgaatggaagtcaatggtgcattttgccggttatttccaatgctgtcggctattttttctgagagtgaactggcaactccagcagtgacagaagatgctatctttggatttggagttgaggatccattgattgggggttcacatatcaactgggcttcaatttcattctctggcttttcaaatttctcagaatttcttgtttggttagatgatggagaggtatttagatttccactttcagcaccagatgtgaccaactttgctaactgtttgaaggagtctttagattcctgttttcccatatatattttcttagactcagctgttagatcacggttttcattttcctctttccctggagatcccataaaaacattaagaggactagaatgcaatactgaagtacttgaagttactggattttttcttggaggaaacactgagttcaactgcggtagaaagtcaaagccatctcctttgcctatggactcatcacttcccttgttaactacagcatcatctctgataggtgagaacatgtcacctaaactacttt

SEQ ID NO: 344371 - DNA, 1000 bp, Homo Sapiens
ttttttttttttttttacgctcaccaaagcctcagagttttattatccggagctcacattcaggtacagattcctatgaagtttgcctcacctggagggaagagggagagagcagggctggctgagatggggctgccagaggcatggtctccagctgggtaagcgggattctgagagcccctggtgcacacggagcctcctggcacacacaggattgtctcaaacacagaggacctctggcacactcaagggcactgaatctagcaatgagtctgcacttctgttatgagagtgggtttttcggccaggcgtggtggctcacgcctgtaatcccagcactttgggaggccgaggcaggtggatcaccacgtcaggagttcaagaccagcctgaccaacatggtgaaaccccgtctctactaaaaacacaaaaattagctgggcatggtggcacacgcctgtaatcccagctaatcaggaggctggggcaggagaattgcttgaacttgggaggcggaggttgcagtgagccgagatcgtgccactgcactccagcctgggtgacagagcaagactccgtctcaaaaaaaaaaaaaaagagagagtgggtttttctcaggtcttctcggtgcccaattccaaatgtggctgtctcctctgcaggagcaggtctgcttgtcaagagtccaagcacgcctgtgttctgtggccacaggagaggaggggccgcttttaaatacaagcctactcctgtcgttggaccagaacaaagacctactggccagaagcacatgagaggtgagagtcgcccttctgccttgttcggcatcgtgtgtgtgcacctgtgtgtgtgtgtctgtgcaactgtgcatgtgtgcacatgtgtagcacacctgtgcacgtacatgtgcctgtgtcggtgtccatgtatatggcttgcatgtgtgtgcttgtgcacacgcaggagtgtatgtgtgtgccatgtgagtgcctgtgtacat

SEQ ID NO: 344372 - DNA, 1000 bp, Homo Sapiens
ttttttttttttttttgctatgtaaatatttattatactatatagtttagggaataatgacaagaaaaaatgtctgttcatgtttagtacagatgcaactaccctttttgttttccaaatatttttgattaatgatcactgcaatccatggatgctccaaatacttttgatccatggttgcttcgatccatgaatacagaacccacagacagaaagagtcaacagtacatcaaaacttaaaatttcatcaaaggacacaatcaacagagcgaaaaagcaacctatggactgggaggtaatatgtaaaaagcatatatttggtaaggagttaatatccagaatgtataaagaactacaactcaacaacaaaaagcaaatagtcccattaaaaatggaaaaaaaagacttgaatatttttccagatacacaaatgcctaacaagcacatgaaaagatcctcaacatcattaatcattcacaaaataaaaatgaaagacactatagattccacctcacatccaacaagatagctgctatccaaaacaaaaggcactacaaaaaaccccaaaaacagaaatagaaaatgaacaatgttggtgaggatgtatatagattgcaatccttgtgcactgctggtgggaatgtaaaatggcacaggtactatggaaaaattttcccaaaaatattaaaaatagaaatcctggccaggcgcggtggctcacgcccgtaatcccagcactttgagaggccaaggcaggcagatcacaaggtcaggagatcaggaccatcctggctaacacggtgaaaccccgtctctactaaaaatacaaaaaaattagccaggcgtggtggcaggcacctgtagtcccagctactcgggagggtgaggcaggagaatggcatgaacctgggaggcggagcttgcagtgagccaagatcacagcactgcactccagcctgggtgacagagcaagactctgtctcaaaaacaaacaaaaaaa

SEQ ID NO: 344373 - DNA, 1000 bp, Homo Sapiens
cgtgcattaagatttgcattcattcatagtattggaaaggttttcaacatatttgaccactaagcactaggagttggaggtgataccaatctacattcaaatcacaacttaatttatattttagtctcctaacctatgattttaagaaaatggccaatgcccccccgtaatgaaacctaggaagttttaaccacatattgttatgcagttgcacagtaggaacattccatcagaccagatctatggaaagtaaacattttgcaattccactgtttagacaatgcaatcgtctcagattcctcctaccttattaccattgtgaatatatttgaacatgtcaggtttgcacaaaaagaaaatggctttgtggaatgtattgttcggcacaaaaatattttctaatacctcaaatcaaaatttcacccacagcaaaatatcaagccacagaggtgcttcagtggtgcttacttatctatgcagaaaactacaagaacagccacttgcttccaaggactttgtattaagtggcaataacttctcttccaagaaatagcaccaatatgattacacctccgactgtggagtgctccttccaagctctttaattccctggagaattcgcttcacatgacccactttcggtatccccagatccaggctgtgaacttgtcttctgcttctgaaccttttcctttttaaactttggcactattcgaaatacggtgcttctgttgttccttttggtgcaatccataggaggttcctcatcctcatttgggtgtaagatataataaagccaaggaatctctgtcagtttctgtaattccacctccacagagtgtaaggcattggatactcgctcttcatgtggcgattccagctgcaaaggaaccctgccaactagcaaagattctgtttcattatacagcgccttcacattgatggctatttcagtggcagtgtctcttgtaagactctccgggcaccttgggttggcttt

SEQ ID NO: 344374 - DNA, 1000 bp, Homo Sapiens
ttttttttttttttttctctcagagcatgcttttctttattaaaattactgatgcagaacatttgattccttatcatttccatggtctttgttcaaagtgtctctttcctgggtctcttgagtttctttatatgccttctcctcatttttgctcaaagcacgaagaacacacattaaagcttttcctccttgaacagcttgtggcctagatgagaatgtagctattccaggcatagtctggagtatttgatgaaatatctcctccatttcattttctgacacgtctacattttttcctttctttatggtaatctggactaggtgttttttcttaatccactgctgaatctgtttagtctttgtgtccaaatcatgttgtccaatatttgaagacaaaatcagttcctttctcagggttggtccagttttggggttcgccttctccatctccctcagcctctgccgctcctggaggatctgcaatcctgtcatgagctgatactctgcaggttctgtgctggtgttcctttgaaccagtcgcaggtctcgctcatccataagtctaatcacatttgctcggtgcatgtttcccaaatcattgcccttctcatcaaataagtgaataactcgctgactaatttttcttccaacgttactaaaagctgttttattcttttttatcttttttccttcattctgggtgtcttcagcggtactaaaggcttttgcatgaattaggaaggagagtcttggggcagaagcaataggggacaactgtgctggtgctgtcttttgcaggatgtgtttaccaaaacatctaatgcaactattttcagactttacagtttgtagtgttaacctctttagaaaaagagcagccatccttttttaggaagaactgtaatcatccccagttgatgaggagaagctcttctgtagagaagaatgacagctgtgctggggcaagcgattgacatactgtagcggacgcaagtacagc

SEQ ID NO: 344375 - DNA, 928 bp, Homo Sapiens
ttttttttttttttttcttattgctcctcttggctctggagcacaccttcttaatttccagaaaggacacaggcccaggagaggtggcagcaggggtcccacactggccctcctgctgatctccaagtggagcccggtgggcaggatgcaggctggctctagcccctacgtgtgacccacaggcctcccacgaagccgctggtctctgcagagtgagaggtgccgggactacctggcctccttgccgcctcggttaccgggtcaccgcccatcattggtcagctgcctccagggatctggacgtggggcacagatgagtgtccttacaaaaataactctgagtctgttcccagtgggaccaggttcctgagagcacgtggggccaggcaaaggccacgtggaagagtccggcagggagcgctcccgcctgcaggccagggttacggctgcaggcgctccaggtactgcggcagggggttctccttgacgtacttctggatgtaccagcaggtgagatgggccttcaggtcctcctccaccacgaagtccagggcggccttggcaaggtgcttggcgatgccacgcccactgtaggcatctgggacctcggtgtgctgcaggtccacgatccgcttgcccacgtactcatagagcaggacggcccggtcatgacatccgttgagccggacagtgaactggcggcgccggcggtcgtgctccacgcggatggggcagccctgctccagcgcgcccagcggcacggcggcagccgagtgcgccatctgcgcgcggggctgcggcgcggcgccggcgggggccggggcgcgcgtggaaaggtcaggcgcgcggcggggctggagcgcgggcgcaggcggcaggcggtggggtagttacggcctgggagaccgcaggcggcggcgctgaaagt

SEQ ID NO: 344376 - DNA, 1000 bp, Homo Sapiens
aatgtgtatgacttgctttattgcaatattcacattattgtggtgatctggagtggagcctgcaatatctctgaggtgtgtctgtatgtgctcatcacatatgtgatgaatggatgaataaattagtgtagagtgaagtgcttccatgaacctgaacatcatggtctggaaactatgggcagtgagtcaaatctgacccaccatctgtttctgtacagctaagaatagtttttacatttttcaaatgggtgaaaacaaataaaaagaagaatgatattttgtgtcacatgactgatatatgaagttcaagctcagtgtccataaagttttattaaaacatagccatgatcattcatttatgattgtctatagctgttttcatatcacaatggaagttcaagttcagtgtctgtaaagttttattaaaacatagccatgatcattcatttatgattgtctatagctgttttcataccacagtggtagaattgagttgctgtaaatacctggctcacaaagcctaacatatacactatcaggctctttaagaaaacatttggcgacccctgctctaggtagactctatggggatatgggctctacactcatagggacccacatgttccaagcctccagctgtgtgttctgcttcctcaagcagcagctgactctgatattccccatctcaccttagcagtctatatcaagcaaagggcacgcagaatcccatgcacccatcatgtatgtaataaaaggcagatattatgtggtctcttgaaccagccttaggcatggaggttgaggatcaggagtgacttgagggtactgactggcagagcaggagccccgttattttggacaaacaccgccactttaagtttcagcttcatttttagccttctggatttaaggaaattacttttttaaaaactataagcagccaaaaaaagcagacagtaaaatgcagataaaacagctcgggcacagaggaaggtggagg

SEQ ID NO: 344377 - DNA, 1000 bp, Homo Sapiens; identical to SEQ ID NO: 160881

SEQ ID NO: 344378 - DNA, 1000 bp, Homo Sapiens
ttttttttttgaagagaaatgcaatttaccacacatttgttgagagcctattgtggagaacaaacagcttgggaagtaaaggttgattacttcctctccaaggatgatatgtttaatgaattcccttttccttagcttcattcttcataatgccaaagagatccatggatatgattttccatatggagttgaatattctagttttaatattttctcttcacttgtcctggaaaaacatccccctcactgggttttgagtcaggacccatcttgctggaaagtgtgtatgtctcagactcagattttgattttacgatctctctaaaccacttttgatattgtttctggacctgctggctgaggaggcagtagaccaagaagatgaagaagccttggaggctgttgatgatggtgaagaggtaggccatgacctgggcagctggacccacctgtagcaagcccagacaccatgtgcagcccaggatgaagagctgagctgttgctttgaaagccagcatccttgtgttctggatggttgacacttcactattgagggaggaaagttttcttttcaaaatccaaaagaccaagataaacaatactaaattcgcagagaaaatggcacagactgggccaaggaaactccacatgaatccctggtccaggtggagccagcatcgatcagcagttccataaaggtgaggccaggaggctgcagaaatggccacagtcacagcgggaacgccatagccgactgggaacatgatccacttcatgagtctattgatgcttgagtagttgaccactgtcaggttccgtgcagtgaggaagaggtgcacaccctccagcagcatccaggtgaaggcggccaggtagagatagtgcaaagcaccggcgatgatggagcacagcaccttgggttcagttcgatcaatccccacgaggaagaggaggtgggccaggaagaggcagagcgagagctgcagatgcagtgaggtgc

SEQ ID NO: 344379 - DNA, 1000 bp, Homo Sapiens
ttacagttctttaaggattttatggatttttagagattcaaaagttgtgtgaagggccactaggtaaggaagtgcattattttgttgaaacatgtcaatccctcccatcatgggcgccagactgccctgcctggcaggcgtgtgccttccagcgtgccttacagctgcggctgtgggtgatgcagagacacccactccatccttgcacaaacactgggcaaacagtgtctgcccacttaagcttcttctggccaatgtccaggttctggtgtaaccacctctcgcaaggccacggcttctccaactttccccaaaacatctgagcggtttcagaaactatcacttcctccagagagcacgtggctgcccgatgagtaaacagcagccttcccgggcctgcctccaggcggtaagtccacgagtctccaggctgcccgcaactccaagactcatccttatccatcactcatttgcatacacgtctgaaggccctagggagtcagctggccagccgaccggaagtcagggccactactccttagcgtgaaatgtgaaaaacccaaaatcctgatgaaacctccaaacggtcttgtttcctatggtccagagtaaagcagatgcctgggtgaggccgtggtgcctctcgacatccacaccccaaagcgtgcagagccggaaccaggtggtggggtcggtgctagtggatttgcaagcagggcagacctaaggaagatgcttcttcatttcccaggacagagtgggtggggcccacagagagcggtcaaggactccaggcagggcccgaagttccccatgttcacatggggaggaagtccctgggcaaagtaaagcaggttctctgggttggtgaggggcggtctgcagctgctgagggctgcagacatctgggacccgaggcgcctgctgtggcggggattggtggggacattctgagatgagtgacttgatcctgggccctaggccctgggcccaccgaggg

SEQ ID NO: 344380 - DNA, 1000 bp, Homo Sapiens; identical to SEQ ID NO: 160883

SEQ ID NO: 344381 - DNA, 1000 bp, Homo Sapiens; identical to SEQ ID NO: 160884

SEQ ID NO: 344382 - DNA, 1000 bp, Homo Sapiens
ttttttttttgacaagttcaagtattctttattcaaagttgaaaaatgtaccatactgcattattgcaaaaattcactggtacaaaacactttgcagctggtgagaaggcaataaaaagttgatttttaaactcattactataaattattcttacagtactttgcaaattcagaatttcaaactgcatgttctttttctaaattgcccacagtactcgaggttcctgaagctaaggcagctgtttcagaggaggggggaggaggtagcagatgtcaagggatttccatttctctttcgatgccgacatacttcagggcatcagcctggctgtatctgtaatcaaaaaacagctcttcgccagtctggatggctctcttggcaaaaatacctatcctgtgatcaccgttaaccatcataacttttgcatagcagtttggatttaccgaatgatttgcaaaacgaattttgttacccttgcgggttgcatccaccacaaaatcattgttcaagttgaacagaaagctgcacatgtatttatcatacactttccctcttctgtcagcttcatcttgagaaataatctctccacagtattctgagatgaattcatttttctgcacaggatctttgataaaaatcccccagcctgccacgtcagatggtgccagcaatagatgctttttggagccccgctgaatactgcagttcttgcaggacacatttttactgtcccaatggtcagcggctccacaagtaagacagaggtcagggtcacactctcggacagccaggtagcacgggcactgcttggtgttgcactgtgctttgcagcggcatcccggaaagcggttttgacactctgaactacattgacaaaacttttcacaaaaattttgtgctatcacacaagggcacgaactgtcacaaggctgccgtggatgatcacagggttgatagttgtaaacatggttagaggagccgtcctttttcagctgtatc

SEQ ID NO: 344383 - DNA, 1000 bp, Homo Sapiens
aaatcattaaatagtactttttatttaaatgtttataaggcagatctatgagaatgatagaaaacatggtgtgtaatttgatagcaatattttggagattacagagttttagtaattaccaattacacagttaaaaagaagataatatattccaagcagatacaaaatatctaatgaaagatcaaggcaggaaaatgagtataactaattgacaatggaaaatcaattttaatgtgaattgcacattatcctttaaaagctttcaaaagaaagaattattgcagtctagttaattcagacagtgttaaatggtatcaggataaagaactgaagggcagaaagaattaattttcacttcatgtaacacacccagatttacaatggcttaaatgcaggaaaaagcagtggaagtagggaagtagtcaaggtctttctggtctctaatctgccttactctttgggtgtggctttgatcctctggagacagctgccagggctcctgttatatccacaatcccagcagcaagatgaagggatgaaaaaggacacatgctgccttcctttgaggagacttcatctcactggccaacactcagtcacatgtacacctaactgcaaggacagctgaggaatgtaatgggcagccgcttttaaagaagtagagtcaataggaagacaaattccagttccagctcagtctgggtatctgcaaagctgcaaaagatctttaaagacaatttcaagagaatatttccttaaagttggcaatttggagatcatacaaaagcatctgcttttgtgatttaatttagctcatctggccactggaagaatccaaacagtctgccttaattttggatgaatgcatgatggaaattcaataatttagaaagttaaaaaaaactcagtatgttaggctgaacaaaacattttttagtaacatatggaaagaatctctgaaaattaagcactgtataattttctcatactaaaaaaaaag

SEQ ID NO: 344384 - DNA, 1000 bp, Homo Sapiens
tttttttttttgaattgtaaaaaactttatgaactgagaggtcctaactccaaaaagaacattaaagacgaagtgtaagagcattacaaatgatcgccaatacacacaaaggcagagttgcagtgaaaatcaacagccagctgaactgtgggtgaaattccctttatataaacatggccttataatcagatgacctcagatgggtctctggtgtgtacaaagaaagcaaaaccaattttcccatgagtgcctctggacactcatgtaagagttacagatgttgactacatttaaacatttatcatgcttccaaaaacatatttgtaagagaaaaaaatataaaaataaaaatgtacaaagttctttattaaaataatagcttaaataaatcctctgtcaacaccagacagagtcagtgactggatctagactctagagcttagagctttttacatagttacatgaaaacatttgaatccgtcttcacagacagtgccacgatgacaatctggttaaaaccaataagccatcttccagatgcagcttaagagttcaggcgagaaaaggaactgaggaaaatgactgtacataatatggttctcattctatttgccttttttcgtcttggctgtcttctcctttctttttttcacatgtttaggaattttgttttttcttttctctctctgggcttccttgaccatcttttttctttcttttttatcaatgtcagggtccgtggtgtgtttcttggggcgggcatggtctccctgctcttcagagtctgtgtcagagcactcagagcttccaatatcttctgaatcagaacaagtcctttcctccacttgattttctaggagtgcagggaccttctgaactcctgacaaatctttcttcaatcctgtaacagtctggtatagaatattatcttgttgggcattcatggccatgtcctcttccttcaatttcataattatgtccatatccctctcataatttt

SEQ ID NO: 344385 - DNA, 1000 bp, Homo Sapiens
tttttttttttttttctcagacaagtatttgcattttaatcaaggcctcctgaaaaactgcaagacccaaaggaattaaaatgaatggtagaatatcacgcaggcaggggtattattttgggtaagggagcctcaaaacatagcacagaggcacagaaactagctcacccttagggttagtcctgagtagagccctggaaggcaccctcccctcccctaatccccaggttgaaaatcgaaggccatttggttgtagctttagagtgagtcgagttggggtcctagactggtccccttctttcctgtgcttgtcccacttcagcgcctcctctgggcagagctggggctgctttctcctctgcagatcactcagccaacaagcccccttcagcctgtggctggctgcctggggtcatgcccagctggcatggcttttggtccaccctggccattccagggcctgtagtgtccatggtgagggtcagctgcctgggtcagaagctggcttgtgaaaggagtctggcagtcccttggcgtggttgaccaactcataggagtcccggatatcagccaggccaaaccagaagaagatccactgcttgttggagaagctgccatcactgtgtttgaagtaccagggattgatggggttggtgacccgggagcgccagaaaagtgtctgaaggtcccgccgcaggcactcccacagcatctggccggagccttggccctggcggctggagctcaccacaaatttgtccaggtacggggtgccccccaggacgggctccatggtcagaatggcggcggcgttgtacccctcggagacgtagatggagtgcagccgcgggcgcagcgaggccaggtagtcgtccctgagcttcttgccgaagctggcgttgaccaggtccactagacggccctggtccagcttgtccaggctgcgcacccgtagcattcgctcggcgttcttgaacagggtcccggaccccttgttgct

SEQ ID NO: 344386 - DNA, 1000 bp, Homo Sapiens
attatgcataaattgaaaccaattttatttaagctttatttgacaaagtagcacttgtttttcgcagaaaacaaatttccgggaaggagaagaaatgcggacaaatagtgaaaattcagagtaccagtaaggatccagtgaaaactaccttgtccttattatccttaatgttgaaaaaattcttatacacagaagtgttatgttatattctgtggtcgatcatcaaacaaggatggaataaacaagattcttccctgtttcaccactggtatatgccttgctcaaaatgtattaaaaggaatatttttatcattactggataatgcagttaggccagtgttctgtggatgtggaataatgtaatttactatgttgaatgactagccaatcagaattctctcattttctaaagcagtggattgattaaaatgtgaccataaacaaaatagattttattaggcataatctactttgtaaacaaatgaaattaattctttgcctgacctaaagctttgaaaatgaaaaaccaaaattgaacacatgcttccaattttggttctgttactaagatgacacttaatataaaagttacaatttaacttcccctcaagtattccatacttgagactaaatgactcttagaaatatgttcatcaacagatgggagccacttatggcctcataaactctaaagcaagtgaaattatctcagcaaaatagaaggagattacaataaagcctcatctggttatcttcagtgatgattaatgcattgtacattggttcaatgatgcaatgaatattgacagataatcacccttcttcatacaagagaaatactgaagatacaaatgccagtgatatatgcttttaatcaatcaataagcaatttccacatgtgccctgtgtacagaactttgctaagtgctatgcaggatgtgaaagaaagtgccagccgagttcctactctaaagggattttctatcttgaaagagaaaac

SEQ ID NO: 344387 - DNA, 1000 bp, Homo Sapiens
ggctttgggcttaaggactgttgctaccatgagggaagtgctcgttgcttggcctacagcaagtgatacagcctgcgaggcacagtccccaaaagtctagctgcaattctattggtggttttccccaaacagcaataacaagatgttacctggaagcacaccagagccaatcatgactcaggcctgtctagatgtttagatgtctggaaatatatttaaaatgtctcatgccttgcctcttgctgctggtgtgagaaccagcagacttcaagagcacagataaccagtatgatggcaaaatcacaaaatataaaacttatatcagtaactaatttgacttcattttaaaaaagagcctgtgaccctggctaatatctggcaccaacactgtggtttaaattcacattggtcttacaatgatttacataatttttttttattagaaagtttatcctaatgacttaattaccatttttgaaaacaggaataatttcaaacataacattttttacaataaggaaagcccaacatcctcaaacttcaaaatattcaaactaaaaattccatgttttagtgtttagccaaattacaagaaggataatttagcaagaaaatggataagcacctttgagaattagatgtaagccttattattgattagtgcttagttctttttcacaaagtagattagcaattgatcctactgtgtgtaggaccacctagtgtccaaagaataacatcatatatttgtgtaaaagaaataatttgtagactgggtcattagaaatatttttctatcgaagtagaagttcttggccattacagattaattagccttcagctcttcagaaggataggtgtggctggttgtggtttcttatacatcttacatggcttttcttctaaatagaagacacatagagaacaaaaacacttactggctgttggtttgtgaaataaacttttcttgccaggcaaataaattgcactgtgaattttt

SEQ ID NO: 344388 - DNA, 1000 bp, Homo Sapiens
atatcaataaaatagtaaagaaatattttatttacctaaggtgttagtataccattaaaattagggaaggaagaaaattttgtacatgggcatagcttcaaaaattctgaagggtatttctgggtatttagataggacttttaagattgaggcctgtgcggttttttaatgggtctaaaattaagacaattcatgtcctttccttgatagtatttgcacaaatcatcattaccagtcacgactgtggtcagatgctgactcccaagtaagtcgaagagggaggcaaacagaaggaaaagagaaatcttcctgagatatctgggtaagacatgaagaggacagagaattgaggttaaggatttgcgtatatgtacctaataagatacaagtgcctcatcttcttcaaccaactatttaaaatcagtgggaggacagaggaggttctgtccattcattggatttgaatacttggggtgcatatttgcatattatgaacaaatgaataagttggactttagcttttccactaaaagctttcctattttgcagattactccatacagtgaacactttgatgtcggaggaggtgagagctccgactaaaagtcttctgacattcttggcactcataaggcttctctccagtgtgaattctctgatgtatgataagttgggaatgctggctaaatgttttctcacactcgctacattcataaggtttctctccaatatgaattttctggtggagaagcagctcagaattatcccaaaaggttcttgcacactcattacattgatggggtttctctccagtatgaattctctggtggacaataaggtgagaggtccgcctgaaagcctttccacactcaaagcattcatagggtttctctccagtgtgaattctctcatgtctaagaagttctgagttccccctgaaggccttcccacattccttacatacatagggcttctcaccagtatgaattctaatatgtct

SEQ ID NO: 344389 - DNA, 1000 bp, Homo Sapiens; identical to SEQ ID NO: 160886

SEQ ID NO: 344390 - DNA, 1000 bp, Homo Sapiens
gctgtttaccacaatcaacaagtatttattgataaaaacaaagccatttcaggtgtgacaacagtaacatagttggcaaaaagataaatgggaacatggctctcagataagtcatagcaggcaagggaaggttagaagacagtaggaagaataacatacatatgcataacactttacaaatcatgccacatatatttagcttctttgatcttcacaaaaaccttctgaggtgttattatttcccgttttttagggaaaaaacggctttaaagatttcaggccaggagcagggggtcaggcctctaattccagcactttgggaggccaaggtgggcggatcacctgacgtcaggagttctagaccagactggccaacatggtgaaaccccctctccactaaaaatacaaaaattagctgggcacggtggcaggcagctgtaatcccagctagtcgggaagctgaggcagaagaattgcttgaatccgggaggtggaggttacagtgagctgagaccatgccattgcatcccagcctgggctacaagagcaaaactccatctcaaaaaaaaaaaaaaggatttcagtgacttttctaaggtgagtagtttttccctaaatgtgcgtcacttcctcgattttccaataataatactttgggaggtggtatgttttgtggatagattagcactgtgctgcggcatggtccatgggaagcatctcaaccaggcttagttcagcatttagtttttgctccaagaactcgagagatgtgcagataggctcaaaggagagagtgtgttttccaccatggctcctctaggtggcagtgagggccaccactagagactagcgtgtgtcactatagaggtgttgtggctttaagtggtccaggcaaaacaggaaagaagtaaagcaacactattcctttagagttaaaacagggtgcaggtatacatgcatgtgcgcacatatatgtgtttgcagtgcggaggaactgaag

SEQ ID NO: 344391 - DNA, 1000 bp, Homo Sapiens
gtttttggagacagtctcgctgtatctcccaggctggagtgcagtggtgcgatctcagctcactgcaacctccgcttcccagattcaaaagattctcctacctcagccttcccagtagctgggattacaggcatgcgccaccatgcccagctaatttttgtattattagtagagactgggctttgccatattggccacgcttgtctcgaactcctgacctcaggtgatccacctgccttggcctcccaaagtgctgggattacaggcatgagccacagcacccagccttgcatagcagtttcttaggttacagcatgtgggcaagatgtgatttctgctcggagttactgaaggcgtgcaggcaggagggaatccgactccgggacaaagccagtgtgcagcaggatttctccctccttgcctgaaaagcagtggattcttgaggatgcgtaagttgctctgcactgaggaccctgatgaaggtgacagatgcatcttctttctctccactttgcttgcaggaagaggaaccttgcaggatgacatttgcactaccagttagcatctgtgtggacacagacgatgccagggaacaccgtggtcagccccacggcagctgtaggtcccccagtattacagaagagagtaagagctcaatttctaagtgtgaccagacacgtgcagcattgtgtcaaccccgtcttgacggcatccttgaaaatcaaatgcagaagtgatcctctaacctcatcactccttaggaactgcaaagccctggatgctgtgtttggacctgcagcaggcacttgctcatcatcagcaggggtggcttcagctgctgcctaatcactcgctttagagcatggtaccgggtcccacatctgggccatctcatagtgggtcacgggtgtttctgtgtaggataaagctttgtgtcatgaccgtctcctcccttccacaaaggcagctgggtctccaaagactgaaggtgattccaaga

SEQ ID NO: 344392 - DNA, 1000 bp, Homo Sapiens; identical to SEQ ID NO: 160887

SEQ ID NO: 344393 - DNA, 1000 bp, Homo Sapiens
tttttttttttttttttcagttgagcagacatttattaagcacctatcaagtgcaaggcactgtgctaggcgccgtgggaaatacagagaacacaggcggtccctgcccacgaggagctcacagtctagaaagggcagcaagacagtacacaatcagtggcagcagcaccagccagagtggcaagtgctcaaagcgagacacaaagtgctgtgcggtcacaacatcatggggatgcttctggcagaagcactggaaaggagacgaggactcaggctgggccttccaggagggaagccatttgggagaagggcatctctagcggagagaggtccatctgcagagcccacaggtcatgggaaacatgtggctgcagggagagtttggggacagtcaagtatggctgggaggtggacagccacggacactaagctcaggagatgtgaactttgtggtctggtcaaacagccactgcagatcacttcgcaggaggaggggtgactagaagtatgttactggaaggtaaatctggccacactgcagcatctggacggcagagggcagcgctgggaggggccagccagttagggcccaccacccctgggtgtctgagagtgggagtagcgggcaggggccagcaaagcacgagggcagagcaggggaccatacggagggtgggtgtggaagaagggaggggccccatgcaagctgcaggtctggggagcctgaggatgtcatagggcttcctggtagagtggaaagtgcactcctgaaggtcagggccagtcactacagagaggggacagcgaggagagggacggtgtggccctaagggtgactgcagtttctcaacatgtggtccgtggatcacctgcatgggaactgcctggggaatgcgctcatttgcagattcccgggccttcctccagaactactgggcaagcatctgccgggtcatgcccggtaacctacattcttaacaccagctgccctctccaccac

SEQ ID NO: 344394 - DNA, 1000 bp, Homo Sapiens
acgatggtgttgcccaggctggagcacagtggctagccacaggcacgatcatagtatactacagtcttaatctcctgggctcaagtgatcctcctgcctcagcctccagagtagctggtactacaggtgtgtgctcgagtggcctggactacaggcgtgtgcccaagtagctgggactacagacatgttcctggctcgcatcaattctttgcacattaaaaaaaaaaaatctccctttacccaggaagagacaggtacaatcatgattagagagagacacccttaatgcagcatggaaatgttacattgtgatcaatggtgctacacagttcttcctttaggagatgcatgtccagaccctgactagttggcctaggctgtagacagagcaagaaggaaatgcagtagtaacagatccttggggatctttttcaatttctgaaatagaggagtaagtaaaccaaaatatacaggagtgaggagtaaaacaaaatataaagaagtgagtaaaacaaaaatagaggagtgaggagtaaaacaaaagggaagttttgtcttcctacggctcctaggatagctgtgtgtctcacccagcccttcctttaccttctcagaagagaggctctcctagaaggagaatgttaccaggacagaggaacagggtttaaagagagggggtccccttccaaagaggttcaccacaaactggattctaacacatgagatagcagccaaggaggtgttctgagcctctaaaaaggatgttacatgtcaaagataacagaagatctaggcatcttgcctgcttgacttggggaatcttcaaaagaagcctctgaaatttgcattccagccctgtgagaagataaccctgcaagcaaggaaggtggtggaagataagagaagccgcggccctaagacagggctgtaaacattgtggttttctaaggccaactgggtgcatagctttggcagctatggttaaatctccaaaaggtgg

SEQ ID NO: 344395 - DNA, 1000 bp, Homo Sapiens
gagacagagtctcactctgttgcccaggctggagtgcagtggtacaatcttggcttactgcagcctccatctcccaggttcaagcgattctcatacctcagccttccaagtagctgggattacaggcgcctgccatcatatctggctaatttttgtatttttagtacagacagggtttcgccatgttggccaggctggtttcaaactcctgacctcaggtgatctgcctgcctcgacctcccaaagcgctgggattataggcatgaaccaatgcacccggcctcaaccttttcatttttaacagactgtagctccgagttacttctcagtgtgtgggcaagattgggagggatgtctgcaagcttccttcccttcagcaaatgctcagaatagctccattagcgttcatggaaattctgcacatgcatcaaggagaaaacagccacaaataacacagcctgctttccaaatctccaaagcacatctctgcaatcattctactttccaactatcaccactgaaggctttcagccagagagcaatttgttttcaacttactctgggttcctaagttagcagaactctttggttctttaaacatgaagcttgctacttcctgtctccctaccccagcttctcttccacatagcctattaacacaaaagtgaccagttcctgcttcaaatcagtctaacgccttcacctgatgctcaagacccttcaaacctgatcctggtccttgccttcctctcctgcctcatctccagctactctcctgccagtgtcctctactccagccataccaatcaccttccagatatctccacttctgggtttttccatactctgcttgctctgccaggcatgcatctcaaccacccaattaattactcctgccctttaattttgaaattttcattctattaactaacattcccctatccaaactcctgccctttaagactgaacacaggtatcagctcctccaggaagcactccc

SEQ ID NO: 344396 - DNA, 1000 bp, Homo Sapiens
aaaatctcactgttgtttattacaatcatgcattagaatttctacaaaaaatgaatggaagactgagaacagagaaaagagacacagagaaggacagagtataaatgcggttctacaattcagctttggaaaacataaagaaagctgagtaaaacacatttacacattggtttgtatttgtctcctgggaaggtggcaacttaggtcatgatgggatcgtggaggagctaatgaaattaagaaaggagcaggtttatatatgtcaagctccagggtttgatgtggtagccaaaagcatttggtagcaaaatataaagtagtattagcacataattgactttaattatatgttttataattacataaatccattaagcataaaggggagggagtaccatgttcttaatgaaaaagtttcatttaactagctgtggaacaataaaatgctatagtacagtaactcaagagcttcctgcatgggcttctccctcacatgttactggattagaaagaggtttctgtcctgcttcccaaaaggtcagatatttaggtctgaagaaagagggggaggctgtgaaaagttctggacattatataaaggtagaaactgataaaaccagaaaatagaggcagggaaaatggtgaatagaagacatggaatgcaaaagagaaagagagaaagtaacattcattagcatctatttttatgaaagacactgtgctaaacactttgtattatcatgtttaattctcataatagctctaggaggtagctacaatgtgcagatgacaaaacggcactcagaaatattaattttcacacagctactaagtaacagaactaagatgcaaatttccatgtgacttcacattccactctaggcattaccagaccattggcaaaatttcaaaatgagagattggcacaattatctaatagattgattttagaaataatatttgagatggacttacgtaaacaaatatcagagagaaagaa

SEQ ID NO: 344397 - DNA, 1000 bp, Homo Sapiens
ggtaacgactcttcgacctttatttatgcccctattaatacaatatccatcatgtagatatcgatctttatcctttaaactgatacgctgagaatcaattagccatgcagattacatttcctacatatccaaatgttagtctcttaggctgagagccggtgataatatatttttgcagccagatagtattagatttcgtttagaaaaaaaagaagacgaagaagaacaggaagaaaggctctctgaggctccttcctcttggggctacttgtcttaacccggctgaggctggggtgcccctcatagagttttccggggcgaagaagcgagaccgcgaggatggtgcgcgcgcagggccaccgtggggagccgggcagctttctgcaagagggctcttggaggttggcgggttagcgaggggtctgcacttctgccgcatgctccctccagctaatcaacgggtctcggtggcccctttcgatgggtttctgtgtcggagatggtcagttttcatctttttagaatttttccacctgcttctccaatctccaaggttctggatcaaaattattctcctgtccctcgctcccaaacgtacgacttatttaaaggttcatctccagaaaaagaaactttatttaaaagaggaaatgggtgttttcttgggtgacgggagatgaaaaagtttaagttctaggaaggaacttaatgcaagtcatgtgtagaaattcaggaagcttaggcctcctgctttggttgtggtgaggagagtttctcccctcttctctcccccgcgttttacctccattcttccctccttttattattttttaaaatttctttccttctttctctcttttcttctctttctctctttcttctttttcatctcctccgcctcttccccaattttgaaagagtgaggggtcgggagagtacgtgtcctagggcgggcagccctcccggggtctgtggactgtgcgctctcaggagacgcccg

SEQ ID NO: 344398 - DNA, 1000 bp, Homo Sapiens; identical to SEQ ID NO: 246593

SEQ ID NO: 344399 - DNA, 1000 bp, Homo Sapiens
ctcaccacctaccatccgggcaccaagggttttattcgagtccaatttttatccgcactgcggagaaagagggaggggggacatagagaaagcggggaacccggaccagaccccagacccctccccccactggagcccggggcatctgcctggttgggccaaggaagacttcatgagatccctgagggccccaggaggagggggctgggagcagcagaagaggactgggggccaccgcttccccatcgacgccccaggccagggccctcagtctctttcctcccctcccttctgagggctgtagcctccatctctacagaggctcggctggccatgaccccatcagacccccaaggtactcccttgtcaggtccaaagcacatgttatcctatgcctgtgaccctgggctgccatccagcccacgtcccagaccacaggcacacgctgccctcctcttgggtggggctgggggcactgctgacctgtcagctgctccctccccagggacccgtctccactccctgggggctactcagtcagtgaacgactttgctttttctctttcctacagattccacctcccatctacccctttcctctcccacctcttgacctgaaccccttttaacctcagggtcaaatgtacctgaggtctgtaccccccacctcttgtcatgcagtagtcatggctggtaggaccttggcccagggcatggggtgaggagagcctggcctggagaggtcagaccaagagtgaggtgcctagctccccaggctgggattttgggggccacccgtctgggcactcctgggtcagtggaggagcttgggggaggctgtggggccagccaccagccctcagccagggtcctcctgcagccagctcaaaaggatgcagctccccagcttggatgggggtgcaccaagggttaggctgttcttccttctgtctagctccaaacccatgtgctgtaccacctcctcgtctgcccagtgata

SEQ ID NO: 344400 - DNA, 1000 bp, Homo Sapiens
ggtgactgcaaaggacagagaacctttccactttggccatactgggttgctaagccggagccatttcagctcctggctcctcaagataacggcgagtccagtgccatcttggagaagctccaggggcagggctgacttttctcctacaggaggaacaatgtggggatctgagggatgggagggagacttccccctagagtggtggtcctgctgggggctcatatccagggacccaaaaggggggctgtgtaggaggttccacattggaggggctctctctctcgcagctgtcagagttggtcctggctgtggcgtccaaacagcttgagggaaaaagatcctgtctaaccacctcatctactactcaagttctttctgaaggagggatttcttcagttaaccatggacagtgaggtttctcaccacagtaacttgagtccaggttgagggggagacagatctgtggtaaatctctgacttgggcagcacactgagtgtggaaccccacaggactccttagggaaggagcttgtgtgtgaaagaacccctggggctgagctggtgacctccatgtgtgggtgcagcagggccttggatggtgccaattgatctggacagcctgttgatgcttttctacttccaccctttggcctggccccactgagccccatcaaggtgcctgaagagggggccagtgagatcccgtggccacagggactccagaggcatctctgcaggaagcacaccatgccttccctccatgttccatcacggcgccacaatctgtgtcccttaacttctcagggtcaaagacaaaggcaagcgttgctgaattttctctttaatggccattggaagagtctggttcagtttttcccaactctcttcccactcgtatttggggcctctgggttttctgaaggcacaaggactgtgactttgtaccactaacctgtggttcaaacctgggtgtgtttctggcatctccctaacccagatc

SEQ ID NO: 344401 - DNA, 1000 bp, Homo Sapiens
ttttttttttttttttcatttaacaaacacatttttattctctgttaattacttaccggggttctaggactgactgagaaatacgggcttctttctattggtcacattcacagccaacatttcctctgtgccaggtccgaaagacagtggtcaccttcgtgaataatttccttgagcaaagctgctctcagccttgaccaaagcagcctttccaggggctggtctatacccatgatctctcttctctggcacacagaaagtgaatggtcagactcatctcttgaatggcaagccacgtgtttattacatttcttgttcaccagacccactttattaaaaagcgaaatgacaatcagaaaggttaagtgacttagccaaggtcacacaacttggaagcagcagatcaggaagaaaaatccaggtctgctaggtaggccagtcttctgtccaagggtgtcctaggaccaggtcatctcagccatgtggggttgccagatgtttctgcatgtggataaagatagataggccaagggctatgagggggcagaataagctagaaattcccagaactttggtcctagaagggcccttaagaatcatccaggctggttgtggtgcctcacgtctgtaatcccagcactttgggagcccgaggcgggtggatcacctgaggtcaggagttcaagaccagcttggccaacatggcgaaaccccatctctactaaaaacacaaaaaaatatccaggagtagtggtgcacacctgtagtcccagctacttgggaggctgaggcatgagaatcacttgaacctaggtggcgggggttgcagtgagccaagatcgcgccactgcactccagcctgggtgacagtgcaagactccatctcaattaaaaaaaaaaaaatcatccaatccacccattatattgatgggcaaactgaggaccaggcaaagaaagcaacttgccaaaaattacacagcttgaagtggcagatcaggtc

SEQ ID NO: 344402 - DNA, 1000 bp, Homo Sapiens; identical to SEQ ID NO: 160888

SEQ ID NO: 344403 - DNA, 1000 bp, Homo Sapiens
ctcactacactgtccagcctcggtaactttccacctggtgttgacagctctgccccatctcccgcagagtaaggggggagtctgtgcataataaaatccttcttcatgtctgaggaaagcagttctttggtgccctccagccggtctgcaagtgtcctcaggaagccacttaatcgtcttgtagcaacagttgtggattccacctgcaggagcagctgccggggtatgccggtccgtaactccacgtcttcctttgcagtatcaaatacaagccccgagatggtatccaaaaggaaatctccccatgaactttacatggtacctgaaggagcattaggctcaaaacacaggatcatttctggggagcaatggccctcaagtcacatcttctcatcctagctccagcatcattgttctggtaggtgctgatggtcacgtgagtcgagtgggccagccccgcaggagtgtccgcttgatgaatggttcctctgggaaagtacaacaaatcacccggcttcagcataaactcatgcgccggcctgccgatcctttcctcggcctccacgctgtactctcgtgccaggggcacagtggggtggtagaggcgccagtgtttctctccctccagctgcaggatgaaaacctcgacatcatcataatggggcggcaggccctgagatcctgcgggagttatgtacacattcgagccaaccaaggagccaaagtaacattccagcttctcctggatcctccaaagctcatccttaaatctctgaggttggtgaaactgaatcgttgcccttttctgatcaaaatcttttctcagctgaagaaagtgtgctttgccatctttatttaaaaccttcttcttcccactgacacaccggcagacattcacatctcttccatagtacatcccccggctgcacagactctccagatctgttagcttgaacagggacccatagtatgtggccagtgcagggtcatctctctgaat

SEQ ID NO: 344404 - DNA, 1000 bp, Homo Sapiens
tttttttttttttttttctttaggactgatattaatttgggggtaggcaagtatgaggaagaatacagagaagtgaaggcgtctaggaatttctgcagaggataactccatcttcatccctccaacacgacatcgccgcaaaacatctctctcaggtgcccgagggttctgaggtttggaccttaaggtaaatcgtgttttctttgggctttgcttttctcccaaggttctcggcgtccttcatggtctctggcaaagcgacccccttggtctctggaagaagtagcgtcactcccgcggcaagcaggcccaacaccgctgacgaatgtggggtacagctcagcattcaccaggcagatcatttgtattgcaatggtgattcccattcggccaacacacatgattatgatgtttaaccagtgcaggtcaggtgagataaaaatcatgacgaggcaggctgcccccgccaacaaatttgacatggccatggggtagatgcggcccacgcggtcaatggtgatgagggctatgaaggcccccgggatttcgaccagagcggagtaaaggaaatccaggtagaggttcccgctggtggcgcccatgtgcaggatgagcccctgatagagcacagagtccgtgaaccacaggtacatcaggatgaaggtgcgcttcctcaggcgcggcgtgcggaacaggtctgcaaatgaagggctcagcttttcggtgacatcctcttcgagggaaagcatctttaaatcagcaggaggcaacttcccattcttttgagcgatgtggtccattatctttattgcttcagtgtttcttttttgtgataacagccaccgaggggactccggcacacaccagtagtagagcaggaagaggaaggtgggcagggagactgccagctgcagccagcgccagtgaggcagggcgtaggccagcccggtaagcgccaccagccccaccgtgaaggccatctggtacatgatcgccaccg

SEQ ID NO: 344405 - DNA, 1000 bp, Homo Sapiens; identical to SEQ ID NO: 160889

SEQ ID NO: 344406 - DNA, 1000 bp, Homo Sapiens
ttttttttttttttttttttttttttttttttttttttttttttttttttttttttttttttttttttttttttttatgtctttttaaaatttattttagagacagggtcttgctctgtcacccaggctggagtgcagtggtgccaccatagctcactgcagtgttgaactcaggctcaagtgatcctcctgcttcagcctcctgagcagctaggcctacaggtacacaccaccacgcccagctaattttaaaatttttctgtagatgcggtgtcttgctgtgttgcccaggctggtgtggacctgctggcctctggtgatcctcctaccccggcttcccaaagtgctgggattataggcatgagccaccacgcctatagccaacatgtctttcttttgacttctactttggtatcttttcttaaatggttccctctgtccccccgacacacacagaatgggggagaggctgtcagattctgagctccagaacctcaggtgtagcactgggattgggggtgggggctcaggaaccacctaggggagaagacagggtgggaagaaacaggaaggaaggtccccaaaattatgtttgtttgcagaggccagccaggctccaggggagtgtggactcagtcgaaccatagggccccaggaccactagcttctggccagcagtcatgccctccacagagctgggtccgtggaaattgcatgtaggagacacaccagactcccaggacagagcccttttgggatggccagcactacccagcctccactggtgagggaggtcaggggctgtgtgacctttgcttctgggactgatggtttattgagctggagagtgtgcccagcagtgttctccagccctcaggaacttctaatgtggctctgggttcctggagtgggtgggtcgaagctccactcggggaagaaacttccaagctgcctgcaggtgctggaggtccggtgattcactggctctgcccctgcagtt

SEQ ID NO: 344407 - DNA, 844 bp, Homo Sapiens
ttttttttttttttttttttaatagttgcaggacttgaggctttatcctgaaagaagacgtaggcagtcacttccaatcatctaacgaatgagctggtggggggcagggggcgggcctccagggggtcttgagagcagagtcgcgcaccctggccagctgcgtgtcacccatgccatcctctccagctaagggtccccggatgtttgacaaaaatcctgaaaacttcaaagcacacaggagccgcggcagcctgggatttcccatcggcagccctggatatcaggaggtaggagggctcagtgttctgaaggcgagtgatgtccacagagcccccgcaggacaaggacgctggccactgccatgcacggctcccacatgtcagtggcttcctgccatattgggttagttctcatatcaagtcagacaaggagcacacacggtgggaagcagcaggaaggggctgacctgacctgtgctcacagcccatgggccagtgccagtcacatgtcccagcctagctggacctgtactcacgtgtcctcacagctcattggctaatgcttgtcatatgacccagcctagctggacctgtgctcacgtcctcacagctcattggctagtgccagtcacatgacccagcttgtccctgtgtcacgtgtactcacagctcattggctagtgctggtcatatgacccagtctcctgtcagtctgagacctgtgggagccctggactaggcggtgttcctggggggtgcactggcaagcccaggtactcaaccagaatgagaagatcagaactggaagtggtggctccacccaaagatgaccataaggaaagttc

SEQ ID NO: 344408 - DNA, 1000 bp, Homo Sapiens
aatgatttgggttggtttttatctctgattcttcccagtaactcatccactaagaaccctgcccacaggagggtctgatccaacggggggtttgaggccactcagctcagcctggttcccagggccagtgtcccactccagaggccaagtccatgctcccctcccctcagcaggcctgttcctccagagctgtccagtctctctgccaggctccaaattctccatcttcagtgtattgaccaaacaatgagacaggaggacagctgggagagcgggagtctgaaatcactggtagagtggcccaggacacacacaggagagagtctccaccgctgctgagatgaagggactctccattcttctcaaaaggcttgctgtgtttttggcattcccccacctgactttttttcaagtgagttgttccgatctgacctcagagaaggccaaactgggtgcatggtcatgtaggtggcctctgatttttcacttggttcttcttcctcgatcacctcccgtacaattattggggagtaaatgtgtttctccccttcacatctttcaaaatggcagggtttttcttttatctctggattagtcttcttcgtgttcttcaccaagactgtagaattcactgaactcttatttccacaggtcttcttcacgatcaatatcagaacagggagcagcaggattgtggcacagacaattcccacaatgatcaccaactgattaccacccaagaccagaggcctcagggctgccggggtcaccagtgttcgaggctcttccgggctgacatgcagcacaatggttttcttgaacaccaggttccctaggtggatactgcaggtgtagtttcctccatctgactccctcactccttgaagcatgatggaaccgtcattgcggaaaatgtcccccaccaggttcacacgattctggaagtggccccagctctgggagtactccgcagacatcctgagtttgtggtagtaacgaa

SEQ ID NO: 344409 - DNA, 1000 bp, Homo Sapiens; identical to SEQ ID NO: 160892

SEQ ID NO: 344410 - DNA, 1000 bp, Homo Sapiens; identical to SEQ ID NO: 160893

SEQ ID NO: 344411 - DNA, 1000 bp, Homo Sapiens
ggtaaagacgggatttcgccatgttggccaggctggtctcgaactcctggcctcaagtgatctgcctacctcaacttcccaacgtgctgagattacaggtgtgagtcactgtgcccagcctgaaaaaccctaattataacattagttaccattttttgagtccttggtatgtgccaggcatttatgtaatcttcccagcaaccccatgagggctgcaccatggactgctcccattttacaggtggggaatgtgacgcatagagaagttaaagagcttagcaaagtcacacaggatttgtggcctgagttcccaagtctcacggctacccccaccctggcccctccgccttgcctctcaaacctgctcaccctgtcccctaaacccactctccttgtccccccaaaccctggacaccttctgcttgcgcagttgcttctgctcgtccaccagggctgcaatgctctcccgggctgcggccacctcgggtggctccaggatgtctggttggtcatcacctgtgtctgagtccttctcgctgtcgtccttagcgtagcactcctttcgctgctcctcccgccatttgagggcccagcgggacttctcgtgcttccagccggcgatggtgagcaggtgtcgggaggtgtcaatctggacctccatggcgcggttctccagctccagcaggcgcctccgcacatccatctgctcctggaaggcgctggcgagctgctcccgaagctgtcccatgccagccttctcaccctgcccgctgtgcagctggacctcagcttggatgtggcggatgtcaccccgatcctgccggccccgggcctggccccgcccagtctgctcatcaatcttgcgcttgagtcgctggatctcgccccgcaggtcagcgatgatgctggtgtactgggcgatgtggtaggagacgttcaggaggttctgcttcaccctagtcttaatgttcttggcccggccggcgtaggtcagggtgtt

SEQ ID NO: 344412 - DNA, 1000 bp, Homo Sapiens
aaaacactagaaagcacttttattttttcaaaacacaaatataaatgctatgtcatgatattgttaataattttacaggtacctcatcatgttacccattcagatatgtgcttaaggtaggtgttcctacaggatcttgggttggatgttccgtttgattttattttaaaaataataaatcacaaaactaaaacgtttgagcaaggtcacttaaccctctccccaggtggttagttattattaccatcatcatcctcctcaacatcattattacttttcagctacatgtttaaaagaggagatctttaatatgtcagcttaactgggaaaatgtgtccctggcacaggtggttttcagaagaaaagcccatcttcacaagagctttgtcctctgcttttattttaaagtgcggaccctgggtggggagggacggagcgggtgttccgggtctgtcactgaggaaccaattccctcagagaggccagagcagcatggatgcggacatgcaatctgttttcaaagtcgtagccagagaaatcctcctttgcttgaagaagtagagctctgcctcttcctacagtctctggtttgtctaatagaagacagccaagttcataacaggcatacggctgaacatataaattattctgacgacacaattcatctttaacagctcgctggaagtactgaacagcatcttctgagtttcctagacatttgtgtatggcaccaagaagcaaatactttaatccaacaacagatgagtcatccacttcatggcaagcttgactcatcctctgcaggttggggaaggaacagtttggaagagctttccacaagtacaacacttcaatagacgccaacacacagagcgctttggttggggtttgcttccgaaatcgctctgcctttttcaccgagaactgttcaatctgattgtttttccttttgaagagtttctgaacttctttaaagacaatctgtgccccatccacatca

SEQ ID NO: 344413 - DNA, 1000 bp, Homo Sapiens
ggaaggagcaatcacttttattttttcagttatattaccaggttatgtatttgagatatgatttctcaaaagggaagtaactcaggcagaatccatgcttttaacaatgggtccttggtctagaaggatctgcgtggggtttaaggccctcctgtgactctctgatgagaaggcaggcaggcaggcatgtcacagaggaaaaggcagataagaacaacgtgctgggtcatgggaggagactccacttcctatgccacatgcgcagaggcatgactagggccccccgcacgactagaaccgtttcattcatagcaagcctggctacaaaaaggcagaagggctgatagtcacctgacacacattgccaccttttctctccccagctagttcaaactcacaaggccatttgcacagcattttggaaagccacccatcccctggatgaaaaagttttaagagaattagtgcataatctaagggaagggcctcaaagcagaaaaaaaaaaagagtgatggcagcagttgagttttgtggctgctcttccgtgctattccatggggcgccgtgcaacgctgccctagaagcctgggtgcactggtgagagggcgggaacaggcgggaggctccacgcagtcggtgcccgaagctgagccttcggggaagagaaatgaggtcagctctccacaccccagtgcccctgtgtaccctcagaagtcatagggggatacaaagatggtgaccttggacacgtggttggcctggaaggagcggtccaggtattccgacatgtcgacgtccacctccagcgtctgaggcccctccaggttctgcacaaggatcagatccccagtctgccggtctgaacgctgcatcacaaagtggccgcggctgttcccacccacgatcccaaaccgcaggctgttgggcccagctcggccgggggcagaggctgtggccatgcggaagagcgtgatgggcgtcttcaggttggaaggcaga

SEQ ID NO: 344414 - DNA, 1000 bp, Homo Sapiens
gaaatattttgatcgcctcttatctagtctctatgctttggtctcacacaatttaaatccatcctcttaaatatgatgccatgggaaaaaaaaaaaacacatccttactttttttttttggctgcctactcattgcctggaaaataaactgcaagctctttgacattgcatttgagacccttacttatctgtttccaacctgtttttccagccctaactcatgcccacacccttctctctctagaatatgttatgcactttcagtttcatgccctggttcatggtgttccctctacctgttatggttgttcttcatttgtcaaaaacctctacatctttcgagcccatgtgatatgtgattttctctgtaatattttctctatcctgcttctgggtaaaattaacctctattccttatgttctcttctactgctattaaaattaaatttaagttgtagaagtgtttatctccttcactgtatcagactcaaaggaaaaagttgtgttcattttgattcacatatgcttaacacaatgcctgaccaatagagggtatccaataaatactgaactgaacaaatctattcctgatctgtgtaataaacagggagaacaaactttaagaataattctcatgcataaaacatattagctacaacatactgatttttgtcagttattattacaattaaatgaaaatcatttggctttgaataatagtaaaaatatacccaaaagatgaattatccattgtaatccatttggttttaagtaaatcaaacagctaaatttctctcttgcagtcagtttggaaggaggcaggaagcagttatacaaaaatccagtcaagtatctcattctttaattgatatgaagccaatctgtgtaccaaaattaaggccatctcggacatgggagaaaaacttgtcaggatggcaagatgtacagaggttgagatcttggttctggtcctgaatattctgtggaagaattcctccct

SEQ ID NO: 344415 - DNA, 1000 bp, Homo Sapiens
ttttttttttttttttttttttttttgccagcaggcagagatttatttccacagcccctgcctccaagggtctgttagtctgggggaggggggctgaaggcagctggaccccaaagtttaggtctccaccctccacctgctcccacaacgggaagaccaccggaaacaagggtgtcccggccccctggctcaggcccagcaccagccaaactccctgctctaaacctggcccagggagcgatggccgggggtgtgggtcaggccggctcccctttcccctctgtctcctcctcttcctcggcccctgctgtggccgggatgccctcctcgtcccacggcggttcagaccctggatctggtgcacacaggggtacccccatggcctccgggtgcttgcgcttcgcatggcgccggagcgtgttggcctctgtaaagcgcagccggcagatggggcactggtacgggcgctcccccgagtgcacgcggtggtggtgcgccagctcgcccgcctcgcggaagcggcgggggcacagcgggcagcggaagggccgcaggccggcatggatgttgcagtgccgccgcaggtggctggagcgcttgaaggtcttgccgcaaaccttgcactggtgcggcttcagctctgagtgcgagatgctgtggcgctccaggtcggagaggtaggggaaggcccgcaggcacaccgggcagaagtgtggggccttcctggggccagagccctcaggcccagccgctgaaccttcagagaccgtatagggcacaccctgatcatcgatcaggaggaggtcgctcccgccactgctgcctactggggctgtcaccccctgcacctgcaccagtgggggctcctgccctgacttgggggggcggccccgcttgcgagggagggaggccttgagtgtccgatttgaggaggtggctcccccaggacgacggcctcggcggccccggggaacaggaggagataaggccagaggtttct

SEQ ID NO: 344416 - DNA, 1000 bp, Homo Sapiens
tttttttttttttttttttttttttttttttttttttttttttttttttttttttttttttttttttttttttttttttttttttttttttggctttgaaggtgtttgtttatttttacaagcaactagtcattagacaccacagtttaggttaaagatcatgacatattagattaaaatgtaaggtatatttggatgcaaatttccacatgtaagttatatacgagttctgaaaacaatgccaagaggagttctagaaatgttgaaaaagagagagagaaagaaaacaaggaaacgtgtttaaagagtcacagaccaccccctcaacttttttctttttttttttgataaagagtattgctctgtcgcccaggctggagtgcagtggtgggatctcagctcactgcaacctcttcctcccgagttcaagtgattcttgtgcctcagcctcctgagtagctgagattacaggtgtgtgtcaccatgcccggctaatttttgtatttttagtagagatagggttccaccatgttggccaggctggtcttgaactcctgacttcaagtgatctgcccgcctcgacctcccaaagtgctgggattacaggcgtgacgcccggctaaccctcctgaaaatctgattaaaattacagttcctttccctggaaacatatggcttccccatcgccctatgccctgcaaaaccacttgcacagagtattagatagtcatgaacatgctgaggaccctctgtggagccacatttagaccccatgatttaaagcagtggcttttttatttccttttctgtttttttttttttcctgttgtagccaacaagaaaaaaaagaaaaggaagtaccttgtatactgtgacccagtttgtgcatatatatatatatataaaattaaaagtttcacaaaacaatcctcaaccctactagatgtgatagtattctttctttttgatttcattaagaaaaatgttactcatgacctac

SEQ ID NO: 344417 - DNA, 1000 bp, Homo Sapiens
aatctgtattaactttatttaaataaatgaccaatctgtcacccaacatgtcatgtggcttctctgcactgatcttgctttgttttcaaacttgtcacttgcaaatattataagaaaaaaaggtcatctaaaatgagttaaactggttacaattggtctcaacttttaagaatttacattcaaatggaataggacgcagcgtttttaaagtgcaagatatactcttttggctcaacatgaaacattatagaactggaaattaccgcagtcatttctcctacaacaaacttagttaaaagctgttttgaaagttagttagccatcagattataaactatgaaaaacactgaaaagtcatttaaaatgagtatataaatgcaaattacaaataaaaccagtgtgggagaggtagcataaagtaaataagatcaaataaatactatacaataacatacaaaattttgcttataaaaaattgaaaataccattttaaaacatccattttcctcacttttgaggtttttacaaagaaattaaaatttagacttagagtctctataaagcttttccaaatgttattaattactggcattgctttttgccaaaatctctctgatctgtcggtcgagttcacttattattcgatcctcgtgattatacacacccgttctcatcaaagtatccctttcttctatcaggcgagtcaaataatcatccaaaccttcttccaatacactgccatgggggccatccttttttccacttgcaatctctgtggaatcctggtattgtttttgctcttgttgccttaacctgttcaattcatttcttatatccaacaattcttgtcgctcggtttttactgtatctttttcctcagcggcaaggtaacgtagtctcatctgttccaattcttcctgctgttttttaagacgagccatttgactttcttgctccctctgtttaagtctggcaagttctttcaaagctcgtccccact

SEQ ID NO: 344418 - DNA, 1000 bp, Homo Sapiens
tttttttttttttttttttttttttttttttttttttttttttttttttttttgagttacagtaattttactttagcaaacagacatgtattctgtgtctcacgggccacctgctgaatgagaggactccagttgaaaggtcaagaacataaaaccacaagagctttttgagtgggtcttcaacttagttaaaataaaaataaaggacctgtgttccttgagaactggcccctaaattttctttctctacttcagagtgtggcaatgatgtgtttggggactttggccaaaattgaaggtttaggaaacattgaacatgacttgagaatatttagaatgtttacaaatgcatttggaaatatttatatcaccatctatataaaaataaaactgtgaacagctggacaagaacactggtctactcgccgaacttttttccaagttccttgacaccgaggattaccaattgcttgccaatggagagtctgatttccatcggagtccaggccatctccagaacaacgaaggctcacagagttcatagctggaggctgacaatccacacacaccgtgtatccctctcggagatactgcatccatctagtcaagggccagttttccagagcacagtgaggagtcaaggactctgtcttaaactccatacagtatccagcatcctctgtgtgtgtagaccagtgtggagacgtagcttgtcgtgttctctccttgttgaatgcagaggtagttataaaggcaggaacataggtgtgcccgcagtcctggccctgcggggtggagtactccaggcagccagctctctcttccaggggtgggcagggcgccccgccgttctgaggctcctgctgcaccgagcgcctccgcacacgggttgtaggcttgcactggtctgcacaaccactccaggggctccattcccccacgaagcacgggcgagctgggcacgccctgtcgtagtcgaagcagcagtccccggtgaagc

SEQ ID NO: 344419 - DNA, 1000 bp, Homo Sapiens
agaattcatagtgattttatttcaatgcaggaaactatgaaagtcaatcaaacatggattcacaagtctttacatttaatgtataacataaagcgttattacacataatttcataactataaaaataagtttaatacattaccatattttaaaaaattactttaaaaacatatactccaaagtcttctatttcatttagagaataatggaggtatctattagggtgaatcatatgaaacgatggtttttctaagttaaaatagtaaaatcttggcaattacatatggttcaacctaataagatcctgagaaaattttatttggcatcacactataaattcaaggggaatttatagaaaatcacatttctagtgaagagaaaacacttcaggatggaaacgtgcacactggtcatgccaagatttctctttgtgatttagagatctgaaatcttggaatgttaagaaaaatttagtgcagtttcaaaaaaaagtgaggacaattaaaattatagtatgctagctgcagttgctaatgccactgaaacaaaactactagccaaatttggcaatttaagtgttttagaggtgacataataaaaattccagcattaaaatgaaaaggcacaaatatgagttacaagtatgataatcatttataaaatccttgaaaataaggccaattcatttgtattattaacaccattaagcaggcacctattctaagcttcaacttcatcctcctaaatagaataaggttgcaaatgaattatcaacataatactaattatagcagcattatcaattgtctggaaggcatagtttataaagatcatggtagtagaaccaagtttcttaggctctacactgctaaaagaatatctaaaatagcctccccacccatatcccatcagtaccaaaaatacattttaaaaattacatataatattactagccataaaatgttttggtttttcttcaaacaatgagctctcctctcac

SEQ ID NO: 344420 - DNA, 1000 bp, Homo Sapiens
ggtgctacagatcctatttattcttttaaaaggctgcatagggagctctggtggcacaatgaattagtgcatgatacttattgagctcttttgtatgagcacttctgaaggctcatttctagaagtggaattgccaggtcacgtgcattttacattttaatggatacccagtgccaggcatagtgtttcctacatagcaggagcttcgtaaagatctgtggcgtgattacatggtgccagatggccctctagaaaggtgacaccattcccactcccaccaaggatgaccagaagagccacagaggtttccatttctgtcaccaggtcacagcaacactaggtttcaggatggccactttccctagggccactctgctactccctaggaggagttaaaggccctgtgatgaaaggaaggcaacgtccgggccgagggtaacttctcctccaggtctcccaagcccatttctcaacatcctcctgctatcacggtgagggcaacatcagctgcaggacttctctaattggaactagccacatctacacaaagaacccacatgttttctgccacccctgaccaatccctgaaagtaaagggaaacttccacttacgcttgggctcattctcctatggccaaccctggcactatattgtcagtaactgctgcactccttccagggccctatctcactgggaacccacacccggacagtccctgttcctggcatctttggggctgcctgtgccatcaagctgcccccagctctgccacctgcctgcgtcctgatgcccccaggatgagcattattgggagagcactaaaagaggcacccctgttggcataccagggccagttctacctccaatcctcctgagagctttggccagcattgacatggggctctctgcctggagaaggaggctggcattgagtgggctgtgggggcgcagtgcagaggcaaaaatcagggtggaggcactcagccctgtctgagtccc

SEQ ID NO: 344421 - DNA, 1000 bp, Homo Sapiens
tttttttttttttttttttttttttttttttttttttttttttttttttttttttttttttttttttttttaattaaaatcaatatgtttaatctttccaattaaatacttccattccataaacttcagaaccaaagttagataccaacaagagactgaagataaatacagtgtcaatagtatcaagggactagcccatataatatacttgaaaatcgtattaatcaccaataaagtaccccaccataaacaaaatacacaataaaaagtcaagatacaaataaagacaggccaacatatgagtagaccattgacagaagaggaaaaacaaaaggcaatgaaaggatatgaactaatgttcaaatgtatttcaatatgagaaataccagatatattctatatcactttaaacttctaaagtaaaaactggaaagctgggtaattctaaatattgtctgggacacagtgatacagaaacacttttgtccatcttatgggagaggaagggcaatgtataacataattccagttacatactagatcaccatatgacctagccattcagctgcaaggtacatttctcatgtatggccataagtttatttagaacataatactgatgaccttatttttaaggttgaatcaagctggtggtgatatatttcatagcaggaaaatggaggaaatacatgtccataatcagaggatttgaatcaaggatgaaagcttcatgatgtaaaatattacatggcagttaaaaacaattggctagaggtaagcccatgaaatataggatagaaatataatattttgctgtagtttgagtgaaaaagaaaaaaaagaattgtgaggtctacaataaaacataatttaaaaataatttaataccacaaaaactccaaagaaaaaaaaccaaaacaacccagacacttcttactagaacatatgttccatgcttctatctcggcttctggtagccccgtgtgttccttggcttgaa

SEQ ID NO: 344422 - DNA, 1000 bp, Homo Sapiens; identical to SEQ ID NO: 160895

SEQ ID NO: 344423 - DNA, 1000 bp, Homo Sapiens
tttttttttttttttttgggaagagaagtacctttttaatagatatataaattatagttatttaacttagaaaacaataactttagtgtttctagaaagtagatggcatttctaaaaaatagttacatacacttgataaagaacagacattccttctgaatttagaactttatgagttattgttataattagtaaggctaaattttaacacaaaggactataataaaacattctttgaatattaaaataattcccccaaaacctatattaagctttacaaatttcagacaagtcattccatctgaaactctgtccaagatatacatggctgtgaataatgtgtttctgtgaaagtcttttggatgaaaataatgaactttgggttttagaatatttgatttactgcctttgggttcctctgctgcctgtttctcttgctaaatattcagactgagactttactatgactaatcttactccattcttggacgttctgcctctgcagtggggaaggagaccctcctggattatggtgaatatttagctctgaatcaaatgaatgtttaaatctctaagacttgcagtaatgttgaatttggctggataccctgtggttataatattttaagcctttaaaaatatacagattctcaaatagcgacaagcttttttcctgattttttttcctgcctagcaattttgttattatcctcactgtctacttcaaacaaactgtatgcagtttacaattcttgtagcatatggttgctgcctacaagcactttgtgtgccttggcaaacagccacatgcaacattgaagaatggtttcctggatgagtactagagaattttgtttctatccatttttctacttgagttcaactttcaagatagggttgggttagacattgtttctttcttcccttctccctccttcctttcttccttccctttcctctctctccctctcttctttcctgtttcattgttgcagctatc

SEQ ID NO: 344424 - DNA, 1000 bp, Homo Sapiens
tttttttttttttttagtagagataaggtttcatcatgttggccaggctggtctcgaactcctaacctcaggtgatccgcctacctcggcctcccgaagtgctgggattacaggcgtgagccaccgtgcccggccaatagcgcttatttcatgatgatctccatttcttccttccacaaatacttccgtgcctactgtgcgcaggcattattctgggtcctagggatgccgccccacagcctgatgcccacagttgctttggcttgtctgccagggcacgccacgaagtcctgttttcccacgtggttccttgtgatgttcagacaaatggcatcaaagccacaagctctgggaggcggaaggtgttttggattaagcattctcagcctttactgtggacatggatcacagatgtggggtttgttaacatgcaggtcctgattctaggtctggggcagggcccgagactcttaatttctttctttctttctttcttttttttttttttttttgagacagagtttcgctcttgtcgcccaggctggagtgcagtggcacgatctcagctcactgcaacctgcaccttctgggttcaagtgattctcctgcctcagcctcccacgtagctgggattacaggcacccatcaccacgcctggctaatttttgtatttttagtagaaacggggtttcatcatgttggccaggctggtctcaaactcctgacctcagatgatccacccacctcagcctcccaaagtgctaggattacaaacatgagccaccatgcttggctgtgctttcttacaagctcggggttaaggaggtaaccctgctgctggtgtacagaccccactttgagtagtgaagggctggtccaaatccccacccatacagaatcagctacatcgacaagcacacactctcgtgagtttaaccaaatggactgtttggggcaggaagaaccccagaaatgacattgggttccccttggcgcttca

SEQ ID NO: 344425 - DNA, 1000 bp, Homo Sapiens
cggccgcacgtgtaggcaaagaagcctgtgtccggcctccagaccatgttggcccgcccattcccgctgtaaccgacgacagccttcagacgcagccacccaccgctggcgggaggcgggcaagtgcccttggcagagtgggggctgcagctgaccctggcaggcgtgaaggccttgcaggaagccaggtaggtggtgcgtggggcccccgaattcctggtgtccctggcgccatcgccaccttcgggaggcctggcacagacgcccagccgtggtggagatgcctgacatggcttggggacctgctgccgggggagctcgctggccctggacgctgcgtcctccagcggtcctgcgcccgggcctgtcttgcaggctgggggggccccggggaagctttggtcgctctcagtaggggccaggacatcccagaggaagacggcgtcccctgcgctgaggacctgctgctggtcaggagagaaggccacagcctgcacgggttccgagtggccgatgtacacctgggggcctgggctggcctgtgtggcgtagtcccacaccttgatggtccggccggcggcaatcagcaggaagcgggcgtcctcactgagcgtcaaggaggggcagggctcagggtggacaccgggcagctcccggatgatgcggcccgacacagcatccagcaccacgactctgttggacgaggtggacaccagcaggtggcccagagctgcagggccaaagcacacagccatggctgagtccaggcggctgctggccaggtccagagtgccgatgtcaactcgcagcagctcatcaagggaggccgagcccatgactgtcactgtgcacctggagggtcccacaaaggccagcaggcggccatccctgctgactgccagggcgctggggctcgcgggggcatccgggcataccatgtccgctgccactcggaggacatgccactgggggtccgcacagctgtactgggccagggagc

SEQ ID NO: 344426 - DNA, 1000 bp, Homo Sapiens
tttttttttttttttaacttgaaattgcacttttattttaaaacagtgaagtgtggctattacatatttcacttttacaatcaatacatgttaggatcttacaagtattaaattgatgattttattatatataaatacacaaatggtccaaaacaatatctaaaatgttgcaatatttataaaatccataaaaatatttaattttcagtatgaaaatggcatactaatttgagtttgaggtaaatgaagagacagatttaggccatctaagaaggaagataaaggagaatgtcatatctatattttgggaaaagtcaaagaatgctaaagagcttgacctgttactgcattaatgacttcagacattatgcagatacatatactatatagtaataaataatacacaatgtagacagaacagaaagcagagggactggaccaatctgctcaaggaaaaggtaaagaattttttaaagtgcagcaatcagggattcttgtgactaatgtgtttcactgaagacaatttgaatcgttcataaacattaaccctttaatccttgaaactttcctttgaggtagagaattgggccagactactgctgaaaagcaagaggaatggcaaggctaaagtagctcttgagagctcaaaagaatcatggaattctttttttttttttttttttttttgagacagagtctcaccctgttgcccagggtggaatgaactggcacaatctcagctcatagcaacctccacttgctgagttcaagcgattctcatgcctcagcctcctgagtagctaggattacaggcatgcgccaccaggtccagctaatttttttttgtatttttagtagagacagggtttcaccatgttggccaggctggtctccaactcctggcctcaagtgatcctcctgcatcaccctcccaaagtggtgggattacaggcatgagccaccatgcctggccaagattcatggaatttttgaactcctt

SEQ ID NO: 344427 - DNA, 1000 bp, Homo Sapiens
ttttttttttttttttttttttttttttttttttttttttttttttttttttttttttttttttttttttttaaaggttatgtttcatttttattaacttagttttgccacggttgagactggatttgccatagttcaatttatcaagcacttaactatgtgttccgcacataataatcatcttagcatagaggaacatgtcttctaatccgcacaagagatactatttttatcacgtcatagaggaggttaataaacttgcctaggtcataagatcttcagttgatgaagttaggatttcaacccagagccaagtaatgtaatggctgatgttttccacagagaaaatgtaagccgagatgatgctcaaactataaatctggaaccttagggggacaaaaacgtatggatgtctccttcccattactttagcattttaattagattcctgtgtctctatttgtctttggaaatgcaagctgcttgcagttcatcatagctaactcacacaattcattttatgaaacacaaacctgttctcacaaactcactgtcatctctttttaatctttctaattgtgataaaaatcatactgcactttaccctgtgtaacctccaatgatctttgaccaaaagccaaatcttttttttgttgtgtttacttatggacagttaggttctacataggtacttaaacatgaaaattgaaatcatagaggctgggcacagtagctcatgcctgtaatcccagcactttggaaggccgaggtgggcggatcacctgaggtcaggagttcgagaccagcctgactaacatggtgaaacaccgtctgtactaaaaatacaaaaattagctgggctggtggcccgtgcctgtaaccccagctactccggaggctgaggcaggagaatcacctgaacctgtgaggcgctggctggagtgagccaggttcgcgccattgcactccagcctgggcaacaagggcaaaactctgtctc

SEQ ID NO: 344428 - DNA, 1000 bp, Homo Sapiens
gcagcggtctgccttcatcttttaatggccggtgcggtacagttagtagacagacgggggatgggacacagcaggggtgaaacagggcagtcacagccggggccggggatctggaagcgggggcggtcctccccctggaaacaccgtctctggaaggacacccttaggatcccctgacctcagggtgccacccacacgggcctggtgttctgggaggcccgggctggagtgacccccagcccctccctacgttccagggacccttgggtctgtcgagtcccttgctggatgagggtcaagacctaggtcaagctgacttcagccagggtgtgggggcccggcttcgtagcccccagacttacctcccctcttctatcccgggccaggaaggcaatgggagggctccctagtcaggcacagccccctgacctgtggcatcgtgtgggtgtgtggggaggtcctgacgtgcccagctggcatcactgctgtggtttcccagaggctgatgcagaccgcaggcgggtccattcggacccagggctccgactccttcatggctaacgcgttatgtttgggagaagcagtctctaagaatgaggacagaaggggaagccctgagggtgacaaggtggggggctgcccctctcctctcagggctccagagttcatgaggaggggtccctggtggaggctgggccaggcggtgccccgatcagtgccggtgggtgatgagggccggggtgcagtcactgggcgcgcacactctggcgggtgtctgctgtcctgggtggggacacggtgcgtgtgaccctgcagagtgctggctgggctggagccggggccgctggacacagatggaaggtagacgcaggtatgagaccaaacgcagaacacagtgctggccagagccccgggtcgcagaaacgtgttccggtcctcggaggactttgcagaacttcagtccagggtggggcatggctggaccctgagggagtggggc

SEQ ID NO: 344429 - DNA, 1000 bp, Homo Sapiens
tttttttttttttttttttttttttttttttttttttttttttttttttttttttttttaaaatgtgatgacagctcatattatagcaactcataacaggtaagtattatttccagaataacattaagtcacttttgtagctctaagtcaatgctgcacaaatggacacttaagattaaggcatcattctgctctggagtagtgcttctgtgaatcccaggaactgtacaaaggctttccgttttaaaaaatatatcttctgttatacttcagttatttcattccactgatcattttcttgcaaatgaaaattgaaaataccagtctataatgttttcatacacctgatttgacgatgccttcttcagctccattctccagccactgagattcactgtccaacaagcggttttttgattcactaagtggtttgataggaaaaggttgatttgagccacttctggcatactcattctggtttgtaacagaagcttgttctggatccatccccacaaggcgagttggaaaactgcaaccatcacccaagcttgaaaatattggaagtagccaatatttcttttcatcaccaaagacttgtctccaatttttactgcatccaagagagaaaccatttccatcaggtccgtatgaaaacgtgggtgcgcggaatgattctattgttgttctattttttccaactagccagcagtggtagctgaaaagtgagaggacgctgatgaagaacattgcagacacaaagaaaagaaaaagtacgtggaattttgcacgtgtatctgtcagttcattcgtccaaaattttataaagtactctaaaactgttgcagccacgaaaaggcaatataatagggaatacaataaaaacagcaggaagaatttgtaattagaaaatcccacacagttattcacccaaggacagtgatgatccatcttaagaatacatgagtcacaggctgagcagtgatgcgcccgatcaggttta

SEQ ID NO: 344430 - DNA, 1000 bp, Homo Sapiens
tttttttttttttttttttttttttttttttttacttgggaagcatctttatttgttgttggtatcattttatacagaactctagaacactgggtcatacggatttaaaacgcatgggaaatattctttatatattcttgcctagtatcctgaagtttgtctacccttctcaattccaaaaatccattcttgtcaatggttaatatactgttgagttatatttcaaaacctgagacctccttaacagttttccacttatacaggaccattaattggccattttctgttgtatgataaattttaaagtgttagtttctcattagaaatttgagcattcattagcccaatggaagttaatctgactcccttaacaagtagcaaacatttttaaaatgtgtgaagccaagggtctgttttcagaagaacagaaacattacccaatcaaaactgtaaaaatacaaaatagcatcaaacatattttttaaaataatttttttctaaattccctgggtcactttatttataatcaaatcttgacattctacctgcaaaggcttttaagtgtacttgctaaagaatcattacaacttatgaatgaagctccacattgcaatgatggaagtatattttccaaatattaataaacattccctacctaagaaatttcagtaggagctactgttgcctatcagatttatgagcatgaaaatgccttaagctctataccatctatctacttggtaaagtgaaatatccccctctttagtttaacattccagttgctgagtcttgataaaatgccagatgatacggactttttcctgcataaaagtatgaaggtaatcactagagaatgagaaaattgaataggattgttcaaaactaagatgcaaagtgaaggtggagcttgcaagatattttcttagagctaccaaaataacattgcatatttccttccatttttagtggtaactcaaaaattagcttgaaatttatccta

SEQ ID NO: 344431 - DNA, 1000 bp, Homo Sapiens
tttttttttttttttttttttttttttttttttttttttttttttttttaagaaaaaactcttaaatttatttttcaaaaatgtgattatggcaacaaataaactaatatgcagtccagttcaccctactcacagtgaaatcatagggtcagtgaaaaagacgcagtcctcatgtataaagaatatttaaaatgtcggttgtatcaagaccttctattattgaacactgtatggcatcttgccttgtaaagagcaaacacagcccttataaatcctttaaaccaatccagcattaacaggagtaaaatttacagtaactacttttgaaagctgtaaaattaaagcacctatttaaattaagatcaggaatctatgaggttattattcataagagctggatgaaactaaatattgcatttctaaggaaaaaattataatcatgcactttatataacttacaaggcaaatgggatactatgaaaaatgcccttcatagcacatttaagcctgaatttaagtaatactcaacgggaaagaaacaggctctgttacggcgctggcggagacataaaaacacaaaggtgtcactgctcagggcagcccttcctgtctatttttagaggtctaagactccagccttaaatagttttgatgataacgcttgtggcataactcagcgtgtaagacatagtctgggaggaaaccggttcttttcctgctgtgtaacctcattcactggtttttccctaccctgagatcttgcttgtggaacatgacagtcggtggatctttaagaatcttttgcttccttctgttgactggctacctcggaacatgcagaactaaaattggatgataaaggagattagttttctaaaaagttccttctttagtgaacagtcttgcttacttggaagcagggaatattactttaactgggaacagaggaacattttgttgaggataaagcactttgggttcaccaaaatatcatggagac

SEQ ID NO: 344432 - DNA, 1000 bp, Homo Sapiens
tagtagagacggggtttcaccatgttagccaggatggtctcgatctcctgacctcgtgatccgcccgcctcggcctcccaaagtgctgggattacaggcatgagccaccaagcccggccaattttgataattttcatccacatcaaataagaataaatatagcttattggccgggcatagtggctgcgcatgcctgtagtcccagccactcaggaggctgaggcagaagaatttttaacctgggtggcggaggttgcagtgagccaagatcgcaccactggactccagcctgggtgtgtctcaaaaaaaaaaaaaatgaagtaggccaaatgtggactaataatgagaatgtgtaataaatcacatattatgaataacctacttttatccaaagaatttatgaaatttacatgaaatattcccgttagaataaaaggaaactgatagcagttgttgcatctgtggaaagtgagtggctacagaactggatgttaggggagaattaattttcacatttttggtaatttttgaatttttataatgtgtgcttttattaaacaaaaaatttagaagattttaaaaaataaatgtaatgtcaaaatatatacgccagatactctttaatcccactgttgggaatctgcacaatagaaacaaaagaaggtaaaattagagttctaggtgaacattagaaacaacttcaatgtctgtagtaggtaatggcccaaaatacggacatacattccattctagaaatattctgaaccttacaaagaatgggttacatctttacgtactgacctggaaaagtattcatgattattatgaaaaggacaagacgctgtcaaatgtctgtatgggggtaaaagctcctccaaacacatgcaaaaaatgctttctgtgtacaggttgtttgagcataaaggaagaagaaatacacatactggttatctcagagatttgagggaagggaggaaattgttttcattttatttcactg

SEQ ID NO: 344433 - DNA, 1000 bp, Homo Sapiens
tttttttttttttttttttttttttttttttttcacgagttatatataaagtatttatttttaatgcacatatttacctacaaaatttacagaaaataaaacaaagcagaatatatagaataccctcttaagacttcttaggagctgagggttttattgctgcagttcaaagaatcaaattttatacaagtgaaagctaagatgaacacatttaagttaaatggcagccttgttaaaaagcttttttatcctgttattgaattttcagctttatgttaaatgaaatttaaaagattgctcatgaaataatttaaaccttttcaaaatctaataaacaggtaaaaggcacctccagtactttaaaatatttacagcaatcccaatagtttaattttaagggctattatagtacatgcggctattatgcatacacagtatgtcattaacactctctaaacagtgagaattgtagactctagtttctggcaccactcccaagttattctggtgaaggcataggatgaccaattacacctgtgcaacactagtgtcacagcctgtctaccacagcgtaaaatccagttatctaaaacaatgactatcaaattcccagacaatacataatttatcagtagacttgtatattcacaagcctttagggtattttaaaaattattaaagaggccaggcacggtggcttatgcctgtaatcccagcattttgggaggatgaggcaggaggatcacgaggtcaggagatcgaaaccatcctggccaacgtggtgaaaccccgtctctactaaaaatacaaaaaaattagctgggcatggtggcatgcgcctgtagtcccagctactcggaaggctgaagcaggagaatcgcttgaacctgggaggcagaggttgcagaaagccaagatcgtgccactgccctccagcctggcaacagagcgagactccgtctaaaaaaaaaaaaaaaaaaaagaaaattattaaagcaat

SEQ ID NO: 344434 - DNA, 1000 bp, Homo Sapiens
gttttttgagaagtgtcactctgtcgcccaggctggagtgcaatggcgcgaccttggctcattgcaacctccgccccccaggttcaagcaattctcctgcctcagcctcctgtgtagctgggattacaaatgcacgccaccacgcctggctaatttttgtattttaagtagagactggatttcaccatgttggtcaggctggtctcaaactcctgacctcaggtgatccacctgccttggcctcccaaagtgctgggattacaggcatgagccaccgcacccagcctatacacacatatttctaagacaagacacttactgagataacatgactatcaaaacccattaactgggcaataaaccatacagacagttcttaaaaagatagaaggttttgtgtatgaaaactgcacctcaatgttttaagataaatggttccacacaaaaatatgcatctacctctccttttggaaaaccagactataggataacacaagatttacttattattaaggattcatctcctcacaagttaggaaggacagccttctcagcagtggcaataaacgggaagtaataaagataattcctaactggcacaacagatctgggtgaatcacaaaaaccacatatctggaaggcaaggtgtatgttctctcaaatcctgctttcctgcccgtgcagcaatcatctcaaaaacagtacataagttatgagtccacaaaatctttagatgccttatgctgacgatgtgtgttgctaaaggagaatcaaaggtctgaggtcctgagaatttctatatacccccaaaccatgaagccatagtaacacagacatatctggatgcacctttggatgggacacattcactcttcttggccacaatcttttctactctgtttatcacacctacctgtctgggccaattactgttcttacctggccccagtaggtcttacaaccagtgacctacctaccaattcagtccttcagtgcccat

SEQ ID NO: 344435 - DNA, 1000 bp, Homo Sapiens
ccaagtcagacttgtttttattttagaaattatctcttgctacattgtaattcccaagaacatctctggtcatatagagtatctgtgcttttccgtaattcttttgctgcaaaaattcagtatacacaaagcaaagcatgctaaaatttaaacaaaagattacagcaaaaaatatggttcataaaattagcctcttatcacttttttctttttcaccaattccattcttttgtcaatgtcctggtgaagagaaagcattaactatgggtcatagcagcctgacaggtgggttttagaagacaatcactgctagatgaaatgttagggtcaccccagaaccgatgacatgggcatggctttccagttttaagaattagtagaagatattcctaggaaattccaattccaaatgcttttagaggagtccaatctgagatacagatgtgttgaaaataatgacaatcttttacaggcagatacatcatcaaaattgatgcctgaactgtgcagagctttcaaagaaaagttaactcttataggtcggtttccccagttctcaggagaaatgaaatcattcctggtttgtcaggtcttcttactgatgtcttcactccgaaaattcttctcctcaagatttgagatggagaacaaatttagcatgctattagccaattgtttttgtgaaaagtccctgtcatttaccacagtacctctaacagatgattatacattctggttagaaccacatgggattatacatgtcagtggagctatcttcttttcccctatgatgaccttgtatcttcaccataatacagtgttttctgtgccaccgttctctgggttgggagaggtcatgttaacacatgtggctttcatatcttcggtgggatatttgttgatggcacgtctgattaaatggacaaatggcttgacaaacttgatgatatagttccaatctggcttgtgggttcggccaagttggaccaagtgatgatcc

SEQ ID NO: 344436 - DNA, 1000 bp, Homo Sapiens
cgactttggttctggtttattgcccctcagcaggcagcgggagtcaaggcctaggctggggctgcccggctcagccagcgggtctaaacagtgtgtgcaggggcgccgttcgcgccctccaggaaaatgcgcgatcgggaatgtctcgaagtcagtccaggaaagagtcggcccctagtcgtgggggattgggccagggaagggcagggcggggcggggccacgccgccgggccagtcggtcccgccaggcagcgatcaaacgtcgagggaggaggcgggggacagggagggggttcgagagggcgtggcgggcgccggccccgcgcccccagcgcccagcactcgccactggaagatgctggcgtccttgccgcccagcgagacgaggtgcgagtcgtcgtgcgtgaatcggacgctggtcacgtggctgccgtggcccccgtacatgcggctcggcgccttggcacgagcgcacgggtacgtagacgtgaaagcccagcacacaggtgtaggtagcccattcccggtctcggctctcatagcgattcttcagctgcttgcagcctccagccacgtcccagtaaagaatctcatagtccccagaattggacatgatgaaattcccatccttggaccagtcaagatgagtgatgaagctggagtgacccatacagcggccaaagcggctggatttggcaccatcactggaaacactatagatgtagatcacgttgtcatgggaaccaatggccaggtacaacccatctgggctgtaccggaccactgagagctgctcattgccatcaatgacatcagacacgatctctctggtctctgtgtccaaaaccaaccacctccccgtgttcagtcctacggccacaactgccccactcgggtggaagtcagcacagagaccagtctccttgaggtcgatgctccaggccagtgcatggctctccccatcccacaggcagagctgccggtcgtggccgcaggtga

SEQ ID NO: 344437 - DNA, 1000 bp, Homo Sapiens
tttttttttttttttaagattttcaaattatttttattaggtaattttataatttcatagcagctgttaggatacacaaacatatatatacaattttctaaacaagtaaataaaagcagtttagtatatctgcctgaattcatattattcaaaatcttaccaaaatatttattataaaaatcagtaaaattgtttaacacatttataaaagttgctgggtatgtatacataaacattttaagcttgctttacaaaaaaaagttaaatttctatccatgtgctcatagtgacttcaaaggtagttcaaagggggaataaagaaggtagcattgccttgtaatacagcattaattaatactgacttacccttggacattcatgaaagatcctttgttatcacatatggtgaaaatattaaaaattaatactccatttctatgaataaaacatagaaaataagactttatttttccagactaactcattagcatgaaagactgcattcattctgcagatattactgacaccccgtattatttacttaaaaaatatttatgatacttaaaattcaaaaggaaacctgcaagacctatttttctcccaatacattcactgaatgcagatttaaatgagtgcatctcattttgattgtgccctttgtgtactttaaaatgactacaatatagtacatttgtatttttaactggtaccaaaattaagatgaatgatctatgcaaaaccagtagcctgtatttctagtaacagttgtcatatgcaaaaagaaaaaaagagccctgagtcagtatgtttttgcaaaagtaatgaaggagggtgctctaaagtcattttataacttataaaattgttaagactgtccagtattcatttgctttgttttcattttgattgaagagaggtatggttttcgtctagtaaatccaatgcagatcatttcttaatactcaatttcatttaagtcctcagaatatcctgatgattg

SEQ ID NO: 344438 - DNA, 1000 bp, Homo Sapiens; identical to SEQ ID NO: 160897

SEQ ID NO: 344439 - DNA, 1000 bp, Homo Sapiens
aaacaaaaacttgaatatattctcaatgtaaacaaaaactttaacattacaaacaaggcaaaagtcccccagcacacactgacccttcttttgagtaaggttaccagggtaaggtataccccttcaagcacgtttcacatgactctcaaattgtgtttcctggacaagcagcacagcatcacctgggaacttgttagaaatgcaagttattgggcgccatcccaaatctaacgtgccagaaatgctgggagtggtgcccagcactcttttgacaagaccttccgtgatgctgatccttccttaagtttgagaaccaatggcctagctccctgttgctgtgaagctaaccgtgcacctgggctctagtcctctatgcctgggctcatttatttttctagcttcacgtcccccaagcaaccgaccttctctcccaccaaagtggacacattcccagccctggctcaggcccttttcgccatcttctctttcaagttctgtccctaaatgctctggccttcaaggcacacaggaaaagctgctctaatagagctggctggcaggaccgggcacgggagggaaggagggcagtgggtgggggaaaccgggcgggggcaggcgagacctcagggctccagggcctcgtccccggactccgccgattcctcctcgatgcgggctgcggcctcggggtcgccgccctcctccgcccggaagcgcagcagatgcggggggcggggggtgcctcgcacgcggccgaagttccggaggctgatggccggggagggcgcccctacgcccaggaagcggccgagcaacggggtctgcgcggcgggcgcgggccgaccagatccgggggacgcctccacctgcaggctctgctcagggtcgtcgctcatgcgcaggttgaaggtggagcccaggaatgagggccgcagagactcggccgccgtggccacagtgtagggtggctgcggctggtcctcatcccagtactggtcct

SEQ ID NO: 344440 - DNA, 1000 bp, Homo Sapiens; identical to SEQ ID NO: 160900

SEQ ID NO: 344441 - DNA, 1000 bp, Homo Sapiens; identical to SEQ ID NO: 160901

SEQ ID NO: 344442 - DNA, 1000 bp, Homo Sapiens; identical to SEQ ID NO: 338847

SEQ ID NO: 344443 - DNA, 1000 bp, Homo Sapiens
tttttttttttttttttttttagggttggtcagagagtttattgggagacacaggaaccagaaggggaaagtcccaggtgtccgtggggtgcatctccccttggtgtgaggtgtccaaaatgcagtaggtggcgctcaggcatcagtcccccataggcagccacagggccttggtccgcgccactcgcagccccagctctgggcctgccccctcggcctcctggtcccaggcccgcgggcagcccctgctcgcccacaccggtttgaggtttcctgccgaggcccactcgacaaactgggaaccctgggctgatccgaaataccacatggcctggacgtcttggtgcaaggccaggcagcgggtcagatggtcccggtctcctgtcaccacgttggccaggcctgctgggaacacggtggccatgtcctggcagacctccagggccagcagaggacaggccgcactgggcaccatgaccacagtgttgccgtaggccagggcgggagccagcagggacacgaaggcaagcaggggccactcgtccggacacaccacagccagcacacccagcggctcccgcaggcgcagcacagggcctctcagcccggctacctgcagggtgtggccttgggcctgcacccgggccccccacgcccgaagtcgtcttgcgctcagctccacctccgcctccgcagccttgagctccgctccctgcctctccagcctcgaggccagggtagacttccggcgctccagtgcagccgccagggcccacagcagggctgcccgggctcctggggactggcccgcccagccagggaaagcctggtgagcggcctccacagcacctcggatgtccttggctccaccctcagccacgtagccatggaggttgccagacgaatcccggatgggcctggagcttcgggccccaggagcctggaaacggcccccaacgaagagcccataggggggtgctgggctgggccctatttcagg

SEQ ID NO: 344444 - DNA, 1000 bp, Homo Sapiens
tttttttttttaactcacttggcacatttattaaccatcaggctatgtctgcggccccacgtgtttgctgccccatgcacggtggtggtggtgggaaggcagggccgggtggccagcgcctacttgctgtccatccatttgagctgctccttgccgttcacagtcaccgacttgagctgcccgtcttcctccacctccacgcgctcctgcccgttctccacgatgcgcttggtggtgaccttgtggccattgatcatctcggtggacgacatcaccgacttgaaccccgagctgccagaactggagcccccgaaggaggtggatgagaaggtggtgtggctgcccccgctgcagcccagcatgttgaaggatgagaaggcctccatgaaggccggaaattctccaaagcctgccgagaaggcccccctcaggccatggccccggccaccacggtcactattgaatgggctgtcccagaactcaaaggagaaagggtccaggccaccgaaaaactcccggaagatgtcctcagggttacggaaggtgtagccggtgtcgaaggggctgtggtagggcgtgctggccccgccaccagcccgccagctgtcacagccagcacggtcatacagggagcgtttcttggagtcagacagaacctcataggcctcagacaccagcttgaacttcttctccgcctcctccttattgtcagggttcttgtcggggtgccaacgaagggccagcttgcggtaggctttcttgatgtcctccggggaagcgctggcctgcacgcccagcacttcgtagtagttagccatggccaggggtgtgggtgagaggagagggaacgtggaggccaggtgggcgcaggggcccagctggtcagatggacgggggagaagtggccggtggtctggggcccttcagcaggggcctggctggactccgcaagctctaggcaagattctgcccaggagttcaccttttcgtagtaccaatt

SEQ ID NO: 344445 - DNA, 1000 bp, Homo Sapiens
catatttcattttttattagttttgtttttttttttctggtagacagtacacttgggaattatactgcaccaggcataaagagtaagttttctaccacagggacattttgtattcagaattcaatataaatatttctagtcagacatttccatggctacagatatttggttccttgatttatatgcatagaaagaaacagttgtcataactgtaaaaagcagtacttaataagtacttttaaatgattggaacagttttcctttaatattacaatactacttatttattggtttggaaactaggtcaccctacatgatgttttgatttttctcaaaggcatcatgagtactctgcttattctttcattcttgtatttttagccttctagttgagttagggaccattttatcagaaatcattttagcactgtaataagaaaagctctgttaagggtagattatataccataatgattttcagacttctttttataaaaaaggtatctggagactctgaacaggcacatgcatactcagggggaagggaacaaaacatggaggagtctgccaaagcacaaaacttccttctggtcctcactgccttcaaataaatacaactatttaaaagaaaaaaaatatctcacactgtgatttaaaaaaaatcagtatcttccatttcctggagagtctttccaggaacctgtggcagggtcggagatcagtcgtctgtcttccgggctagcctacagaaagtccagttgtgctccactgtgttttcattggcccgctcactcatgtgatgcacccgggtgttgcggatcgtgaaaccttgttttgtaatgtattccatcaggtggaccctaagagaaacttcctggtgataatcacagggtccaaaagtaaaggaaacctggcagtctctggtgtccatcatgtgcttattccacttggtaaaataatttgagatgccttctagtaaggaatggaccttagtggtgat

SEQ ID NO: 344446 - DNA, 1000 bp, Homo Sapiens
tttttttttttttttttttttttttttttttttttttttttttttttttttttttttttttttttttttttttttttcagaaaaacaagtcttttattgactaacttcactagtggccaatgaagttttttaataacaaaaacgtaatatatggtagaaagtattgactttattaacctcacttacgatactgaatacaaagtaaaattaggtggtgacccttaattttcagtctatttcaaagcatggtccctcagatttaagaattaaggcatacatatgtcaaaaaaggaaggcgaatcaaacaaccaaatccaaaaagaccccagtgatttatgtattatgaagtttgagctacagcccttatgatattccttttagtactttcttctacgttttcattaattccttcagtaactggatttttaaccaaaccctataatccatcataattcttccaattatgagttgaaaagaaacataggcagatatgtataccaagtaccttacgaaattcaccacatacatggtgaacttcacatataaactttgaaaatcaaaaggactatgatattcttgaaatccaaaggctagataagatctaccttccaatcatttctgcattttaagatatggtttcatctagtgatgttaataaagaaacacattacatatttaaacaccagtaagatatgacattcaacagaacagccaataagattttgcattttaaaaccaaaaagaatatatcttgaacaccttaaattataaaattcagttgtaagcaggaactgttactatgtaacgaatactgttcatatcaaaagtgctggtgacaaagaattcagtatgccttcctacaaaatctgttcacatacatgtatctatctctatcacctgtaataagattttaaatgttttaaggtgcttaaagtttgcactacaggactaattcaatgagattcatctgctacctcttcatagcaacttcaattggaat

SEQ ID NO: 344447 - DNA, 1000 bp, Homo Sapiens; identical to SEQ ID NO: 160902

SEQ ID NO: 344448 - DNA, 1000 bp, Homo Sapiens; identical to SEQ ID NO: 160903

SEQ ID NO: 344449 - DNA, 1000 bp, Homo Sapiens
ttttttttttttttttttttttttttttttttttttttttttttttttttttttttttttttttttttttttttttttttttttttttttttttttgaggtattttaaagagctttttttcttaaaaaaaaataatataaagttataaaaagcggcagcagcctggggcccggatctggaggggaggaggtgctggcggctccgttgcagtgggcaggcactttctcgttaatgggcttttgacttcagtgtagagcacttctcctcaaaggccagggccgggcctggcttcttgcggcgcacagagcaggccacatcagcaggggcaccagcctgacagtgcttggccttcactggccggcaataagtggccaggtttttccgcttcttggccacctcctcctcagagaggcagttggttggcagggccttggctgggtgtccagctgctccccggttctccagctgagaagccttgactggtgtggggagctgatgaggggagccacgacagtccaggggccctgcccgcttcactcttggccccattgtcccattaagccccatgctcagggctgttttagttttggccgagaggcccctacagccagagggtttcccttttccagtgggctccaggatgcaggtccgtttaagagtggtagggccaggggataacttccgctttcgagaaggggcctccacctccaccccgtccttgcctttggatgacttgctggccttggaaggcggcagcttgctgaaggacggggatggcgtgttggcaggcagtggtgaggtgatagcctggctcccccatgcactctgcctggctacaggcagccgccacgctgggggagcctgcagggtagctggggacaaggttgtccttggtggggggcatggaggctgggcaggcaggtctcagggttggacctggaaggcgggggcaggtgcctgtagaggatgggctcaggggagcagataacggggagttgac

SEQ ID NO: 344450 - DNA, 1000 bp, Homo Sapiens; identical to SEQ ID NO: 160904

SEQ ID NO: 344451 - DNA, 1000 bp, Homo Sapiens; identical to SEQ ID NO: 160905

SEQ ID NO: 344452 - DNA, 1000 bp, Homo Sapiens
ttttttttttttttttgcattatttaagtaaaaagctttattttttttccctcagtgtctgaatcttctttattgtttaccaggattcatgattccttttgtaacttgttctcagtcatttattcagttgagtaattacactttgtcagacaaatatctaaagttttattatgtaacttgcagattttcaggacgagtgaaggaggaaaatggcagaagagttcaggaaagacaaaaatgcaagactgtgtctaagtttatgcctctcttgagtttgatgatccaattttaatttaatcatttgagtatctcttagggattcttcctccacagtggaggaaagtgggctctactgaattcattggaacaccgtcctttaaggagaaagaaactttgaacaatagacgtctttttcaacaactactgccaatgttttgaaagttgtcatttgttttcagctagataacaaaggctgaagagttgccttctttccaattgatccgatggtttactggcgcttttaaaacacattacataaatctttagaaatcttttgtgaaggtaaattcagtatttttaagcagtgatcctttgctctcatgattcatggcatggagacagcacccagctttcctgaatcaaggtgaacgttgatattcagttttcaaggtaacacaccatataaggcctccatcgtcctgaggagacctgatatattgccttttcctgacaaaaagtctcacttgcagatgtacctcaattagtgcaaactttttttttctttctattttttgggggggtggaggatggggtcttgctctgttgcccaggctggagtgcagtggtgtgatcaaagctcactgcagccttgacctcctgggctcaaatgattctcctgcctcagcctcccaagtagctgagaccacaggcatgtgccaccatgcctggctaattttttaaaaatcttttatgttttgtagagatgggggtcgccctgtgt

SEQ ID NO: 344453 - DNA, 1000 bp, Homo Sapiens
accagtcatgtaatgttttattttcttcattccttagtttaaaaaaaattaacaaaaaagaatagccaggcatggtagcttgtgcctatagttccagctacttgggaggctgaggtgggagaatcacttaagccaaggagtttcaggctgcagtgagttacaatgatgccactacattccaggctgggtgacagagcgagactccatctctgatcctgggggttatgcgattctgacatttatcttatggtcactggagtggcttctggaagtctttgatgcggttcatccacctaacacaattttagataatcatgtttttcagaggagtagaggtaagatcaaagagccaagacccagtcattctcagagatttcttagtattgaggatacccaagtttcactttggatgcactcccaggacatttgtaaacgggataagatttctcaggctcttcaaataacagggttctgcttggatcaggaacacctgtaatcccagcactttgggaggcggaggcaggaggatcacctgaggttgggagttcaagaccagcctggccaacatggagaaaccccatctctactaaaaatacagaattagccggggtgatggcacatgcctgtaatcccagctactgaggaggctgaggtaggagcatcgcttgaaccctggaggtagaggttgtggtgagccaagatcgtgccgttgcactgcagtctgctttgttaattcttgcagtaaatactccttcaggtggtaaagtcaagcagttcacctggagagggctgctttgctcctcacagagcttcaaccaggccaaagttcttaatctgcctccccgaagcgctgcaccagcctctcaaaaggttccttctgtaggttaattgcaggttggagctcccagaatagcattttcttttaaggatgatcgctcatccaccatcccggaacatttctcgagctactcattagagtttaatttcctcgagccaagtc

SEQ ID NO: 344454 - DNA, 1000 bp, Homo Sapiens; identical to SEQ ID NO: 160906

SEQ ID NO: 344455 - DNA, 1000 bp, Homo Sapiens
ttttttttttttttttttttttttttttttttttttttttttttttttttttttttttttttttttttttttttttttttttttttttttaaggcattttaaatgtttatttattgtatctatttgggaaacaaaacattaaagatacatttatttatcaaaaatgagtcttatgagcaggcatttaaaatgtttaacattggactaatacagtaatagtattaacttgtgaaattttgaagacacaattttgaagacacaattccactttaacataaaatacaaaacacctttataaaatgtattttgtccagtcaaatgtgatcctccctcttgagcccaggagttccagataagcctgggcaatatagcaagatctccatctcaaacaaaatgtgattttaaagaagttatgtgtatattattcctcttcaagccatgggaaccacttttaaacacttttttttataaataagaggcattttgaactgtgccatccaacacagtagccactatccacttgtggctatttcactttaaattctaattagctaaaatgagagaaaatgttaaatttacttcctctgtctaattaattacatcttaaatgctcaatagccatacgagcctattggacattgcaaatttatatttttaatgtggtatatttatttacatttccatcatggtggaaagttctatcagacaagactgctctaaataacttctaaaaaccactaatgtaataaagttagcaatagaagtcttgaaatttttttctaaatgtaaagttttgtttctgtggttttgcttctagtccagggaatatttcagataccacaaaatataaaccaaaattcaaaatatgcatatacaatttgaaatttcttcttgcctagggtcgaactgtacttttcttttaaaaaaattttatttttaattgacaaataataactgcatgtatttatggggtatgatgtggtattttgatctatgttta

SEQ ID NO: 344456 - DNA, 1000 bp, Homo Sapiens
tttttttttttttttttttttttttcctgttttctcatcttctttataggactatgaggcttaaatgagacagtacacaactgcctggcacaatgtctggcaaatattaagtgctagataaatggcagctcttgccccttcacactctgccaacccaagattaagggtcccagggtccagctcctggtttcctgcataggaagtccagcagtttggaatttccctggtcgccagcatcattaatataacgaatacttcctttgctctttcagacaaagatgataagtcagttgtagcatccatcaccgagagtctgcagaagaaatcaaagcacctcatgtgagctccagccaagcccaggcatcaggaggctgttatgatgtggagtttcttggcctgtcctctgcatggcccagtgtaggaagcccagtttgctctctggtgtttgttaatgtaaacattcagtgaagggatggggcaataaacgtaactcatcctttcccgttcctgagggtgatatacagcagggaccaaggggatggatgtgattgcatgatagggaatcccagacctggacccctgaaagcctagtccaaacccacccacaaggcagtgaccagccttcttgtgactgggcctggtcttcccttcccctcctccacatctacatggcactttccccctcccctcagagcttgggggcaagtcctgctgacttcatcctgctctccatcctgctccctcccatttcttcacactaggtaggtctgtgttcagagttctgaagtttgaaaggatcaagatcttccctctttagtgtccagggttcagagctagaagggattgatcatccagctcactaagtttcaaacttacgtttttcagtggaatccttccaaaacaaaacaaaacaaaaaaaaacacaacctaagaagctactggacttgaaataaggataggaggtctttgagcctgccttctctcattattccttcactac

SEQ ID NO: 344457 - DNA, 1000 bp, Homo Sapiens
ttttttttttttttttcttttaagtatttttccatttatttttaaaatgcaaattacactagtaagtcaaaaaaatcattctgttaaaaatacattcagaattaacaaatgcaaaaaaaaaggacacatcaggatcataacccttgccttctgaatattaagtttataacaaaagctcagcctagaaaaatagcattcttcaccggattttgaggaggatacagctgtacaactgtagatgttttcccagatataatcacactactgtgcttactgatcccataaatgacctgtccactgattactttttagtagtcaactactgttttttaaaattttggtggtgatgatagttgtgatttggtgaaaacttggctgtaacttaaagcaggaatatgagggtttattttctgtacccatatacatgtactataaggtgaaatcgcatcacagcatgaatgtacagtgaaacctcatttttaatagtcacattaaaagtcacattagaatagtttctggcatgtatagtatttatattttaggactcaaaggacaatacattggtaaatatttttctcatacattaaacatgcatgtcactataaaagcgtcatatgaggtttcactgacatgtttgcaattgtttattttatacatgtatgtatggacaaacatacaacccactgaggaaattcaagcatgagtgctggaatctttttttatagtttatgttccaatgataactctttgttcctctatcattttcaaatgtatatgtgtgtgtatattacagacatccatgcaaacacagtaatggaactggtgtatgtagatccgaatgggctaaggtctaaagtagtttaatccaataactgaaacttcatagaaatcaaagaaaaaacttgctccatgccaatttataacttttgaatttcactgcactaaagaatggtgtgttagttttaaaaaattgagtttaatgtctcaggtgtatccaaga

SEQ ID NO: 344458 - DNA, 1000 bp, Homo Sapiens
gagacagagtctcgctctgttggccggatctcagctcactttgtcagctcggcctcctgggtttatgccattctcctgcctcagcctcccaagtagctgggactacaggcgcccaccaccacgcccggctaattttttgtatttttagtagagatggggttttaccgtgttagccaggatggtcttgatctcctggcctcgtgatccgcccgccttggcctcccaaagtgctgggattacaggcgtgagccaccgtccccggccgctgtcttgtacttttatacaactgaaagtgcagcacgtttacaccagcaccataaacacttaaataatgtgctgcactatggtgttactactgctactaaattgcggttgatagaaatgttttaggtgttatataatcttatggggctaccaacctatatggcccattgctgactgaaacatgattatgtggtacctgactatacatgaatcatcttgtatctcgctttctatattacttacattgacaggatttctctcttcagtgggaattttcacaactttgaaagcatctgttagaattgaaaactttctcctatttctcacatttatagagtttctatcgattgtgcattctcatatgtttttttaaggatgtggacacactgaaggcttttccacattgcttacattcaagaggtttctcataattgtgaattcttgtatgtctttgaaaggaactgtgaagactaaaggccttcccacattctttacatttatagggtttctctccagtatgcattctcatgtgtccttgaaagcttgtgggataaataaaggccttcccgcattccttacattcataaggtttctccccagtgtgagttcttttatgtatccgaatgtaactagaacaactaaaggcttttccacattgtttacattcatagggtttctctccagtgtgagttctttcatgtgttcgtaacgcactaggaaaaatgaacaccttccc

SEQ ID NO: 344459 - DNA, 1000 bp, Homo Sapiens
tttttttttttttttttttgaaaggtcaaatgtgctttaatgcggggtggctcccaggtcctccctgggccccgggggagtggcgctggctgggcctgccggctgcctggccttccttcccggctttcccttcttggccgtcgaggcctttctcttgccagacagaatgggggccggggtgttggtggcagggggccccgggtggggcggctgctcctcgtcgagcgccttgaagttgaagaagtagtcaacgttggacacggtgtccaggatctcaggcacgctgtagtcaaaggacagcagctcctcgggcaggcacagcgagcggatgtcatcggctgagttcccaccactgctgtcaggcagggccggcccagggacctcgcacagggtaccctcaggctcagaggcgcctggcaggcagtcgaagagcttcatggcgtcctccagcagaaccttgtcaggcagtgccaaagctctggccgtcttgggggccttggccttgcctgctcccagcagggccccctccttgacctcggccaccttgagctcgctgaggcccggtgggtacaggggcaccccaggtcgggccccactgccctgcagctccttgacggggaaggccaggggttcgggcccagggaagtggccgaggtgaccctggaggtggctgtaggcgtctgggggcagtgtgggctctgcaggcagcgtgatgagtacagggggcggcttgttctccttggggggtgggggtggcagcggggccgggccttcctctaggggcggtaggggcagctccacgaaggcggcgggccctgcgtcccccacaaaacccagagcctctggcccggggccctcaggcgggaagtagggcaagagaaactggggccccccgggtgcctgctggtagtgggggtatggaggcagccccggggccttgaggtagggctgaggctccaggaggtagctgcctggggcggaggggacccccgctggcccc

SEQ ID NO: 344460 - DNA, 1000 bp, Homo Sapiens
ttttttttttttttgcatatctcaaatttaagtttatttaaaaattacaaaaatgtctccactcaagttgtccttgaaaaaaatttagaagcagcaacaatcatcttggttagttacaagcagtctagtgcaatttataaaatcgagcaaaatttggatgtgtgtcttatccctctgtagacacgggacccttttttgaggtctctttctttagggtctggtagcatcatgactgggacactttccaaagccttcttcctttggactctatgtaaaataattctatagacccctgtgattgagctgcgagcatctctcccttggttatttcgaatatgctcttctgtaatgcccaaatgttctaaagtgcttttgacctcattttcttcttccttgagagtgctggtttccgacaaatgtttgggatccagttggaaaggttccaaaggtgtagggtatggcaccccttgcatccattcatcattcatgatgcagtcgattccgtacctctccgtggggatctgctgaaggactcctcggatgagtcggtggcagggctctgacacgtgcggcggtacactgtatgtgccctcgaggatgctcttttttagtttggccacggtttctgcccgaaatggcatggtgccagtcaccatgaagtacaaaagcacccccaaggcccagatatccacgtaaatgccgatgtagtgctcgtcccggaagagttcaggcgcagcgtagggaggagacccacagaaagtgttcagcatttcaccttttttgcttactgtgctgaatccaaaatcgcccaccttcacacaagtattactggtatagaatacattttctgctttcagatctctatgaataatttggttttcatgcatgtgcttcacggcagacacaatctgggagaagatgagcttgctttctggttcagagagcttcccctcagtgctaatttttccgaagagctccccaccccctgcatactccatca

SEQ ID NO: 344461 - DNA, 1000 bp, Homo Sapiens
ttttttttttttttttttttttttttttaagtcatattcataaattttattcatttttaggaaaggacatatctaaaattactaatcagagaattcaccctatagtcctcatacaaaagctggattttgtcaaggagaaaaagactctttcttgaaaaagattacagaattctttgtcctaaaaatgtagcacctcatacatagaatgtatagcataaaataatgtggctttcaacacatgatcattcataatttgtgaagtgtcttccctatgcatacatgaaaagtccatattttgagtattagttaaataaaaacttgagatcttaaaatgtctcagcttccctatttctaaactaggtttatttcatagaacaaactatttctcccatttttaaataatacacattgtaattgttatttcttaaagcagtaaaacagttattagttttgtttataatgcttgctttttcttctgatttgtaattcttcaaaaaaactaaactaaatgtcccagacccaacagataacacaatataaacattgagggcatgagctgaatggatccatctcagagtagtacaaactgtgttgtaactttctgtctctattctgatactaattgctttaccatctacctttatctatgcaatttcacatttaatacacaaccagcatcctattagattcttcttagagtaggaccctgagaataagtccattaaggagtcacatgttatttataatacctgtttgaaggtttaaagtgtgtctaatttttaagaaggcaacaaaatttttctacaaatgaaactcatcaccatgtaaagaagagtatatacttggcattgaagtgcccacctagtttcaatatctgcacctatacattttttaaatggacgaaaatctcctgattttgaaaaatgttgaaatgctattgacagagttcaagtccaggcataacctatgaagtgatctcactacggtaagcagagctggt

SEQ ID NO: 344462 - DNA, 1000 bp, Homo Sapiens
ttttttttttttttttgattttttcaagtataaattattttatgtattataaggtctgaaggctggactttatcacattattcacatttgtagggtttctctccagtatgcatactcttatgattagcaagacttgaggaccacttaaaagctttgtcacattcttcacatttgtagggttcctctccagtatgaatcctcttatgagtattaagagttgaggagaaggcaaaggctttcccacattctttacatttgtagggtttctctccagtatgaattatcttatgtttcttaagggttgaggagcagttaaaggctttgccacatttttcacatgtgtagggtttctctccagtatgaattctcttgtggtaagtgagggatgaggataagctaaaggctttgccacattcttcacatgtgtatggtttctctccagtatgaattctcttgtggttagcaagtgttgaggagcggctaaaggcttggccacattcttcacatgtgtagggtttttctccagtatgaattctcctatgtttagtaagggttgaggaccaggtaaaagctttgccacattcctcacatctgtagggtttctctccagtatgaattcttttatgtttagaaagggttgaagagcagttgaagggtttgccgcattcttcacattggtaggaattctccctagtatgaattatctgatgttgatgtagttgtgaaaccatgcaaaatgatttgccatattttttacatttgaaatgtttctttccagtatgtcttgtcttatgtctattggaatttgaaaatttgccgaagactttgacacatttatgagtctgaaatattttgttttgggtagttgacaaacattggttaacttcattacaacctcctttttgcacctcacactcacccatgcttttacatgtttttacttgtaaattgtcatgtccactttttccatatcttcttggtattactttttggagtgaat

SEQ ID NO: 344463 - DNA, 1000 bp, Homo Sapiens
ttttttttttttttttgagttgatggattttattatggtgaatcacattgttcccctccacagtcttaggtgagatgtccacctctgcaccatgtgtagtactgggctttgaggttattactgcagagtcaatccagctaggtagagaccctctggcttccatcccattcacgcatgtggcctcatcctgcagagctgagataactgactcccaatgctgagtagcagagagtcagcctttgagtagcagagagatactgtcaatgcaacagccttctcagtatctctctgctcctgtagccaccacattcatactgccctctagggagaggccagtagcacttactgatatgcttgaagtacccttttaggacaagaatgtgcatgcagcccttgctataacaagattaagacatggaagcacccactaatagccatgctggctatacttcctcctggacctctgaaggctgcttttgccagtgctgtgtttctctcctgagtctgcagacttggttgcagccacatccatggtacctgtggtggtgcttactgtcatcactactgctgttgctaccctgccccttcatcaggcactataggttttatgactgcaggggtgtgtgaactcttgaacgtagtatatgtgggaggtatgttggattcatatctctattgtataatcacaataggtggacccaaacatttcagcattcatgtgaagtctactgattctgaattgctccttctcttcacaaaacttcatggcatatcccactgggctcctctgcacttcctccaacacagatgagtccaatgtgttcccagctaggatagccctggtatcactgtaagcctccactggtggtctcaggatgtaaacaaggttttcccagtgaacaaaaaggtcttcacttgcatccgatggaggacacagctgaagataaaaagagcggcccgtggcaagcttcaggtggagctgtttttttacgctgttgtg

SEQ ID NO: 344464 - DNA, 1000 bp, Homo Sapiens
ttttttttttttttttgcttttaaaagtccttttaatacagcatgaagaggctatatttctataggcgagccgtatacagattctccaggaataaggcacacaacggaatgccatcccaagggctgcacttcggagacgtcggagccttctccacgcaccttccgagctgggcccacgggttctgttttgtctttttagctggactcacacgtatggacagacacagacacggacggggtcaccgcatgggggcggaggaggtcggacggcaaggttggcaacagagaaggataagcccgctgccacagcccccaggggaccgcttggccatctcgctgaaggctggaacacccccatttcagggttagtcgttggactgagctacaatgtagtgaggttggattaaatattcgtttagagtagattcaagtctattagatgctggagggctggtgtaagggctccggttgacatttccaagttcaaggagcatggcctggaggaggcgtggctcagatggcaaagctcccgagcggcgaggccaggctttgccccacttcttcttccctcctggggccctgctgattgagagccctcccaccaagccaagacgctggtggaccacagaggggctggttagtcaaataagctgcttcttccccttgcccactccctgtccctctacaaaattaataaaaccgtaataacaagataagaagaagaaggtgcaagagaatggattacaatgctgtttgttatcctcagtggaagaggcacaaaggggtcaccattccctttttcactatgtatcgaattatagcttcccttaaaaaaggcaatactttccaaaatacacatatgtataaatacaggacaagaacatattaataagtctaaacacttgaataatatgctgtctacttaatactgatattttcatccagggaaaacaacacagaaaaacaacaatatggcttaaagaattgcaaagattttttt

SEQ ID NO: 344465 - DNA, 1000 bp, Homo Sapiens; identical to SEQ ID NO: 160908

SEQ ID NO: 344466 - DNA, 1000 bp, Homo Sapiens
tttttttttttttttttttttttttttttttttttttttttttttttttttttttttttttttttttttttttttttttttttttttacagaaaggatgacttttatttccatcctgaatgattcacaccattatttaaacatctgaaaaatcctgaaataatttaaactgaaggcacagaacaaaccaaaatatttaactatcagaactaaaaatgagaaaatccaaatagttctatagtaacaataaattatgaacaagtttccgtcaccaaatatcactctgaccaaaaatgactgtcttttgtcataaaagctacagcttaagctgattccaagatttctataaaaatgagagtgaagaaatttcttctttcaaaatactcattatgccaccaggttcaatgtaagtattttgtatataacaaagtagcagtcaggatatttgttgatggatggctactccccaagaaatgacacattcttacaaactttaaaaaaatagcaaagttggttacaaaattctatttggggagcagggaaaaaacttgttccatgtcaattagaatatcaaagcatttcaaaatcaaactgcttccaaagccaatcatcacacaacagtaatatactgtatgggccattccactgtatcttgttatatgttgatcatacagtgtaactaaggggttgaacaagtcagtagcaatgattgttgctgtatcttattccaaatagatatgttttttaaaaatcattataaaactaactgaaataatcagtgacatgctacagatacaataaaccccagcaatacaattgctaagtttcaaaataaagtggtcatgcttcataatatattgtactgtagtattctgaaatacattctctgattatcaataccatttattacagaggtcacttgtaaatttgctcagattctgaactaggtttctaaatgaaatttttttcaagtatgtataatattaataaggtaaagatat

SEQ ID NO: 344467 - DNA, 1000 bp, Homo Sapiens
gagacggagtctcgctctgtcgcccaggctggagtgcagtggcgtgatctcagctcactgcaacctctgcctcctgggttcccgccattctcctgcctcagcctaccaagtagctgggactacaggcgcccgccaccaggcccggctattttttttgtacttttagtagagacggggtttcaccgtgttagccaggatggtctccatctcctgacctcatgatccgcctgcctcgtcctcccaaagtgctgggattacaggcgtgagccaccgcgcctggccggctgtcaatcaagtgagacagggctccaaaaagatgtgcacaagtcctggcatggagtaaggaccaaggaatgaaactggggagattattaaatgccccattttcttgccaaaccctgacgaggcatgtccctgaatatgcacagggaaatgaggacagaggggacccaggctctagatacacacatgtggcccagctgttagcagaggcccaaaccacgcatgagcagggatctgggctgcctccccctgctctgtgtccctgacaacctccttgggcctcaggctactctctgcagaacagacagcagcagactctgctctaggaggagctccagggggcacacagtgggtctctggggacaaagtcctgggttaggcaccaaggggagaggtggagggggataggaagacccccctccaggcacacccaggggccagcaagacccaagtcattctgcaaagcagctccagcaggtctgcctgccggagtgaagtggggctcctctctcttcccctccttctccccctcctctcagccaagcgggaattgcagggtagatgcccgaagtttggcagatgctctgaagggaggcgagcaggagaccccgggccaagtgctgtccccgagctaagcaaacgcacagtctgggcacggctgtccccgtggtggtgatttactatccacctgtccatgctctgagtcctgcagccaaca

SEQ ID NO: 344468 - DNA, 1000 bp, Homo Sapiens
ccaaatgacacaggcctttttaatagcaacgaaggtaaaataaagcaggacagcacgtcctgaggatgaagtgttttgcagactcttctcatcgatctggtcaagaagggagaaaggctttggcctccctgatcttctgcctcacgcctctgcaggacaaagtgaggctagcgtggtggcgcttcagggattccaggcgccggtgaagcagttcggtcttgtccaccttttcttccaagtcccgaagaagtgagtccttgcctagaaggccgcacttctgattcagtctgatgttgtccgtccgcagcccctctcgggcttgcttcgtcttggtcaggatgtctcttcctagggcggcctgggcctcgatttctgccagctgtgtctttttgcacgcgttctccatgtccatgaagtgcagcttttccttcacgtgggttattacttgcacactgttggtcaccttgctgcgaagttttaaaagttcctcatttcgttcctcaattttctcattgaaggtttggttctcaatcttcagctgttcaaagtcaataagaagcagaccctgggtcaggtcctcctgggtcctcatcctggtttcaaaatgcaccaggctctgcttcagctgaatgttctccagccgcacggcgctcatctccttctcctttttatcctccaacgcctggatctgctccacctctcgcagagcagcctggcgcccgcccctcatccgacagctgcccatggcctgcatcaccacctgcttcttgagtgcctggaagcgtcgccactccttctccaccctggtgagcttctcctggcactgccgcttcaactggcccagctcctggtggtaccactgcaggtcgtctgcctgctgcttcttcagctcctccagcatgcccagatggcgcaggtacgcttgctctttctcgggggcctcggcctctgcgccccggtcagccacctcagcggcctccaggcccttctttctgcgcag

SEQ ID NO: 344469 - DNA, 1000 bp, Homo Sapiens
tttttttttttttttttttttttttttttttcaaattgacacattttattaaatataatgtgcaaaatataatgaagtaacttctatttaaaaaatggtacaaggcaggtattatttaaaatgctttagtaactcattttccataaaaagaaatctggcattataaaaatacataaaataatcatgatttatatcattaatttacgtaagatacttttttgcataaaacaaagttaaaaaatagtttaaaaaggtattcttatatgagcatcattcccagtataaaaattttcataactttttgtaattttggttcatctgtataaataaagcatttttatccttttaaaattcataactccatttaaaaaacataagattctctctcttttaaataaaagttcacttgaggtagtatgttaagcttttcctttggtctcattcagtctatgtgtccaagtcataagactgaaaatttggagtcctgtagttttctaaagtctgtttaaaggtacaaatgtgattttcttcctgaaaatctgtcctttctttcccatcttcctctgacccagagtccaagtctggggaagaatgagctttcaaataaaaggctcttggctgacaatctgatggctgtccaaagcttgaataggcatctaggtgaggtctcctgagagcttttccaaaggtacccatgaaagaattactcgaggcaaccgacgctggctctggatttgcactaaaatctaaagaggacttgtttagacacagatttttcattccaggtccttcattgtgagagtaactagtgttaagtagcttcctcacatgtgaaggccacgatatattactgaagctccgttcgcaggattcttctgaaggatgagaacatgggtagcactcctttttctttatgtaactgggctcatagtggtccattaaaactgttcttgggtcaggactgcaacctgtatgatatgtttcaaaaggatctgagcca

SEQ ID NO: 344470 - DNA, 1000 bp, Homo Sapiens
tttttttttttttttgtatgcagtatattttactcccatgaaataaaacacatttgtttcatatttgctgaaaagtaaaacaataatattgtacgaaatgttatacacagggtaggttgtacatagcagtttcagaaacatcattgcatccaccagagaaactattctaaaactgatattcacacattttttataataataataatatgttagaaacatacagtgtggcatttagtatatacactcccttgctcgcaagcgaaaaatcctaatcgcttctgtataacatgctttattttaaagcctaacctttaaaaacactgttgtgatattactaacaactgcttttataaaattaatttgacatttcgatatatatacatcctttcagtcatttaaatgttaacaatgctaaacttaaaaaataacaagcttatagtaatgttaaaatgtcatatccagtcaaacatttgtttgtgtatgtgtccttgcaactgttagaaatacttgtagtgaaagatgtcagacactgaggacatccctttgaaatcaaaggagctctctctttgattcagtggtttccttttctctatatagcttctctttctctccctttctttagtgcccacgaccttctagcataattcccagtctttcaagggcggagttgccccatccggcaaggtcctaggatcccggcgctgtgggtgcggctcacacgggccggtccactgcatactggcaagcactcaggttggaggccgggttctgcacgctggcgtagccgaagctggagtgctgctttgctttcagtctcaggctggccaggctcgagttacacgtgtccctataaacatacggaggagtcggcggcgcgtaaggacaggcaggcgtcggcaccgcggaattcagcgacgggctactcaggttgttcaagttattcaggctgttgagactggagcccgggacgcctgtcactgctgagggcaccatgctggac

SEQ ID NO: 344471 - DNA, 1000 bp, Homo Sapiens
tttttttttttttttggcacaccagacttttatttcacagcactgatgatagctcactccttttaaaaagcagcagccaagaaaaaggaagtagtcctcccttggggggcgtgcagctcatcttggtatgcgggcccctgctcgggtcagttcgtgggaccctttctgccagtcccttacccggctgcgcaggtctgatatgatggctgtgaggtcgatgttcttccgctcatagccctgcagttggtcttggcactcagccagcttcgcctccgtgatcttcaggatgtcagggagctgctgcaggtcagccagctgagactggaactgccttcgtgccgcctcaatctctttgttcatctcatctttaaggatcttgttctctttgtcacagcgttctagctgggcagctacttcatcagcctccaatctggtcttcatcacctgactcttatagttgtcaatcatcccctcatagttcttcactgaggccttcagctgctggacctcgaggtgtgcctggttgagtttgtcctccattggagcaaagctggccttcagcctctcattctccagcttgaatgcggaatactcagcagtctgacggtgtagtctctccaccaggctatcccggtcttcccgcatcttctcctccagggtttgttgttggtttacaagatctgttacccggtcattcaggacaataatttccagctcaaggtctcccttttcttttacaacttggttgtagcggctcctccaggattccagagtggataaagcttcagcgacataaagatccttgtcagcgagttgcacgtgtagctgctcagcatactcctcgctcttctcggctcgctccttctgggctcggatggccttcttcaagctctctttgtctcggtctcccttctgcttcaactccttcagctgctccatgatggcctccacttctgccttatgctgattcccgctgcgctccagattcttaatctgcatg

SEQ ID NO: 344472 - DNA, 1000 bp, Homo Sapiens
ctccttcttccttcctttgccattcttccttctctcttccttcttttctgtcttgcttctcttcttatttcttttctttcttccttctcttttttggtagctaaaaatatatggattttctccatgtcctctctttctaaaagagacctaattcttatattcccaacctcaagacttctatcatctcccactggccacagatcatcatcacgttcagcccatctcaaggggcacttgccctcccctctcagccctcacctgacaccatctctggacccacactgagctctgtcaccactggacccctcaccaggcaggctcccatctcctctgtgccttgccacatgctcttccctactgtaagttctggcccaatgccactacctctgagaagccttccagaaccctcctttcccaccagctaagttctccagccctccctctgtacccccacagcactgagtacacacttccagggcagccccgcttcccacactgcagagtaatgacctgtctcccccagagcctgacaaagcacagggcctggcacacagtaggtgttcagtaaatgtttggagagtgacaggcaagtctgctcatagttctggaccacagcctgcagctgccacatgccaccctcccagaggctccaggactccgctcctctggacccctgacagatctcttcttctgcacagtgatgtcgtggccaggctgagcgaagccactgtgtgtcctagccgcttctttctcctgatgcagattccctaggaagttgcacgattgtgttccttgggacctctgattcctcctttctagacagtcaacccccaaatgtgtctggctcctgctctttcactccgcatttgtggaatgaggtgtgaggaggcaggagcaagcctggagttcctgccaccttcctttgaccaggccagaacttaggccacagcagagcaaaggcagctggcctggggttggactaactttttgggggctaata

SEQ ID NO: 344473 - DNA, 1000 bp, Homo Sapiens
ttttttttttttttttttttttttttttttttttttttttttttttttttttttttttttttttttttttttttttttttttttttttttttttttttttttttttttttttactattaagtcacatctttattgaaaatactacaattatgtggcctacaaaaataacagggcattcgttaactttgttcacctacccacttcatttaacaagcatctaacgaattacttgatgctgtgctgtgcacaatttctatctggcaggaaagaactttggaaaaactgttatgaataccttactttagaaaaagggacatgcataataactgttgatgacaggggcccatgtgatgtgtacaggagccaggccagtgtgaggcacatgtgacctgggtggcagaggcgccatgggcggcccgggtggcagaggcgccatgggcggcccgggtggcagaggcgccatgggcggcccgggtggcagaggcgccatgggcggcccgggtggcacacgcgccatgggcggcccgggtggcacacgcgccatgggcggcccgggtggcacaggcgccatgggcggcccggttggcacaggcgccatgggcggccagggtggcacaggcgccatgggcggccagggtggcacaggcgccatgcgtggcccgggtggcacaggcgccatgcgtgagccgggtggcacaggcgccatgggtggcataggtgctatgggtggcctgggtggcatagggaccatgggtggcctgggtggcataggtggcacaggcagcacaggtggtctaggtagttgtggcaccagatgaacacacaaagcaggatccagagcaggagcagcataataggccccacccaagaacatgtccaaagggtgggccaggtcagcagtagcagtgtttctcaacattagcaccctctgatttcgtttccacttggctcttctgttctgaaaccaaacctgcactctgtcttcagtcaaattcaggcg

SEQ ID NO: 344474 - DNA, 1000 bp, Homo Sapiens
tttttttttttttttttttttttttttttttttttttttttttttttttttttttttttttttttttttttttttttttttttttttttttttgataaatgtaatttttttttttttaaagaaaacacagaacaagtcctaaatcagacaaattgcacaaaagagagagaagaaaattgtaagcttcctgggagaggaagagatgtccatgagaaaaccaactgggatgagcctacaaaagcatgtccctctctctcctaatttacttagtctcaactgagcccaacaggagctggcctctgtcccagctgcaggatgctcccaaggcagtgtccaagagcctggaaggcagcttttatcagcaggttcagtacagcaggaaaagccatcctggcaaagagtccagtggtcctattagcgtaggctgctgctgctgctggcctgggagctgcccatacctgggtggtctggactatgtcgattctgggggagaaagaagcagggtaagaacaactaggaactagccttggctttgatcaggctgtacaggagaaacctgcaacctgccttgggttttcaatcttgggtccaacttgaggcaaagaactctagggtatttaggacaggggtgagatctggggaaactcactgggttgtggcaataggcctctactctaccttctttttcttcttctctttcttcttccttttccgttcaggatcctcttcttttttctttttcttcttcttgtgatctgaatcagatggtgtttctgtaggagacattaggtacctatcacctgtaaagctcaaaatcctctactgttatgaaccactgaagactacaggaaaatcccaagtcggggcaactgcttttgtccaaatggccagaaaggatacagaggtgctgctagagtccctgtcccaagtcccaagagaccacagtacattggtttcttcttcaggggaatttaggagtccagagctccatacggaactt

SEQ ID NO: 344475 - DNA, 1000 bp, Homo Sapiens; identical to SEQ ID NO: 160909

SEQ ID NO: 344476 - DNA, 1000 bp, Homo Sapiens
tcatagtaaatagacatctttaatgttcgtctcttcttcctcatcaccttcagctttgcccacgcacagaccctttcccctgtcccaacactaaagtgaccaaatcacaaccagtgagactgagaaaaaaattcgaggtaatggagacttcatgtacatttcttccccttgtggtgattcctagttcttctccatggagacagttggggtctctccttgctttttacatccagaggatacagggacagaattcgtgggagagaaggcagagaagggtttcttctttcatcataaaatgttccttgtaaaaaatatgatatatatgcatacatatatatatataatatacccagtgcaattgcaattgttctgccaaatactgagaactgccaccttgggtgatgtatttctggagttttcaacagttgtctaacaacagctgcattttagtaagacttgggcaggtggctccagataagccacttgccactcacattcaggctgaggcttccatgttcacagtccaaaggaaaaaagtgtatctttgcgtctggagtgggcattgtagggaagggatgggcaggaagggatctggaggctgagaggtgaggaagaaggaattgacttctctttacttctctaccacagtcttagatgcaagtacacatacaatttaaaatctgacagtagtagtgctataatcacactacctaacaaaataattcacatcagcataaaaaatattcacaccaaaaagtttcattttctttcccccgttccaagaaagcttatgatatcacatcacctgactcagcaatctcaccacagatatttccagtgattcggccaaaagtcattaaacataactcagtctttggatttgctctttcagcagcaggacttatttttagatgaatttctgtagttgtggtttttggttttcccaacacactgagaagtctgaagtctctgccttcccccatgtcctcatccacggagt

SEQ ID NO: 344477 - DNA, 1000 bp, Homo Sapiens
tttttttttttttttttttttttttttttttttttttttttttttttttttttttttttttgggccacatgggtagaaaaacagcgtctgcctttatttaagtcccgtcccccgccccaggtcccgcccctggtcccaccccgcgtcccggcgcgggagtccccgggggatggaagtagctatccagggctggctgaagggcccgggacacttgctccgctctctcttggagccgcccggaacgcggggcgcgaggctgctgcagggcccccaggaagtctggcagttgggagggcagtgtgaagacgggcacggtgcggaaaagggcgggtacggcgtccgggtggagcagcctgtcgaagcaggcccccacgtagctgccgggcgcccggccctgcaagaagtcgggcagcacgcagctgagcgaggcgcggaaggcgtcgtgcgggccgtgcgccccgggcccggacaccccatcctgtagccactcgctgcacagcgccaccgcaccgggagagaagagcaagaccaccacgccgccctcctgcagggtctggcgccgctgcgcgtgaaaccaagccacgggcccctgcgcgctcagttcacgacggctccacaggtctacggccacgcgcagcggcagctggcacagggccgacgccagggcgcccaccaggcgctcgaaacccgagtcatcggctgagtagaggagcagagccgcgcggcccctggcggccgcccccgagcggacgtcctgtttcaagagcctcagccaccctttcgcgtgatcctttttgagaaggaggatgagggaaagcgcagcggcaaagagtaggcaggccagccacacgagggcccagcgcttgtggatgtatttgtccatggggcaggcccatagcgctcccaagtcatcgtcccatagctgcagacactggcctgactgcaggtcttgtagtaagtactctccaaggcgagctgccctcgtggaggctttgctggg

SEQ ID NO: 344478 - DNA, 1000 bp, Homo Sapiens
tttttttttttttttttttttttttttttttttttttttttttttttttttttttttttttgggccacatgggtagaaaaacagcgtctgcctttatttaagtcccgtcccccgccccaggtcccgcccctggtcccaccccgcgtcccggcgcgggagtccccgggggatggaagtagctatccagggctggctgaagggcccgggacacttgctccgctctctcttggagccgcccggaacgcggggcgcgaggctgctgcagggcccccaggaagtctggcagttgggagggcagtgtgaagacgggcacggtgcggaaaagggcgggtacggcgtccgggtggagcagcctgtcgaagcaggcccccacgtagctgccgggcgcccggccctgcaagaagtcgggcagcacgcagctgagcgaggcgcggaaggcgtcgtgcgggccgtgcgccccgggcccggacaccccatcctgtagccactcgctgcacagcgccaccgcaccgggagagaagagcaagaccaccacgccgccctcctgcagggtctggcgccgctgcgcgtgaaaccaagccacgggcccctgcgcgctcagttcacgacggctccacaggtctacggccacgcgcagcggcagctggcacagggccgacgccagggcgcccaccaggcgctcgaaacccgagtcatcggctgagtagaggagcagagccgcgcggcccctggcggccgcccccgagcggacgtcctgtttcaagagcctcagccaccctttcgcgtgatcctttttgagaaggaggatgagggaaagcgcagcggcaaagagtaggcaggccagccacacgagggcccagcgcttgtggatgtatttgtccatggggcaggcccatagcgctcccaagtcatcgtcccatagcgtggaggctttgctgggtagtgaagtacagccactgggttccaaggcacagagggatctgttgtcctgggggcctcg

SEQ ID NO: 344479 - DNA, 1000 bp, Homo Sapiens; identical to SEQ ID NO: 160910

SEQ ID NO: 344480 - DNA, 675 bp, Homo Sapiens
ttttttttttcattttacaacatgttcattttatttctatcaccatggggcataccctttggggtgtaaaacgtactctacaccctgttggctatttatctggggttagacttctggagacttttcagatagacttgaagtctctggccttgcctgggaattactggctgcccaaggaagcactggagaaggcggtggtctccttgcccttgtggtcctgctgtggcgcattttgattgagttcctggttcggctggtcagagtggctggatagtgttggcccactccattcctcaggtttttttgaagcggtggtcttttagggagagccttttgttcctggaacttccttgacgggtcccttttcccttttgggttgtcttgggaacctctttggtgttgatgggtggttgttggaaaatgggctggaggctcgtggtttcctggacatcttcaccagaccagtgtctctgtacagtctactccagtccacctggtctccccgagcttcccccaggacagtgaaggcaggccagcaggctagaaactgtagtcgccgacattacaagcaaatttgggctgctgtgctctgcttcccaaatcaaccctccacctccatctggatccccatccaggaagaatccagttccacccctgctgtgaacccagggaagt

SEQ ID NO: 344481 - DNA, 1000 bp, Homo Sapiens; identical to SEQ ID NO: 337768

SEQ ID NO: 344482 - DNA, 1000 bp, Homo Sapiens
ctcaaagagaaattttaatgtattaatatatttatctttctaccaatagtcataaagtataattttaattttttttttgcagaagaggcccatgaaagtcacaatgcatccatgccccatgcccagggccacccacatctcgggccacacctgatggaaggttggagtccttctctcagaatagctgggcccagtgtcacaaacactgccccgtgcagggtgctgggacctagagaacatgggtcctaaccaggaaccccagagtcactgcagaccaagttccaagagccctgagctcaccagaacagaggacagccttgggggataagtccctggaaagaagatgagagtgagctgggtcctgaaggatgggccattctaggtgagggaagcctcagtggacacagatgcatgagggagggggtctgcccagtcccggggagggggcggggcctggcctggcacgagaagatcccagtgcacaagtcagaccaggcgacaaaaccccaggatgatctcagctcccagagggccccttggtgtaggcgcttccttcctaccctggggtcaggctgcccaggaggtttagttggcactgagggatggctgtcaaatcgcttgcaggcctggaagggtctttggtgagggtgggggtggcttcgtccagggtggaagcactgtgagccccgttgaccatctggccctgggagggcatgacaagggagagggtcacgctggtcttgctggtgctctgggcgctggagtatggcacagacacagggtacactcgtcctcctgcagctggggctgggctcggtgtgggctggctcatttcgcccagcgggtagccaaagttcctcactagcagggtcatgtcctcgtgccgggggcagaacctggcacgctccccaccactggcgaaggtgtcgctgtggatgcgcttcacccggtccacgacggcctgggccactgcgtccagggaggtctgcttggcaaactc

SEQ ID NO: 344483 - DNA, 1000 bp, Homo Sapiens
ttttgagacagagtcttgctctgtcacccaggctggagtgcagtggcacgatctcagctcactgcaacctccgtctcccgggttcaagcaattctcctgcctcagcctcccgagtagccgggactacaggtgtgtgccaccacgcccggctaattttttgtatttttagtagacgtggggtttcaccatgttggccaggatggccttgatctcctgaccttgtgatccgcccgacttggcctcccaacgtgctgggattacaggcatgagtcattgcacccggctgatcctcttattagaattttaaaaaatacctttaaattctcctttgaggaaaaacaaatctcttaaaggttaacataaaactactattaaagaggaaaagatataggtcatgtaacttagagatacaaaggacatacttcttaaaaggaaaaacaaaccctaatgcacaatatttaccaatatttaaataatccagttgaaacctttttttttttgtcattaatgaaaaaacacaccatagacggttacctacactgagaagagtggaaacgatggtgttaggggagaggaataagaaggtccgttcagttagagctttgcaagattcgtatatacagcaccagatcctatgaaatcagcgcccctcgagtcagtacagtttgtgagaaatgaacacttcagaattgcagtagaaaatatggccataaaaaaacttcggtcttccagtcctatgcaggaaggggcaccatgcaaggtggggtctcgctggagtggctcgcggctctggcgaccctggggctccccttccccagccccgaccccgggccccacctccagggccagtcacttgcttccagagtgcactgccgtcacagtggtgggcctgggtctccgctcggctccaactcctgagacccccgacgaagaagaaatgaaactacagagcgtggaaggtgccagacagtctttttggctggccaaactgaggctgctc

SEQ ID NO: 344484 - DNA, 1000 bp, Homo Sapiens
ttttttttttttttttgagacagagtctcgctctgctgttaatttttgtatttttagtagagatggggtttcaccatgttggtcaggctggtctcgaactcctggcttcatgatccatctggcttggcctcccaaagtgctgggattacaggcgtgagccaccgtgaccagctgaaccaagtctttttaaagtaacttctgcccaatcttgggcagagtttctgagcaaatctgtgctggtgagtcgcgaaacagcagccctggctctcttggtggtccggtgtgtggtggggtcagtaattcacactccgcatggtggccacggtggtggccaggcgacggggcaggcctttgctgacctgtctatagtcctcaggcctggtcttcagtagcgtcacgatgtgctggagggtgcgggacggctgcaggcccagggcatccatcacgttgatcagatagtcgatgtcagtggccagctgcttggcagagtgtgggctcagctcagggatctgtaggatcgcatcacagtaggtctgcattgtggctctggcgatcgagcccagccagttgtcagccatgttgtccagctcgggcaattcatccccctgctcaggaggaaatggcagctttccagcgtgcaatgccaactctaaggcagagtcctcctgagtcacaaatggctcaagattcagggggagggacatgatgtactgcccgatgttgctgatgtactcgagaggggtgagactaaaggcgggcagttcatctgtgagggtttctccgatgccagccgtattccagctgtccatcttcgaaataagcaacagctgttgtttgatgcgcaggaacacggaatcgaaagccagctggtgggcctgctggttaagccgagtcagcgctgctcgaggtgcagccagcaggttgtggttgcttgaccctttttccttaagggtataaagtatttccattaaactggcatattcagcagggttatctttct

SEQ ID NO: 344485 - DNA, 1000 bp, Homo Sapiens
tttttttttttttttttttttgatcaggcagctttattccaaagggcagctgagctcacctcccagtgagggtctgggctgtgagggcccaggtggcaggcaggggtggggcaaggaccctggagtcaggacttccccaccttttggcttacagtggcagcaggcccacctggcagtctccagggctctgagggtcccctccgatgggagcaccttccattcccagatcccaagttagaccaggggcttccgaagctggaatctgctctctggaggcaaggctgcccaaacagcctctgtacagagtggggcgcacctcagacactcctcgggatgtagaaccagcattcttgctgctgagccactgccttgcattaggcagcagtggaggaaggggacggaggagagagaattgggaggcagaagggctgggtgtgggcctgggtcctcaggggacgtcttgacccccagctgctggcacttctccatcctcctgccatcactggagcagacatcagggacgagacaagatgccacctcctgccaccacagggcctgctctctcccccaccccccgccagaatacttgtccccctgcttggcagttgccctgggctctctgagtccaggaggtgggccctgctttgcaggggggcagttcctcaggtcaccacttgctggatccagctgatcacacctgtgatgcgggtgtagacgccgaagtagttaggccggccacagcccaggccccagctgaccagccccgccaggaaccagcggccactgagtgccttgcacaccagcggaccacctgagtcaccctgacaggcatccttcttgcccttgcggtagccggcacacagcatgcgtggcgtcacctggtagcgatagacctcgctgcacaggtcctgtgggatcaactgcacatccactttctgcagagcgttgctgatggggccgccctcgcgcaaggcgccccagcccgtaatccagcagtgca

SEQ ID NO: 344486 - DNA, 1000 bp, Homo Sapiens
ttttttttttttttttttttggctttatagactctaaccatttatttaacaaaatggaaatttctaatatatagcacatttctacatttaaaattttagggaggagagactcatgttctacagtatacattattacaaaagagttcattataaatttaaatcagctgaaacaattcctttaatgattaggattcatcatcctttagtgcagcgaggtgacattttgtggaaagcatccatggctcttcgtcagagatgtcttaccagcacaaccttccttcactctgacctgtccatcagaggatttcctttaccagtaaaacagatggaagtccatttttctctttcggttcccaactcaagtgtagatcttttaatttaggaaagaactcaaacttatataaactaaagagtggaggttgttgttttcattctgtttactcacacactgctctgtaaagtcaaggttttcttgtcgattttgctcacatgctgattgctatgcatgcagccatcattagtgcaaatgcgcgggagactttttgaataatgtatagcacctaaaggaatgaacagcagacccccccaaaattcaaatcgctgttcttgcaaattctgaaagccaaggatcacttgtgccttacagaatccgggggctctatccccaggtgcaaagtacattttccaggtttctccagggcaaaggcagggtggacaccctcattaaacctgtgcctgatgatgaagagcaactgctcgctctctgcgttgatgaagataagtctctggttgttgtagtccagcaggatgcccactctggctggacgctcagtcacatgaacatcactcacaataccactgtagaaaaatgtgtatctctgtggctcagagcagtgcatgtaccatgaggtctccccttgtcctagggcacctgcctgcacagccgagctggagcagatgccgagtcgatatgctgggcagtctgtgactgtggtttccc

SEQ ID NO: 344487 - DNA, 1000 bp, Homo Sapiens
ttttttttttttttttttttttttttttttttttttttgattcttaacatatttaatgaaactcgagcttcataaaccagtgaaatgcctacccctatggagacggggagctggtcatgggacccaggtgcctggaggacatcccagtggctttgaaggctccagccagtcaagacggtcaatattagcccttctgccaacatctggcaatgtgaggctggggtggacgttggcctgatgttgccaggagtaggatgctgatgctgccagagagtaggtgggctccaaaccccaggcttctcacttgcttactaagcacagcagtctgaagcttgggacctggcagtgcgtctttggagaaggcaaaaaagccacagcagcaacacttaggagcaagacccttcccgctctccaccctatttcctcccctgaagaagagcaacagctcaagctctagcatggcacagaacgctaggttgggccaggcaagcagccatggtggggccaggtgaagcaatgtgggtctcagcaaggaacccctctgaaggtggcagtggctcccagggctgctgcacactggacaccacaactttggcatcagctgcatggtgagctgcagagtggtcagaggggctggggccctgccaagagagcaaggccagacctgcccagcgggaggcaggaaggccctgatccagcaaggagaagtagaggaagtccacagccacctctgttactcatcgctactgggacatctggggacaggctctgttcttgggagagcaggtcaccaggatttgtagggctgcctgccggtgacagacacgtaagtcacagggaaaggccgggatccaggcctcagctgtagcagcagctggaagaggtggagccgcacggtcacaatacatgcagacacagagcagcaatacgaaacagaacagctcagagcggtcagctcctcagcagaagctgcgtgggccgccactccccctttctgcaa

SEQ ID NO: 344488 - DNA, 1000 bp, Homo Sapiens; identical to SEQ ID NO: 160914

SEQ ID NO: 344489 - DNA, 1000 bp, Homo Sapiens
tgtagctggaggacaggaaatagatctttattatgtcagtttaagccctgcgccatcccacccttgtatcatatctgtgcagcaggctcccctgcacaccctgaggctgtggcgggtaggggtggggtgaggcccggctagcctcctctcacccctgctccagcccaccacagtcatgtcagcaatgcctggcgcagcatctgcttcttctggggtgtgaggcgggtggggaactggatgtcgaagaagatgaagagatcccctttcttagtggggtcctccggcaatggcatcccctcccctggcaccttcttgaagtatttggggtggatgatgtcattgatggggatgttgagcagacggtcatctagggtcctcacctccacagtgcagcaggtgagagccttgccaagagggatggggttcacgaagaagaggttgtcattctccctgcggaagcgagggtgtagcttctcctttacgatgaaaatgatgtctgctgggatgatgttggggccctggtccccttccttctcaaaggtgatgcgtgtgccctgcctccaaccgggcttcacatcaatggtcaggatcttgtccttgatggtggaggagtacccatcctcgttcagcacccttctggagatcttaatttttttggtgcagccaaagaataagtcctccagggacaggtagagatcccgttcgacttgggggtcctgcttcttgacccctcggccctggagccccccaaagttcaaatctacctcacttccttctgcatcaaaaaactcactgaaggggttgtttccaccaaagaactcgtggaacaccttttcaggtttgccgtggaagacgtaaccagttgtccatggggtctgggatccaaactccaaaggaatcccacccttcaggccctcttctccaaacttgtcgtagatgcctctcttcatggggtcactcagcacgtcgtaggcctctgctatttgcctgaaaatctctg

SEQ ID NO: 344490 - DNA, 1000 bp, Homo Sapiens
ttttttttttttattttgaatagttttttaaaattttattttaacgaaagttaagaaaaaacccttacttatacactaaagaaaataaacataaaatggtctcccgcctgactcacaaaagtcccatggcctgatcctggccagcaggagcagttggtgatgaggatccagggcaagatgcagctgagctgccagcctcctagatgtggttccctggtgtctacggtctgggtgagggatggtgcagagccggtgttctggccagcatcccggtgggttcccagccactgcaggatgttgccagcctacgggttttcgggctccagctggcaggacagcttgtagctctctttgtcactgagctgctccattcttgtgaaataggtgacaaatttctcaagaggccgaagcctgtaattcatggcagccacttggagcagctgcatttcctgcagaactcggacctccttgctcctcttgttggtgttgccatccaggtcgtccgggatggccgaatccagcctctgtaactcagtcagaaaatcccccaggaaggggaccacacccttcttctgcctccgcagcctcatctggactctctgggggttcctctcctgggtggccaccttaaagctccccgccttgatcagtaggtccctcttcactgcagtgtcttttttgcagagttcttttagctctttcatgcttttgctggacactcctgcccacgtcttgtgtagctgacctattgggttgctgcacagagcagagacgatgacgtgcaccgaggagaagttgttgaggcttaggcactccctggccaccttgatccagtgctccaccaccctggccctgtcccgggccctcatgctgtggtccccgaggcaggaggtggtgatgcagttggtgagcctgttgaagtgtgcgatggtggcacgaactgtgggtgccatgtgctcattccccttcagatgtccttggccccagatgcagcccaagc

SEQ ID NO: 344491 - DNA, 1000 bp, Homo Sapiens
tttttttttttttttaaagaatattgatcttatttatttgttttttgggttgataaataaagctaaatttaaaaatctgtaggtaatacactgtagtggcataaatatttaagatcagtaaaggaaatcatcaaactattgtcattcatacatgaaacgtacaaagcaaatagttatgatttaaagattttaatacataattaaaaatcaacaattattacatagttatataacattgatactgttagatatgtggatgtatatatttttctttccagtaaaatagtttcatgcttataaaagtcaccctaggtcaacttgggacaaagaaaacaatgtacagtagaaataaaccaagtattaaatagaatatataggtaaggaaaaaatattataaagcagttacatttttgacacacacacacacacaaataaatacacttttctattatttgaaggcaattcacaatcatttccaggaattccgtgagaatttaaggccatttgttctaaagaaatgctttaatttagacacaacttcacaaaactgtaattcttgtaaaaactgtacatgcaaaaaccctttacaattattcgtggacaggcaggtcagtatataggagtaggttatttcacaaatgtgttgtgcactaagtcacatagttgtatatatttaactgggaatttcacaaaagacttccagcctgtgcaccttgtgtggcaacgtggaatggtgataacaagaaattccgatcaagagagccagtatccctttgaattaaaatatctagacaagatataatggaataaaaagtttaaaacatctgctacatagttcacagttaaatagtcttggtttcagtctttctaaatagcattattatataaggatgctactttttacaaagtattttctgtgcatttatagatcacaatgtttgactttttataatttctacttagtgttacaaaatacaaaccaactgcagtctaaatttag

SEQ ID NO: 344492 - DNA, 1000 bp, Homo Sapiens
ttttttttttttttttttttagttttccagatttaataaatgcatagatcctttaaaggaagttacattggcacattaaagtcaaaagaaaattagccaagaggagcatattacatattaaaaaacattattttagtttctaactgcaactttagagactaagagtattcatttagaatctcaaatgggttctgctgaggaagaggagggtaattaggatacgtgtgctctgaaagctacacaaggcttcagagaattgaaaaccagcagggacgccatcaggggccatgtggcctgtgccttgccatagctaaaaataatttttggtccttttttcaagataaaatagaggcattggatagggacagatattaggaaatgacctgaggaacccaggagtcaatgatatattgatgaggttttgactcaaacagtaagaaccaaccaggagggtaaagtcatacccacactcactccccaagtgtggccaacttacagaggctggcctgggaggggtgatggactggtgcttggcctcccttctgctatgactggccattgaactagagacccttgacctctccaagacactactttctgttaagtggggagaataatccctacatacatcacagagcagtttggagaatcaaaacagagacagaagcactttggaacctggatgagcctgtaagatcggaggaaccaggagaacttggctattaaggtgacagagtggtcccgagggctctggaatccctgcagctgaagtttatactggtgaatctacaggggccctgccttccctctttgctgatttcttaggaaaatcaccctcgtcctcaagttgaagaccactgagcccaatttctaggtaaaaaaacaaaaagagaagcctgaacttggtgtagctacgatactaatactgatgtgaatcccaaatagaagcctggtggtgggggtgaggtcctgtcgcaggctcatgcaacagggaacttca

SEQ ID NO: 344493 - DNA, 1000 bp, Homo Sapiens
ttttttttttttttttttggagggactggttctttatttcaaaaagacacttgtcaatattcagtatcaaaacagttgcactattgatttctctttctcccaatcggccccaaagagaccacataaaaggagagtacattttaagccaataagctgcaggatgtacacctaacagacctcctagaaaccttaccagaaaatggggactgggtagggaaggaaacttaaaagatcaacaaactgccagcccacggactgcagaggctgtcacagccagatggggtggccagggtgccacaaacccaaagcaaagtttcaaaataatataaaatttaaaaagttttgtacataagctattcaagatttctccagcactgactgatacaaagcacaattgagatggcacttctagagacagcagcttcaaacccagaaaagggtaatgagatgagtttcacatggctaaatcagtggcaaaaacacagtcttctttctttctttctttcaaggaggcaggaaagcaattaagtggtcacctcaacataagggggacatgatccattctgtaagcagttgtgagggggtagagatgggacaaaattttggtctcagaggtcttaccatcttaatttggtaacttctaatgaaaaaaataaaaaatagaaataacattatccaaagatatcttaaagctgaaaacttgaacagcacattttttgtttttgttgttgtttggctaactcctcctggaatcacctttctggtttagctagtactttgtacagaacaatgaggtttcccacagcggagtctccctgggctctgtttggctctcggtaaggcaggcctacaccttttcctctcctctatggagaggggaatatgcattaaggtgaaaagtcaccttccaaaagtgagaaagggattcgattgctgcttcaggactgtggaattatttggaatgttttacaaatggttgctacaaaacaacaaaaaaggt

SEQ ID NO: 344494 - DNA, 1000 bp, Homo Sapiens
aaaaccgggtataacactttaatatagatttgtggaactctggcccttgcagccagaatacacatttataagccataaataaagcacgcagaaaccataaattaatcggacccgagacctggatttcaccgtgtcaagattgggaatgctttttttttctttttcttggtcatttacaacagacccttacattattttttttcctgtttttaaacaatagtacaaccctctggttctgttaaaactacatggttttacaccgagtcactcacaaaatttttttttttttttaagtaagacttccctgcaacaacagcaatggaggagaacaacaacaacaaaaaaatcagaatctgcaggtgcttgaagaagcaggagtctacacagtagtggaaaccggaggcttttttttaactttatattctttcccgttttcctccttatatagaacgtggggtatctgtgtggccctctgtttgggacggaacggctgcagcgggtgaagaagactgctgtcttgggggtgttggggtgggggtgttatggatttcttctcccttgcgtctctgcaacaccgtctccccaaagtctcgacccccacttgctctctcacttgtcctcgatccggggtgccagagttagccgggcctgaagccgtcgtcttcttaagaggagttcataatgggccgggagtacaccccctggtagtaggaggtatctgcggccaggggcgaggcgtccaggcccgttttgttcgtgaccgggcccatggccaagctgccaggcatgggggaaccgtagccggggtagtgcatcacctgttcgtaggccttgaggtccattttgtggggttggtggtggtggtggctgtggtggtgctgctgctccgaggacatgaggttgttgatggagaacgggtggttgaaggcgtagtggtgttccggcttcaggtgggcctcaggcggcaggcccgggtggtggggcgggcccagcaggtggg

SEQ ID NO: 344495 - DNA, 1000 bp, Homo Sapiens
tttttttttttttttttttttttttttttttttttttttttttttttttttttttttttttttttttttttatcttgcaaaggctttatttgaaaattttgaaacttacatcccacagtaattcaagatgatcaccacaagaagaagaaagagataatacaaaaatatatatcacagcctaggagccagggaagaagggaaggaggaaggtggaaaaaccagtgagaaggagggaagaacctgaggagggggaaagggcagggaagcaaaaggaaggagagtggaaggaaggagggaggaaaggaggggacaggagggagtccgggaagggaagggtagacttggaggcagagctcccgatggccttgaaccagctgactccggtccctggcagcctaggtggagttagggaggcccaaagggaggctgggaagggaggactggctcagggggctctgaagtccagagaatggcacacacacagacagccaggacagacaagacaaaagggactgtaggagaaagggaagggcaaatgggagtccctttctcatgtagtgcagcaggcgactccccaaaacccatctgtcagaaaacagattttagcagtgggctgggggtgaagtctggggcctcactaccccattcccaagggggagccctcagggtgatgccggcatccttggagtaggatggggagacagagaaacaaatggtgtggaatgggacgagaccatgaccgatgagggcccaaggagcccccagctcacctcccacccacctctggagcagcacgcaggggctgcggaaacgaggtgggtgggtgttcatgagggagagagtgagcacgccgcacaccaccacaacatcaggccgggaaacgcacatgagaggtaaagtgtgcaggaaacgctgaccactgagtgagctgagcacagaatgtgggaaggagagagtgcaaatgtgagacgagagaacatgagagtcagctgagcggagc

SEQ ID NO: 344496 - DNA, 1000 bp, Homo Sapiens
ttttttttttttttttcagaaacaaaaaagttttatttataaataaactggttttaaagcttgtatctaaattcgtgtattttcaacatctatttagtgatcatgaagttccagaaccagaatcagaaatgaagatgagactaccaagacgagccaaaaccgcagcactagaaaaaagtaaacttaaccttgcccaatttctcaatgaagatctaagttaggaaagacgatggaggtggaatcctttaagattatgtccagttatttgctttaataaagaagaagttacccttgtcaaaatcagaacaaacctgatgtctttctgaagattttctgctgtgcgcttccacgttactttggcctgtattaaagcagtagagcagcatcagttattatagtccagaaaaagtgtgcatcagtcagtcacacagatttatcacaatctgaggtgggcctaggaatctcatttttaaatagtctctccaagtgattcttatgaactctttatgtttaaaatcatgtcattatggaaaacttacaagtgtaactagctagtagcttgcatttgagaagcttatgacttagatgggcagaatcaacaaagatgaaaccgcctgaggacacatttaacaagtaacatttctagggaaaatgaaggaagtaccacaaactggctagaaaggagcttatcaatcaccagtgaggaagaccagtataacgttcaacaacagttattttgacaaaaacttattttgtgattcctacagtgaaaacatttttggtgatatctgcctgggaaatctctcttcctaaagtatttgtatatgggagtccttgtttgtgaatgtttcctggattagggaggtgtcaacataaatgtattattaaccatgaagctgctcgctatatttttggcataacaaaataatatttatttactgtggataataattctagtgggaatataatgtgacaggaacttctctttatatacgctacc

SEQ ID NO: 344497 - DNA, 1000 bp, Homo Sapiens; identical to SEQ ID NO: 160917

SEQ ID NO: 344498 - DNA, 1000 bp, Homo Sapiens; identical to SEQ ID NO: 160919

SEQ ID NO: 344499 - DNA, 1000 bp, Homo Sapiens
tttttttttttttttttttttttttttttttttttttttctgttaaattttcctctttattctctccccactggcgtgcaaacagaaccagaacagtgctacttttaaaaaataacaaaatgttttatacacatttctgtatatacaactgaacaacattttacatgtttcttttgcacagcaaaagatataaacattcagctctgagaacacagttatgtacagaaaaaagtcaaaaatacttcacaacagtgcaaaaatattttacacagtatcatggagtgagatcttttgagcaagaggaagggtgtgtgtgtttctaaaggaaaactcctttttaagatattggatgtctttaactgtaaacaaaacgcgactctctttcatctccccccaccccccaaacagttatttgaagaatttggcaacatttcaggggtctgagtctgaggtaaacagccagaattcttgcaccaaaaagaaccaagggctaaagggttgcattaaagcctcaaacaccttgagagcaaatttttttttttttttaatgagatgtcagtgacagcgcagggccgctcccagggggtgggaggaggaagtgaacccctcctcctcaggccccagctgccccacaaacaggaaactggccaggcacctacggcctgagactaggaacttcagccaaccttccctcacccgcatcccagaggggtgcctctctctccctcctggcggggttttcccctctcaaatctccccgcatccccacgcgcaacagagccaaaagtgctggggcgggagcgggggccgggaggtaggggaaagcggtcgggggaacgctggacctgggctccaagtgtaggtctgggccccaaatgccccatttcccccttcctgggggcgggcaagggacagggaggttgtcgggaccacggatgggtagccacggtggagcgccggcgacgcgcggaggagctcagcccgagtggggctcgtctgc

SEQ ID NO: 344500 - DNA, 1000 bp, Homo Sapiens
ttttttttttttttttttttgaggtgatgaataactcatttactctgatgtgattacatgttgcatgtctgtatcaaagtaacccatctatgccatgaatgtatacacataccatgtacccacataaatttttaaaaataaatttaaatataaaaaataataaaaatttaacatgagaacaatattcttcaacttatttggtgtttaaagccactggaaaaagaaattactagaaatgtcattaaactatgttactaaaagtatactgttaccattttttacctacacccttgagtaaggttcacacacaatcttaaaagagaattttaaaatttactgtattttattacataaatgtgcaactggtaaaagcaatttattactaaaattcaagatttttctctcactataatgcagaagaatattactctgaacatgtacgtcatgcatcatgcaatgataagtcaaccacaaagatgtatgcatcatctcatgcatctttcaatgtccttactcattcatgtaaaagttcatgaatacgcctgtaatcccagcactttgggaggccgaggcgggcggatcacgaggtcaggagatcgagaccatcccggctaaaacggtgaaaccccgtctctactaaaaatacaaaaaattagccgggcgtagtggcgggcgcctgtagtcccagctacttgggaggctgaggcaggagaatggcgtgaacccagggggaggcagagcttgcagtgagccgagatcccgccactgcactccagcctgggcgacagagcgagactccgtctcaaaaaaaaaaaaaaagttcatgaatgatgcccacctaaaaagaatcactcatacctctgatgcaacaattcatcacatgctttcatataaacaataagttgaatcagtatgaagtaattttagagttgaatttgcttttcaaaaaatctataattttttcaggtaaaaaaagtataatttcaatggaataatttca

SEQ ID NO: 344501 - DNA, 1000 bp, Homo Sapiens
agataagcccactttaaaacaagatatttaattgattgtttcaggtatgactgtcaggagcaaattatcttttccccgaagaacagccatggaaagggaatcactgtcaagagctttaacaacatcagttgtagtagtaataggtttcccatttatgttgacaattacatcgtgatctctcaatccagagctttgagcagctgttccttcaaccactttacatacataaaccccagaactcacatcagggaaatctggataatgcattttcaattcttcactaaggggcacagtgagggacagcatttgcagacccagatatttcttatttgaaaacgcctttcctttcatctggtgctcatggtattctgccaagaactgcctaactcgatctgaaggaattgcaaaggagattccatcagtcaccctcaatgaattgacgccaatcacatcaccatccaagttcaccagaggaccaccagaattcccatagttaattgtggcatcaatctggacgtagtccatatctgaatccttcatccccagttctttgccccctcgctgtttggtgctgacaattcctgcagtagctgtgttctgcagagaaaatgggctgcccaaagccaccacaaactctccagcccgaaggtcagatgatcttcccagcatcagtacaggaagttcagcatttgattcaatcttaatcaccgcaagatccaatttaaggtcaatatccttgacaacagcttcataacgggccccattctggagcaccacctcaatccactgctggttcctgacaacatgggcattggtaataatgagcccgtcctcagacactatgaacccagagccactgtacacaggaacaagcctgctgccgtgaagtaacctgccccacagctgcacgtgaaccaccgatggcgccaccttctccaccaccgcggcgatgaagttgtaattcctcctgagcgggcctgcgcttctggtccctgtatcc

SEQ ID NO: 344502 - DNA, 1000 bp, Homo Sapiens
aaaaataatatcagttttattaaatattcgagaacggacccagaggttggatttatacaggagggtaacacgaagggatttatttatttatttattttctcctactggctaaacaaacgtcattcactttttttctctctttttgtaattttccctcttttttttccttttttgaaattggataggaacactgacggtgctaaacataaatataaatacagagaccacaaatacagctaaaaatcttcacacagaaacggtcacagtttgtaaaatgccataatgacccccaggattctttaaatacaatttgcctgggctgggcatttgctggggcagaggggctaggcagggactgcggggaggccctgggggttggtgtggggccaaggcgcgccctccttgggcctccggccctccccggctgccaggccgggccctgaggccctggagcagaggccccagcaggcccaggagccggctctctgcacggggggcgggggtgggggcgtcgaaggagtgggggagccaagtcctcacttggagggcaatctgtagagtctgagttcagggtccgagcccccaaggcctggacggggaaaagggcctgtagacaagccgagaacgagctagcaagggagcgaggaggaggaggcgcgtggtgaaagagagttgtgcggtgagggagggggtccagagctgactttcaggtccacgtttgactccctaattttgttttagggaatcaaaacacatcaattgtgccagtgataaatacagagtgtgtgattaggggagagttggtggggagcgagggagaaagggagagaggggtggcagggacagtcctggtcactctttctgcttctcctcttctgtctcttcccgcttttcctcttttccgcccaggctgtcggcggtggcccctccgccgccccccgagagagtggatgtgagattagattcttttttccacttcatccggcggttctggaaccag

SEQ ID NO: 344503 - DNA, 1000 bp, Homo Sapiens
tttttaaaattaaatcgtctttatttaattgacagtgttagagagaaaaattcactatcattactaaagagctgaaagcttaatacatattctttaggaatagttgctaactaactcataactatttagatttgacttaacagaaagggaggtcttacaatgaaacaggtttatgattaaagatgttacaattaaactattctaaagacttacaatatgcttcttagctaacgttataattgtatcatattacttaggttcaagttctttcttcaaagagtcatcagaataacatggattgaagagacttccgaacacttgctatctcttgctgctgagtttccatcataatttttttttgcaacatagccatttcttttttaaattcattttgtgcaccagtaagtagattatcatgattcttctccaactcttccatactctttatgaactgctcatataactgtttaattgttttcaatctctggctctgaacaattctagattgttgaagaatcttttgttgctgtcgaaacatattaagtattttttcttcttgttcctcagctttctgcatatctaaatcccactgctgaaacaaagtcagaaactgctgagaatattcttggttaagcttctgcctttgatcttgttgtgttttccaaacatgttcaattttctggttactagttttgagagaagccttggtatacatttctagtctctttctcttggcaagaagagccttgttaatgtcaactccaactccttccagcatattctgcacttcaccccccatatcttcaactactcctgcagaagaccttttcttcctacgtttctcaatgactgcagtcttcccttcaataacatcttcctctgatccactcagatctttcttatcttcagtctcaaagtcataggctctcgtaaactgatcttccacagacggcttcccagatttcctggaatacttttttccggaggacaccatatttag

SEQ ID NO: 344504 - DNA, 1000 bp, Homo Sapiens
gcattaaacttgcaaaatctagcttcccacaatatgtagttttctaccctgtactgtgcagtccatatttacaaaatattttaaactttacgatgaattcatttccatattaaaaaagtgcagttctctctcaccccatattctggggcaataacattcttcataaatttctacagaatagcagcctatgataagcaaataaggtgcttagcttatgcccaaggatctactttttaagtatgctgggcagtacttttgtacagtggaagagtcagtgtccaagctactgtcggagtggcgccccagtcaggttggcaagctctatgagcgcgagggctccatgcaggcgctcccgctgctcctgcagccggcgctgggcccctctcttctcgtcgtcctcttcatcagactgaaggtattccagagggtcctgctgctcctgatcagccttctgaaccagcttgcctttcaaagtgggggtgcgctgctctctcatttcccaatacctcgccagccactcggccgcggccttgttgtcggcagcctgatgtttgctgagtgtgtccgtgggctcctctctcttcagcctggcgtaggggtgcttcggacagtggcggtttgcatgggtgaatctgctcaggcagccattttctgaacaaacaaaaggtttctctccggtgtgaagacgctgatgtgttttgagctgtccactttgaacaaaggcttttccacagtctggatagtcacacagatagggcctctcacctgtatgagtccttttgtgagcctggagcgatttctcccgtggaaacaccctattacagatgttacaacggattctgctggatgaatgctctccttcatttattaaatcgcggacagtatctgctctgggcctaccacgtcggattccatccttgaggtggccgctgtctgggctgctcgcttcctcctcgtcctcacctcccgaggcggcggcggaggccgaggcggcgggcgg

SEQ ID NO: 344505 - DNA, 1000 bp, Homo Sapiens
gtggggggacagtctcgctcttgttgcccaggctggagtggtgcagtggcacgatctcagctcacagcaacctccacctcccaggttcaagtgattctcctgcctcagcctcccaagtagctgaggttacaggcacccaccatcatgcccagctaattttgttgttgttgtatttttagtagagacggggtttcaccatgttggccaggcgggtcatgaactcctggcctcaagtaatccaactgcctcggcctcccaaagtgctgggattaaaggcatgagccaccacgcccggcttaagaatcttaaatgaaaaaaattcctttgcctttaaaacaaatgcataaataatttcctaaagcggaaaatgaaacagcttttagatctttcacaccaagggttacactgaattatattaaaatataatcaagacaaatagcttagaaactcttcaaatgtattctgggaacctgatttgcaaaactgtcattttccagtcagaatacataatgctaatacataatacaaatagtttccccaaatatgtcagtccataaaatttttctaacagcccactaaatttataatattaccccagaaatatcagcaaagaaaaacagagacttcacaaaattaaatgaagacatatcaaaaggaggattctaactaaaactgcccagcttggtcagcacttgtaggtatgtgactgtcaccttcatgcaggggaagccaggactgcatctttcaccactgtgctccccagagctagtctggcacacagcaggctcttaatacttattgaataaatgactatgaccctgggttcaagtccaactttagtagttacacttacgtctgcagtgcattatttttttcattaataaggctctcgtcttgtatcttgtcaagtattaacaaggcacatttttcatgacctttactacaagccaaatgtaagggtgtattcaagtccttatcctttacagtcagatcagcctgg

SEQ ID NO: 344506 - DNA, 1000 bp, Homo Sapiens; identical to SEQ ID NO: 160920

SEQ ID NO: 344507 - DNA, 845 bp, Homo Sapiens
tttattagctttacaagaggcacaatccacacttaggtaaagcacttcattgttgcaaactgtagaatattggtctggcatgttcttggcctccatagctgctttattaaaacctgaaaatcttccttgcttcttctaaagatttctcatccatgggaggctttctctggctgccaggctgcagaaacttcttcaccgtgggcaggttgctgattctggttttcagggccttcagcagagggaagctggagataagactcgagtcaagctcttccacgtagtagaaaagttccaccaggtgaatgtcagcccagctcagcttgttgccaacaaggtagtcttgtctgtggctctttaagactttttcaaaggcagggaagtagcgattttttattttctctttgaccaaggcagtcttggcatctctttcctctggttgacatatgagcagaagaaggatcatttcagtcaaatctactataccttctgtgtacatatcaatcagggctctctccttcatgtctttcccataaaggttgtatttgctggcaatgtagttaagaatggctctggtctgcaccagcttcatcccgtcaatctcaaccattggtacttgctggaacagcaaactcccatcatttcttaacttgtccaaatcttctgcagattctagaaatttctcttccaactctactccagctgcagccaggagccaccgaatggactccatactgccccgtgcattggagtagtggagcttgggcttctctgccatgatagcagtctcctggaggtttctctaagcttagtttgttaaactctgtcactgtcgtggctgggcaact

SEQ ID NO: 344508 - DNA, 1000 bp, Homo Sapiens
tttttttttttttttttttttttttggggatagcaacagccgtttattgagtaccaactgcatgtgccaagccaatgctgagagctttacaggcaccatttcactatgatatgggaccaggctgggtacggtggctcacgcctgtaatcctagcactttgggaggtggagatgggtggatcacttgagcccaggagttcgagaccagcctgggcaacgtagagagacacctgtctctacaaaaaataaaaataaaaaattaaccaggtgtggtggtgcatgtctgtagtcccagctactccagaggctgaggtggaaggatcacttgagtctgggagttcaaggctgcagtgagccatgattgcactccagtctgccaacagactgagaacctagctcaaaaataataaaaatagtaggtcggccacagtggctcacacctgtaatcccagcactttgagaggctgaggtgggtggatcacctgagggcaggagtttgagaccagcctgggcaacatggtgaaactccatctctactaaaaatacaaaaattaggctgggcatggtggctcacgcctataatcccaacactttgggaggccaaggcaggtggatcacttgaggtcaggagttcgagaccagcctggccaacgtggtgaaaccccgtctctactaaaaatacaaaattagccgggtatggtggcagatgcctgtaatcccagctactcgggaggctgaagcaggagaatctcttgaatctggaaggcggaggttgcagtgagctgagatcatgccatctgtgtgggtgtcggcaggaatgtgccacgtctggttcaggccaggaccaaattggttcgaggagatgacagccacgttgtaggcagcacccgagagatagggcatcttccccaggtgcagggtcctggtggccttggccttacacgggcaggacagcatgtggagctgtagtcggtaagtgacctccgtgccaggcgccagcc

SEQ ID NO: 344509 - DNA, 1000 bp, Homo Sapiens
ttttttttttttttttttttttttttttttttttttttttttttttttttttttttttttttttttttttttacacattttaatcaatttaatacaaatacctgatttatacttttacaccaacgggctaagtcccaagttccaaactgtagttcgcatgactctacagaggggatctttggaaggataaggtacctttggagaacagtgtataaacaattgtaaacatacactgattgtccactagctttcttaaatagaatttctgaaatatttttgtaggaaattatatataagagtgtaattgatcagataattcctattacaacatataaattctgttgaatgtgcaaaatgtggtagaaatagaagatacagtggatgatttatacttttaaagtaagtgctacattacaatccagtaaaagtcctttaatcttttcatgaaacttctctctatacaaattgaaatacataatgctttctggttcttcttcaaaccaaaacttgtcaaattcatagacaagataacagtaaaactgatgaaagtgttccattgttggtataccaggaacaaggttatagagatgaaacttcaaagcttcactcttcagtaagctataagccatctctgtaagattgattccaactattgcataagaataccctaattttggatgatttgaacgggaaagaatctgatgagcttcactagtgtaattttcactgaaatacacaagattgattaacccaagtatgcccatgcctctgaagtctgtcttgggatcatcaccctgaaaaccaatttcagcccactgcttggagattctagcgtttaacttcttcgtgggcattagaagattccaaagcttcatgagtagctcttcatgctgtaggttatcagaatcatatggccttttcctcacactttctacatccaaatacagctgtttataaccagttatctgcagtaagcacatcttcatgcatattttaaaac

SEQ ID NO: 344510 - DNA, 1000 bp, Homo Sapiens
ttttttttttgcagggatagggataatgcttttatattagtttttctataacaagaaaaatcagctttgagatttttatcatttttttccttagaaaagaataaaaaataaaggcacccggaacttcccccacaggcctgaagaacaaaggtgtctcctaggtgcagctgggtccttcctccctggctcagcccagccccatcacctctgcttcactcctgccccaaggccccagcagcacccagggggctctcccatcctgcctccactgggcttgcccattggaaaagtgcctgtgtcctgccagggcgtggcagggagggactcttagcagagtgactgcccagcacctggaggagcagggtgggccaggccaggccagcagtcctgaaggctcctgtccccataggatgggaaaggaataaaagccagcttttgtgagttccagagggtggcaggcacctggccacagagcatggatacccttgtgtcttctccagggaacggacggacagatggacagggcagacggcgagctgctatggctgattctggctggggcaagagctgtctgtggcataggctttggagggctgttcgcacatgacttgtgcatgtgtgtgtgtgtggtgtgtatgcatacgcatacacatgtcagcagggggagggaatgggtgcctgtgtgtgccagggcaggggcagacccttccctgcatgattcagagggcgtggcagcggtagtgggggtgtgacagagactgtggtggtttggagggtagttgtgtgtggctgagctgggtgtttgagggtgtgatgtgtgtgcatgtgtctggccgtgggacacgccgtgggaaggggtggggatatgagactgtgtcagcccgtgtcatgtgggatgcctcatgtgtgcagctgggtgtgtctgtgtgagcacggcagagtggggggctcacagcacacaggcgtgtgctgcagaaaagagtccggcggtccatcgtcc

SEQ ID NO: 344511 - DNA, 1000 bp, Homo Sapiens; identical to SEQ ID NO: 160921

SEQ ID NO: 344512 - DNA, 1000 bp, Homo Sapiens
ttttttttttttttatttagaaaatttattttatttaaaaggtatatatatacataagtcccaagatataaagttctaaacatagatttaaaaagagcaaaatggaaaaaatataaatatttgctgttcctgtttatatcttttgtgcatttattgtcttttctaaggttggcatttttctttattttgcaatttgatccatacttacagtaaaaaaaaatctaaatattatagaaaggtataaagcaaaaagtaaaaattcccttcactccatcttctcctcagatattggtgaatctcctcccaaactttcaaccacatagatgcatttttgttttcaaaccagaaagccattaacactaactctttaaaggctgcggctgaattggcgagatgaagaattatgtagattaaggctgctgtctccctatagaattttttgagggattccacctttttttaaagcacatccttcctgttccacacactgaatctgcctggtttgtctcaacttgcttttaactattaggcctgtttggcagaggcaatataaatttttaaaaatgtaagatgtttaaaatgccattagcctttagcacctggaatttgaggcagaaaggtatgagttaggcaacctttcttgccataatcccagttttgacaagcctcaaacacaatgtacaatatttaagacacaaattcattaggtatgggctcaggacagcttgctcttatttaatacttgcgtgcttgtggttttgcacaatggatgggtattagagtttgccttggatacttggcattgattagactgttctgaaatttggttatgcttagtcaaaaaattctgtttattgttcttcagcaagaatagatgtaaccactttaaaaatagttacattgttttccagattaagtaaatatttcagttaggagaatacatatttttatttttattttcagtttttgagatggagtctcactctgtcacccaggctgg

SEQ ID NO: 344513 - DNA, 1000 bp, Homo Sapiens; identical to SEQ ID NO: 160922

SEQ ID NO: 344514 - DNA, 1000 bp, Homo Sapiens
tttttttttttttttttttccttttttttcttatatttttgtaggtgtgttgtccccaagcatggagggctgggtgcacagtgggtctgtttgatcagattgctttcctctgtggcgggaaagcaggtccctgcatggggtctgcgtgtttctgtgcatctccgtgtgtgtgtttccctgtgtctatgtgcagccctctgcatgtgactttgttcctctggtttgatgcccatgtgtgcttagatctgcttcctctcctttctcctccatcactgctctgggaaccctgggccctgacagattcggcaactccagcaacttctgaaaattctccttccctggagtccggccccacctgggaggagactgctgcctctcccttctttctcccttctccaaaatggggctgatgaagagggaggggccaaggggaggtgatgggcagaggagagagcattgctgtggttctccagtctggttacatattactctacaaccccgagtggcaacagtccctgggggtaaatcagggctgtcatacattgaggagagcagaagccaggaagggcttcccaggcacagtgggttttggccccaggaccagctcccttccaggggtgaaggtgcgatgagtgccctctggtggtcctgaggtgtcctggagcagagggagatgtcctgagtctgtgggagaccacaggaaactggcgacagtcacaggagctctcagctcccaggaacattcacatccaggcctccttcccatgtggcactgcagctgagtgactttgatttttaaaacattaaatctcttttcaattcccatccaccaagtttagcacgttttctgagcaccgtttaaacatggtactggagctaggcgcagtggtgcacgcctgtcgtcccagctactcaggaggccgaggcaggaggatggcctgagcccaggagtttgaggctgcagtgagctatgatctcgccactgcattccagccttggc

SEQ ID NO: 344515 - DNA, 1000 bp, Homo Sapiens
tttttttttttttttgaagaaaatgctaatatattcaccttttatcaatgcagttataaatatatatttctgtgtgtgtgtgtgtatatatatatatatatttgttactactattttgaatgtaggaaatggttcgcaaaggcaaaagtacataaagcccacaaaaattatgatgcagccctgcttccaggggagtattttcagtatacagtgaaaacatgtgaaaaactttcaattttaggtatcatattcttgcaacttgtgatttttgagaactgagatcttcagatcctgagggaatgaattccacaatttcatacatccttaaaagtgtagatttgtaggacagagactcctgctgatcacactgcaggagccactgtgtagggcaacctatgttaagagtaacttgctcactcacaagccattgcttctgcccctaaattctgcaaccaatatttacagagactgatgagccctctcacatgagtctgtctgttgaatgataaaatcttagatcttggagcaacatttaggcctactgagcccctctccaccaatgcaagagcacctttgtcacccctcagcatcaatttgagcacatcctgatgttctacttgagagcttcaaagcagtttcctttgtgttattgtcttgtaaacatactccaaatgtaagaaaatacagagacacacaggttgctggtgatacgttaggaggatcacagaatgagcatgccactcaacaccatgagtcattgatggtggatgagctacatattgtgggcagtacccacaaggaccattgtcgtctcatcatcctcagggctaagttgcagaccattgtccaccactctgtggagggtgctatagtgttgctggctttggtggaaagaatgcagctctgaagcagcctcccaggcagcaaacgtaggcatgggaaaaggatctggcctcttgttttcaaaaaaacatttcaggttcctctcgctcagcttgtt

SEQ ID NO: 344516 - DNA, 1000 bp, Homo Sapiens
tttttttttttttttttttttttttttttgaaatatcattactttactttagtgttccaggcattttaaatattcatacaatcgccttatttcagcagtcatttcctctccagtacagattttgtgtccagaaccagagccatgtacgtcactgaattttctctacagcacccgcatgctacacgggacctactccggtgcccatgtctttgctagtaaagcctctcaccacacttgcaagagggctggacctccccttgcttgatgtagcctccactgtgaatgaaaacacactttgtcacttcgatcccagtacatttccagcactcccaggtgttccatgtatgtggcaatcatcccacagagctagtgacacatcatgtcagctggtacctatgtcagcacctgctccactatatcatacagatgctgaggcacttaaatgttcttggtaaaatggagttcataattgccataggagttgagttttggggaaagggactttcaataattaatacccttaatacatatttagcagatttataatttcgtgtctgtttacatttgttgtcaaagcttcataaactatttatgtaaatgaaagcatgtttgagtttccaaatgctgctatgacaagcaaacagagaaactgcttagacaacacctgcttgtgccataaatacatacggcaacatccggtcatccttaaagaaatgcttgtgtttccaaaaagaatttttttttttaagtcataagccttatgcaattcttccaagataataatgtgtttgtccttccttctcaagcatggttcaaggcatctcaaggcatattgctgtctgaggttctgatttaactgtccgggggtacaggggaagagtgggcactaacattttttaaaagcttcacagtcattccagcatgtagtcagtgttgagaaccttggtactaaaggctcttgcatcttcctactgtcacttgtcctcatcaaaagcccttg

SEQ ID NO: 344517 - DNA, 1000 bp, Homo Sapiens
ttttttttttttttttttttttttttttttttttttttttttttttttttttttttaaggcaaagaggtgctttattgagcaacagtacagcttgcaggagatctgaagtgggtagctcctttctgcaagcaggtcatcccagcatctgctcagctcccagctaagagaagacccacagtgggtagctcctttctgcaggcaggtcatcctgatatctgttcagctcttagctgagagaagaccccacagcaaataactcctctctgcaggcaggtcatccccacttctgccagagtctggctgagtctagggtttttatgggcttcagaggggaggaagctcatgctgattggtcaatgggcagccataggtgggcctgaaaaaagcaccataagttctcactccagtctgtggaactggcagcctggcccccaggcttcaggccacccctgggttgaaggtggggcttcaccagcgacacatccctttccactcgggagcctgtcgcttcctgctgctgttcatggtgcccaggctgttcatgccaagggacacctgcaggcctgtgctgtgccaccctcagtgcccccttggcctccctcccatgcttgttggcacccaaactctggagggggccaaggcagcagagggctggtgtgtcagcaccatcccaagcacacacacacctggctgggtcataacagcgcctgggcttggccacaactttgcttcagaatcagagtgggtgccaggagtgaggagaggccaggcagcaggagtaggcacttccgagcctgtgggagcaggggggcttcctaggcccccaagagcacagggatgcctgggtctgcagccatggctgggcagctgcagctgcctctaggagcgtggagctcccccatcaccaactcagaaggtgagcaccgctcctgcttgttcctggctcctgccagcttagtagagtgtacagccctggccatatctcccctgctgcagccg

SEQ ID NO: 344518 - DNA, 1000 bp, Homo Sapiens; identical to SEQ ID NO: 341260

SEQ ID NO: 344519 - DNA, 417 bp, Homo Sapiens
ttttttttttttttttttttttttttttttttttagaaaataaactggctctttaatgggaaatgggaggaagggctgtccgcacaggaatggggttaggctgtcagaagcgcagccccctgcgggctaagtcggctcgggcctcctgtatctggctctgcagctcgcgtgcggcgtcctcgcagtcatgaaaagtggccacacgatagcccacagtgcccagggcatagcagccggcggacaccagcaagtaggcgggcagtggccacaggacttcctggcaggacaagggcagctccaggcccaaggctcccgtggtcagggccacccaggtggagcccaggatcgctagtccccaaagccactgcgctaatttcgtcatggtcactctaccccacgtctccccttccccgcgcg

SEQ ID NO: 344520 - DNA, 1000 bp, Homo Sapiens; identical to SEQ ID NO: 160924

SEQ ID NO: 344521 - DNA, 1000 bp, Homo Sapiens
tccccagctcatttgccttttattcttcatttcagttagttacatttccactggttatcatcaaggttgtgcatgcgccttgaaatgttcacaaaaggtccacgatacagggatttataataggctatatgttatattcagaatcccaggggaactaatagactctgaaaatattgattaagcaagatgtaaaaatcttatacagtttcatctacaacagttttaaagacacgtacaagcttcatttgccacaaaactcacaaaaaagtaattgattaaagaatatctcttttatgcaaaatatacattttaggatataatttaattgatattctactatatactgacattgctccttgatcattgaataaaaaaatactctcattgccagaattatgtttttgtaatatttataattgaggtaataatgataaaagacttaaactatgaataatgttggtgagttccatttaagctataacaatttcccagaactaaacaaatatgtgactaaacataggtcatttttgataaatgaatactaacaatttcacaacataattgacaagctgattacatcagtaatttataagaaaattatacaatcaagttcatagattcaaccaaagaagtagaaataagggaaattaagacaaaactatactacatcagtatcactgccttaagtaattcacagcacaacctaatgtgggcccatgaagagtaattcaaagaagtgtgggccttacttgaaacttcagagatgttgatcatgaatttggcttcttttgatgagaaatggccaagactgttgacccatgcacacatgttggtatttacagttgtttcatggacactggccagtctacaagcagagcactctcatggggagcaccagatgagttccagccgcagttcttttataagctttaagtgcctcatgaagacgcgaggatctcttccaagtgcaacctggtcacatcagggcacattcagcagc

SEQ ID NO: 344522 - DNA, 1000 bp, Homo Sapiens
ttttttttttttttttttttggcaggtgcaaaaaggaaaacaaatttgcttgttttgtttctcagatgtcttttctgtcagagtgcatgttctaaaattagctgtggttgcttcttttcacttctttcacgcctttgttgctcttcctctgaagccactggtaaggctttttctgctctcaatgtctgtacattctttctttgtactgctcctttcacagcaggatcttccatttcagtgctaggcttcaaggaaggatgttttgcaggaggtccttctccttttccattgactattctgtttccttttccatgggaaggtccacgtaaaggctctgacactttcttggggacacactgctgtgctgcttgtccagggcgtccaggtctccgctcctgcgcgccagacagcgctccatctccgcggcgtcgcccttgacagctgccttgtggatcttctgcagttccgagtaccggattcggtacccggaacccgtgtacaggtggtctatggtgcccaggaccgtctggcccctgtggctcctgaagccgaacaacttcatggtggtgacttctcagactcccaaccaactgctcttgagaggaggcagctccctgtcaccttttcacctccccgcccctgcccccgccgacccagccccaaatcccctatccaaccccaaatccgcaatccaacccccaatcggcgatcccaaatctattatctaatccaaaatccgcgatccagcccggtccaccacagccttcagcagcgacactcgcagcctccgacctctcagaccgagtgagcctcgcaaagcctttgggcgcgcgcctgcaccgcggtggccgcccggctcccggaagtcgctcggaggcggcacgcactggcaggtggggctgcagctgcgagagggggcgggcctgggaaccaccgcgggtgtgcgggccttgccattctcaagattcctgcggaaacgctgtgcgctggctgcgctcca

SEQ ID NO: 344523 - DNA, 1000 bp, Homo Sapiens; identical to SEQ ID NO: 160926

SEQ ID NO: 344524 - DNA, 1000 bp, Homo Sapiens
attttttgaaaatactgttttattaacactacagtgataaacaactttaagcttatgtttctttatagatcactggctcacacataattcaaaacccacacagaagctaagagtctttacattaaatatattcttcctaaaaatccttactgtatgcatctgtcctcaagcagtaaaatttgattatgcaccattttataattaatatgtcacatttacatagcaaaataatgaaggcacagctaatacaagcaaacttaaaccctttctacttctgagctgggggtaggggcacacacttggattggttcttcaagtatatattttttccaaacattagcttcagtgaagagttctgatgattttcacagctacaccctaaaagctacatgacagaaagacgtcacaaggcgcaaagtacataacgctggatacacatgctttacataatttgctacattctacatctcttcaagtaaattaatatttctaaaacgctaggtaaagtgatttaatacttaaacatatttggggtattttttacgtgtttgtaaatagacagtactaagaaaacacaaacatgagattgtaactaatgaatacatgttgacagtattttacaggttttacaccctccttcttggaaccatgttgtttctctaaattcaaatactcaaaacatttttcagaacttgaaatggcagttttcctggccttattaacagtagtgtcatgatctccattgcaatcttcctcaatgccatcaatctcctgtgaagtgtaaagctgatgtctgcgttacaaaagcaaagtctcaaagatgacgtttttcttgggttctgccttctctgcactgcgaaatgtcatgagtaaagaaatttaagaattaagcactgagaacgtgttcagtcatggcttgggtgttccatgtgtagcgtatgctgtgtgatgaatgggtttcaaagtgacgttctttacttcgcatctgctaacacccttt

SEQ ID NO: 344525 - DNA, 1000 bp, Homo Sapiens
cacagtttcagaaatttactatattaatcaacacactgaaaacattttgattcctaagcagctttgagtaccagtttttttccaggacacattcggaatgatgcaggtggggatctgaagaagactttcacagtaaaactttcccctcaaggtcgagccttccataagctggtcccttttaggaagatgggctgtcagggaaagaaagacatagtaacattctgactgtggggctccatcccattcctctctctttcccacttcttctttagaaatagcattccagtacaaactctaggtggaggaacacatgaaactgtttcttctcaggtgcattaatgatacattcccttctctactgactttgcaccttccaactcctcattgctgtcttcgaagagcaggaaatgctctttataaacagatttatagccctttaagccatccaatacagattgaaagaaatatcatcaccacttttaactaaagcattctgtcttgcaggaaggtatcatcaagattctagtgtgcagatttagcctctgtctaaacgtaccacatgagaagcttagagcctcaaattgttctttgtgtaagcgttttcttgtcattgattggttggttcatctccccaaattaggagacaatttttccatgagtaaaagtccacattaaaagtggagtcattcttatcagtagaatcaaaatgagattattattgtcccctgatcctttctaaagttcataacttctttaaggaaactttaaaaaatattttgtttggcctgttcatgaaacttttgataattttatctgctccaatccaccttatatgagctcaaataatcatatttaagatttcaagagagcacctatgtcttccatacaccagtttcatataaatgcattgcacgttctaatacagtagccttgtggagatgcatgtcttgtgggatcacaattgcggggctcaggggtctttgtgctggtagactttgaa

SEQ ID NO: 344526 - DNA, 1000 bp, Homo Sapiens
tttttttttttttttatgcttgcatgaagtttattgatacattacactggtggcagactcctccctgaaatgttgacccagacagcgtcatttctggatcagttttcagtttctgctttgcgacgtttgtgagcagtagtcacggttacctccccagcaataccgtaacttccaaagggagcacatttgtcaccagatcctgaactttttttagctacatcttctactgggaaagcaacagaaaggaaaacagggctttttggcctggggacatcttgtccacttggaggattagcattctggggacttagggtatgtttctggtatttctcatctgcaggaacagcaatgggcacttgcattgcaacatatctcaagacatctgactgtgaaacgacagcatgtccaggaagaggtttccatccctgtgcttcctgaacatttgagcctactaagataaaaggtggggcactggtcttcttggtgtcgcccatcacataagttggaaaagtgacttttggtggatgctgctgaaactgtggatccttaggattaggtaaatagagggttgcttggggaaaaggcccaggtgcaggtggcggtgatgggtgaccttgttgattcttatcagttagacaataaagggtccacatgttagaacatggtggtggttgtcctcgttcacttgttgccattgctaacatctgagcagcaagctgagctgggtcagctgggacgtaggcaaactctggtgagacagctgttggaggtggtgatgagggtggggtagtagtcttaggggtggctggtttggaagaaagaccaccaactgcttccgtttgctcagtgcctggcacagcataaactgatggaaactgggtggttttgtcactatattctgttctggttacattgtcctcgtctgtgtctgtagatttttccatctgggtaggtactttagattctacagatgtttttcctggttcttttaaacattcta

SEQ ID NO: 344527 - DNA, 1000 bp, Homo Sapiens
gctgtttcaaaatttatggtaatttgcctcaaatccatataggaacgaggcattgtataattaaataaacaataaaataatgggcggtttgtcacataggtttaagtgtagcagagtccactagaacccaattctctgtcccagcaggagggctctcatctgttccagcctgtaaattagaaaagtgagatgataccatgcttggaaattttctttttttttgagatggagtctcactctttcgcccaggctggagcgcagtggcgtgatctccactcactgcaacctctgcctcccgggttcaagcaattctcctgcttcagcctcccgagtatctggggattacaggcgtgcaccaccacacctggctaatttttgtatttttagtagagatgaagtttcgacatgttggccaagctggtctcgaactgacctcaggtgatccacccgcctcggcctcccagagtgctgagattacaggtgtgagccaccatgcccagctggaaatttccgatgctgctgaagcttgtgtcttgggtgttcaacttgggatcaggctcctcacagctcccataactgatgttgctatcctccaaatcatgggaagcctccccaccgtctccctcatgggacatcatgctttcttcattttccgtgcccatccttgtgttctcctgaagcatgctgaagcatgaagggttgtttgggtcttattccaccatatcccacatcagagtcacttccactttcactcagctggatagcagagaaaggattgtctccttcttcgtcactcccagcatcttcctcatcatcttctccttcagatataagcaaatcctcatacaggacactggcttcaggttgttgtacagttccttcctcttcatctgcaagatcaccatctcccccttctggggctggaggcttaggtttcccatcctcctcctcatcatcatacccttcaacatccacatcagagtcttcctcacccagccta

SEQ ID NO: 344528 - DNA, 1000 bp, Homo Sapiens; identical to SEQ ID NO: 160927

SEQ ID NO: 344529 - DNA, 1000 bp, Homo Sapiens; identical to SEQ ID NO: 160928

SEQ ID NO: 344530 - DNA, 1000 bp, Homo Sapiens
ttttttttttttttttcttttttttttttttttttttttttcatgaacctcaaagtagcaatatatttatttacaaaatatacagtttcacagaaacagcttcgctttatacacataaactttaaaattacacagaaccatgtaaacgatgtgaagtgtctggcctggccaaagccaatgggagggcctacttttggggtgacatccctccctcccctcacttcattagccaccaaccaggaaccacagatgggtcgtgcctaatttgcatataaagaagctgattgcagctgcccagctcaatctaacacaaaaaccaaggtgtccgacttcttagacaccacccacagggacagatctgctaaaagaacaaaaatgcaatcaaggaaacaaaatggagatgagtatcacatgcattccagaggcatcgaaccttctagcacacgtgacagttgccagggccggcagttccattctaaagtcacatggattcttaaatgcacctttaaaagcttgtggaattttttttttcaaagcagaaaaacactttggagcgctggttattcacgtggtgaagacactggacaggcgttatctcagggtagatctttggcaaattcctctccaatgcgtcctggctgtttgccctcgtcagtttctaaaccagcttactatttttctctaccgaacctcccccttggggatcttcacaataaactggcttcagaaactatttctctctagtttcgtgttaatacaagcaacagaacttttaaaaaaataagacggttggacaagtgtgaaagatactaggacaaaaaaaatgcctctgattagccaaattacggttcaagcctcttggtgcttcagtgggagaaggtgggaagagtctgcctggtggcctggcacaaaggtgccacatgaaggggaagcccccagcagtgagaacgcgggcccatcccactgaaaacaaacatgacttgcttgagcattcttccct

SEQ ID NO: 344531 - DNA, 1000 bp, Homo Sapiens
tttttttttttttttttttttttttttttttttttttttttttttttcactttttaatccagcatttattcccttgaaatgagttactacacctatgtaaatttttttaatgtttgaaccccaaagataaaataaatacatttttaaataaccttcatgatattcatagttaaatacttcatctcaaaatagtcattgacttccaaggtggtcaagccagtggccataggcgtctaccttacacatgtctgacctcatgtttacaaacagtctgggacaatgtacaacgtcaccaaaataccagaaaatccctttctcatacataggttacaattccaaatcaataagaaaaatgcagcccagaaggcaacacagcattctctaccatagtgtttttaaaagtatgttcaatgggctgttaacaaatatttcactttaaaaaaatgagtttctctttggataaggatatattaaaactgggttatttagtgaaggaattcttagagccttcaatatgccaacaggcaggtttgcaaaggcagctcccaaaattatttgtctgtaaacattttctccccatgagcatcttttaggaacatgatccacagagctgggtttgagaaacatagctttggcatggtggcatgttcagaagcttcagtaaatcttcaggctatgacatctctatttcttaaaatagtcttaagtaagtctatttcttaaattaacaacaaaaattattgttaaagccagtaagtctggaatttcagactcagaaaaatgagcacatgggcaagtagaggggaatacacctgtttatcatactatgtgattttcatcttcctggcaaaaatatgttcaaaaatacccatgttagctaattttgatgatgtctgtgcacaacatctgaacaaactaaccaatatatgcaggctgcttaaagcaaaaacagtaagtggaataatgttttcccttatccaaaaggaaaaatgcaccagtg

SEQ ID NO: 344532 - DNA, 1000 bp, Homo Sapiens
tctccgcccctgcctctggccctaagcttcagccctctggctggacactttggatgatgaggccttgatgggcagcccagcctttctagggcccttgggggcctctgtcttcctggacaaatgtgcaggtaccaccttggacccactgcccttagcaggagcagcagccttggtgtttggcccctgcccagctttaggggccttggccttggccaccaccttctttttggtcggggaagcagcaccattcttgaccttgctggccgtgggttttgaactcttactctcagctttggttttcctgtaggcctcagcatctccttggctgctcctgctgcctttggcctttgccttcctgctgagcccaccagcactggaaggtgcccgcatggccttgtctggcttggggggcaccttcctagcctctcccgactgtgccctggtgtccttggccgcgccgccttgcttgcgagccttctctgtggctgcgcctggcttgggaggaggcttctgcacctttgctggcctcttggctgcctttttcaccttgcccacgttgggagggtcctccttggcctcacttggtttcttggggcccttccccttggcctcacccgctctcctgggagccgtcgcgggggccatcttcctgggctggattttcttcttgtgcttgggaactaatttgaagctgccagtggcccccctggctttggagttgaggggcctggcgaggaggccacggcgcatgccagtggccagcgcctgcttcagcaggtacttgaagcggaggacgtccactgttgggtacttgtgcaggatgtagagcttgatagctgccaccgacgtgccccggcgctgctccccagcctgcagcgcctccagcaccatgcgtagcaccggggggtggcggcgtcccaccgggaggctgctgtggctcgggcctcctggtgggacaccgccgtggctcgggcctggcttttcagattcaggagacctg

SEQ ID NO: 344533 - DNA, 1000 bp, Homo Sapiens
aggagaattattctgactttaatatttatcaaatgttattcttccccttacaaaataataattaaaatagaaggttggagcagattgtttcacaaattcaaccttttccccaatcaggggttgggaggaggcaagtatctctactgggatttattgaaaaattctgtttgtgaatggaattcattttgggatttttgttttgctttttatttttgttttttttaaatttccataggttttggtggaacaggtagcatttggttacatgagtacattatttagtggtgatttgtgagattttggtgcacccatcacccgagcaagtatacacttggaattcatttttatttccacaggtattatattctttttacataattaggcacaacttcacaaatcaaggagaggaacagtaaggatctttgtcaaagtcatcatttggaaagcttatttctgaaggtgtgccttgtgcagagcctaaagatttgaaagtggagctagttgcagttgacttgagagatggcgtcaacagtttgtgctcaaagattttctttagtccctcctgtttatatccaacctttatctgacaccggctgctcccatcagaagagttatccaatcgcaaccacccacagcagaggtgtatctgccactgctcccgcacactctccttcatcacacagtgaaacacaaaaatgaagaatccttgcaaagtgttaaaaatggcaaacaaatacaagaaaaagttcctcatgggtccccaagcaaaaaatgcaaacccccaggtgaggccaagtaagaatgtcaggctcattgtgcctttgaggtcatgcaggatcatcttccgccgagtcttctggatttgggatttcacagaattcagttgaacaagaacagtgcagaacatggagagattcatgagaaatatgaggcaaaaataagccaccactgagatgtaaaagatagaatcatctttaatccaacaaaacggagttgttgg

SEQ ID NO: 344534 - DNA, 1000 bp, Homo Sapiens
ttttttttttttttttttttttttttttttttttttttttttttttttttttttttttttttttttttttttttttttttttttttttttactgagcacttactctgtgccaagtctctttatttgaattcttttacttagtcttcaaaataggtaccactatggcctctattttacaaataggaaaactgaggcacacagaggctgagtggtttgtccacagtctcacagctagcaagtggcagagctggcattggagcccaggcagcctggctccagagcctacgccactcactgcctggtgaaggagttatttgcatctagaaatgtacagaagagcagaagatgtcccaggagaacttttccccaggggaaatcctgctcctattttctgcctgtgaccttcgaggtcatcaaaacggcccagtggcctggggcagggccctgagcacccaccacctgagcaccctgctctggtgccagctatgtctggggtgcagcccccaagagcgaaagtgcaccgccgcattgggaaaagagacaaatggccgtgtaagcgtgtcttgcctttcctcctggaggaaatgggtcactcagtaggcgcagtcctgcagttacggcccctccagctggtgcatggggtctgcaaacaggtgtttgagcgattctagatgcagtcttggcgccaagggcctctgagtgtggaccaacggtgccgcctagtgttcgttctgggaaacgcactggcttcatgagcactgtctcatgaaggtctggggtaagggtgattctctgaaactatggcctgagcttcgaatttaaaacccacactctcacgcctacctgggcaaattcaatcttgcccaatcaccaaacagccaggacactgggatccagctgattcagctggaggagaaagaagcgttttcctctgcccccaagaaaactgcgggatgggctactggtccagatggtctatggaagtcttgggagcaccgca

SEQ ID NO: 344535 - DNA, 1000 bp, Homo Sapiens
ttatccttgacgattcattaatttagatccattggttgggcctagtgatgcattctcagctgccctcgatttccccttcagtgaagacatcctcatcctcaaagcatctcttatcttgtgatccataatggttccaaacagcaggatgaaaaaaccctggaaagcattgagcaaggcaaaaattatatggaacgtcaaggaagtgccttctatgagagtggctattccaaaaccccaggtcagtcccagcagtggagtgaggatggcaacatttttgctgatcctcataattatgaccacatcctgagacttggaactgccaatagagggcctctgagtgttgacagcaacaaccaaaaccacaatcagatttacagccacaatgacgaacgccgggatggcaaatgctaaaagggctttggtattgtcccagttaagccaacaggcctcaggtctcatgtagcctttctctggctctgtgatagcaactgtagtgacagcaatgatcaatgggcacccatagccaatggcaaagccaatgaccatcattcgggacttcatcatcctacggaaaatgaccaatattccataaatgatgagcaatgctttgaagagcatccagaaaaacagagagaggtagaaaaagtggctgaaaaatgtcactgcaacacacatgttgtagtcctgggccttaatgttaaagtgagagcctatgataaaccacacattggcagtcagaagggacactgctatattcacgatgcacacgtgacgcatgtatgatatctccgtcacaaccacccgggaccacactgtggcttcaatgatcaggcaaagaaccaagcttaggattgagacgctgagcccaatgcaggtgatgtagtccagaactttgtcggtcatcgatttggaggacatgagaatggaaaaagacatcaccacactggtgtagttacagcggcatttcacttcgttcctgatatccaacatcatttggcac

SEQ ID NO: 344536 - DNA, 1000 bp, Homo Sapiens
ttttttttttttttttttgaagccactgagacattcttgttttattcccagacccctaaatcagaaaacccgatcgaatactgagcataatttcttcattgacatttgtctctaaatgtcaagttgttctggaaattttttcttgattttatgattccttgccttattcatttgagacaaactgagttagcatgatgttgtcggaggaatctccagtatgagaaaatgcataatggcctttgttttgcagtgggttgaaaggctttgagaatttgggtttggcagataaatctgatgagttttgcttttctgtttgcttccaagaacttaaggcagacaacttgttgaacagaagttgtcgcagcttactgtccaagagtattccaaagcataagataaaaaatccctggaatgcattgagtaaagcaaaaataacatgccaagccagattctggctgtccactattgttcctattccaaagccccaggtgagccctagcagaggggtcagaatgaggaggctcttccccacgcggatgatggtggccttgtcatcccgactcagtctttccccaacagtcggcctccagagctttgtgagaactagcagcaccacaacgaagttcacagccacaatagccagtgcagggacaacaaaagccaggagtggtttgcttccattggaccagttaagccaacacacatctttccttttgtaggtattgctaggttgcgtgacagcaatggtaatgacagatataatgagagggcacccataacccaggcaaaatccaacagccatcatcaaatgctgggccatgtgatggaacacgaggatgatccggtaagccagcaggatgccaagcatgagcatccagaagaacaaagagaggtagaagaagtgtgtaaagaacacagcagctgtgcagactccagaagggttcaccgtggtgtccactgtggcaccaacaataaaccagacatcagcaatcaagaggga

SEQ ID NO: 344537 - DNA, 1000 bp, Homo Sapiens
ttcgagttttcacatctttattattgttgttgttgttgttattattattattattatcatcatcatcatcatcatcatcatcgaagtatttcacgtccagagctaagacaagactacaaacacaacacatagaaaattaataaaatagaactttgttttcttctgaggctcctcttcttacttctaggtagtatgtgctccttccagtggctttggggagggggtgggagagacgacaggtctgggatcagggagtcttcaaggcccccgctgaggggacagcgaatctaccattgaaccgtgcacgggggacatggacaaaatgagacgcgacagggacaagagcattttgctctgcttccaggaaacatcaagtgagtccgctcctcagttctcaccaggaagcctgatcaggctgaggcgagttcctcgggaaggaagggcgcgcgggatgctgggtgggctcgagtagtgaggcctcagagcacccgccgggagctgtgcgggcgggggcgtccaggagagcgctgggccccgcctgtctgcgccggagagcaggtctcctggctcccccacccgagagccttccttcccgggtctctctgacgcccgtggctccccacaggcctttcccctcgcgtcctccctccctttccagcaccttcactcggcctgtttttcttcctcctcctcggcactgagctgagacgcgctgagcagtttgctctcctttttccacttcatgcgtcggttctggaaccatatcttgatctgcctctccgtcaggcacagggcgtgcgcgatctcgatgcgccgccgccgcgtcaggtagcgattgtagtgaaactccttctccagctccagcgtctggtaacgtgtgtatgtctggcggcctcgccggccgctgggcccaaaggaggaacctgttacgcagagtggagatgctgaggcctgcggtcaccgggcccaggaccccctcccctagtcgaccctcgaacac

SEQ ID NO: 344538 - DNA, 1000 bp, Homo Sapiens
ttgagataaaattcttgtgctttatttctttaaagaatgaaaatgcccatatttctttcagtaataaaaatggaaatatgcttatttgacagttttgttgtgaacatgaccaagttatgaatttaaaaattcattctttaggttggcaaattctgataataacagtaactcttttcaacaaaagaattttctaagcattgctgctgttaccagacacttgagactgatccacttcagagcacagtgctttccattaaccatgtagacatccacacgcacacatatgtctccatacatacatacatacatactgtaagatcaagtagaatgctatttttacatgtagtggtcacatcttttatgaactgtgaatttgggtcctgcaatggcactggtaagtgacgtattcaaaccgagcttgctggacagaagatgtcgttgagaaacacctgaatgtcttttctttgaggggagagtaatcagttaccaaactcatgcaaaataaaagtggttccctttgctctgtggatgtacctgctccgggcagcagggagccttctgtgtagccttggccactgacaacatgctactgttattgtaaatgcaaatacgctatctttctacaacagccatatccctttatttttttttttaaaagtatcactaaaggtggctgcagtttacatggtgaatatatagcagtctgttgaaggaatcatctgttattagaatagcctgagtattactccagcagaagatgctacaacctctaaattccctgtgctagttgtagcccatgaattcttttattattttattaataataaatatatttgaaaaatcctatgcttcaatagatttctccgataaggactgaagcaagtccttatagacagcagagttcatgaatcgaggatatgagtctctgtgcatcagggtgtaaatctgaagttgagcatcatcgaatatgtgttgggatggctccaccatgtttctgttg

SEQ ID NO: 344539 - DNA, 1000 bp, Homo Sapiens
ttttttttttttttttttaaagtaataaacttattttaatagtgcaaaatgtaatctgctttccaaccaatgaaagaaaaactttcaaaaaatttatgaaactagtcaataccttgaacaaagaaaaacacaaataactaagtaaatattacaattgtgtactccaaacccaaaaaagcagagaccgtcattacaagccaaatcttttttagagttggttgttgcaggttactaaaatgcgtaaaacaaaatctctacttttcagacttacagaaaagaaataactccaataagaaagctaacttaagtttcatgggaaacagatcatattgatgactttaaaatgtttttcaaggagtttacggaacagaacatctatatcttgatttttatggcaaatgaggtttgtcttgacttttgaagcttatgtgtcttttgacgtatagctcagaagtaaaaaccaatcaagagggacaataacattcaggggatccacaggactttaacctgatccaaaaatataaagcaaaattttgagacaaattagcttaaaaatgcaaatgtattttggtttataattaaatataaaacaaaaattatcacaattaggatttgaatgaagtttgagtaaatttttttgtctacttcatacataatattggtcatttaataatatgtatgacaagggtatggcatcagaaaacaatacttacagcaagtctattattactgctagaaattgatgaaactagtgttttggatgtgacattgtttgacgtgtcactatttaataaaagaaaatagaaaattttgctgtaaaacattcttcagaaaattgggaactgcctagacagatgagtatctatatacctcaatgaatttctatgtacatctccttactacatcacaaacacaaaaacaacattaatatatttacatatatgtactagacaaaaatgaattaactttccctagaaaaactatacttattaagaaaaca

SEQ ID NO: 344540 - DNA, 1000 bp, Homo Sapiens
ttttttttttttttttttttttttttttttagtgattatgcttttatttatttccaacttcttataggtaacataattttcagacaatgttagctgtttttaatccatcagtaaactgcattaagattcttaataaacaaacactgaaggcctctttcatatttgtatcatctgcatttttttttatatgcttgtcatgtggctttactttcagcctcactcttttcttcttccaaatggattatccttaaaccttttacctttaaagagcctgagatttatatttaactcgaacaacagtttgcctctgttgcccctgtgttcatgttttcctaagccagagtttcccacgcctcctgttcctggcagcccaagtgccttcgctgggctactcccacctggcccttgcttttcattccttagggcagtcacttagcaccttccaaagtgcctgcacatgtttcttatttcatttcttaaacattcatattaccactatttagattgaaggaacagaattggtttgggcttgaagagaatacaaagagatctgtcttcaattatctgatagtagtaaagtttcacgggagaaagaaagatttcggttccacataaggaaaaacttggaaagttttgaatggaaagttcatagagagattcagtaaccacctgtcaggaattttgtaaagacgtctacggccatatcaccctgaacgcgcctgatctcatctgatctcggaagctaagcagggtcgggcctggttagtacttggatgggagaaattttataaagaacacatgaacactagctggcctatgtggcctttaaaatctcttccaatcctgagattcccacaactctggataaaaaggggcaaaagtattagacatttcactcccattaatatgagggaagtaaatgacattgaggtccaatttgtctgtagttcagaattagtccaatacagacccttagaccaactagggaacaaaaagcaag

SEQ ID NO: 344541 - DNA, 1000 bp, Homo Sapiens
tccagagaataaatttaatttatgacagctgtaggacctctctctgtgggggccaagtcaggggtgttggggtttgtgaaggggttgggggggtctctgctccctgggactgaatgggcccctgctgctcgaccctcaaagttctttgccctatagcacatctatcctgtgccgtgggcatgggtaaggagacattcaggcatcagacaagcatctgtcaggcgcctaccacctgccagccctgttctaggcactggggatgcagcagtgaatgacattgatagaaatccctgttctcctggagttgatgctcctctgggagccctgccagagtctgacggcaggactcaggactgactgggggaagggagtgaggaagagaggagaccaagagatgtctaggaatccagcttggaggatgcagttgatggtgggtccatcaccgggcaggggaccgtatctgtttcccaggaagggtgtggggattcagtctgggtccaggcatggcgaagctggcacccagtctcaggctccagggatagcgtgtaggagtgattttcctcggagccacagctggcatggggagctggtgtggatgggacaggagctccggggggtcctgcatcgcccttggcccctggcctcttcttacattctaccttcacctggtctctgcagtgtttgtggcaacacagcccgcactcccgacagcggtagccttgcttggtgacaccccagaggaagccactgcagctgtcgcagaaggtaggctttcggaaggtgacctcatggaaggtgtgcaggaaggccaggcccaacttggagcagatggcgctggcccggagcaggtaccctgtcagctcctctctgctgaaggatcctctcccctggcgtgggggtgggtgaagcccatggcaggcgaagggaaaattgcccgagagtcgctcaaagtcctcctgagagattgttcctcggccttcagggtcataattcttgaaca

SEQ ID NO: 344542 - DNA, 1000 bp, Homo Sapiens
ttaatcggccgtcatctgcagctgctcctctgtgtcttctggatggtgttcagcagtgggcgaaccaaggtggtagcctgtagacatgttttcaagctgagctgctatggcgcttatattggtatctgctacaacctgcaggataatgcgcccgtaggcgttcttcagcagattaaccacatccgcgtgagacagcccatccaaaggttgcccgttaatgctgacaatccgatctccaactttaagcttctgtgtccgtgcggccactccgctagcctgaatcatggcaataaatacggggatatctcctaagggacttcctcttcctccagcaatactgattccaagggcatcactgagctccctgtttatctcaacagtccttggttccatatctgtgcctgaatttttctgggaaggatctgaaactctttttgtgccaaccaggttttgcaggccagtgatgacaggagcgaaggagggatgacagctgctgtgtgcactctgctgactaccctgactgttctgtgatgtcgtccttgcggaggtccaggaaccagctcggagtcttccaatctctagctgcacaagtccctgtgcacacttgaggatggtggccactgtctcctgtgaggcatttctcatgtcctccccattcacagataagatctgatctccctgaatcaatctcccatccaggtctgcggctccgcctttcacgatgtcagaaataaacactccgcttccatttcgtttcccaacgatgctcaggcccaggccccggccagctttcttctgcagatccacagggaaaatctccaagttctcctcatcccggtagtgtgcctcatctctatacaccaccagccgcaccttctggggggtctgcctcagggctgtgatggcttcttcgtggctggagttcctcaggtcaaccccattaacctctaatatctggtcaccagcccaaagtcttccatctctggctgctgccccttct

SEQ ID NO: 344543 - DNA, 1000 bp, Homo Sapiens
ttttttttttttttttttcaaacactttattgaaatgagtaaagaaatatacaagtaggtagaactgggtataactttggtataatgttaaaatttgaccaagtatttttagccttccctttccccatgtcaggcccttcaatattccctaaggcttcagtgcattttacgttagttggccttaactgtgctcttccattgtgttgaaataatcataacctttgcaaccctgtttactcagaagatgttcctcattccaccctaaggctttcctgaatctccaaacagaagctatttatgctcatctggcaataataatatgtgacctatatgtctttagggacttaatttctcatattatgctattttatatatcttttatactgcctttgcaatgaaatgaaactatattccttccatatatataaacatgcatcttgtatgcaatcagtactgaatacatattttgttaaattaatggcatacgaagcttttttattgtttcttgcttcacaaatgtatatatagatgtgtcaataaaacaatgagacatttaaactacttccaattaaatgatatttaccttgcaagatgagactgaactctgtttgctttgtggattcctttaatgattgatttaaagtagaagtaaaattttaaaagtgaagaattattactggatgttagttgtgcagggaagataatcagagtggttgaaaatatggggaaggcgggggtgggagttgaaccacataagacctattttagcccaggttactgttgagggacccagttataccataagttgaattatgccaacttaaaaactataaatcacatgatttaaatttaaggcaggtgttggacttgaccttttactccagcactaagaaagtttaaaacagtgttacttcaggatgtatcaggatgggagttaaggtctccagcatgattaaaatcagtgaaatttagcagaagctactgaactatagcaaaagac

SEQ ID NO: 344544 - DNA, 1000 bp, Homo Sapiens
tatgttatgtgaaaaccccttacaaaaggcagtttattgacaaataaatgctttatacattcaggtttttcccatctctcaatagtgatggtttccaaagaagaaactcagtagtgaagaatacatacttttttttttttgcattagtttgatcagttgaaaatcagaaccttcaaagcatcttgtgaatgagagaaatggaactggacctgggcaaggcatggggatggtagagatccatatgaataaatgatttagctgttgatgtggacagcaagagagttggtgggaaatgttacagcagacctgaccacgctacaaagggtctgtgaagaacacagtacaggtatcaaaacaccaaaacaaaactaaactaaaaacaagaacaaactgcaactttgccaaactgtaaacaaggtaaagcatttcacaggttcaaagttcaagggaagtaaacgtctttaaattatttttgtcagttcaaccctgatttaaaaatatggctagcaaaaacaaggaagccacagctgtcgacatcctgagcaagcatcggtctcctttgagaagctgcactcccaagcctcttctcaagctgctacacgaggaggagacacttctctcttgaattccatctcagttctctttatttccacactcttggaatacatcgattgctttccattttggtgtctacagttctggctgctatagatttagacgtggggatactggaggagggaaggcaaattctcggaggatgctccgggcaacttcgacattattctgggctatctctaaggctctcttcacctcttcaaaggcataaccctctcccatgagttttgcaatttttgcatcgacattttccaatgccgcctcaggcccatggggttttctgtggtgaatttctggtgcagtcctgcgcggtcgtggtttagggggtctggctggtgcctgtgaaccatctgaacatgaaggaagctgatcatagtcctgtgat

SEQ ID NO: 344545 - DNA, 1000 bp, Homo Sapiens
tttttttttttttttttttttttttttttttttttttttttttttttttttttttttttttttttctctgtccatttaaaatgttttatttttttaaaactagatgacgtgccactgaaataggcaatgttggcaaaacaatgtctgttacaataaaatacattagacatttaaataaataaccttaaaaactatgtgaagggacataaacccagtcgattgaatctggaacaatgttttctgcacaagcgagtacaggcatacctctcgttaaaactgatgtaaacagaacgaaccatcacaatcctaaagaagaagccaagcggggcgggggtaaggtggggagaggtggggtggggtggggtgaacggaggccaaagtgggtgagggaagtagcaaaccaaaacaatactgactgaggtagcaagactctgctcagtgcagaaaaattggcttatgaataaaaattagactgtgatatcaaattaaatccggatcatcatgcaaaagacacaatacatgctatttagttttagaaaaaaaaccacacacattcatttcctaaaatctgctgccaattaatttgctgacaatgtctgctggctcaactattttttttatacaaggatgagtattaaacagaacactgtacatgctttttcatctacaaaaaaatatttgcataaaatagtgttagttctctgtacatgtcaatggacactttaattatgtgtataaaaaaggaaaatcttgccccactggagtcagaaaaagcaaaacaaaatctagagtatgaaacctccatcaccagccagtatgttcatgtgaaaattcagcagaaatagacagttgctttaaacaataaaaaaattaattgattaagttaaacatcttctttatggaaaactgtcagtcaagaccagaacatatcgctaaagttagtgtctgtgctatagacccagatcaccaggggcattatgagcagcacaaacggccagga

SEQ ID NO: 344546 - DNA, 1000 bp, Homo Sapiens
ttttttttttttttttttttttttttttttttttttttttttttttttttttttttttttttttttttttttttttttttttttttttttttttttttttttttttttttttttttttttaagaacagtacaatgtttattaacacgtttcttcctgaattttcttcaatttttttaaacacacaaaaagcttttctgtacttagattgctgtttgctgtttttaatgttgttaacatgcatattattgcatttatggatagtagtagatagtgtaatatacatgaaaccaacatctagggatggctgccttctgagtgctttacagatggcacgttctcttattatccagcttaatcacagctcctccaactgataacttcacatcatctgcagtatttccaatctgtaaatctggttggcacaagttggttttagcgtatttggaaccgtattttaaatcactggaactactttgccttaatgcccatgggctgtcagctcccaagggctaagaccaagtttttcttaactttgtgcatatagcgtgggacctgcccagaacaggtactcaacaattttgctgagcagaactgtcctcaatggagaaaagaaaggagaaaggctttactgaagactgccccaaatacaaacaaattccattttaaatggaatatatacactttagcccccaaatgcagaccagtgcacgtctgtgtagtttccgactagtcacctggtaatagatcattcctgtcattcacaggctcagtcccagctctatttttcagtatcttgaatcaagttctctctcctctaatcatggaagaaatagacccataactagttattttgggtaaatgggagctatttaaaaaattgatattttaaaagcttaaatgaaatgttaatcaaatatgatttatgattattttctttctatgagtattctttaattgtggaaggcagtttcttaggaagggaacaagggttctctttta

SEQ ID NO: 344547 - DNA, 1000 bp, Homo Sapiens; identical to SEQ ID NO: 160929

SEQ ID NO: 344548 - DNA, 1000 bp, Homo Sapiens
aaaaaaacaggacccagtttactactgaagctgcagcgaggttacagaggcgtcttggggctcagtccctgagctccgggacgcccaactgggagtggggcctccactctcctacgtacagacacccccatagggaaacgctcacatgctgtcctgctgggacgctgcaggcctggccgttctgtggccgcatccgcgtccgggtccctgtgtcctggctgggcgagccggggagggggctgattcctgggagcggttcagcagcgagttctgaatgtcttccaggacttcacggaagagctcctctcgggacttcatgccgtccaggtagaccacttccacaccgttggcctccatctcctgcctatacttctggtacatgggccacacgtggccatcgaagaggccggggggatcagggactgtgtagttgcgggtacttctcctccacttgcactcttcatacgggacggtcaggaagtaccggcggctgtacaagtccaccaggggcttgtagctgtagagcaggaagccttccaggaggaggatgtgggtgtccgaggcctctggctggacgctgaccccgtgggcacgggcaaacttctgcgggctgctcagccaggcctgcacggtgtccagcatggcctccatgtccagagactccagcacgtcccactgtttgaagccgtcttccccaactgctatttggtcttggggcttgaagaagtcatcctgatggatcacgcagcagttgggcagggctctgagcaggctgttggtcagcgtggtcttgccgccgttggtcatgcctccgatgcccacgatgagcttcatgccggtgcggaggggcggcggggacgacttccaaggcagcccgggtagggtgcgaccacgcagtgcgctccggagtgcgtcccggcttcattgagaaaacctggcgcctttataggtctcggcagcctggaggccgccccgggggaggcggcccctggggatgggg

SEQ ID NO: 344549 - DNA, 1000 bp, Homo Sapiens; identical to SEQ ID NO: 160930

SEQ ID NO: 344550 - DNA, 1000 bp, Homo Sapiens; identical to SEQ ID NO: 160932

SEQ ID NO: 344551 - DNA, 1000 bp, Homo Sapiens; identical to SEQ ID NO: 160933

SEQ ID NO: 344552 - DNA, 1000 bp, Homo Sapiens; identical to SEQ ID NO: 339410

SEQ ID NO: 344553 - DNA, 1000 bp, Homo Sapiens
tttctaatccaaacgcacttctctttattcaaaccagggtcaaactggtcaatgggaaacgccctgaagccacgtgcctggggagaaaggcttcctactcggttcggttcagcgctgcgtgggatccacgcggctggctgtgcgcaacccccacagttcacctcagacactaccaagcaggtcagtcgacaaaagcaaggaattaaacaaaaaacagaaatacactcagtagatttcttctagaagctcccagagtttctggaccaccaagtcccaacccccaaagccaggagcgaggggactaacagcgcaccccctccaccagtgccgacggaaaccccgttttaaattaaaaaataagccagtatacatcgtagaaaatttctcttaaaaatctcacaatttgtaaatgtatattttttctttaacataaaagtttacaatataccgtaaaacaaaaggctcaggaaaataatttccaaaaaaaaggaagaaaaagaaacctgaagttttgaattaaagctgaagacattttttttaaaccctgttgttgaaccagtgacttttttttattgtgctgatgggttagagaaagaaatatttaaaaacctcagtccagacgacacccacagccgctccaaaagcctcgcgccctccccccgcccccccccccaaggttgagtcgccactttgccgccaagtttgtgattgtcacgagttcacaagtttggaatcctgggtctgggccgtgcagacgtcgcggcgccgcgggctagcgtcggtaggggtggaacccttgcacgttgtggttctgccctcgtccaaagccgctgccgccggcgggggggccccccgaccctggcacggagggacccccgtaggaaggaggctgctggctggggtctgagaagccctgtccgaagccactcaagtcctgcccgtaacctgctaggccacatcactgctcagcctgaccataagactgtaaacaaagtgtggg

SEQ ID NO: 344554 - DNA, 1000 bp, Homo Sapiens; identical to SEQ ID NO: 160935

SEQ ID NO: 344555 - DNA, 1000 bp, Homo Sapiens
ttttttttttttttttggtagaaggcacacggctttttaatagcagcaagtcaggtgcatctgcctcgaggggctaccaagccatcataccattgtggcaaagggggcatgaggatgaggagaaagcaccaatgtgagggcatcctcggtgtccacaggtgagcataaggcaggaggggaagcttccaacacatctggatggcgacaccctgtagcagttccagggaagggtgctcccgggcagctctggccagggccagggccgctgtgtcaccagcaccgttgtacgccacgttcagctcctgcagctgccggttgcggtccagctgggcagccagcagctccaggccttcgtccccaaggcccgtgtgcagcagggacaggtgcgtcactgaggtgtttcctgccagcccctccattagcacggcaacacctgccgccgtcagcgggttgttggacagccgcagtgtggtaatttggcactggtcatgcagcaacaggtctcggaggtccttgcaggcctcagggcccaggctgttgagttgcaagcccagcttccgggcacgcaggaagacaggcaggagtgtgcgcagcccagcaggatctagctggcaggaggccaagttcacctcatccagggcatgccttccgctgcccagcacagctgccaccactgtgcacttgactggtgtcatgcgcacacctgccaggttgagctgacgcagggagctgagcacctcagcggagaagcgctggttctggaactcatagtggaagaagaggtggtcaaggagctctgatgggggcagcacctgccggcccagcttgcccagcttcttcttgatggcctgggcattctccagggcatccaggttcttgatggggcagccaagctgagctagcacagctcggttgtgggcagagagaagcccccccatgaacatggggaagagctcgaagacttcatcctcagggggctcatctgggtggcgccgggggc

SEQ ID NO: 344556 - DNA, 1000 bp, Homo Sapiens
tgtcattttgtacatacagcatttattacaatacttggcatacagtaaatgcccaataagtatctgttgaagaaatgagttaataaatgagtaaatgtcacattgactttatgaaggaaaagatctggcagcaaaggtagcaattttaggatagaaaggaaatgataacatgggtaagggaagtatttgagggtcaataaggctctgggggaaccaattcctcaaatcacactgtatctgtaactatttcctccatcagtgcacaagaatggcacactgttccaataatggaacactgggcacatgggagttatttatatcctactgcttaaggtcatggccaaggtctgattttgcaattcaaaaaattgcaacctccagcataaatgggttatctttaccacaccaatattcttggtaataaacttacatttatgttctttctttaccaatattattaacaataacccactattattggtatattagtattagtatattattgataatatacctatattattatattattaatataccaataataatatattaatatgccaataataataatatctcaatataattggtaaagaagagagaaataaaataaggcttctctaccatattatttcacctatcactttattccagataatttatatctagctgcaatttatctccaaagctctaattccaaagatttcaacaccaccaatttaatatctgaattgctcctctctcatatagtgggtaccccaaactcactaaaggcaaagcttaagcaaccatcctcttctttcctactcccccatatctgctactggaacttccattcccaaagatatcctgactacggacaatggtgtcactgttgacaccctctccacagtccccaaagtcaggagtaagcaaactctatttcctctcttttgtatttctttgatctgtaccatcctctccattctggctgccatcaatctcctcccagtcctcaatc

SEQ ID NO: 344557 - DNA, 1000 bp, Homo Sapiens; identical to SEQ ID NO: 160937

SEQ ID NO: 344558 - DNA, 1000 bp, Homo Sapiens
ttttttttttttttttgcattattttaagatctttattattaagtaactcactggggttgtcaaagtatgttataaaattacacagataattagagatatatgttacatagaaatgctgattttacactctcttctgagtacaagcatttgattacagaggctcatagcacaacaaaatgtatttcacgggacactgatgcccctattctgatattgacaaggcaaacatcagcggtagcagagtcaacaaagcaaagcaagatgaaatgaaactagatgtaggtaaaacaagctaaaaatatttttaagtgtttttgtttattgtcatggtggctgttttctacttacaagattgcagtactctaatttagccaagtaattgctgctgtaaaatccaaatctacagagcgcacaattttttaaatggagtgtgcattcctcaagcaagactaaaaacaatcttacttgggtctctaatattaagcttcagaacagttttgcaacttttgacctgaacaaatctcttatccataaaacaagaggaataaaagattgcatacgtgcatttaaaaagtaactttattactcccaggtcaaaaaaaaaaaaaaaagggaaaagaaggagaaagggaaggatgagggggaggagggaagaaaggaaggaagaacaaaaaaagaaaaaagaaaagaaaagaaacagaaaggcactctatctacctatacctatatattttacttgtatttctaatcttggactatgtaattacttcattcacttgtgtgttttaattttcatggagagagaagagaaagaaagattttccagaaaaagcaaaaactgtgtgtgtgtgtgtctgggtgtgtatttaaataacataaacaaataaaaacagtgccacatacttattgccagtgcagcaacaatgtaaaacaaaaacaaaacacaaataattctgaatgttcctaatatctctttgatttataaagtttaaagtgact

SEQ ID NO: 344559 - DNA, 1000 bp, Homo Sapiens; identical to SEQ ID NO: 160938

SEQ ID NO: 344560 - DNA, 1000 bp, Homo Sapiens
caaggcaggcatatcacttgaggtcaggagtttgagaccagcctggccaacatggtgaaaccccgcctttactaaaaataaaaataaaaaaattagccaggcgtggtggtgtgcacctgtgatcccagctactcaggagactgaggcaggagtatcgcttgaacctgggagacaatggttgcagtgagccgagatagcaccactatactccagcatgggtgacaaagtgagactctggctcttaaaaaaaaatttttttttaaaagttccaggtcacatggctatcttgggctatgaaaaacacaaggactaccaactccacaaggctggctttgtccatcccttaagattaagttttactctattactcaaatactttatttcaacttttattaaaccaaatccagtaacttttacaatgccttactagagggttgcctcataactgaaccttcatttctggcagggaagaaaccatggcttcaggatcatgactgaagtttggccatgttccatcattaatgttccaacatcaccagggacacaaagctcagcatgagggcttctacccaaatctccctacgacaggtacttcttcaactcttccaccacctcttgaggctcagggaatttgagtttgcgtgggggccccttcttaatcccagtccagagctccgcactgctgccgtccgggcgcagcagcgtcacctcgaagctgcccctccggggcttcgtcgggttcacctttactggaagctctggggcctccaggcgcagcgcctggctcagggccgcggcgttgcgcccatagacgcgtcagctagtgcaatgctcgataacaacggtcgcctcctccattccctccccgccgttcgccagcttctctcgcttctcggctacggcgaccaccgcggcctcagccttacgcttcctcccgcggggagccatggcgcctagagcccggccgagaatgcagcgggactggtgggtggggggcgga

SEQ ID NO: 344561 - DNA, 1000 bp, Homo Sapiens
ttgtgcagcacagaggctttattctatagtttcagagtctctggtatctccagtaggaacagagtgggcctcaccctctcctcatgactaagtccagaaaatctgaggtgaaagtttgactttttaactttagtattccactcattgtccacaaatgcttgggttacactgcctgcatcactaattaaaagtgaggtaacctggtataagccgtgcccaacccaatatttgagaacttttagtgagtacttgaaaaccaggctgtattactaaacatccccagcttccaaagttcagaagtttggcgggcctaatcattttccaaaatggaatcttaagatctccagctgccctcctcaccgccaagtatgaacaataaatcctgactttaacgctaaaatttgcaactgacttctgaggacatctaacagcagctgttttccagcgatgggaatagattacatggatgcatcttccaacaccctgtgacaaagaggtgcagtgattcatgatcaagcctctaaagtgaaaggcacataggcttttacaaggagaatgatctgtgttcaaactcagtgtgctacttgttagctgtgtgagcttaaccaaatctctgtgagcctgttttctcatctacctaatgggagtaacaccaccttgctcacaaggttgtaaacgctgtacataatatacataaagacccttggcatactgccttaatatagaagataataaaagttagccattattattcttattctctaagagtttaaatcaactaaagagtctgattttaaattgaatcttctcagaccgagtcatccaggactagaattaacatatgtatattctgtctgtaaggcagttaaatgcctgtagaggttacttagtgggttagaaaggttagaaccctgaagtggaaggacgttgtccctgctcccactctcttacacctgcagcacatgcaagcacgcacacaaatcacaccccccaggctaaa

SEQ ID NO: 344562 - DNA, 1000 bp, Homo Sapiens
ttttttttactggttactaaaattgcttaacatttattgcttcttttggggttagcaagttgtaagcctcattagatgcatacactaagaaatggaattgattagactcgaccgtaggaatggatcaaactatgtactcttcttgttccaagtttcctccaaaagtagtagttattttgtttttcttcatccttgtacagatacatttagtagagcttaccacatagccttcccctaacaaattccaaagacgtccacagcccccttatgtaatgaggtccaatcaatgatcaattagccatgctagtggctaatagacaaggagattatctccataatctctccaaagatggcaaattatggctatttatttttggttttgcagcattttttttttaaagacaaggtctcactgtatcccccaggctgaaatgcagtggaatgatcatggctcactgcagcctcaaccgcctgggctcaagcgatcctcccacctcagcctcccaagtagctggggctataggcagagggcaccacaccaagctaatttttaaacttttggtaaagacaggatttcaccatgttgcctaggctgatctcgaactcctgaactcaagtgatccacccaccttggcctcccaaagtgctgggattataggcatgaggcactgtgcctgattgcatattttttaaaatttaccaaatgaaataatctgattatctggagattcccaagagttcaatgaagatgatgaaagaaacactatgaaaacataacctgggaggagcctgacaactggcatcattgttctatcttcctacttataagtctttttttccgagtccacattgaaaatagacagtatctcttcactagtgggtaaagttactaagaactgaggataagctagagataaccttctgccaagtcaaggcatagctggaattcatgccatgattttcatctaccacattgaacaactgatgcctgcagccaggc

SEQ ID NO: 344563 - DNA, 1000 bp, Homo Sapiens
tttttttttttttttttttttttctctttgaaaagtgctttatttcagtaagatctaagtcagatgcattaaaacatatcaaaatgttacaaaaatgtatggctcccttgctgaggccctgtcagattatgttagatgagtaaacgcatcagtgtgtaagttcagaaccaaacgttgaatcaagtcatgtaccatcgctgaaaggcaagttataattaagaatacttcacaaggctaaaacaattgggaaaacccttcagaaacgctagcaattacacaccagaaacatcagcctggaaacaggtctgcgatctgcagggaagactccaaaggtaaactgagggtttcccaccacagcttgtgcatcttgtgctcagttaaatacagttaaaacacaaggggcgcttcaacaccccccttgtgatagggcagagctttctattacatctggaagaagggggcgccacattcattcttatttttacatctctaggaaatcatatctcatctcatctgagcgaagcaagactttgtgcaaaacgatttaagtggaaacgtgaaaatgtgtgctgctatatcagggacgcttatggtgatctcctgtctcctatctcattcttcacgtcatggtttggccgctgtaagacactgaaattgccttgttcatgtagaaatttctcttttggctgggcacagtggctcacgcctgtaatcccaacactttgggaggcctaggcgggtggatcacgaggtcaggagttcaagaccagcctggccaagatggtgaaaccccacctctactaaaaccacacaaaaaaattagccgggcgtggtggcgggtccctgtaattccagctacttgggaggctgagacaggagaatcacttgaaccccagaggcggatgttgcagtgagctgagatcccaccactgcactccagcctgggaaacagaaccagactctgtctcaaaaaaaaaaaaaagaaagaaagaaacctctc

SEQ ID NO: 344564 - DNA, 1000 bp, Homo Sapiens; identical to SEQ ID NO: 341793

SEQ ID NO: 344565 - DNA, 1000 bp, Homo Sapiens; identical to SEQ ID NO: 343737

SEQ ID NO: 344566 - DNA, 1000 bp, Homo Sapiens
gcacagaagtttgtagctatttattgcactgaaaacaccaagaataaaacaaacgccccttcttcccatcccacccgccccccccaatagcagaaagtttgagcagtgttcattcaagttcacagccacatatttttaaaaaagaaaagaaaaaaaaaaagaactaaaacaaaaccccaaacaaatagtaacaaagaaaccagcacggggagtctggcaaactcatcccccaaaagggtctccctttgaagggagacaggaggccttgggtcaggattcgcaccatggtgggcacaaacccaggagaacactttcctgtaaacgtgttttcatgctggagccaaggttttgacttgggtttggatttttatttatttatttattattattattattattattttgcatctaaaggatgttttggaggagcacagagtttgtctggtgagggtaggctctgggcagatttttctgtgagtctcccctgcctgccacatcaggatcatccctggtgccctgtggtggcaccaggtggctgcccacccacaggcgtggccttcacagtgggggccatctcagcctggggtagcgatctgcctccacttctctggcacttggagagtgacacagtggacaggaggtgtgtcagccaatgaaaggcaggacctcaggctcctccagctcagtttcctctggcagggaaaccaagctccaaagagggaaaggaacttgcccaaggtcacacagcaagtctggtcagagctgggaattgaagcctactcaccccaaatcactgctctttcccctgcagtccactgctgaaaagcagttgacaggcaccgacgaggggaatcaggggcaggtgggggaggggatggagcctgaccaggtctagaagtaaacaggagtccagccagtgactatccctgccagttcctgcaggtaaattaggcttcacatagccagacgtttgctccttcatcggctggatgggaacaaa

SEQ ID NO: 344567 - DNA, 1000 bp, Homo Sapiens
ttttaaattttttcccacatgaaaatatgatactttaattattaccttttacattattagtttgcagacaggcataattaggtcctcagttgcagaaatcacagacatctgaaggccagcactttaatttggccaccgtcttaagatttctctgctcttcctttgctcctcctcataatgcacagtttgaactgatgctgttctatataaggtacttttccacctacctcatctctgactacagtgctatatttttcacacagtaaggacaggtgttgtgttaatctcaccatgccaacaatcagggcaccacctagcagagtcagtgaaggccaaaataaacagtggaagatagccatttggtcatacttttttataagaatgacatcttcagattggctggctggactgtagaagcatgaaaagggggttccatttttgtgatcgaagaattcttttatgtccagagcactgttgagcaaatcatttctatcttggtggcacttaggtgtgtaaaagcacttgggatttatctggacagcctcttcattataatgtaggagagctttctgacctggatggctgaggttcacaaacacctgaagacacgggtacttcccctgaccgtggcagtgcacaccacaggtgaaggcacagtccagccagtcgtccatgatatctgtgtggatggcagtgcaggtcgattcttctctctgaatgctgagcataaaaggctttagaatggttgttccgagcaagaagaacattaggactgagaagcccatcatggcaaaccccagcatcacggctcggtcctctccagcactggatggcagcctcttgtgcacatctagtgggtctccatcactgtagtctgtctctctcttcttccctgaggcaggaaaggctgtcattggcagtggagagaaaagagcccctcacactcagacttcctgtgcaccacgcctgccgcctgcctcagcttaggacatggtacggt

SEQ ID NO: 344568 - DNA, 1000 bp, Homo Sapiens
ttttaaattttttcccacatgaaaatatgatactttaattattaccttttacattattagtttgcagacaggcataattaggtcctcagttgcagaaatcacagacatctgaaggccagcactttaatttggccaccgtcttaagatttctctgctcttcctttgctcctcctcataatgcacagtttgaactgatgctgttctatataaggtacttttccacctacctcatctctgactacagtgctatatttttcacacagtaaggacaggtgttgtgttaatctcaccatgccaacaatcagggcaccacctagcagagtcagtgaaggccaaaataaacagtggaagatagccatttggtcatacttttttataagaatgacatcttcagattggctggctggactgtagaagcatgaaaagggggttccatttttgtgatcgaagaattcttttatgtccagagcactgttgagcaaatcatttctatcttggtggcacttaggtgtgtaaaagcacttgggatttatctggacagcctcttcattataatgtaggagagctttctgacctggatggctgaggttcacaaacacctgaagacacgggtacttcccctgaccgtggcagtgcacaccacaggtgaaggcacagtccagccagtcgtccatgatatctgtgtggatggcagtgcaggtcgattcttctctctgaatgctgagcataaaaggctttagaatggttgttccgagcaagaagaacattaggactgagaagcccatcatggcaaaccccagcatcacggctcggtcctctccagcactggatggcagcctcttgtgcacatctagtgggtctccatcactgtagtctgtctctctcttcttccctgaggcaggaaaggctgtcctttggggaaagggagaaggagatactgcagtgagctcataaagaagggggaacatttccaatccatggggactggagggataatctc

SEQ ID NO: 344569 - DNA, 1000 bp, Homo Sapiens
tttttttttttttttttcacataatcaatcattttactaaatacaagcatattttcattcacatacagctaaataaagcatttttcacatttcattacagtgcacaacaaagtgaggaaaagtatacagtacattttattctgaaatatgagacaatctaatccaacatgcagttgtggtctttgttacaagttagtttatcttttctttacctatgtagtaaaatagcttctaaagctttatccttagtattatattaacacctgattcttttcacacttattttctaaaacccacttattgcagtgacaatggtactgaattctactaaaatgatttttaaattttctagaacttatttaagcaattaagctcagccacctctgctggatttatgctgaatatttttaaacctgccagaaaatgccaggagtgggaatactgtacatataataaattttagtgaagaaaattgtagggaagttttgtttctttccttttttgaactgacagaatccagtcgactctcatttacccactggataatcttgctttcagaatcttctaaacataattcagtatagcagttgatgaaattttgtgttaatgaaatttgccatgttttgtttgtcttttacaaccacgaaggtggcaatttaattaccccacctaagccagctcttgtgaaatgaatatagagaagatgatcagttcacttgtagttaatgctgtgaactgatccaaagtggtttgctcatccaacttggggcacaggtggcagaatagtcttccataattttcatgatttggtttctttattctggctaaagcaaattcccaaagtttcagattcggtcacattcatactgaagttcaatattatatctcaaagcgatttgccattcttaggccttcctatcacgatggatatgagaaacctgactctagtcagaatagtttttttttttaattgtgaaaagtatggcttttgcctagctga

SEQ ID NO: 344570 - DNA, 1000 bp, Homo Sapiens; identical to SEQ ID NO: 160940

SEQ ID NO: 344571 - DNA, 1000 bp, Homo Sapiens
ttagacacgtaagtgaatatttatttgaaatgaaaaagaaattgcaacaaattacaaacttaacaaaagcttacgaatatatcaaatatcatgaatcccaggaaaataacactttattattattattttaaatacctttataatacctttttaatattttatggctgattatttttgattgtctcttcttatgactatagtttttatatcatttctgtagagagaacagaaggataattcaatctttgctctagcatggttgatcaaaaatttaaagttattattggtagtttaggaaagattatttccatttccataacttatcagtaatgccacactgtcatgtcctctgcagtttctggctcaggtggtgctacatgccgggggcaagaccttggagagttctagccctttgattttgatttcatggcaccttattgcagcctcttagtcactgatccaactctatcaggtcctcaccacccccactgtgcctgtcctgggttcatgatatggccatgaagccttgaaggctggccccaaggaggttgccatgcagtgtctggttgatatttctccttgaggttaaatatgggatcaattagcctgatgagtgcaaccaagggcaggtaatcagtgagggttgtccagatgttgatgtggtaggtccttaagaccaccaccagggcacacacagcatccctggactggaacagtgctgcttgtctctatgccaaagtggggtttctgattcctctcctcatcccaggaggaaactgtgctgagctttggaaggggctcttgcaagtgttgacctaaagcttaagcttcaagagttttatggtagattagcctttattgccaaactcaaaaacgatttgcaggttagatattgggcctccagtttcttgcttctcaataccttcctaaaggtggaccaagaaaaaacatcgtagaggcaaaatgatctaggaaatatgcctcagttggcaggcatgat

SEQ ID NO: 344572 - DNA, 632 bp, Homo Sapiens
tccatgggcatttgttctggtttatttgacagggacagggagttcagacactggggagggtggcattcctgttgatgttcttgtgctgatgatttgatgtccttgtgcttcggatgtgggcacagtctcggatggaagggttcagggagcaggatgcacatcccagcccactctcccactcataggatgctcatacaaatgttcccacagaaggctgaacagcatatcttatttgtttcacacttttggaaatatgaacagtggtggatgcatagatctatgctgggtcgcttctcacagaccttgattctctgcatcctcatcttgtcacggtatcctccctgggcctgcagcagcagcacacagagaaccaggacaagcagcagagtctggggtgccataactctgaccagagcgtgagccctaagtctggccaggcagtcacagacttccctgcagagctgcctgtgtacaatgcaggaagattgcgagaaaggatttcagtgctgttcctccttctgtgggatagtctgcaggtgtaaccaaaatcccaaagcaaaatttgtcctacacttttgcttgccctcctttcacaagacaccatcctttggccaccagtgttcttgggctct

SEQ ID NO: 344573 - DNA, 1000 bp, Homo Sapiens
ttttttttttttttttcacttcagtggatcctttgttccatattattttaaccaaccaaagtatcttgccacaaagaaccacagtcaaggcacaaaggtaagaggaggagagtctggacaaagtcctgttgaggtggtaggaggaactgaaatgccctcagtaaactgcagattcttctctcagtcatttctgtgaagattacccgaatagcagataatccaaattggtttagtttggtttggcatgcatcacttttaccttttatgacaacatatgtaccctataagttgtttattttggcctaacatgaaaatcatttacattctctgaaaagggaaatggcaaagggtgagggatggcaacaaacaagcaaaagcctggcttaacaccagttccaggccagatgcacacaagccaaatgaagttgcctatctggcccttccctatataccaccctcttccaccctgtccttagggtgagaaagactccataaccttttttcctttctggcttggacaccttggccaggtaagaaggctgacaatttgggagtagctactaagtaacattctttaaggccagggctttgtatacaaatacccttctctttcctctaatacctgactctcctttccaagttcccttgggaacactgtgaaaggatagatgtgtcttgcaggatctcttccactttgcctctggagaggagcaaggtgactgacttattggtatagaggcaggcaataagccaactctgctgaaggctgaggcagggacctgggttctcctctgctttcttttcagcctctccttctccccacattcctacctctggccaatcttacccataatcgcaaccttacccttggaatagaagaccaaagaaacctccctcctcttcattaatctctaggaatctgttcctttagcccacttccctgacccttctagccttgttgatgtccaatctctgccctcagaaaaactcctcaatatct

SEQ ID NO: 344574 - DNA, 1000 bp, Homo Sapiens; identical to SEQ ID NO: 160941

SEQ ID NO: 344575 - DNA, 1000 bp, Homo Sapiens
ttttcttttctttttctttttctttttttttttttttttgagacggagttttgttcttgttgcccaggctggagtgcaattgcatgaactcggctcactgcaacctccgccttacaggttcaagtgattctcctgcctcatcctcctgagtagctgagattacaggcacgtgccaccatgcccggctaatcttatattttagtagagacggggtttctccatgttggtcagtttagtctcgaactcccgaccttaggtcatctgcccgcctcggcctcccaaagtgctgggattacaggcatgagccactgcgccgggcctaaagtcatattttttatttagtatatttggatataatattgaaatatctttgaaggttataggactctagattaaggttcaaaaaatatttttccattcttaataatgtgcctttaaatagcagtttttaaaatccagaatatattttttaaaactagttaaaaatatttgttataaacaaatctgttattctaaacactagcatgctaagtacctttacttcataaatatatgctattttctagtttttatgtttaaaaaccagtcatcttttatttgaaaaattaagaaaaatataaaatactatacaatttttagtcacttggggtattaaagtcagaagtaaaaatctatcctccttctgtctaattctactttacaggtaactattctttaaagactgatgctttatctctagattacttctatgcttatgcaaatatatttatagctatgtatcttcatctatttacctctccattacacacatgtgtataggtatattcacattttaataatggatcaatgatatagctacacatatgtatgatatacatgcatatatttaatctcctttttgctttaaaatatgattgacatgtttccatgtcaatatatattgttaatctttgatccatttaaaattataaaatgttttcataagcaatacatccacctc

SEQ ID NO: 344576 - DNA, 1000 bp, Homo Sapiens
tttttttttttttttaattctttaaatttaatcagtcatttataaaactccccaattagtaaaagttggcttattttaacagccttaaacattggccactatttaaacaagacattctaaaaaaaaaagcaatcacataatagtttatagtcatttacaagtggatggtatacatttagatacagaggtagaagttcacctttacaatgtttcactaatacacatataccaaattcaaggcacaaaatagtttgctttacaaaaaaatactgtaaaaatgtcatttgctgttctacaatgtgaataaacctttcaaaagaatctttacacccttccatacatatgccatagaataagatttcttcctctcactaatcatagttggcacaaaaatggggacttttcaatgtagaagttcccatttttaaaaactgtttctttgcagagctgctatgtattctagataagagtccatccaaagaaatgaaacacagcaacttcctgaggaaagggcactttctgtatgcagcaaaattcataggtagaaaatgtatgatcttttaggataattaggtctccagacacttaatgaagtatatcagagataaaattaaaaattcaaggctgggtgcagtggctcatgcctgtaatcccagcactttgggaggccgaggcaggtggatcacaatgtcaagagatggagaccatcctgaccaacatggtgaaaccccgtctctactaaaaatacaaaaattagctgggcgtggtggcgcatgcctgtagtcccagctacttgggaggctgagacagcagaatcacttgaaaccgggaggcagagattgcagtgagccgtgattgtgctactgcactccagcctggtgacagagcgagactccatcaaaaaaaaaaaaaaaaaaaaattcaactaatactttagtcattgtgactttaagaaagagacttggtcacctttactgtaacactcagacatcatttactt

SEQ ID NO: 344577 - DNA, 1000 bp, Homo Sapiens; identical to SEQ ID NO: 160942

SEQ ID NO: 344578 - DNA, 1000 bp, Homo Sapiens
ttacagtacatcacaaataaattttattaacttaaacacaaaattaatgaagaaaaattctgtacacaacggtggacacagcacacctttatacagtaaggccaagataaactttgtcttttcagtctgcagagtacaaaaacataaaatgaaaaggttaaaaattgtcaactgtttgcttcaagcaaaaaggaagaaaaaactaattcaattgtgaatttaaacaatttggataattcacaaatgactatttctagcagcaacacacaacttcagaaaagaatgaagtagctcttcaactacttcgggtcaaagctggtgttttttccgcccaatatatgattgattaaagaagactcatcctaagggtaatttcatgacaatggattgtgtttgttagatgagagaaaatattgcccagccaaactgaccacttttggagaaactcttatggtctgacaaaggtgataattttattatttccccagattgatgcctgtcatgtagtacataatgcaggtggagaggaacgttgtttccatggtgatgacaatggcaatgaaccttcctcagggtgacaggaagaaagagaaaatacgcacatagggagtaatgcaaagtttgctgatttccggattagcatcgtgtgtcttcctttatcgaaagaaaatgcagacacgataattaataattctgagcacatgaaaactttgttagtctccgattcatgaaccattttattaataaaatatatctactatcatctatattctttgtgggaagaagcatttgaataattattttttccaagtagttacatataatacattagtgtggaaatgaaaaagtgaggtggtaggagagctcattttgtttcaaattgtttaagaaactgctgtgttatttcatcaaggccctcagaagaactgatgcaggaaaaaattttagaaaacaaaatccttactgacacttgacatccatgcttttggtcttgacaaca

SEQ ID NO: 344579 - DNA, 1000 bp, Homo Sapiens
ttttttttttttttttttttttttttttttttttttttttttttttttttttttttttttttttttttttttttttttttttgggttttgtaaatcatttattatgactgaaagggaagaaaatgataggagacaaatattacaattaaacatgtaacattattctcttgtaaccaatcataataacatactttgaatttttgaatggctatataatttcccagaaaataaaattttcacatcatcagttacagaaaattgatttccttccatcaaaatattttatctctgctctatcaaaaataaatgccaagtctaaggtactacacagtttaagataagccttcactacttgtttaaattagaggagtgtggggaggggcttaccaaatgatgaataaactactgcctgagaataaagccctcacacataagtaacagctctgtcaagcctctggctcaccaactaattattaaatggctctctaggaacttagaaactcttctgtaacccagccaaaaggcttctgagagtcatcacaaactggttaccagtttattctcaaaaacaaatttgcttattcgatgggcgactgtggctcaaaagatgtaggggaaacagtcaattgaaatctattttgatggggtttaaaaaatattctttttgtcattatcaataaagtaaaatattatttgagcaatgtatttcttagttctgtcccttctaaggatgctaatacagtatggaacatttttaaaaggcttaatgtgagaacagtacattgccacagggagaaggcagcaaagaagaaaatatgaaggctcgggcaaaaaattaattcagcagctaacatttctcaaattggttaaaaaaaatgacaaagtgataaatatatgtccaaaaaataaatacaaatattctatacataaataaaattaagtatactcatgattaccattacaattgaacattttaataatataattttcatgtcttatc

SEQ ID NO: 344580 - DNA, 1000 bp, Homo Sapiens
aaggacctttcacaaaccaaatgacagcaggtttttattaacatatcttacaatgttgattattcctagttttgtaatttctgcttaattataaagatcaatttagcttctacagtaatgtactgtatttaaatgatcattcatacaagatatcacaccagtacatttttttgaataatatacacacatcactctaacttggacctgttatttttaaaagtgggtttataaatgggacttataaaagttatggggaaaaattaaagttctagtttagcagcatgcatgtatgtattcaagtacaattttcaaccaagtgcttttttaaaatttactggtgactaattcaccaatatcaaaataaacactatcaaacacccaaattttaaagttaaggctaatattttcacttcacatccatatgcacaaccataaaacattccattttaaataagtagtaatcaaagtctgaatacattataccatgtatatatagcatcagagtttcaaactgtagaattattcaagttcatgaatcctgtaacagtatttactagagatgtcaattagcattttgctcttcaaccacacttacaaatggtctggtattcataacgatcaatgcaaaaagtatgacaggctgaacttatgatacagtatttaaaaaagtagcaatgtgttggaaaggacagctatttagtcgaacagaatcattgactcttacagaaagttatcttaatattttggaaatgtatataaaaatagcaagctatttccatgtattttattgtagaacgataggtaatcttttgactttctgaatacatttgaatatgtactgctctgctttccatattttaatgcaaggccatgatttaatgtccatttttatactcttgtaatgtcatgtcattacaaaaattttttagaacatggatctgacattatattttatcattagatttgtttagtttatttttacatgtaaaaatgtaatttt

SEQ ID NO: 344581 - DNA, 1000 bp, Homo Sapiens; identical to SEQ ID NO: 246595

SEQ ID NO: 344582 - DNA, 1000 bp, Homo Sapiens
ttttttcatttcatctgatgtcaattttttttgtggttgtcgtcgtcatcttgttttttttttttttttttttgtttttttttaacaaatcacatctggtcttgtttttctgcagacacaggcaccaggggagggaacgaggcagacacaaacatgcgacaggcaggccgtgtgcccgagggcagtcgggctccaaacaccaactctgtccggcgaaaccagggcgcagctcttcactgcagcggggccacaggcgcgcccgagcagtggaagtgcacgttctgccacttgccgtcgcggcggtgccacacgcgggtctcctcagactggctggtgcggggccggccctgcccgtcaatgtactgcgtgagccggatgtaagcgatgcaggcggcatcctctccaatgacgtgcacgtgtgggttcaggatggtcgtgtggatcggcttgctgttcttggccagcaggttctcgaagtagaatctgtggaagtccatcccttcaaccaggttgcccagtgcttcaggctcaaacgaggtcagccctgggtcacagattttcgcgtaggcctcaaagtcaccgttgttgacggcctcgatgagctgctccgtggtcttaatgatctcctgcttccgggctttagcgtcttcatcctctatggtggtattggcactgtcagaagactccttgactccatctgctttcttgttgagtaaactcttggctgctgagaaattccgtgtggccagcatggtggtgaggatggctcccttgagctttctcctggcattgaactttttcagacactccacagtctcctgtctgtgcatcatggatgctaccgtggagcgttggcagacccacgggtgcttcagggcctcatgggctgtgatgcgcttggcagggttgatggtcagcatctggttgatgaggtttttggcttcaggagtgacggtgtcccactcaggggacgggaagtcataggcaccagccttgatct

SEQ ID NO: 344583 - DNA, 1000 bp, Homo Sapiens; identical to SEQ ID NO: 160943

SEQ ID NO: 344584 - DNA, 1000 bp, Homo Sapiens
tttttttttttttttatactttttaattttaatgaacagacattgttctatctgaatgtttatattttcaattctctatttccaacaattcccttcattatcttttgctgggcccaaggatattgaagccatccattgctttacttgtcttccaagttcatcagtgcctgcactgcaaactcttgtaacttcttacgttcctctaggttatactgaagcttttctagcaactcaaaatatcggaagagtgagtctctgggccaaacacggtcatcctgatccatttccattagcccgggcagattttcgtgcacaagagtctcccagtccaaacgaccaatagattcagaaaatctggattcagaagaggaagaataggaagaggatgtggaggagacacaggaggaagactggtactctctcttttttgacaaggtctcttctgtttttgatgcagatgttattaaatcctcttcagtggcaccataattagactctacttcagacacttctgataagtccaaactttccctttgttgactagctcctcttgaactgtcctctattttgctatggcttgacgtcagtgcttcatgtgacatgttttttctcctctggatgatctgccgcttgaacatgtcagctttgagctgaacctcccgacgcgccatctcctcattcagctctttcctgatattctgaaagttagtaaccatcatggctactatgatacttcgaaagataatggagccaagcaacaaccaaaggatgaaatagatgctgctgaagatgcgactgacttcaggcaccttccagacgtcctgaagcagtgcataccaatgatccaaggtgaagagaatgaacactgttaccagggaattcgggaggtccgagaagaacacatggtactccaggtcctgacgaggtgaacgggtgtactctgagaagacgtagacaccagtcacagcaaaaatgtagaagaagatgagcagcaacatca

SEQ ID NO: 344585 - DNA, 1000 bp, Homo Sapiens
ttttttttttttttttggtatttttagtagagacagggtttcaccatgttggtcaggctggtctcgaactcctgacctcatgacccatccccctcggcttcccaaagtgctgggattacaggcgtgagccaccgcacccggccaatttgtttcatattctatgttaagccctcacatttatctaccttgccccctgctttagcttgcaacagtcaaatcaccttgagggccctgaccaggaccaaaataataatttgaatttgacggaattgtgcaaggagtttgagagacctcagcacccggcagatcctcagaagctgaagccacaccgattggcctgttacccctaccaataccacaacctcgggaagcagggactgtggaaaacacacaggttataagtaaaatacaccccaaggcacccaggcagaattgcagcttcttcatcttatcctcttcattgttccctgggcgttatcccttgaatagcattctctgagaagtgcttactattcagcctttctatattaagttgcttaaacactatacttaaacttgttcagatataaaaagggggataaaattcatggttatttaattgggttgttgtggagcataaatgagataatgtaaggaaaacacttaaaataatgcttggcacttagtaagtgctcagtaaccggcagatgctcttgttggcattgatgttgtagttagtctactttgctcctaataccaacaactcctgcaatgattgatgtttagttttagggaaaaaaaatcaaaagaaagaagttaagtaaatttttgtttcttcctattatcatgttaacttgttctttcgattcacctaggcacattcttcatcccactaaacgaaccctcaggatctctatccttaccaacatggtaacaacaaagtcaaagacattccaggcactcttccagaaaacagaaaagttggatagccacttaagaaggatctccaggatgaaaataa

SEQ ID NO: 344586 - DNA, 1000 bp, Homo Sapiens
ttttttttttttttttttttttttcaaaatgtaaacgtggttttatttaatgccttttatccatcacaaagcacccattccttcccagcatccccctcttcctagaaaacaagatgtagcgtaaggcacgtgcactgtccacatgacgtcaagtaggtctttaaaaacaaaaataagcaatagtcttttcaacagcttgaactgccttcctctctaatgttcaaagaatgattgtccccacaaagcacaacttggagaatagagtgcttacattagaactgtgaaccaccccacataccagttcaaaaaaccaaaccaaaccaacgactaagaaacccagccacacaggtacaagagcataattccggagtaatgagactagtccataaattaaaaagaagacaagacaaacccatcccctcctcatcaccaggcaccccccaaatcagcaattccttgcttttgttctgtgagtcttacagaagagtctagactccgagccagcccttttccccaaagtcaaatactccgaagccaatgttgggtactttccttctcagaacccccatttggactgatggacggcttctgagatggtcactggacacgtcgtctcggctgtggggccccttcctggtgtccaacatctgggtctctggagttctcggtggggaggtggggaaggcgagggggtctgagggtgagatggcaggtggagatgctgctgatcctgctataaatactccagctccagggcgtgcctcagtgcctccaggtctgcgtggcaggatatccgccagaaaggcatgttgtgctttttcgctccttgctcctcttccacaccatcaccgatcaccacgtagacagcttttctgccgaatctctgcattatcctctcgaagcagctctccttccctgtcttggttgcactgtagatgttctcaataggaaacacagaccccaggccatatagcaggactttggccagggcaggaattag

SEQ ID NO: 344587 - DNA, 1000 bp, Homo Sapiens; identical to SEQ ID NO: 344586

SEQ ID NO: 344588 - DNA, 1000 bp, Homo Sapiens; identical to SEQ ID NO: 160944

SEQ ID NO: 344589 - DNA, 595 bp, Homo Sapiens
tcagacacacaggtccccgctggcaacacaattcaggtctcgcgtgaggaggcggaagaggttgaaggtgacagaggcctcgaggcagccaggggactccttttttggggcctcctggagccggtgcagccaatggtggaggcggccccgggtcctgggccctgccgtgggctgaggctggatacaggcccggagctgggagaggatatggtgcagggtgtgaaggggctggtccaagacatcccccagggctgggtcagtgtcagcggtggcctccagaaccttcagcgtcagggccagctcagcctccaaagccacggggcgctccctcacctgcagctgcctcaggtcccaggtcctggggaagaggcgggagcggcacttgcagtccttcagcagaagcgactcttctaaggcatctttggccctcttaaaggcctgcagctcctgtggagacagggacttgaactgggctatgtggcagccccttgcatccgggagagccccgcggagcctggcgacaggaactgctccagtcacggtcagcactgcggccatcagcaccagcactggcatgcagtccccggtcatgtct

SEQ ID NO: 344590 - DNA, 1000 bp, Homo Sapiens
ttttttttttgagtattcagtgcagcttagctgccaatataatttttatttagatgattattgcctaatttatggccacatatattttacatgtgtatgttttacatatatggaaaatacacataagccttacagtgaaagatcagataaaatctattgtaagattgaatgcacaaaatgcttttattactctaagcaaataaatcaatcaaatcacatttcccattagacagcacctcagctcctctatacatacagcagttcgctggattgaatacacaatgaacaactgaaaatgatcaatttccatcattctgataacacgggcaaaaaattcaaactctctgttagaatacaggtactagtaatcaaaaagaaaatttcttgatatctcccactagcattttcagatttagaatttaaccatgaagtacatatctagaactaatgacagaaaaatcgcattttaaaataatattacagttcttctgtaaacctcagagtgatttctgtgtggggaacttgctgaccagaaaattaaatgagaattttgtacatcctcagatagccaaatagagttaaagggccactcccacaccacccccttcaaaaaaaaacaaaacatgttttctctctttttacagatattgacacagtatagtctcacaatttttctcaagtgggatattaatgagggtaagtagccaatagtggcagggctagatacacctcagatttcgagtgcaacaagggtaagccccattaatccatgcaaagaactttcatgcatatagtttagtgcatataatatgattatagaaccagaagttctttctttaacattttgcttttcactaggcaagtcaatttacccagcatattctgaatagtgacatagcatttttcacaaagccagtggttgactttcatgttaacaatgcctcaaaaataccaaacattatattataaaatcccagtgctaattaaacaatgaacattt

SEQ ID NO: 344591 - DNA, 1000 bp, Homo Sapiens
ttttttttttttttttttttttttttttttttttttttttttttttttttttttttttttttttttttttttttttttttttttttttttttttttttttgagatttttagcatctttatttgagaagtcaattctgcagatgggtaacaattccaagtgttgatatatctcaacctttctatacagaaaataacaaaactcaaccagccagcctccccacatatgcttccaaccacatctggagtgtccaccatcagtccccttggctactttcaaaccagagctcaaatgcagaccgttttccttaggaatcattcccctgacccaggttttcagagttctttttccaggacagaattatagccccaggtgaagactaggtggatataggacaagaaccatcctaggcctggctcacagccaaagtccatcatccattttcagcactgaagagcaagatcttcaccaattcttgtttttgtagcccccatccagggacagcaccactgaaagtttgcaagacagctgggttcagtgaagtgtttgaaaacagaatatagcaccattggaaaacaaaggcctacagccacacttgatcacctccacgttagacagataggaattaggatcaggaacacagatcagtacagaaggccagaacaaaacctttggctaatatataaaaccagcagtgctccaaggcagattcagccaataattaagaaaaaaaccatcaaagcctcaacctttgcttacaatctttattgaagttatacaaaaagaatcctccaaaagtgaaaaaatacattatatacaaaaacactttcccttgggaggagggctgtgccccctcttaacatgcagtgctttcaactgtagctccagcctccactgtcccctccactgctgcccggctttcagcctgattctcagcctcctcctccatgttttccgaaacttcatttccactggggacagcatccccactgcctccgttca

SEQ ID NO: 344592 - DNA, 1000 bp, Homo Sapiens
ttttttttttttggagaaagctgctttctggagcagtttcagttttatttttgtatttaaggctgaaggacagtttcaataaacatgtcttcttcccagagggatttcaaagaaagatcgtttttgcatgtcatataggggagaatgaggacatgagacaccaagaagatgaagttttcaggagcagaggagaaactttacaccaacatgtctgaacttcattgactcactacctggagccattttttagctgttgagttaagaaacagaaaaaggagcctggggcttctgactctttcaccaggcttaggggagtgagaggagggtttagacacgggtagggcctcttggccccttggtgcagccccgctgagccatctcctcctttggctgggtgactcctttctgctgccttgacaactcctgttgctgccacaagttctgctcccttcgtctttcctttgaatcctgggtggtgcaggaactagccttgttcagtggacttggggagaacttctcatgaatcagattctgcaaacagatgttcaccttttgaatctgggctaacggggggcgaccaggctctgagtgtaaatctgttagaaaattctcaccaagggcccctagatgcagctgctgtcgctgtgcctccctcagatggtcttcaaaccaggcctggccatgctgtagcagctccagaccctgccacagggcatcctgttctctctccagagcctgcatcctgcgtagccaaaggaagaagctctgggcccctgggtcttggcggcttgtccccagcggcagcagcaggactgtgtagggagcctgcaccaagggcaccccgccagagccctggctccccatggctctgaggtgggaagggtggagccactcccactggtgcagcccgggctggtccctcccctccacccctgccttgcacccatcctgcctctgtcagcctctcaggccccttcctgctgtgtctgtctgaggctgg

SEQ ID NO: 344593 - DNA, 1000 bp, Homo Sapiens
tttttttttttttttttttttttttttttttttttttggttttttttttttttttttttttttttttgtataatcaattctaatgactgctttacactgacaaaaaagaaaacagtaattatatacactttgtacaataaataaaacgtaaaaaaatatttcaatacatagaagctttacacatccaaaatacagtacatatatatgaaatatctctctaaaattcaatgaaatactacaaactactataattttcattataaattatatatatttcaatatagaaatgtttttctttaacattttaaatttcagagataacttgcatggtaatattgtggagaataattttacataccaagctttttagtaattaattgtaattaataattcaatggaagggcatgattgtgataatatgaagaaaaatttcttaattatgccaaaagtaccatttttaggaatataaagatacagtgttccatttctgtatagatggtaatgctgaaaatacaagggaaggtattagattttttcagtatctgtcttgagtacaactctgtagaatggtgggggccaaactgagggatttctataaagtcaaattactagattaccatcccatctcattacttacaaaaattactttagaagcagtcttctaaggcaaaatgtattttaatatgtctcaaaaagttaataaaaatactgcttcttaatgtttcaaagcctgtatgataaataaacctccactttatgtactttaaaacatggtctttatatataaactagacaaactaataacttaggggtaatggagagacaactgaagacatttattcctctattcgaataaaggtgaggaaaagttatgatgatgcctaagaatactttactaggtaagtgtcgaaaaggtcaggagttcaatatttaataccattttggtgtttgcctattttataatatttgacccactgtattagttattcaagaagaacgt

SEQ ID NO: 344594 - DNA, 1000 bp, Homo Sapiens
tttttttttttttttagtgtatgacgccatttatacgaaacgtccagaataggcaaatccatacctattctgagtggttactggggtgggggagttggatggggacagctaaggagtgtagggtgtcttcttgggctgatgaaaatgtcgtaaagttgacggtggtaatggctgcagaagtctgtattagaaaccactgaatcatacacttcccgtgggtgaattacatggtatgtgaattgtacctcagtaaagctatgtttaagaaacagaagtgactgcctggagctcccaccaagtcaggtagccacgatgtgctcagtgggaagggcagtggggtccccacccaccacagcacctgcagcaggggtgcccagcaggttctcccagtctcataaggacacaaagcctcatctgtcctgggaggttctggtcacctgggctggctatgtgtatgaaggaagggtggctgacagcaagaaggtctgcatccactcgggtgagggaactcttacgttactttgcaacaggcaggaaggggacttattttctaggtcttgagctcagacagggactcacattccctggttggttttttggtgagcaagtttccaggcgctgacagtgagcgttcctcccgccggctgccctcgaatgggttcccaaaggagcgtttacgtatcatggtcttcaccaggatcacggttgccaagctgggaatgtgtttgactgagttctcgacctcctcttcagtcacttcgaccagcgtgcagttctcatcctccgacggcaacggctccgccccatgcctcgtgacccaggggtgcagcttgatttccggcaccacgatcctcgactcggggttcttgtccagcatacgggtgatcaggtccttcaagtcctcagctatgtcgggctggtctggaaattccagggcctgactcttgatcttactgtgtaaacacatgatccgctcgtccatgaatgggcactggccaaa

SEQ ID NO: 344595 - DNA, 1000 bp, Homo Sapiens; identical to SEQ ID NO: 160945

SEQ ID NO: 344596 - DNA, 1000 bp, Homo Sapiens
ttttttttttttttttttttttttttttttttatggctttaatgccgcaaaatatttatttttccttaaaaaaggtgtcaacttggaaataatggtttaaaaacaggataagcattaaggaaaaacactttcaatgtgtcttccatttgatgaatttgtttttctctctttatccccgcaaggtggagtttcatgtcctcggtgaaaccagacagtgtgaatctgttccagcccaaatctgcagcattagggatgagttctcagaagtgattctgaactgagcacgcactcatgtctgcatggggaactctggggagaagagccttccttttctttcccttgggcatttgcctttccttgtcgtcttactgaggcggaggcaggaggtctctgtcttccaggccctggccaggccatcctgccatcaggaaagatggaagagtaggcctccgtctagcagccctggctggaaatcccccctctagatcctgctgcaagactgtacaaactcacaggggccatgtccacccaggcacatcatcagaaccagggagcacagccttgccacctagaaggggcctcagcagccgtgcaactttctttccctatctccaatccagagagggatcctctaacattctctagcaacctcatctgcacccccaccaccttccttgtaagaaagaccacgtgtgactaaaatcccttcacgctgcatttacccaggttactattgtgcgcgcaaaatgttttcacagtgttctcagcctttgctcctccaaacagaaaacgtttcccctgcgttactgttacttccctatttttgagtcctggggtgactgtctcttaaatgtgccaagatgtgagcaagctttaaaacatgacagctcagtgttaaggagacagaaagcttcctctttctctgttctattgcaactacaaattctacagtcatgcctaagatcctttagctaacacccttttcaagaaatcatcagac

SEQ ID NO: 344597 - DNA, 1000 bp, Homo Sapiens
ttttttttttttttttttgagattgaaattccttcactttgacccagtcaacaaaggagctttcaacatgtatgagttcttcatattcttttacagtaaaggaataaatacagtcataaaagcagaaaacaaaaaagggggaagggggacattcaaatgtttggtaaaatatggaggtaataattcagatataaatgcaggcttagtttgctttaatacagtggttggttttttgcttatataggcaatataaaagaaagtagctttttaaaatctagtaaaaagtggtagaaatttttggcaatttttgttcttaattattaggcaatgcttccgtattagaaaaaataagttcctcttatagctctaaattaataaacaatttaataatcatttcatgttatagacttcagtgttgcatttcattttaactgactgtaatccacaggtactagtacaaaatgggatttatgtgtatcttagcaggatataagtgatataataatcactgttaatgacttccacttttaaaaaagaatgttacaagaaattcatttctatcaaacttaagaggactccttcatagcccaaagaaatgcaacttaactcaaaattttaacaagtaattaaaataatatgtatatcataaattaaaatgtatttttaacaagttctaaatatacttatttggttctggtacataagaaaatatttacaactaataaaaagcagattgtagaatatacatgttctatgtaggaaaataagtaaaatgttttatagtgcagaccaaacttttctaggccaagttttatccatgcaactcttttacaataccatctcattaacattcctggaacacatacatgcatggaagaaatctaacaattatcttgatttaaagctcatactgcctttttagggcctgtatatcttctaaagtaaaatggttgtttggtgtgtccgaaaggtcctcaaacagctgttcaattagctcctt

SEQ ID NO: 344598 - DNA, 1000 bp, Homo Sapiens; identical to SEQ ID NO: 160945

SEQ ID NO: 344599 - DNA, 1000 bp, Homo Sapiens
tttttttttttttttttttttttttgttaatgcaagtttttatttggctgtatatacaatttaagctattaaaatttgtacaatatttacaaattaaataatcatctgaaactgtctccaacaactcttgtaacacaaaaccaaggggaaaagacaggggcaggcaggtcccagctcctgtggtccctccttggcacagagccttttctaaactggaaagaccaggagtctggcactcctgttcctctttcccgggattaagcattcaacttcaaaagacaaaatttaagccaaaagacactagtaaggaagtaattccaattctaaacttcagaagttctgccagttgagaagtggccttccttgggcgctgggattgcagtggtcaggagcaggcgcactggcccttgcctggagtgcggctgggcagtggctgctgggtgagacaggtcagtctcacttgagaagctgcagaggaaaggggcctggggggaggggcggggcagggtccctcagtgctgcccgcctgcacccccactcccaggcattcctttccctgagttgtgtggttgccagtaagacgcagaaatgccacagggcatagggggcacagccaccaccacaagaggcttctggggagatcagggtaagaaaaggaaatgggtaccagtcttaggggtgggccagcgagcaagttcatagcttgcctccagcccctctggagtccacacttgggaacgggagctaatactgttcggcactgcagtgtgactccgcacatacaagtagggcttggaggggcagccccttctcctggaaaggggtgggggaagaagagggcttctcagaggctaaaccttctgccttcatggccccagcagaacacagggctgaagagttggagaggaaggctggaactgacccgagatccccatggctgcctgggactggagtcaaatgggaaccccagcctctttccacttggcctaggggatgccgc

SEQ ID NO: 344600 - DNA, 1000 bp, Homo Sapiens
tttttttttttttttttttttttttttggtggatgagcactgggactttattacacggcacggcactcgtgacaacggaaggggtgggcagaaatgcaggccggaacattccacagtccagggacggttggtcattcagaaagtatgtatttccagaacactcagtagtaaggccgtctgggattgttcagggggttgggccggaagcggtaggccagcatcatcctcttgcggaacgcctcatactcgtcgtcctccttggagagctccgccggccggtcaatgccgaagccagcgccgtccactgtggtggtgcccttgttcactgggttcttgatgccctggccctctgagcccagcccctcgccctccttccagcccatcttcatcagcatctggtagccgatgttctccacagtcagcttgaactccttgtactctgagtagtcaggctcacggccctccttcagggccttgaaggtctccataaacttttccagctcgtctggaggcaggaagtctccgatgaagtgcttgccccggcccatctttgtcagctgctcggcccattccctggtcttatccatctccatgcgccgcagctggtgctcccaggtgcccagctcgctgtccacctcctcatcactgtcatagccgtgctggtgctgttggactgccttctcccacagcagctgcatgtcctgcatggcccgcttgtgctgcatgatcatgtcgtacatctgctgcatctcctgctgctccttcagctgcttcttctgggcgtctgaaagctctgtgacgcccactagacccacaggcttccccttctcatagccgagccccttgaggtcctgaactgacagaggcgagggagaggcatccacgtccctctgcaccagttcagcaggtgggagctctaccttatcctcttcaggcccccaccggctcttccgcttcctcttcacggtggctgcggaggctggcttcccgggggcagctg

SEQ ID NO: 344601 - DNA, 1000 bp, Homo Sapiens; identical to SEQ ID NO: 341237

SEQ ID NO: 344602 - DNA, 1000 bp, Homo Sapiens
ttttttttttttttttttgaatcttagctgttgttatttattaaagatttacaaacagacctgagctgtccactcaacagctcaatgaccttgggaagttatttaacttcactgggctcagtttcctcacctataaaatggaaattgataataatacccacttcatgaactatctcaaagtcttaaataaaataaagcatgtgagtaataacactgacagccaacactggctggctgcttagtgtatgacatgcacttcatgcactacgaggcagataccatcagcgctggctatctcactccttggcctgtgcttgttttgttttgctgagacaggcccttgctctgtaacctgggctggagtgcaggggtaccatcatggctcactgcagccttgatctcttaggctcaagtgatccacccaccttggcctcccaaagtgctgggattacaggcatgagactcatttctctacatctgtttacctttgccctattaaatgccaagtgctttgaccgcacatgaattagtatgttccctgcacctcctaaccaatgtctgccttctaagcccatggtctttcctgccatgctataacattaaggacaagtacactatgctgattattgtcattatgagaccatagctcctagaaaaccagagctggtcatcctcattttcacacatcaccattggcctctgattactatgtctcacacgtgacaggcgccctataaatgtttcacggcctgtgcccacgtcctgctaacctatattttttaaaaacaggggctaatggggtgcaattaataaacacgtccaataattatcaggatgacgtcatttctcggtctgcacctgaagctgttctctagaagctgcttccagtttcaccttgggaagagtaaggtaacacaggagtgattctcacgcctctggctccattgttctctgtaggaagcactgaaggaaatgcctgtaaaaagctccgacttgttga

SEQ ID NO: 344603 - DNA, 1000 bp, Homo Sapiens
tggttttgtccttttttgtttcatttttcatttccatttttgtttttttatggagggttggggaagggtagagatttggtccactgaagattagtcaccctcaatgatatatatattagaaaaaatatcagcagcaagactctctggaaatagattctgtttgatgtagctagtctgtcttttctgttttgccctctttcacggcagcctctgaagttttccgcaggggagctttctccgagttggcatgtccttggccagaatccgccgctccgccgttcttgtgagtagtgtgtttttccaagtagttcagcatttcactgagaactgtttggaaagtgcttagagctgcacatattgccggagtcccaaagccatgagtgatcaaactgaaatgtgttaaatgtctctggatgtcaaggtctagaattggagtgggtctggaggatcccagtggtgatctatcttggctcaagaggtcttggaattctttacagatttgtttggtcgccaggatcatcttttttcttgctgtctgttctttctgttccatatgttgtctggcaagatgttctcctactgctttggctggaaactctgtttcacaagtgtagccaaaatcccgagccaagtgcaaagcctccccttcaaccaaggaagtaaggagggtgacattagctgctttccgtcttcctgctggtaagtttaagccaagcctatccaatttctctctcaggcagcggcccccattctttgattttgctcttctcaaaatgcctcccaagagtgaagcattgaggcactcaggtggggagaggcgcctctttacctcagcaatggtcaccttgtatttggaagtagaactaagaagggacaaacggccagggacagagcaaaataagtctgtggggttgaccacacaggtgccacctcttcttatcactccaccttggccattgagaacaagcccacactgggcctccacagagccctgcaagtc

SEQ ID NO: 344604 - DNA, 1000 bp, Homo Sapiens
ctcgagggccgcctcctcggccaccttcttagcttctgggtatccagggcggaaccagcagggagctgtggctcgcaacatcttgctgccttcgggagcaccggcctggctctgctcccctcccaaatggcggcttgcctccagggccgcctcctcggccaccttcttagcttctgggtatccaggggggaaccagcagggagctgtggctcgcaacatcttgctgccttcgggagcaccggcctggctctgctcctctcccaactggcggcttcaatgagtgctgcggccgccacttgtcgcctttatataggcacagggcagactgggtgggacttctccttgataggttggtgcttcagtccaatcacactgagcctcatcttccaccagactccagcttgggaatgcctcagggggtgcgctaatggaatcaactggaactcccggttgctaaacttggagctaggttgcttttcctgagttaagtaactgtccctgcagggcagtcctataatggctactggaattgggctacctaggattaaattaaggttcagggaggttggtcaacttgcttgggcccacacagcaccccttggagccaggactgggccagcagtctgctgcatgctggagggcgggatcctctggggctgcctttccctgctctgtgcactcgccgctgcgggcaaattgaggacaggaagcggaccgcacccacttctctcccaggacttgggcaatgttcaacacaggtggtcttccaaaggttcatagaaaatgcacatggtgaagaaactatgcatggatttccactggtttgcactaaaataaacttgtctaacttctgataacctttctgaactagatctagtttgaggcactaagaaggtttagacatccactgaaaaggactcccgtcagagcaacatgaattccacgaaaattgcagcaagaggaaacatcaaatttatggtgaagcttgggtggaagattg

SEQ ID NO: 344605 - DNA, 1000 bp, Homo Sapiens
tttttttttttttttttaaagcagaaatgtctttattgtttgaagcatgacaaaataaaattgataggacatttcatttcttacttagtcttctcaatggggttataaaaatacaatgccacttagtttttgtaagctcttgaaaatgtccagaagctcacacttagtatgatattaaagggcacttataacacacaataagatacttagaaacccatctcatagatacaattgaaatttctttgagaaaaatttctaaatatagaaataaataggacggcactatttcttcttttccaaaacacagaatagcattttccccatgttacctatacacaccataaatgtggacacctcctcccatttttgttcttgatacaggttgataatcaagctgaaattaatttgcttgcttttcttcaatttaatctcaatttggtttaaaataaagcaaaattcttaatttgtatccaggatcttttagaatacctggcttattttcattttgttttaaatcacaattcattaaataggaagatgatgatgcaaaaattttaaaaagtacttactatttagctgcccaaatcaccctaagcaacaatatttctgaagcatgtgtacatacatgtgtgtatatttttaaatatcacttttgtatcactctgactttttagcatactgaaaacacactaacataatttttgtgaaccatgatcagatacaacccaaatcattcatctagcacattcatctgtgatagaaagataggtgagtttcatttccttcaggttggccaatggataaacaaagtacgccataaattaactaaaaaacccactgccctatgctatatctgtgctattgttaattaaaataagtgtattcttgctgtggaaattctgtggtctgggaatttttatttgttcattctttcaaggcattagtaagaaaggataatttctattttgaacagaaagacatacaactagtcagatcaata

SEQ ID NO: 344606 - DNA, 1000 bp, Homo Sapiens
ttttttttttttttttttttttttttttttatacttattcactctttattatttcaactttctttttagtttattaggttcatggaaaaaaattagtagtcattcaacaaaagcaaatattatttttcttagttacaaacaagcaatgtcagacacaaggaactgaagtaacgttttcaatctcattcaggcctattctggggaaaggtggcaaagtagacacaaagagatgacaatacctgtttcatactgaacctaatgaaatgaagtgaacaataaattaataaataaagccaaaaatgatttaggaacagtgctataactttggaagtatctagaaatgcaagactgtggaaatggatgcctggctcaatataaaattcctctagaaagagttctgtggatatgatacatagacagaaatccagaaaaatctccttaatcttgcaattcccacctaacttccattctgggagtgagatatgctacccagttgtgaaaataatacatgtcttttctgattagaagttcttccttgataccttggataaatagtattcaacagtgaaggaagaaaccactaggcttaccattctatttttctctcactggaaggaaggcaagaggcctagtattaaaaaaatcaccaggagttaaatttttccactagcaaatagggctttaacagaacagaagcataaagtagctgaggatagtggtggttcaagggaagacggaaaatgtataggaagccccagtgtacaataagggcacctcatgtctcaaatagttacttttcttttattttattacattcaagcagagactggagtggcattaactgctaggggaggcatgtgagctaggatgctttttaaaagtgagggcaggttgtccccaaaagaagcaatggcttggtggcccagcttgcatgaaggactaatccaaaatttgagggcgtctctcagggaacacgatacatttcatcttttaacagaat

SEQ ID NO: 344607 - DNA, 1000 bp, Homo Sapiens
cccagccaaatatcaggtttttattatttattattattgtttgttttgagatgcaatcttgctctgtcacccaggttggtgtgcaatggtgcgatcttggctcactacaacctccgcctcacgggttcaagcaattctcctgcctcagcctcccaagtagctgggatgatgggcgtccgccgccgtgcctgggtaaatttctgcatttttagtccagatggggtttcaccatgttgggcaggctggtcttgaactcctgacctcaggtgatccgcctgccttggcctcccaaagtgctgggattacaggcgtgagccaccgcgcctggccccaaatgtcatgtttttaaataaaaacatagaaaatgatataaaggttcacagcatcatcaagaaaacagttcccccgtgtcgcggaggcggagatgtccatgccattcctacaccctctgggtctcaggtaatttccttcacggtcaagacctcttcgcggtagcctttcccttcctctggggtgaattcctcccagatgatctcgtcttccacctcatggttatcattcagtttgtctttgatctgtggaactggcgggaacagccgctgtatcctaaggaaccttttaaagaggaagccgaggacgatgccacagacaagggttcccacgattaggagcacataaatgtacacagagccgaggttcccgtcgtcagaaccaaattcaatggcttcactccaggagctccaattcaagatgcggacgtctgcagctctgatcttcacactgtgttttgctctgggctcagagcttggaaagttgtatctattttccaaatcaccagaaacattaatcagtaggttttccgtgccaggctgggtattctttctgtggacgtccagctggtactgaaagtccaggtacgacagcttctgataggtcctgggctgtttccaccgtacgaggcagtgcgtcgtgttgcaacgtacggtgacattgctgggag

SEQ ID NO: 344608 - DNA, 1000 bp, Homo Sapiens; identical to SEQ ID NO: 160946

SEQ ID NO: 344609 - DNA, 615 bp, Homo Sapiens
ttttttttacccagaaagctctttattggcctccagggcctggtccagccccactgtggggtcacatggaaacccaggctggggagccgcctcttgtctcacaaaagtccacgtcctccgggaaaacggcaagccctcggcgtgggggtcagcgatgccgggccctccatgctacaacctcttgttcttgctcagccggttgtggcgccagatgttctgtttccgcagccgccgccagtactcccggctctcggggtccagctcctccagggtctttgggggacccaagttcatctcgaacagccattcagggtactcagcatccggtttcaggggtacatcctgcccttccttgtagatgttgacgcccatggcatatgtggtgagctggacaggatctgtgcatacgtcggggtccttgagggcctcgctggtcactgcaccttttcccgatttggcccccttcataactggtttcttggcataatcccgggccaggagtcttccggaagtggcggggtttaggagctcccaggccccccagccggcccacgtccgggtagccccgaaaaggcgtttggtcgccatgacgtattgcgggcagcttgcaagtgc

SEQ ID NO: 344610 - DNA, 1000 bp, Homo Sapiens; identical to SEQ ID NO: 160947

SEQ ID NO: 344611 - DNA, 1000 bp, Homo Sapiens
tacacccaagagtgtctataaacaacaacaaaaactgcaaaccaaaaactagtttacaatactgaagttataggaaacaagcacaaaaggccattgggtggggctggatggagcatgatctggtccttaaagtatgcagatcgcctgggaggcccagcctgatcgctggtgccagactgggattggggctgggtggaaactgctcttgggtccccctggagcacataggtctggaccagagtggggaggccacaggtctctgagctgttatgggactcccagggcaccggcttcttttcatcctcctccagcactgtgagcttggtgatgggtggcgtgccaaggccgggcagctggaaggcatcctcctccatgattgtgggcacccaggagcccaggctgctgtgagctgggtctgggacacttggccagaggggattcttcctgttggggctgcaacagagccaggcagttccacagaggcaggtgagcaacagcaggaggccgaacaggcccaggatgatgtgtagctccgacccctctggggtcaaggtcatcagggtgaggactgtactgttggtggccccagcctggctggcagccatgaggtggatgtgatacagactggcgggctccaggccatggaggacaaagccacgggaggaggcattcaggatggcggagaaggactggttctgagcgttggtccagaagatggtgtagtgggtaagggggctcttccccagctcagggggctcaggcacccactccagctgtgcccaggtcttgccaatgtgctttagatgcagctctggggcatgggagggagccatttcttgagagtaggcatagacatgctgggagggtcccatggtgtcctggtacaagggagtcacgatgatctcatagagctgaaagggcctgatgttctccttcagcagaaaccccgtggctctcccattctgttccatcctccaggtcttgttgctattgctcgcgc

SEQ ID NO: 344612 - DNA, 1000 bp, Homo Sapiens
aagtttatatagttttatttccacaatacccagtgcctgactctttgggtgactttactaatattttgtattgcctttatcacaggtttgctatcacccctatgtttgagaggaagaataattttaaaatttatgtatttgttaactaaatttacaaaatatacctgatgttaattttaaatgatctttaaaattaaacatactattaattattacataaaacatgagtttataggagatcaacaaaaaattactaggtttgaggttttaaggttcatctgaatgagggaggagtttccatctcattgttgtatcaatttcttcatcaaaatttcctacttcctgttctttagaaagctctaagaataccttctccagtgtgcactgagaaaggctgtattcttccaggttaaagttatgcttcactgcttctaatttgtgaaaggtctgtgatagagggtaaacgtctgccacgggcagcttataggttaacaaagaggaatacctttcctgccctgcagcctgtgggaaaagcttcagaatctcagtgtggaccaaagtcacttgagacgtttccttcacttttagctctagaatgtaatccttgccaagtttgtttttcaggtgttggatggagccaatgcatctaagccttccagacaccatgatggccacacggtcacacaaggcttccgcctcagccaggttatgggtggtcaggaggacacctctctctgtgtttttaacgactgcctggattgcctgccacatttgctgctgccctgtggggtctatgcccgtagatggttcatccaggagcaagacaggtgagtttcccaggaggctcagcacaaaacacaactttctcgtgattcctgctgttaatttctgcacaggaacattcagctgctcatgcagtttgaaagcactcactaatcttgcgatggcgagcctcgcgtccgctttcctgagccccttgacggcagcatacacctccagg

SEQ ID NO: 344613 - DNA, 1000 bp, Homo Sapiens
tgccatgaattcctttttactgaaataccgtaggactcactaccacaataagtacttaagctgaaagagtttctaatgggagccaagtaaattcagctctccactgtgcaaagcatcttgtcatttctataataaaagtctttccatgttcagtccactttggctctggaacctggatgagtcatgcttggggcccagggtgcctgtgaggatgctgcatgagaatttcagctgtggtggcagtgtctgggagtcccactgactcagggggaggccaggcgagatgagctggaacttttaggggagagctggcacttagggacatagtgggaagggatttctcctcgacatcattgattgtgcttttcttagcctagttctgtcctgcaatttatttttcttatcatgtgactgtcggctgaagtctggggtcatttggtttctttttcttcttccttgctggacagtctccatggggtcacggttgtctaggtaattaaaacgaatgatatctgttgggtgcttatcagaagatcgccagggtggaagtgctttctcccctgagttattcttctttcttaaagaggaagaggaccgaaaagctgataaaggggactgtttttcctctggagaattgcttgtaactagttgaacgtcagcgattacaaatccatcctttgggggtgtcttaggcttggtaatatgaagttctttcaccatttgaatatagtgcttcttccagatcccctgctcaaagggagttggagagaaattgatgtaccagttaaaccgtaaacatttcagcatccagagctggtccagctcagcaaggttcttccaatgccagcacacctgtgcacaacgacaaaggctccgagggtccaggaaagaaaagatgtataaagataacacccttggaagcttggttgtaaagtccagggcttctgctggaattttctcttgaagctttcgacagcagaacttttgctgggacagcgag

SEQ ID NO: 344614 - DNA, 1000 bp, Homo Sapiens
ttttttttttttttttttttgcgagcacgtacattcaggtttatttatttccatgctaagacacacagcggcgtcactggtgtagatggtgaaggcagtgtggggtgggtcttgctactccctgtgggacacagggagaggctgggttagtgcgttaagccgggccactgtgttcatgcaggtggcggctagaaccaagatggagccgggacagcagggccactgacccctctggcctccaggcggcgtggggcacgggctgtggggaccctccgtccaggtcccctggtgttcagaatggctttctcctccagggcccaagcccttctcctgctctgtgctctgcgggcctccgcctcctacacacacctcgggggcctctgagctctgtccctggtgccctaggaaactctcaagttatcctcgcctgcctggaagagcgccctggctgtgctgtgcccattccaggggcatctgcagtggcttcccctaagcggtggctgtggctgtcctgggttctgagtgtgaacaagcgtgtgtgtgtgtgtgtgtgtgtgtaggagtgcacggcagagcctatttgtgtgggtgtgagaaggtctgggcatgtgtggcactccaagggcacctagagtcccttcgggtgtcatgttcctcccgtgacaatccctcaaccatcggttcatttctgtcctctccctgggttgctgaggctgaggaccccgggggcctgccgggaaaacgcccactcatcatccctccttccagagccagagcctgtgcgtggccagttccatcgacctcgcctctcccctgtgtgacgtgacttcacgagggacagaaatactccgtgctcacaccctcccccagcaaacaggagcatctgttttggtctcaaagatcccataaagcaaacccaaccagtcccttctgtatgagcaggagaggctggagtttattccccaggtggggactgacgtaggaacaccagccccaaagg

SEQ ID NO: 344615 - DNA, 1000 bp, Homo Sapiens
tttttttttttttttttttttttttttttttttatgtattgatttcatgatttatttatatatctccccaccccttccaatacttgaaaaaaaaaaaaaaaagaatggcagtaccagaaggcattggttaagtgtcccaggaaccacacaagcagtgactcctaaagaagttcagaggaaggagagaacccatggggagggggtgcagtgggggtgggtcagggtgggctccctggaggagaagtccatctggtggggagaatggtctaggcaaggatgcagactggccagtaaggtgggtccatgcaggaagctgagggaggtggaaggcccgtggggctcgagcgcatctgcccgccctagtcggggaagagcaggaagccggagaagacgctgtcagagccctggatgcccaccatgtcgtagtagtcattgacagccagccacacctcctcgcccacctgcaacctcagcagcacaccgcccgagttgacctgattggttttggacgtgtggccacagaaggtgaccactttgacgccgctgcggtacagcagcacgcacaggttggctgtatgcgacgcgtggtagacaaagtagtagaggccggggactttgcaggtgaacttgccagtgctcgtgtcataatctccctgcgggttggtgaggaccgcgttgaatctgatcaggctgttgggtgcagggggctggtgggtctgccgagtgaccgtgaacactgactggaatttctgcttgtatctgccctcctcacctggctctccagggatgcccatggggccgggcacccctggcatcccagggggtcccatggggccatttttcccaggatggccgggtaagccgggttctcccttctgccctttgggtcctcggatcccgggaatggctgggattcctggctcccccttgggccccggcagtccgtcgtacccatccttccctggtgccccgggcaggccgggcatccctgggatcccgt

SEQ ID NO: 344616 - DNA, 1000 bp, Homo Sapiens; identical to SEQ ID NO: 160951

SEQ ID NO: 344617 - DNA, 1000 bp, Homo Sapiens
tttttccgaaaatactttaatgcgaggtcctcgtgtgggtcgtgttttggagagataactggccttggactggagggtggctgccttcttcctttgccaggtcatgcgaggggctgctggccaccccatgcacatgcccctgcccctccatgtcagatgcgtgcccctcggggctggccgtgtccgatgcaggccccttccggctgttgatcttgatggcggcgcgcagcgccgacttgaccgccgtctccacccagccgtgcgggtaggcggtgtgctcgccggcaaagtagatgcggccataagggaccgtccagtcatccttttcggtttgccagagcgccggcggctgtaccacaaagccaccctggctgtgctggtcctccgcccaacgcttgacgacgccggtgccgtcccagagctggcgcacgacaggcccgtgcaatgccgccacgtcgtcgagcgccaagcgcaacgcctcttcccggctcaagccggcgaacgctgccgccgcgtccgaccacgtgtacgaggccagcagcagcgcgccctcgcgcggcggcgggtagaaaatcatgcgcgacgggcgatcggtgtttgagtggccgccttcaatgtgctcctcgcgccagaagggcctgcggaagcttaggaacaccttggtggccggcacgtagtgcagcctccgcagcgcctcctgcatgtggcggggcagcggcggcgagaaggtgatgcgcttcaccgccggtccgctcgccgtcagcagcaccacgtcggccttcagcaccttcagattccgcgccgggggagaggtctcgatctgcacgtgcacatcgtgcggtccctgggtcatcgccaccacgggcgcgttcaacagcacaagcccggacagcgagctcagcagcgcgcgcggcagcaggtcccagccacccacgatgcggctgtactggagtctgtcgctgaggcagctgtgggcccggagggcctcggcgaagctgag

SEQ ID NO: 344618 - DNA, 1000 bp, Homo Sapiens
ttttttttttttttttttttcttactgaaattatttatttatttttattatactttaagttctgggatacatgtgctgaatgtgcaggtttgttacacaggtatacatgtgccatggtactttgctgcacccatcaacccatcatctacatcaggtatttctcctaatgctatccctcccctagcccccatccccccaacaggccccagggtgtggtgttcccctccctgtgtccatgtattctcattgttcaattcccacttatgagtgagaacatgcggtgtttggttttctgttcctgtgttagtttgctgaggatgatggtttccagcttcatccatgtccctgtgaagaatatgaactcatccttttctatggctgcatagtattccatggtgtatatgtgtcacgttttctttatccggtctatcatttgtgggtattttggttggttccaagtctttgctattgtaaacagtgctgcaataaacatacgtgtgcatgtgtctttatagtagaatgatacagatttcaaatttcctttataggcacaacagacaaaacatggactcacaatctaaactctgaaaaatgacagaaaaggaaaaccagtgaattaagaacaagtatttaaaaagggaattataaaaagcaaatactgtgctgctgggtaatcaattgactccccttacccggaagtcaatagggtgtcttaatttatactttaatcaaaaaaataaataagaaaatatttaatattttgaagttcagagaaagaaaattaagcattctccatgacatcctcagaaatgtagacaattctataataaatgcatttttaaacttaacacagtaggaaacatgggatttggttgctggcacaaaggctgcatggtatggcttaggcttatgccctatgatcgccctcactgacatcgcctgttgtctcactgtaagaaatactactgaggataattattgcatgagtttcaaatgcatt

SEQ ID NO: 344619 - DNA, 1000 bp, Homo Sapiens; identical to SEQ ID NO: 160952

SEQ ID NO: 344620 - DNA, 1000 bp, Homo Sapiens
ttttttttttttttttttttttttttttttttttttttttttttttttttttttttttttttttttttttttttttttttttttttttttttttttttttttttttttttttttttttaagattgatttatatttaatgtaatgaggcttttctagcagcatttaatacatcactcaaagaacaagtcttaactgagaagtacagaatacctcattttcacagtaatttttttttaaagtcccagtgatgaaaactataaggcagcttcctcaaaggaagttaacactgatgaatccagtgcagccggtgttttccatatgaggtgataaaatctttatcacatccagctggactgtcctgtatgttagtctgagtctttggaacagttattcctttttattaattgtatggttgttatgcagccatggaaggaaaaagctgaacatcaaaatcatcaacaatatacctaaagaaggagccagccagtatactataaaaaactgagggaatgcttcatcaaaacacatgaaatgtagcgaaagtgccaaagctggattaaatacagctcctgttagacttcctcctgcatagaccaaaaaggtgatgagtgcagccagcaggtggatacgaagcttggttcggacttcctggaagtgcagcagagcgctgtggaagagaaaggagcagacggcctctgtgatgaccgctttgagcaagtcgactcggatgggattcttgcaagcgaagctcctctcgctgacgtgatactgggtcagacccaagctccacaaggcgcttgtgcagtacctgctgcacagggcactaaccagctgagccaatagcctcaccgcacccgtctcgggggacatgccccccagcatcatctgcatcatcacgccgcacgggttgctggacgtgcccaccagagtcaggccatgcacaagcgagaagaagtagacgagcgtcagcgtccaggtggggtgcgcggggtgctgttcg

SEQ ID NO: 344621 - DNA, 1000 bp, Homo Sapiens; identical to SEQ ID NO: 160953

SEQ ID NO: 344622 - DNA, 1000 bp, Homo Sapiens
cccggttatttgtagggccgcaggaaccgagacactttggagcgcagcagtttgatgaaggaccgtgggaacatctccttggattcctgggctgtgtacttgaagtagttctggggatgcgccagcacgtcgaagagggccttgatcagcttcttgtctttcaaaatttcctggtggttctccgaggcgtacaggcgcccatcgcgcacgatgtcctctatgagttgctggtagtcctcatcgtaggtgacatagggcacttggaagcctttgccgctgttgccttcattggatttgaactggatccagagcttgcgggagcgggaggtgaaggcgatgggcctctcgtaggtctggcaggtctcataggtggtgatggacgtgggagaggcactcttcctcatgaccagaacatcgccgcactcatcctcgatgggcaggaagatctcagggaccacgatgaggatcctgcgctttgggggaggtgcgatgtgccagacgcattcagcgttggctgggtagtcgccagggtagttgggggactcgatgtagccggtgtagtcaccaagctcgccgccgcagtgctggtttttgcagtgtgtgacgttggtggagccatcgaagtctgtgctggtgttgcccggacaggtgatgcagtggttctggccaaactcgggctggtaggtgccgacggggcagcggatgcagcggtgggtggtggtgttgtagtggtggccgggggagcagtgcactttagcctcgcagtcctggaaggaggtggtgccttcgtgtttggtgagcaaaccccctccacaggggaagcagccggtgcgcccgggctcaggctggtacgtgcccacggggcaggcctggcagggcttgaagccatcggccgagaagaagcctggagaacactggcctccacattccgacacgttgcgggcaccaggcagaccaagcccgtcgctgctggggcacggtgtgcaactgagctggcctt

SEQ ID NO: 344623 - DNA, 1000 bp, Homo Sapiens
tttttttttttttttttttttcaaataaataaatatataaatttatttaatcttcttgtctgaagacagctcaaaactgagcaacttaacaggcacagtccagaacagtatctgtgtccaccagcctggccagtctgtctccctcctgcgttttctctctcttcctcctcgttctgtaaatgcactctctggtcacggccagtagtacgaccaccacaggcaccagcagtcccagtaggacggccaccaggttagatgctggctttctgggaggtggcgcatctcgaggctccatacacaggcctcccccgtaaccaacttcacactcgcaggtgaaggtggctccctgctcccgacactgcccgtcattctgacaggggttctgcagacacgggctttctggaaagcagccttgggtgtggttccccagggtgcagacctcccccgctctgcagctgaagggctcacacagcaggatccgtgagctggcacaggtgcaccgctgagagcagtcctcagtcagaaagctgctgcccagccactgaggacctggcaacgcagctcctcttgctctcttgggtcctgagcagagcacagatccagcacgcagtgctcttggaagggctctggggccaccgtctggtgacaggcagcaaaggggccctgggggtctgccagcaccctacaggcctgggtgctgttgctcgccagctgctccgggctacattcggacacttggaggcccgtgcggaggcccagctccgccccttgtccctcctcctccgctggtatagccctggggaagcgcaggagtgcgtcctcggtcttcacctcccagctgttgccaaaggtgttgaggttctgggtcagggcgccactgggcagcatcatgtcattcttgcggttcttgtcgtagtttccgcacaggccactcacaagcccctcgtacatgctgggtagggagatcactgcatttttccttccaccaaagctgacgacc

SEQ ID NO: 344624 - DNA, 1000 bp, Homo Sapiens; identical to SEQ ID NO: 160954

SEQ ID NO: 344625 - DNA, 1000 bp, Homo Sapiens; identical to SEQ ID NO: 246596

SEQ ID NO: 344626 - DNA, 1000 bp, Homo Sapiens
agccacaatctattataaatactttatttcaactagaaggtacaatctctcaggggtttcatagtttaaaaagctacaatcacatcatgttgtaactacgtaaaaaacagagctgtaaatggaactgcttggctttgaccatacacatttctgcccagcccttacagaatctgcacaaagaaatatctccctttgctccagttaattgttcttgtatgtaagttgctttctattccagtatatccagagtggtgaaataacaaggccagccacgtagccaaaggtcgctccaagcgtacaggagatgggccataccttgcactacggttgtcaggattaagttactcatttcacagtaccaagccccctgcagggtacatggagagatctataagtgctacgttttctttctactgtcatctgccatggtctttcccaatccagtggaataggaagtgctccaagccatgctcctacaaagctagaaattgtagtgatctggagactattctcccatatggatgtaactccatttctactgaacactcttagccatgctttgaggtttggtcctaacaaacataagcaaggcacagtagtaaaagtagacaaaataactgcaaataaaaatgtttccaatgccaactctatcagtggtgctccatacagaacaaaaattacatgaaaggagaaacaagacataagaaagtagatacagcatttcaaaaatccagttaccttgtgtgataatgaacttcttttagaggatgtatttggtttcactactaaatatagtactagattgacagcagttacaaaaccagaacagatgcacaaccatgtcaagtgtgtttccaatattgagaagttctccaagaagagtgatggaatgaagacacttaggataattgaaaatatgcataaaagatgggtatacagtagtctcttgatatcgttatctttcatggtgttttcttggatggctagctaactctccctc

SEQ ID NO: 344627 - DNA, 1000 bp, Homo Sapiens
aaacagtcctggacttagatagggcaccatcatgaataccactgcgtaaggaatttggacatctttctcccactcgtgtagggaattctaagattccctgacaatagatctttccatacctgctcttcttagtatatgcccagaatcattctggaaaggctcttcctgacggatatggaggcagcacaacacagcaagaacgggctttgggagccgtgggtcctagtcctggttttcatgaactttggtgagatcttaggccagtgggtttagcctctcggtacttcatatttttacttctaaagtgtatttagtaccttctctacctggtaaggctcagatgtgataagaatgtggaaaccattttgacaagtacatagcagtgtataaacataaagcattacttttataattggatgttgtaaatgttaattttgacattaagaagaagtaaacaagactaatattgagattgatcgccttagcaacttccttttaaaacgacaatgtcaacgagagtctaaatttgtatgtctttccagctaagtttctcacctacatacgaaggagcaggaaaatgctgttttgggaaacttgttaaacagtccattactcctgtgtagactttgctcaggtatgaacatttcaaatcttcaaagtaaaatggaaaaaatataaattaaaaaatatatctagttgagtccaacaaattctaatattaaatacataaaatcaaggaaaggttcaacctaatgtaatttgttgccatggacaatacatgatggacagacagctttctgggcaaaaagcatcagagggggatagagctggatgcagaattccagcagaacgtttacctctagcacatggactagcaaaaatcacacggtggtagaaatctaaaataatcgtgcatgatagaaatatcaatgatatttcctcaacttcaaattgcatatcagctaattctcaaactaaggatgaaaggctgatgaggagt

SEQ ID NO: 344628 - DNA, 1000 bp, Homo Sapiens; identical to SEQ ID NO: 160955

SEQ ID NO: 344629 - DNA, 1000 bp, Homo Sapiens
ttttttttttttttttcagttttcaaaaaaatattgatctggatcagatgggctgataaggcccaaacacttataaaccaaagctgcaggtctctaaggtcttcagagaagctacacaaaatactatgatttcattagcatccacatatgtatcattttccacaacattttacaattctcttgtttcacagggaaggtgaactaattataatgaaatatcagtaatgtatcttaaataagtaacatgttgctggaaaaaatttaagttaaaatgcactacataatagtgcagaaacaaagtgcaggtggcaattttaagacatgaaaacaatgctgaatcagtagtgtttggagtgatacattttgcccatttttggccagtcctagaacagtactcaccacaagctgcatgccaaatatgaactaatgaggctaaaacactgaagaccaaatagaaccactctagagtctgtttcacaatgagatactcctccccgttctggaaacagcgatctgctgtagttcctatcctcctgtggcacctatccctgctacagtacctataaccagatgtcctccatcatccagcctccaggacaagtggcgctcagtgagtcacaacctgaggaacagctgctggttaccgatttgtattcctgtatatactcgacttgggtagccaggattttctcgtttgtcttgaatatatttacttctaaaaagactgttagtcttgttgggaggtgagcagaggaatgtttacttgctggagaacatagtaacaaacatcacttctcacccctcataaacagaaagcccattgtctgtgccgtgaaaagaggactaccttgtcaggaagattttacttacctctacaagaaaaaggactcgtattaaaatcgacctgtggttaccacccttagaaatgctgttttcagatattcctattcctagtcttagaggcagccatggaatatatagtctcctctgaccttggggt

SEQ ID NO: 344630 - DNA, 1000 bp, Homo Sapiens
ttttttttttttttttttttttccactaaaatatttatttaatggatatctacagaaataaataaaaacagtttttgtctaatacagataggtttttttatatatatgtaatttgattttacaaaattgaagcatatcaaattgttttctctaaaacatagctcagaaaggaatagtagaaaacaaacacaaagaaatactgaaatagtctcatttttaaattataagcatgggccttctgaatctcagcatgacatgttattagtaaaagaatgtaagatatggagtcaggggacctgggctccactgtttacttgctacatgtcctaagaaagtttcaatatatctgaacttcagttctctacctttaaaacagtaaagatattaattatatcaacttcacaagattgttgggtaaattaaacacgtaaatgtacatgaaagctctttttaatatgtgaagagctataaaaataacagtttgatttaatttcatataaaagaatcaatggatacctccttttaactgaagaataagcaccaaaagcatgtgtgtgttttcttcagttgaattacatcactctataaacctagagtaagaaaatgcaccttaactaagcaccaaagcctctcggacaaatgggatctagggaatggttctatgagttttccaggcagctaactgggagctaataagtcctgagggtcaaagagggtcctttaaaactctgaaggctcaaagaaaaggaagccaaataagaacatttgtattacatcaaatggctaggatgtaacaagctactccttattcagcaatttcaaagtccattaattcctcacagaagaagaaacacttcgttattatcacttgcaacgatttgcttatgtgaacatggcattctcttgttcaaaaggtcaaagactcgtgcttaagggaggaacaactggagtgaaataacaactctaccatgaattcagatatcactggctaaaaagtcta

SEQ ID NO: 344631 - DNA, 1000 bp, Homo Sapiens
ttttttttttttttttttgaccagccatacacatgcctttatttagatcagcttttttcaaaatgcagccaaacttatgagttggacagcccaaagtaaccagccctattccactgagttagtttaccccacagcagtagaacccagtgctggtttggttcctggcccatggtgggacagcgtgaaggtgatggagggctctagcacaaggaggtgctgagtgccaccggcaggtgcttctgcagacagcctagagcaaggtaagcaggagcactcgcttcagaaccgaggcggctcggaccagaggcaggcactttcctccacatggcaaagggacaagggtttgttcttcctacctcattgctttactaaagggtcaggctaggcatgaccgatcaaggatgggtagggggtaaaatggaggaggagcatgactgatgaggtgcctggaagcctgtaggggtgtagctgctgggtcctttgaggtaaatggctttggaaatagagggtgaaactgaaatcctgagtgatcctgcatggctttggatgaggccagcctggttcaggcatacatggtgagctgcagccactccagaacgttgagcttgatgataccatctccatccttgtcaaatgcatgaaaagctctgaacatgccctccagcctaacgaagcagcagatgaaactgtcaaagtcgatgttcatgtgtttgtctgcgtaccgcatggtaatgatgtcatagagctggttgttgaggtggaatcctgcgtcgttgactgcatttcgcatctcgtagctgttgatggtgccggactggtctgtgtcatagtgtttgaaaattttctgccaggccttaatcttgttccagaggtggtggaactcctgcaggttgagctttccagagccatctgtatccatgagcgcaatcatgctacggcaggactccagtgtgaacccgtgtgtcttcaggtccttgtgtttgttcacgactgtgttaag

SEQ ID NO: 344632 - DNA, 1000 bp, Homo Sapiens; identical to SEQ ID NO: 160957

SEQ ID NO: 344633 - DNA, 1000 bp, Homo Sapiens; identical to SEQ ID NO: 160958

SEQ ID NO: 344634 - DNA, 1000 bp, Homo Sapiens
tgccattgataaaatgtaatttaatcatttaaatttacattgttaatgtacaagagcatttctttcaaaccacaggttaacacacactaaagagcaatgctgttagaggagcagagaaactttggaaaactctgctgtctgaaataaaagcaaggcactctccattaacagctggtggcttcctgatttccgcccacagaaggcatgttcacactgagagagctctcccgccaaggggaggaatcacctgctttaatacatgttgttctcttctgtgctagtgtggtcatccactctgtataaacttatgtgcaacattaagacaaaaaaaagggagttgagttgataagatgacttgggaggctctcatagttgtaataactatggaagacagaagaacatgctatcatctttatttttagcactcatatctggacctattactaaaaaagcttcttcattccttccaaccactagattataatggctaaaaagtcttttccttaaatctgatgggtgtaaaaataaaaagtaacagcatttctctagggctctgtttttattttgttttgttcttcctttatagacacgacaaaaacaaggattaactttccaaatactcatggtgcacaagaaggttatgtatgcacagtatttctaatttattcaaattcaatttgaatttggtctgaagctatcttgtatgaaatgttagctttcctgatatttaataatatttattatgtttgcatataagctcaaaaaattaatgcaaaagtatactttactcatggttatcttcaggtaaatattagtggttatgtttaaaagcctgattttatatagatgaagttgagaaaaaaaaagagtatggaaaggtaaattaggtcttagtcttgattctgttaccagctgtttgaccttgagtaactcttcacccttcaatgggccccagtttgctcctctatgaattttaaggggttggactagttgacagacc

SEQ ID NO: 344635 - DNA, 1000 bp, Homo Sapiens
tctgaggttaaatattgtagccatttccactgtaggcaggagagagccaaaagcaggaaccaggtgacacaggcaggaagtagcagaggtggcgttccatcccagttctcctgacaactgatgtcacagccagagctcgcttctctccaccaatggtctaatccctctgaataagcagcaggtcaatcaatgctgatgcaattggataaactgcttagtaataacttgaggctcacccagatggtttgaacacaatatgaaaaaaaacagtagtcactttgtctagatcacgagataaatctacaaattgtagtttgtctgtgcagattttcattggcacaaccaccaggaatcctgcaacaatgtgtatgacaggtgcagcactgtcagggtcacttgttaaggcatttagagattcaataaggcaaaaattatttgctgcaatggatgcactgaattgctaaatgaagcgagaaatatagaaaaagtatgaaaactgtctaacatggtgccagacacaaaatcattcaatcaactcttattactagtagccataaatagagaccctgatcattcatttgaaagcaggaaatcataaaacttactctggaataatcaagatctctgggtgttgagtctgttaaagctcggacaagagcattcatcatgcagattggaggagaaggtggagagggctgagaaggttcctgttgtaatgggctctttggtttggaaggcagacgacctctcctccctttcagactatctgtacggacaacttcttttaccattccaacactgagacacttctgaaatcgacagtactgacatcggtttcgacgtctcttgtctactgggcagtttttatttgccaggcaaacatattttgcatttttctgcactgttctcttgaaaaagcccttgcagccctcgcaggttcgcacgccgtagtgctggcaggcggcgttgtccccgcacacggcacacgtgccctcgccag

SEQ ID NO: 344636 - DNA, 1000 bp, Homo Sapiens
tttttttttttttttttacaaattatttgttttattttgtattcactgttgcacagtatcagaagatgttccaagcttcagttcattattaatatcatttcttctttgttctcctggcaaatctgatgacatgcttgatattggcgtatggtggaatggtactgagtagtctgttaatgaaggcggaatagcagcaggatcaaccgaagtcacactgggcacccttacagaagatggctgatacatgagaacccctttggttgggctgctttgtgtttctgacataaagatgcatttccttttggcaggagggtcttcctcttcgtcagaagagctttctattgtaagatcaataacatctactttcttcttgcttgcctcactggctacagtcactgaacaaggcttactgaggacgcttgaactttctatttttgtacacggttggctggatactttcatagcttctttcttcggtctcattggacaccaagaaccatcttcttggaatttgatctcatctacatcagaacagtcattgagaatttccataaaaagcccatctaatattagactttcataggcagcttttttgtcacacacaggacaaatccaggtgggctttttctcattcatttgtagatagagggcagcatcaaaacactgcagatgtgtacaagtcactgcacggcatgggattgtcagcctcatttttcctaaagggcacatcaaggatacccgaaggctagttgtagcaatttcactatcaggatctgcagtaagtttttctttaattagtgctctggaatgatcagggtttctaatacctttcatttttaatctctgtaataacatggctgatgtaagctgccgtacaagatatacagacatagagtaattcttcccaatttctgatgcccaagaaatggaaatttggtttggcacagctgaagataacctaactaaagatgtaatattcaaggggcgtccagggcgcttc

SEQ ID NO: 344637 - DNA, 1000 bp, Homo Sapiens
ttttttttttttgctagtgcggagttttattggctacaaaatagatgcaaaatgatgagaatctgaaggctgcagtaggaaagtagagctttaccctcataaactcgcactttgattagaaaagtgcaatatattaagagcattatgagaagtctggtgagactgttacagaaaaaaaaaataaaagtttctgagtctgataattccaagggtatcttttagaactcactcactggtgtctgtgcaaggactttccttgggggaaaatagattttacaacaggcggaaactttcattggtctcatgcgtgcttttggatttcattcacttgacaaagaactaatcttccgttgatggtctcctgggttatggccttgatctttggagttgcagacactttcatgctcgactttgattcttcccgtgtcccttcactctctccctccaggagccgtcggtacgtggtgatttccttctccaggtgggttttgatgcccagcagcacttggtattcattgttctgccgctccagttcatggcgtagctgcgtcagttcctcctcatagtgggagatgatctcttgcatgtcctggagcttgcaggagtaccgagactgggtctcggataacatgttttccaaagcagatttcgtgctgtactgtgtctgcaggtcaatctccagggcctggaatgtgcgcttcagttcgtggatgtcaccttgtctgctctgcacagtggctggactggctgcctcctgggacatggctgcagactgttctttataccaagtgtccaagtctcgatgcttcttctttattataagctcatattcttgtctcatatcctccaggaccttaatcagatcttccctgggacctgtatccaccttcacattgacattgaagtcacttggcacatgatgcttctccatttcttgaggttgaagtcatccactgccatcctggcattgtcaatgagaagaataatctgagcattggtc

SEQ ID NO: 344638 - DNA, 1000 bp, Homo Sapiens
tttttttttttttgtattttttagtagagacggggtttcaccatgttagccaggatggtctcgatcgcctgacctcgtgatccgcccaccttggtctctcaaagtgctgggattacaggcatgagccaccacgcccggcctggtctgtattaactatatgaccataagctatcattcagaataattttattcagagtaaaaaagtatcatcttgtgagaaagccacattttaaaagattagaactactattacttaacctaaatctgttaagaagaataaaatctgatgcttttcaataagaagccaaaatgcaatacttacatatccagttaaaaggagccagtcaagttgttcccttggttttgcaatgaaacaagcaaatcaatcttttcgatgttctggttggtgtttatagaggatgccagtggagaattctctggcatttgctgagaaagaagtgttgtcacaggtggctggccctcgttttgtggttggcctggctgacttatggccatcaactgatcaggcaatgtagctggtccagaggttaaaagctgactacagttattttgaatgccaaataagaacattcctgatgtctgctgagatgagccaggagaattctgcagttggttcattgtgcctcctgctgtgttgtgaaataaagtagcctgtggttgaggcgaagatgtggctccttgaattccaggcatgttgttctgaggggaataaagaggagactgttgcatatcttgttgatttatactggtctgcaaggcagacatggatgctggagataagaagagagttacttgctgctcttgagaactaggtgacccttgtaccaactgaatctgaggagagctatggaacaagggggtctgtgatgattccgactgggtaggacctgggttctgaagtgaggaaactgtggactgactctgaaattgcatgggctgttgctcttgattcattggggccatgttactttgttggtga

SEQ ID NO: 344639 - DNA, 1000 bp, Homo Sapiens; identical to SEQ ID NO: 160959

SEQ ID NO: 344640 - DNA, 1000 bp, Homo Sapiens; identical to SEQ ID NO: 246598

SEQ ID NO: 344641 - DNA, 1000 bp, Homo Sapiens
tttttttttttttttttttttttttttttttttttttttttttttttttttttttttttttttttttttttttttttttttattccacatcaatattcattttatttactctatcatgtaaatactagaaaatgacattttaatagtagcccccttctcttttttttaagaaagcagagcaattcagaatatgtaaactagactctgagttttgtcagatgaaatgtgccattaaatagataactcttaagttctgttcagtgatacctgtattcagatttgctcattcatttcagctgattggtcaaacacagaatgtaaaacttggatgttattactctgcttattagcaagaagcttggggtaatctgaaatgtctggcttctccggcaatgacctataaggttttgctttgatttcaccttcagcaaacataggctccgaaagcacaggctcagaaaaggcttttctacaattttcactctcctctctgttttgccttatggattcttcttcctggaagatgttctttaccttcttcagcacagcattaacacagactgccaaataaattagtgctgcatatgaagcatatattatgctagttaaagcagtctttgctggaaaggagatgatttcaaacaaagaaccctttctgacctgaatgttatataggggttgcctcggcgcattaacttccctcagcagacgaccagatatgtcccttagctctaaaagtctgcatgcaagctgaggatgcagaagtttggccactgatttggaggatctggatatgctgtttaatccacgaattaatgttgctcgattaatcttagctaaagcaatagccatcctgattttggatgttttctgcgcaggttctcttttctgattagactgtgataatcttaggatggtgggaaattcatctttaaactcatctacaaggtccatgattgctttctggatcccctcgattcttccagaaaagttcttcaac

SEQ ID NO: 344642 - DNA, 1000 bp, Homo Sapiens
tttttttttttttttttttttttttttttgaaagggctaaaatgattttatttttaaatgtggacaggcaagcagaggtggttggcaaaggcaaggtggctgacgatccggaagctgtacaggagagataagggcactggctgccagagtgccctatcgaagcatcatccgaaccctgcggtaggggtggcccacaccacggcctgaggcccagtcaatgccatatttgtgggcggcagcctcagacactgcatagcgaccattgagatttgatcggtaacaggatgcataccaccaggcaccgtggacaatcactgcacagttgctgttgcttgaatcgtggtcagcgtcataggtggtaaagggcctcccactgtggaggctcagggaatcccctgcagtgccctctgagaacttgcccagtgccagctggtagtggtctacctcaccgaggaggcggaaggtcgcatagtgggcgaaagtacggttaccattaaagtcttccagctctacccgcagctcccagttaccctggagagtaagctggtgcaaattctcatttcccagccagaattcagactcttggttcccaaaacctgctctgtaggaggaccaagagcggaagaaatccacagaaccatcctggcgcctctgaaacaccagccagccgcccccctcggtgtccatgtcacaaaagactgggagggccctgccctcaggtaggcacagatggtaccagccgctcaaggtggcgccctggctcaacagctcccggcagtttctggggcctggctcacccttggggcccatcttgcctggtggtccaggtggcccttgaggacctggggctcccttctccccaggacttcctggagctccgggacaactgggcaggaggacaactttgctggcttccagttccctgggtcctgggcagctggggtgttcctgggtcttcaggcaggcaggccccccaagcaggagaagccacagggagggc

SEQ ID NO: 344643 - DNA, 1000 bp, Homo Sapiens
ttttttttttttttttcttaaaaagaaatggtttaatttcatttttatctgggaaaaaaaccacaaatacgagtttaaaatgaaatgacaaatacattgacatgtcaagtgtcattttttatggtattatgcttattcaaggtgtgaagatacagaacctctttataaatttctggcatcaaagattcccaccgtagataaaaacaggttggttataaaatgtcaattcattaaatattcaatttttgttctttgtttttataaggaatattttgtagaaacagtataaaatagagtagacttttggaaattgaattataaaattttagaaaaaagtgttaagtcctaacttttctttgcgaaccaacaagagagtctagttttaccttggggagttacctgtgaagtgcattaggcggctagagctgtttcagagccctgggttctatacagtagaagcagccttctttagcacttagaatacgaccccagctttttccagttagcctcaatcagaaaagtttaacatacatgaatatttctatagtgcagtaaaagtgtcattttattaatttgcattatgaaaataagtctgtataccaagtaatgcataatgaatatgaatcatgtaaatttggtcacggtatttgaagttggctttggctctgaagtatttttgaattcatagaaaatattgagcttttaataaaataaataaaacattttaattgatattaataatcaagttcaaattttaatttttcatctgctactcaattttaaaagagaagtcactctcagtagtgttcccaagtgagcgattgcaccttctatgatgtgaaaaagttgctaaagatcctattgccattagccgttcttaagtgctgaacgtaactgagagaattgtttgcaatagacatgctctgtcactggcaggaagtccatcaataccctttgcaggggcactccagaccttgtgttttaccagaaactgaggcaa

SEQ ID NO: 344644 - DNA, 1000 bp, Homo Sapiens
tttttttttttttttttttttttttttttttttttttggttgtgcattcatttattcagtcaacaaatatttagctgagcactggctagctgccaggtattgcactaaggacccaaagatggaagagatgatgtccctgccctcatggagcttgcagtcgtgttgagcagactgtcaaacagatttaggtaaggcaatgtgaccagtgctatgatacaaacaggatgctacaagagtacttggaaagtgtgtatactgcaaactgagggccaagaaaggctccctggaatacgtggtacctgaattacatggtgaataacagatgcaataaagaaatgggctgagctaccagacttcccgtgtgttccatgtaccttaaatactttacaaagtttaacaatgataatgtgtgtggtatggtttgggtctgtgttcctgcccaaatctcatgctgaatggtaatccccagtattcgaggtggagcctggtgggaggtgattggatcatgggggtgagttcatcatgaatggtttagcaccatctctttgatgctgtccttgcaatagtgagtgacttctcatgagatctggctgtttcagtgtggcacctctctctcgctcctgcttttactgtgtgaagtgcctgcctttgctttgccttctgccatgagtaaagctcctgaggtgtccccagaagcagatgccgccatgcttcccatacagcctgcagaactgtgagccaattaaacctcttttcatataaatcacccagtctcaggtatttctttatatcaatgcaagaatggcctaacaaatgtcttattataaagtagcacctaggattttctcactgaaatggcagtagtttgatacttcccctttttgttcactttaccaccctcgctaacaaaatgagtgttcattatgaccagaaaaaggtatagaacggaccatgcttacaacatgtaatgcaagttataaaagagcacaaaagaacacgt

SEQ ID NO: 344645 - DNA, 1000 bp, Homo Sapiens
ttttttttttttttttttaattaaactggggatttcaaaaaagtggcctttattttccaatttctatagcaaaaccagccataagtgaacatggatgctcttcaatatttttccagtattaaatgaaaaaagacctctgccccagcccacatttcctttgttgaatgagtagagaagactgagaagtatcactcacccgtgatgtggtttgtcccttttccagccagtgtgttggtaataaaagtcacctttcagagctttggtccctgtaatgcccgtctttcctgtgtccaggaataacctttgctactaggcagtcctctgaaagatttgtagaaggttaaagtggaaagggacttggaagctcatagaatccatgcctcttcttttagcatcaaggaattagaagtcctgagagatgaagaatgttgtcttccaactcaaaccatttctgaagccatttccctgttactgcattgcccacaacccttccccattgctatcctcatcctgctaatgctgtttttaatgactgacagtctgatttgtctttggcagcaaacattttgcttcacagattcctacttaaggaagagaggggctcctcattgtcactgtacagagcaggctggtcagctttacacaggtgtcagatgaaccgtcacagccagatttgcatgttggcctcaggagggcttcaaggtccaacatctcgacgtaaggagcgtttccagttctttcatgctcagataacagtgctaactgcagctgtttcatcccaaatccctatttgaggtcttaacatctattccattttgccaacaagggttatgctgttaaccctctgcaccagatttagagctgactgatgcactgcctagaagggtgagagagactagagcaatgaaccatcgctgattttagcacagaatacttccctgatacagcaggacttggcatgccctttagaaaacaaacaggtgttaactttgaaatcatt

SEQ ID NO: 344646 - DNA, 1000 bp, Homo Sapiens
ttttttttttttttttgtaggtgacatgtttatttacctagaaacccaaaataattacatgaaaaaaattacaaattagaagagattacagtggcaggattaaatgtaatacacagaaatatacaatctttccatacagacaatcttaggtggaggacatcaaggaagaaatacgtccatttattgcagcaacaaaaacgataaactgcttaggaataaacttcgtaagaaggacgcaagttctacataaaggaaaacttaaaatgcaattacaggacaggaaatatttgagtatgggaacagcttactatggtcaagttcacaaagggtaaaattaaaagttaaatcataaatttattgcaatccaaaaattaaccaactggaatggaaaaaagttgtaccagaaaaactgatattaaagttcatttggaaaaatgaacgagtaagggtagctgaggaaatgccgaaaaggattagaataggatagattcacacacagaatctatcctgtagattctcacaagcatgagtgatgagtacagaagacactttttattttccagtcaagctgacacctacagaagacactttgaagcctcctttacacagcaacatgaaaaccatccagatggccatgggcagggactggtcacttatagtgtgccgctccatgtgttaagaactgctcgtcagattttattgctaaaggacacgaggaaactgtttaacaatgtatgtggtatgccatcacttgtgtaaatacacatacacacatatatttaaataaacagaacatatttttagaaagacacacaagagaagtatacagtgattattccaagggaggaaactgaaggctgaggatcaggttcagggagagatacccccttatacctgttgaattttgcaccaaatgcacaaatcaataatatgcttttaagccttctcaaaattctgggtgatagaacaaatagctagcaaaaatcctagtctgggagaa

SEQ ID NO: 344647 - DNA, 1000 bp, Homo Sapiens
tttcaggattcatggccaaacgtaactatttattcatttttttcttataaacattgagtttcttctttaaaaaaaaaaaaacacctagaatttaaatatttcccatcccatcacatacaagtctgtatacattatttacatcttttgaataaaacatattacagattttctgacatcagtatccctttttaaacaaaaatgaagcaattaaactttgatcagtaacaactacaatttgcataatccggcacagtttgtaatatagcgcctatgttggatttcataacttagatgatttttccccttctagttacttgattataagagagaaactgtctccatgagagtagttccctgtctttatgcactcttctcaatacttgcacagtgtaaatgccgcccttattcttccattacttggcactgacaatattcctctgcttttgtcttcagaaatgatttctatttgaactttaagtgttctcatatatactgtattctccttcaacccagatttcatgacactgttcctagtgttaattctatgcagtaaaagttaaacctataggaaaagttcaaataaaacatcaagtaagtgtttcctacaagattagtgccctcaccaccctggttatgcatgtacaataataaatacaagttagtagctccaaaaaaactactttccctaaaaagtcatttctgtcgaacaatttaaggagcaaagcatccttaaaatgaaaatgcactaatcttttttacaacctgcacaattaagtatttcagaaaaacaaaaacttgtgcaaaatggtaagaaacgcccacctatacaaatttaatattaaatcagatgagaacatgaatttataagtaaaaaacaatttaatattaataatatatagagaaattaaatattgaaattttaactttgtatcactaataatctcagcttcagtgaaataatttaaaaaaagctgtcaaacactaatttcctaaataaact

SEQ ID NO: 344648 - DNA, 1000 bp, Homo Sapiens
tttttttttttttttttttaaatggttctttattcataaacttgatgcaagtttacaaaatttactgtacattgccaaataaatctgcaattaaaaataaaatccattaaacaaagcatgccaaatgtgcagctatcagtctgcttgccatcaggatattaaagaattcaacaatgtattcaagatttagccttaggcttaaggaactttactgatttaaagaattctgccttgtcacttgttatctgagcaactggcaatcagaactttatacaaatgtaatcaagtgaacaagaataccagaaaatctatttactgctctcttaaccaaaatggaatcaaaagaaattaaacacacacaatgtagaaatgacaagtctctcagatgtggtttacaaagttaaaaactgaatctcaaagctaatgcacaagaaacacttttgaactttgtaacttgtttgtgcagaaaaatgtgcttctggatttcttgttaaaagtgcttaagaactagaatttacttttaaatcaaacgtgggtgtataaaaaaatctattaccaaccaaaaaggactgattcaggtaaggcaataaaatggagagtaccttgatttgagtcaggttctataaaaaaattaacatatgtagagtttctattaatctttcaatgtaaaagccattgttttgacatggcaaaaattactgtaagagtctccaaattaagtatctttttgtacttaactgcacagcttttgctcaaggagtctttgtgccaatcactttataagtttattagtttacaaacgattgcaacatcccgttaataaaatggaaacgtaagatgacttagtattttaaataacttgaagctctgtactgtggctcttgttcataagaaacactgaaccaacaagcagcagattcagcccagccaagactctgatgccccagtggaaatcactactcacaagccttaattgatacagttttacactgctttgcct

SEQ ID NO: 344649 - DNA, 1000 bp, Homo Sapiens
ttttttttttttttttttttttttttttttttttttttttttttttttttttttttcagggtgagacaatcatttatttattggacagggcaaggtcatttaaagattggaaacatatcccaaaaacacgtgtttagtttggtgttacaggcattgatgctcacaacaaacaacattattcaatacatcatgtaaacaggccacatacaaccaggaagatgctgtcaagccactgagaagccacaatgcttagaaaacaatcattagggagttacagagaataatcacctccaactcattgatatgcatattctgcggctgcacagtatttggctggttccctggttattaagtgagtcgttccgtattttaaagagccttgattggtacacacttctgaatatcactgaaatcagtcaagcaaaggcttaactagctcacatcatatttttgaactaccctaggcaataattgactgtctcacagtactgtagataaaattctgtacttagcatatttagcagtgttacaacgcatccaaatcacctttaagtcctatggtacatacttgaaaaagacagcagaaactcactggagtaaatgaaaaaagaaatttggggagctcacctggcctgaggtatacaagctgctagcaaagatagacacacgtgaaaaccactttgtcaattatttgccaagtcatttggcctgatttttggcctgatttttagcctgatttttagcaggactcttcccgactgaggaggcaaagatttcaacatccattctagagactagccacagtattataagtagtaatatatcataaatgcttggttatgaggaaaaactactcagcataagattcacggagaaaaacctgttaggtatctggccctcttgcctgaaatctattgattttaccaaccactccctttcacagcaataagagttctcaagatgagaagaattttctcactccatatagaaaatcatattt

SEQ ID NO: 344650 - DNA, 1000 bp, Homo Sapiens; identical to SEQ ID NO: 160964

SEQ ID NO: 344651 - DNA, 1000 bp, Homo Sapiens
ttttttttttttttttttttttttttttttttttttttttttttttttttttttttttttttttttttttttttttttttttttcaaaaagcatttttgtttaatgctaagatcacttcagtttccaaggtcatataaagaaacatccaatttagagaaaaaattctgtaataagttcaaataccaaagcgtaaagatgatgtaacacagtgcctatgctgcatggttacacaaatgaaacgagaaaggtagtgattgcttctaaattctcactgaaaatccaatttaaaggtttattgcagtctaggtatttttaatttttcccttggtgattatcaagatggttgatgctaataagtactattaaaaaactaaaatgctgtcgaatatggaacttcttttagttaagaattattaatatagaaaatgtgagttggtggactggtacttcttgtgctctgatttttatttatttattttcttcttttttttgagacagtttcgctcttgttgctcaggctggagcacacaggcacgatctccactcactgcaacctccgcctcccgggttcaaacgattctgctgcctcagcctcccgagtagctgggattacaggcgcccgccaccacgcctggccaattttttttgtagttttagtagagacaaggtttcaccatgttggccaggctggtctcgaactcccgatctcaggcaatccgcctgcctcagcctcccaaagtgccgggattacaggcgtgagccaccacgcccggctttatttttttttttttgagacagagtctcgctctgtcacccagactagagtgcaatggtgtgatctcagctcactgcaacctccgcctcctgggtttaagcgattctcatgcctcagcctcctgagtagctgggattacaagtgtgtgccaccacactgagctaatttttgtattttcaatagagactgagtttcaccatgtcggccagactggtcttgaactc

SEQ ID NO: 344652 - DNA, 1000 bp, Homo Sapiens; identical to SEQ ID NO: 160965

SEQ ID NO: 344653 - DNA, 1000 bp, Homo Sapiens
ttttttttttttttttttttttttttttttttttttttttatttttatacgtttttatttaaaagattccctttttaatctgttccaaagtgttggaagctgaactatacaagttcctgccacccatccttccagtacagttttctgaggacatactttttaaatggaaaaataacaggaggaccctctaactgaaaccaggtaggcccagagtgagctcctcaggcccctgtggcagcctggccaaagctggcctttatggagccagcgcgtggagaagtctggggaaccggggccctccctcttgtgaggaaagggctgagcaaactcatgttctctttagtgaaatggtccaaattcagatccaaaagcctccattatggcattccctggcactcttcttatactttatacattgaaggcagctccctcttttatggccagtataagcaggcaaagaaacaaaggaatatagatacatatatgtgtatatatatatattttatataggtaaaatatatacatattttatatatgtatatatacatatttgggggtagggaaaggagaggagggtcatgtaaacctaaacagtcatcacattaccccaaatgagcctgactttaacaaaaagataataaataactcctgggggttaagtgacaacatgggtgcagcaagaagggaaagggcacaaatttaactattaaatacactttgatatttgtttggcagagttcaggccaaccccaggcttctgcccttgccagacaagtaagctgatgatattcaaagaaaaaaataaaaatattaaaaaaaaaaaaattcaagcagagctccataccacagttttccttcaagtcagttggccggcaggcagtttcccgaccaccaggaacagaaactttggctccaaggcaaatgaaacaaacaaacaaaaaaaagtatttccacttacaacatgaaaatacagaaacttcatcaaagaaagaaaactatc

SEQ ID NO: 344654 - DNA, 1000 bp, Homo Sapiens
ctatcctgactcatgttttatggggggctgggtgggagggttctgtgctggctgaggagctctgctctgctctgctccttgggagacggcctagtggctgccggtccttggatgctggggcttggctggaggcacagcccccactttccaggggtcccctgcacctgccagcttcctcagcctcaggatttcgtgcttgtacctgctcagaggaaccatgcttaagtgacttgcccagctgtggacaggtctgcctttagcgcctgaggcagccatcatccttcattccaaccagaccagggccctggggtcacacccagctccctctgcccacctgcccaggtgctggtccacgtactcctgtagctcagaaagttgctcttcagccatcgtggcccggaccagcagctgtgcccgctcccgttccagctctgcctggcatggggatgtaagccatgagctggggcatggcgtgaggatgggcctgggccagcccttgcctcctacctgggtgctgcgggagaagtcccggagcttctggtggatctgggcccaggatgcagcgtccaggcccctgtgaggggagaggaaaggaggagtggttttgagagctggcatggtgacacagggacagacgtgaccgtgctgagtcaggttcccagagccgggaggggacacctgggagtgagtgagggaggcatgggcccccccgtgctcctgtggcgcccccccccaggccttggagccatccgtatatagggacagcccgggcccaggggttctgctggctgctgggggagggctaaaccacaaggccagcccagacagtgactccagcatcaacagggatgccacccccacacgggtgtgccctaaaccccaggaaatggtccttggggagccctgcccattgtacagctgggaacatggaggcccagaggcaagggctggcccggtcaccaggcgccctgctcccacccctcgcgtcctccaggtctca

SEQ ID NO: 344655 - DNA, 1000 bp, Homo Sapiens
acgatactgatagagaacattctctacaaaagtggcaatgagcctgcaggagggattcggggtacagtggtgggagcacagagcctgctccaccccagcaccagaagaaccaggaggggctgcggcagtaaacggacgaggaacaggagagaaggggcagcacctggggctctgggagaaacaagtcggcacttgggggtggccccaggctcaggcccagagaacagggagaagagctgtggtgggctccagatggcggtggcaggcagccaagccctcagtgtcctgcagtaggacagggaccatctcctccatgccccctactctgggcacatgtgtgggaatgggaacccccagacagaccagaaagaggcctttgagggctctctttcccctgccccagccatgggggccccaggagatgctgggggctgaggccatgctcccagcaggagctgcttcccaagctgaggtcagggatggggggccatggctgagaaaggaggagagcacctctgcatggggtgcaaaggggcgcacacgtgtcagcgggctcatcagggactctcccacatctgtgacctcagtctggctggagagctttgggggcatacgtcagaggacacatgctgtgaccaccctctgagctggcctttcccctggtctcaccaccatcagagggctgggacacaggtgagctctcttacccccgatccacgcagaatcacgcaacagcccagtccctaccagacctggagggaaacctaccaaacaccacccaacgtgagtgtgcacacacgcacacatgcacacacacacacatgcatgcacacacacacatgcacacacatgcatgcacacacacaaacacgcacgcgttcacgtgcacacacacgtacacatgtatgcaagaacacacacacacccaagcacacacccgtgctcacacataccacatacttacacacacatgcatgcacacacgcatacatgcacacaa

SEQ ID NO: 344656 - DNA, 1000 bp, Homo Sapiens
ccacaaaagccactttattttaaaatatcatgtgacagatactttccagagctacaacatgccatctatagttgccagccctggtcagttttgattcttaaccccatggactcctttccctttcttctctgaaaaaaactaatttaaatttgcttttcttttttttaactgagttgaattgagattgatgtgttttcactggatttttatctctctcaacttcctgcacttaacaatatgaaatagaaacttttgtctttactgagatgaggatatgtttgagatgcacagttggataatgtgggaaaatgacatctaagctttacctggtcaccatgtgatgtgatcagatgcttgaaatttaacacttttcacttggttcttatactgaatgccgactctgctctgtgttagagatatgaaatggtgtttgatactgtttgagacattatggagagatttaattatttgtaataaaagatttgctgcagtctgaaaactgcccaggggtgcactgttgggtttttctttaaaatagagtactttgtattctgggagaatcaagttctaatgaatgcaggtatgtggaaattctgttgaaacttctttagagttagttttagttttaaaaaaagactctagtaaaaatagatagctgttgaggaagccttgtttgtgtagatctgaataatggaacagagatgttaaactaattttaaggggaaataaaggctacctccttgatgcttagtcaaggtcacccagatagtctgtatttgagcccctgattaatactgattgcaatgcctgatgttcctcttaatgaaattaagctaaaagtataaataccttgttaaacaaaaatgaaacaactaatctgtctccacctagctttttaacattttcaggctgatatgacaaaaagggcatgctcgtccaccttaactctctctgataaaggaaaaataagcatgaaattggcatacaaaatacagttcaa

SEQ ID NO: 344657 - DNA, 1000 bp, Homo Sapiens
ccaaaggaattagatttattctgcatgaaaacggaaagtgttcactccccaagctgagagctgaggaggtggcactgtgctgagtccagccagggcttgggtcctgccccagtctgacaggcctgctgagcctgggaggggcccaagagaaagcccctgcaaagccccgaaacctacatgctaggtagcctgtgctggagtcactcaaaggggcctgtggctgtcagtcatccttgcttccccttggcggcggtgagttctccctttccgatgatgatgatgacgatgaagtatctgctggcaagccccttgtatctatccggcagaacacgcattgggtgaacatttcagaagaggtgtcactcttgaagatggagaaaggcctgtcacatctttcgcactgtttcaactttaagcccacggcctttttgtacttgattaccaaaggaatttcatcaatttcttcaatattccacagtctcatggtcctatccttggaagcagacaggatccatttcttgttgttgctaatggcaacatccatcacccagtcattatggcccttcaaagagagcttccggtagccttctgctacatcccaaatagccacagtcctatcaaaccctccagaaatgagaaaagagctgtctctggcaaagtgacaggaactgacagaaccttcatggccctgcatcagagtcacacaggctccacggtttcgaaactcccctgtgtggacgttccatatttttaagtttttatcccaggagcttgtacacaggaaatggccactgaaggtaaaacagcagtttgagattgcattggaatgtgccttagtgatggtgagcagcgtggcctgggatgtaacatcccagatcttgatgcacctgtccaatgagacagaagccaccctctggctgtcggggtcaaagcagcatgacgtgatggaccttgtgtgatgatctttgatgacggaaacggtggtgatgttctcggcgtc

SEQ ID NO: 344658 - DNA, 1000 bp, Homo Sapiens
tttttttttttttttttttcggcagtcttctcagagccagggtgtcaggaggagttcaatgagttcaatgtcagaagcaggatggtgcaacgaagaagggttcagtgtgaggggatccaggctggaaagtggaaactaaggcattcgtcctgcagagctattcttcatccacgtctgttacaaactgtgaatggtgttcgggtgacttgctgtgcgttttgcttaggtggagttttaccgcatgtttgctcacaaatgtccgacagcacaacttacacttgaatttagagtctgtgtcctcttcggcagctattgtttctggagacctctgagccgacgatacccgggagatctcttgctccaccttgctttgctggtccactgacaagcgggtcatgtccttcatttggaaacccaggtgagattctaagtgactgatgtaggtagaaggggttctgaactgggaggcacagtcactgcaataaaagatggggtggcctttgtccatgtttttcggaaattttgtcccgcccgttttcctaagctggtacttgacgttggccagccagtgactgatagtggtcattgagagtcccgtaaacttagagatttgcatacgctcttgtgggcccagatcagacagcaggtatttgccctctgatgtctggaagaggctcgaggcaaactgggcttgtagaatcagaagatgctgaggattccagttggactgccggccttttcttttatgcaaagttgagacttcactggagacatcctcaaagcgcctgacatccatttccagcttcatgggggggaccctggaggaggaggctggctttggggtggtggctttggggaggactttgaccatgtcggcgatgtcagacagagcgtgcttctgaggtggggacatacaagattgtgcttgcgaggactcggctttcttgcttttggacttggtcaggtcaatgggctgatcgctgttctcaaacaggtagcg

SEQ ID NO: 344659 - DNA, 1000 bp, Homo Sapiens
gcagtttatcacaatttctttaatggagaataaatggataaagatatagctgtagtcttatcaatactgcagataatagtgagcagctgatatttcccaatggaaatttgtaaatactctttataacagaggaatactccacctacttccacttgtatgcaatataacatatcttataatagatacattttggcacaccaaacacaccaaattggaagtagaattaatccttaccaaactcatccaaaaagcaaaggttgagttggtgctagaaatgatctgagtaaaatagaaaacaatttagaaaatacttcaatattctaagtacccatatgtctttgaattaagtgtgtatgtgtctgtgcatcttgtactggcagaagtatttttagattttcacacttttaattatatatggaggagttctaagttttagaataatgaggaaaaattaaatatataagagaacattatccttaaattgaaaattgaattatagtagcagtgatgatatgattacattgaccacttactgatcaatgtgcataatcacatcctcaataatcttacgaagttgctattttcctaattttacagttgagaaaactgaagtctagagaggttaagttacttacccaaggtcacacagctcaaggaatgaagtgaaggcaacattccaactctagtttgtttgattccaaagctgtccactcatgtctaacagggcctctcttctaaaagtattatatttgttaattacgatcatgtgttgtgcaaaacaaagttgtgttcataaagaatgtgacatagaaataatgtctcactccacttattggagaccactcttattaataacatttggttgtattttaattgtcttttttctctttttccatttacataaattgtatgttctgaagttactgataacagaaaagtaaatgtgagggccaagatgatgattgtgaaatttccctatattccagggattagattttta

SEQ ID NO: 344660 - DNA, 1000 bp, Homo Sapiens; identical to SEQ ID NO: 160967

SEQ ID NO: 344661 - DNA, 1000 bp, Homo Sapiens
ttttttttttttttttgggaaaagccagcagtttatttcttgatggcttacagaggaatgcttgtctctttacaccttctcaggagggtctgcaaagcagcctcagctgctctctggacactaatacatggatcttgacgaagtgcttggagtcgtgtggtcagttgttctctgtctagtaactccacatattggctggtcaaattgagaacaacggcatctgtgagtttgacagctgcactcctgatcacctcccaggtgctggtgaagaaggtgaaggagtgtgtgtggaggatccacagaatttcctggtttttcttggccagtttcacacagaattgcctatagaaatccctggcccttggtagatcctgatcaaggagacggtctaataccccatagagctcctggaggcccaaaaagggaatgcagaccatcaagacatcacggcaagcaactccaatcttggggttgggatcccaaaggtgcagaaggaatgaaatcaggctcttttttatttcttcagcaaaaaaaatcttccaccttcttcctgttaggggtgccaggtcctcaaataagaagatggcagtcaatctcacatcatcctgctcatcttcaaagaaggtccttgtttgcagcactatttccttgaagtagaagctcacgtctcggtctgtcagcagctccaggattttttttagagccttcaagctttcacagacgacttcagtgcgagctaggtgatacaggcctctgatgatagattctagcattaactgcttatgtttcttcaccttgtgaggagccccggatgctgtgttgccgagccctcggatggccatctgcctcagagtggcgttggagtcccaggcactttgatccatcaagatcagcacatttcgcagattcccatgcttccaaaggattggttccttcatgagctcagagaagaaagctgcgccggttatccggtagttctccgaggaggaggtaagagatg

SEQ ID NO: 344662 - DNA, 1000 bp, Homo Sapiens
tttttttttttttttcgccaatgctattgtattttttatttaaaaaaaattaaataaaatagtgatccattgcatataaaactgaactagagtccatagtttacggtggggaaggctcagaagatagaggcaagaatgtagctgcagcattttctttttcttcatatctaggaggcaattcagatggaagatgtggagtgtgtgaggcctcagaagatgaattcgtcccagaaatggtatatatagattcacagtctctttcagaggctgcaccctctgaagttggggtcctgccatagttgaaaatactgtaatatgaaggggggttttcattcggaagcagactgttagttccaggactctcagcgaccgcagaagctgaagattcaggaaagtaaggtggtggagggggtggaaatattattaccgagtcacctacagtgacctggacaggctccataatctggatctgtccctcttctctctcagaggcatcctggccagcattcagcgtgtttctcttcttaacatgggcaaccacgaagaaacacaatcccacaagcacaatcaagggccccatgatctgcagagaaaggaacccacacatccggggctctgagtcgccagtgtctgtctcgtttagcggttcctgcgcccagttggagccacatccagggacccaaatgcccaggacgctgatgagcatgccgcttgtcaagaacagaaacccaaagataaggcactgggcaaactggcggctctctccacagatgaaggctcggtcggggtccatctgctgacctctctgcagccctgcacggagctgaagttgcgcccgggagcgggccaggatcacagccccaagcccaaccacggcacatgcaggccccgccaccttgagcaccatggggcagtctgggaggggcttatattggcatgcctggaacccaaagatggagagcaggactcccacacacaacaagacggcgccgaagacaaa

SEQ ID NO: 344663 - DNA, 1000 bp, Homo Sapiens
tttttttttttttttttttttttttttttgagtcctggttccagcatttattgctgaatgatcttgatcagtcccttcaccccctgagcctccatttcatggtctgtaaaaagagaataatagcattttttgaggattaaatgagctaaagtaggggagtccttggcacgatgctgggcacggcaccaccgtcaaacgggactgcgcggttacggtattagttaggggatgctgccctctggcgaccatcaggaggaagcgcaggcgagatgcccgggcccgggggaaccggcgttcctggcgtgagcccatcgtccagatccggagagtggggccgggcgcccgtcactccgtgtgcgcctccacccactggcagaggcgacgggcgtagcgagccgggctgacagtggagaaggtccggcctgggtagcgcagtgtcttccacaggtgctccagccgcttgcggagcccgtagactgtggcgagatccacgacgcccaggaaatagcgctgctcgggcccgtccaggatgtgtagggcgttgggggcgtcgggcagcagccggcggttttgggctctcgactcttccgggctctgtgccccttgcacagacctggccgtgcggaagatgaggctgctgcccgggcccctctcatcctcgtggagacgttggaaggctatcaggaggctgtaatccagcacgttgagctcccggaggaaggtggtatccagttccatctggcggaggaaccagctccgctggggccccaggttgatggtcttgccctgaaagttgaggtccttcagcaccagaacaagggggctgccctcaggggcgggatccacccagcggctcacctcgcagcctttgatgtcatacctctcggagatgcggccggcggggtagaagacgctctgcatgacgatgaagtacgtcttctttccccggtccacccgcagactgtgcactcctggaaggggagagggcgccggatgagga

SEQ ID NO: 344664 - DNA, 1000 bp, Homo Sapiens
ttttttttttttttctttttttttttttttttttttttttttttttttttttttttttttttttttttttagttatgaatgtaaccagctcactggcacccaatgggtctctgtctctaatttgtcaaaagttgttttgagctcattaaatgccacagtgaggtcatcatttattataattttgtcaaaaagatgaccatattgactttccattatctgtgcagatttaatcatttcttgaaaatcttcttctgtgaagggttttgcagcaccttggtcatctctgcttgaaataatctttgcattttttcttgtttctctcaaacgctctattgatggaggctttataaatatcacatagggcttaaattctagtgtccttaaatgcttcactgtatgaggctgaacatccaacaaacaaactttgtttttagcaaggacagaccgaactgagtctatacttgtgccgtagtagttgtttttatattctccatattcaataaacttgttattttgtacatctgtctcaaacaaatgcttggaaatgaaaatgtattcaacaccatcactctcctggcttcttcttgctctggtggtatggggcactgtcacgccatagtgctgtgtgtcactgatcagcagctttcgtttcagttcattcagccctactcccacgggaccaaccaagacaacgagtctgtatttttcattagtttgtcgccgatacggtgtcacttcttcgtatgtgggtacgtcagctgtgtcgtactgatcactcttcttgcattcatacatggatttatttgttttcttatcttttctactaagacgaaaacttcttctaaaaccagatgatttcctgttggaaactttcaggggctgaaccaatatttctggtcgtctcaaagccaatctcctttcctggaaatgctttgaggggatcaagcctgccctggggttggcatcagcttcgtgtttcgcttgccaccaagttgcatca

SEQ ID NO: 344665 - DNA, 1000 bp, Homo Sapiens
gtgtttacacctttattgtccgctcctcccaccacccccaaggattcctgggttcaaaatagcccgggcactgaggcccaattagccagagccgctgcaatctcggtgggtggggcccttgaggttccagccggctgggccacattccagccccactgggcgggaagtagagggtggagaagggggaagtggtgctgggaccctagcccctcagctctggatcaggagagtcagcaggagcaggaagtagactgcatgcggggatcccgaggccttggccagttctggggggcagagattgctgcctccagtgggccagtgtggggagccactggggggcaggaagttggcctctcccactgtctgggagatccaggcctcttcaggaccaatggcagcaaacagctcccggctcccttgaacagccatgcccacgaggatccaggacccttccgtcatctggcacaggaggggcggtgctgaggtcatctcacacctgttctcctgcccctctgcatacaggacacagagggttccagggggcaggatgccctgatagaggcagtcacagattcgttgtgtcaagatggagacagcagcagccacagggactcggtcctggggttctttccagcccaacacccagcagctggcccccggggggatacccgccgggtggagacagatgggcagggctgatggggagggctccacccgggagctcagctccaggagggccagggggggcctgagtcccaggtgctggggcagccggatgctgatgaccaagcgggatacctggtggccctgtgggagggagctggcccctgcccggcccagatacacttcaatgtaaggcactgttgtagagcctggcctgaggacacagtgagtggctgccaggacccagcctggggccaggaggatcccagtgcagactcgatcaccagccacatgcacctctgccagccagggccacaggacccccactggagcagcc

SEQ ID NO: 344666 - DNA, 1000 bp, Homo Sapiens
ttttttttttttttttattttttttttttttttttttttttaacacttaagaagttttattgaaaacgataaaatacagtaacaccagattctcattttaaagtaaaattaacagcatcttccagaacattcctagaactgaaccattcttgtcactattgaaaaacaaagccaagttccaaatccaaaataataaatgaacgtgctgataaacattcttcttatggttccagcccctactttagttattttcctaaattttacatgtgtaccttttcaagaaagagtaagttttttaagtgatcaatatttatgagaactggactttcttcatataattacaaaaaaaaaaaaaaacccaaaaaacaaaatccacaacgcaccctactcaaactcagataaaatacacatttgttcattaaagctcacctgctttagagaattttttctcttcacacattagcacagtaagccaatgtttgatccatgctgcaaaagctacacaaaacgaaaagccctggtaactccctagggaactcttaaggcaaagcaaaagcaaaaaccttatgctacaaaagtaaaacaaaaagcagaggcattgggactgtggagacggctcagatgaataagcaccacaaggatgaagaaaacaatttttgtagaaatttttgcaagaagataaagtccaaaaaagaacataaaacatcaattatcctgcagaaataattatcatgtcaggtaacttgactactgaaataagctctgtttggattttaattaacagattcttaattctctcctacatttaccagtagtatcagagccttgtgttgggggcttgtttcttccttttcatcataagacctttagtcggagacctgcccagcaattcctgtagaagacaatcttggtgtgttttaggtccttctttggaaagctgtcatctccctttccacctaaacactaactctacctctgggcagtcacttcatgtttttgt

SEQ ID NO: 344667 - DNA, 1000 bp, Homo Sapiens
tcaagaagaacagactttatttttaacataaaagttctattttcttgtgaggcagcaacaagtgttcaggtacagggaatacataagtacagcgtaacaataccgattaccattggaaatgctgttttttgagagaattgttagaataacaaaatgttttaaattgcattttaaaaagagttacacagcttccacagagacaaaaaatgaagagttaaaaaaattctattcttaaacaagactgtataaacaaaatgctgttcagggctgctctgctcatcttcaatttggtcagagtagaacttaaagtgcagagttaagcattcttagctttattttgcaaattcagcacttccactcatctggttttgagacatcaaaattccaaagactaaggaatgaatcttaagtttacaatagtaaagtaaatgcagtagtggcaaattttcttttattttccttcacaaaagaaaatctttataacccagtcctagtcttggacatagtgaaagctataaattctgactttttttacactttctttcagtgaaagccaaccactgaaagcaaagaaaaaggactttcatgtcgtcaaatattccacagttagcaagagcaccttctaaaagactgatttggactgtagtcataagtattaagtataagaaatataaaacaaattgaataatctagttgaaaaataatcttgacatccatgctcaccacatgtaaccaaagaggcaaaaccggtatttttaaaacacagttgcgtacaaaagccatgacaagtaatagactcagtcatgatcagaaacagtaaatttatattatttttatcatcacaaagaagaaattgtttaaagatttaaaaaaacctaagattgacaaagtgaataaccaaatagctcctttctctgaaagacacatgctacccatttcttttaatgcaatggaaataaatttttataaaattaaaaaaatttaaattatattcccattg

SEQ ID NO: 344668 - DNA, 1000 bp, Homo Sapiens
gcactactcataaaagccaagtcttgataaaagccaaaataataattttatataacataaatacagactaaagcaagcgtaaatgttatgtgttttaaagtctatgaaaacatacatatttttaaagcagtcaactcattgaaagatactaatatttaaagtagaaagttgtgttgtctgctgaacatgagactctgaggtatttgtgagagagaaattgtcaggaaagcagtagaacatttcctgcccatgggtgcagtcttgagtatttgtaatagccatgacgaatccaaaaaccatcaccacagcaccaatgggaagcatgacacaagacataatcttatcggagtgtgtccttggttcttcagacagtttcagataacaggctgatggaatgataaaaatgaggggagttgcacagagcacaccattgagttctagaactatcccgaggcaatcaatcagcaatgacacaagcgtggctacagtgatgaccatcactgttacaacaatgtggaaaaccgatgaaagattcccaccaaaaaacacattggcaattacctctcttgtcacaaagcattccatagggtatgtcaaaatgacagtgacaccataacaaaatcttccaaatgttaccaggtcatcatttctgcagtaattttcaaataagtccccttgggtgaagccagtaaatgtcaagtatccacatgtagcaaagaatatacagataaatacagaaatcacgatggacatatggataaggcgggaccacttagctactgtgggttcttctagagaactgtaaactaagaaggagttatggtggcaaataaatgcaaaagacataaccccgaccgcttgaatggcattgggctttgcaaatacccaagcgtcttctgtttttggtatgtgtggacccagtgaaattgcccttgccattacaattccaagaatcagagttgttaaacctgtagagatgagggagacctttccaagcttt

SEQ ID NO: 344669 - DNA, 1000 bp, Homo Sapiens
ttttttttttttttttctcattttaactttattatgaaataattttaaatatattgttcttgcattttaataactatagtaagaattactgctttggtagcaatattttaaatgttacacagactccatcaagacagaaaaaaaccactgaaaattaaatctgagacgacctacctgcgtggatcataagcataaagacagaactcatcaatgtatagtattcaaagagaaaatttctgggctaggcatggtggctcatgcctgtaatcccagcactttggggggccaaggtgggaaggtcacttcaggtcaggagttcaagatggcctggccaacatggcgaaaccccatctctactaaaaatacaaaaattagccagtgtggtggtgtgcgcctgtagtcccagctactcaggaggcagaggctgcagtgagccaagaccacaccaatgcactccaacctgggtgacagagcaagactctgtctcagaaaaaaaaaaaaaaaaaaaaaggaaaaagaaaaaatctctgactagggtcaggtagaaagcaaaagtcaaacatccactgagactccccatcaatgaggcccatcccgaagaatcagccgggaattgccaaggcagttttcagagggatggatttttaacagaacctctccccaagtgctgtagaatggcacacacagcagcttgtctctaactcacagccactcatcgggaaccccctacagaaggattctttatcttcctcatcctggtccaactcactgttcctgtcttcattctcctggtggctctcacggtccttgagcttggctcccctcctgcttggtgatattaacttctcagcaaacacaggagccagagacttttcctcccctttctttcccgggacagtggtattcttcctgcaattcttatgagggacaagaacctcatctctactgccattgtccttagcttctgacatctcatcttccccatcttctacctcctttg

SEQ ID NO: 344670 - DNA, 1000 bp, Homo Sapiens
cagcaacaaactctcctactttatttattttgtatacatttcatgatcctggggattacattgacattacttttgtctctactttttcttcaaatagagattaagactcagttaaaaatgtactttattaacactgatgccatgaaaacttctttttaaaaatgaggtatttggcttactgtcccaaacagtagaggtttgggcaaactgcagaaatggtctagtaagtaagaaaatgaaagtgaatacactgaaacataaaacagaagcaggatttgacaatatgctgctctgacaccctgagaatctttactgcaggcaaaataaatccaccaccttttatctctaaaagcaaaacccagcatgatttcttcctagggcatacatttctattcagaaaagaccacagaataaagaggtgagttaatatgagaaaggtaaagacactaagatcattctttttgcccctttccccaccccaataaaaaaatactcattaaggggccactatttcccttgctttcaaattatcttagaaaatatttagaattacacaacagcagcatttacaagtgaatttatatagaactgttgtcaaggctcaaaatatcatgagagctcttgaaaaaaacagttgaggtatttcacataaaaaactgaacaatcaggttagccacgcccaaaatgatgatgaaaacgtggaagattaatttaggccatgtcagacgctcttcttggtggagggaaattatatagatgagagatgggtatatgaatacaaaggccagtccacatgctgctcctgaatatcttatgatccctcctatgtttgggtagaaacaggccatgatcactccagctcccacaataattagattaagaatcagcacatggaaaatgctaggataaatgtcaccgaagatatggcccaaaagctggacacgagccaggtagcctaagagtgggtatacagtcatcatctggaacagcaggaatatcc

SEQ ID NO: 344671 - DNA, 1000 bp, Homo Sapiens; identical to SEQ ID NO: 160969

SEQ ID NO: 344672 - DNA, 1000 bp, Homo Sapiens
gtgtttcaaatgtttaatgacaatttttgtttttttctgaggaaatatctgttcatatattttgcccattcttctatcaggttgtcttctttctatcaatttgtaggaattctttatatatgagaaatgtaaactttttttcctattatctgggttgcaaatatttcctcttagtaatttgttcttaaattgtgtttacagaaaatgatactttaagttggaagttttctaacttcaattttgtcctaggttttaactttcttgatgtgggagggttaactgtgatgatcttcacttcctgactcaaagggtcagactgtgatggagactcatttaaatggcctgtgtgcaggggtgtctggaagacattttggatcttatgataattattctgctaattgataaattagaatatttaacttacaaagatgcaaaccatagggcagaatacatattatgaatatttaatacagaaatactgagacatatatgaacaattgtgttttctttagtgtatgagcaaatctaaataattgcgctagtggattagcatcaaaaacagtggaatatggcatgtaacattgctcttctcctccttcaaaaaaacctcagccgagtctgcccatcaactctaccagggactttttcatatgctagacgtcgttttttgaattgtggtagttgtgagcacataaaacctgttaatgattccttgtctcctgagttaaatgaagattcatggtgccttttctgtcctaaactttttccagctctttggtagaaataaaggctgttgaattctttttgatttgcattagaatcagaagcacgaaataaatccaaactggggacagatggtaattctctccagaaagtctcatcttttgaactttcacatgtgaggccttcagactcatctgatagacatttttgctgatcagtgaataaattacctttctgagagtacaatttgttacatgcagtctgctgtgcaccatat

SEQ ID NO: 344673 - DNA, 1000 bp, Homo Sapiens
aagttgtgaattccttgtaaacattggttcccaggacccctgcagataccaaaatccatgcatactcaagccccacacttgaacctgcagaatccaagtatacaaaaagttggccttacctatctgcaggttttgcatcccacgaatactgtatttttgatctgcatttggttgcaggtgtgaaacctgtggatatggggggccaattctatttattgaaaaaaaatccacatataagtggacatatgcagctctaacctgtgttgttcaagggtcaactgtatatctgttttgtgtgccaaataaggtatggataagaatttcaaaggaaaagtcatttaaacagaattacaaggaagcctcattttatgagctgacattcctcaatcaccaatacgccctgtacggctcacatacatacatatgcaaaatgggggtggggaaagtccctagtaaaagaacagtgtgtttcaagacagggcccatctccatttatgctgaagagcttagacacaaccctgtagtctaaaggaatcttccgaagaagctactcatagggctttatgggaaggtggcagccaaacatctatctagtatattgcaaattctgttcactatcctccctttctgtggaggacatagggaaataggaatcattctggcccaaagttcctctgcatcaaatgaaacacaagaggagactctaccaaagccagaatgaggcagttctccctttgctcacccatccccagcccagaaggcatattgttgcatattccccagctcagaagctgacaatcatgcattcaaatgtattttgtctcattcaacctccttgaaaggaccctggttcctgatgataaaaacacaaaaagggaaccttttgtttagtgctgctagaagcaagagggaggaggtagttccctgattaatattctagattaattgatcatcaaaaagaagcagtcagaccttggctttctttatgctgtcttcctca

SEQ ID NO: 344674 - DNA, 1000 bp, Homo Sapiens
tgtttttttttttttttttttatcttgaacttacaactttatataggaaaccaggtttagaatatcaatcaatcaatatttaaaaccactatgtaaaatgcagtttactttttcctgattctgtaaagcagtataagaggtgctatcatcaaggagataaaacaatcaatcatctaacatattttgatatacatttccttgtctaggaatacaacatagtataagaggcaccacccaaaacattaaaatgaaatataacagctaaatgaatgacagggggaggaaaaagaaaagccaacttaccagtttggtggatagttagaatgtttagggacgaaataaaatacttggccagagctttaaagaaatgtaagagtaagcgttagataaaagaataaaaattgagtatttcatgcatgagaaataatatgcacaaagatgacaatacacatataaagtttgggggaatctgagtaaagcaatttaactaaagcaaatttgctgaaacaaatcagtaaggttagagtggtgatacacaacagagtcttgccaagaccagtcactctggcttctgtgtaaaagactaagacagtagatgttaaaggttgaaatagctatttgaaaatgaatgaactagtcccagtgaaggtcctgaagggtggataaaagttgctacattgtgagaaaaactgttacacagaaggggctgatctagggtaaggacaatgcagaatacactgggaggatgaaaagctaagattttttttttcttttttttggtccaaaaaaggaaaacaatcttagggacatatgattataaacaaaaaaagaaaaaggaaatgggagaataataacttcaaatgtcacaggaaaaatatctaacaatatgctctatatgtgttcaggattaggcctcaatttactccaatcactgtatgataggcactgcaatccaacgcaacatttaattaggcatgaaatatccaatttatacatctaa

SEQ ID NO: 344675 - DNA, 1000 bp, Homo Sapiens
ttttttttttttttttttttttttttttttttaattgttatacttttattatataagtatatattttaataaaagtatgttacataataaaaaataaatttaaaattgttcacttaccattaactcttaaaaatttaatttctacattttcttgcaaattttatgtttgccacactttaagaatctaattttttttttaacaaagaacaactattctgatttaatcttctcacctgtggacaatgtatgcttttatcttaactaatccgaaagttatattgataaccaaactctccagttaaaaacaattattcagtgcattaaaaaataccaactttcagctgggtgcagtggcttatgcctgtaatccaagcactttgggaggctgaggcaggtggatcatatgaggtcaggagtttgaaaccagcctggccaacatggtgaaacttcgtctctacaaaaaattaaaaaaaaaaaaaaaattcagccagatgtggtggcaggtgcctgtaatcccagctacttgggaggctgaggcaggataattgcttgaacctggaaggcagaggttgcagtgagcccacattgcaccactgcactccagcttgggcaacaagagtgagactctgtctcaaaaaaaaaaaaaaaaaaaaaacaaccaactttctcgtcaaaatttacaaagtaccatgtgaaatgaaatggcattaagacaacagtgagaaaactgaagccataacacagaaaaaggagatgggctgtgctgcatacatagctggggatacacataataaatacagagaaatctgaagataattaagaaataaaagatgcagaacttctctttaaattcagcaagattcagcattgcagcctggaaactatgtcctctccacatgaagaatcaattttatttcttcaccactgatgttttccatctctgaactgaagttacaagctaactttagcaggaatacttatggcttactatggagcatct

SEQ ID NO: 344676 - DNA, 1000 bp, Homo Sapiens; identical to SEQ ID NO: 160971

SEQ ID NO: 344677 - DNA, 1000 bp, Homo Sapiens
tttttttttttttttgttgatccagcgagtatttattgaggacctgctgtctgacaggcctgtgctgggtgctgaggctacaggggcacagcaaggctcttcccttgagaagccactgatgtcactgggtcactcgaggtaagcatgtttgaaagggctgaatcaaagaacaaggcaggaagtccacaaggccaacggaaggtcccagagaacaagcagagctcagaggctccgaaggcatcgaggaggagggtcagtattggcaagcaggagcagcccctcagctctggcctgccctcaggccacaccctggcccatgggcttcttgcacacccactgatagggggtgtcacaggtcatgtcattccacttctgctgaatttggacacagtcttcagtctgcccattcttgtgccgccagttgtcagactgattcttttcccaaaacccgaagacaacagggctttatactgttagatgaaggcagcatcccttcctggtgctgtggctcctagggagctgacatgggatgagtctagggagctgacttgagatgggtccttcatcccctagtggccctaggatgaggacagggctgggagaaggagtaccctgagggtgtctgtgctcaggttgctcttagttactgaggatccagggacagggaggggtgtctatgaagctgcaagctcccatcccagaattcacaataatatactttctgagtgggcaggatcccttggaaccaggcgctttgttctgggcggcgttgaatggtgtcccatctgtccagcgccaggagccctctgtgcccctgtcagtgagaccgatccagtagtacactttacttgtgaactctaccagaaatgcctgctcctccttggaggccacagatgccagatgggctccctgggacacgcagaactgctcagcctcatgccaagacttcttgacactagaaaaataatataagcttccaccattgaacttccagccttgc

SEQ ID NO: 344678 - DNA, 1000 bp, Homo Sapiens
tttaagagaatgtgactctttatttataacaagttactggtattttttttgttctaaggatcatgagagtaaagaacactgaaaaattgagacacctttgccacaaaattacaaatgttcctcaaaacaatgaggcagtagcagaataacagaagccattataatcacaagccataaaactttattatacaaagtgactacaaacacttaatagatgcaaataattgttattacagtgaaggattgaaaaccaaactatttccatttaggtaaatcatgtctcaaaagtcttctaattagccctttttgcttagctgcatttcagttatcacagcctttactattcacacactcaaagggtccaggtatgtttcattgtccaacaataacaattcttttatttattctgacataaatatttcagaaattgtttgaggaacagaaatcaactttctggatttgtctacacacagtagactatttctacctgcaattctcttattctctttgtccaaatatatatataattttatacatatatatatgtatgtatgtctcagttagaaaactggaaatggttatttgaatagaaaactcttttagtgaggaacatttttcaaaaaataagaatctagacagatcactttaggatttacatttcagattatttttttcttcatcttttatgtgtgaaaaagataaatcaacaggaaaaataagcctttgtattacattcagaatttccttatggtgtctttgtacccatctacatgcaagcaagtatctactacaggatcccttccacccaacacaccatgtctctcagttatgttgtctgttagtcaaagcttaatgtctgccacttttctttctatttgggcctatcatcccccatctccgctgaagacttgtgtcacaagagtacggatttcatcctcatattagccactataagcttatacgcctaactggcttgttatattccaaaccatcacacaca

SEQ ID NO: 344679 - DNA, 1000 bp, Homo Sapiens; identical to SEQ ID NO: 160972

SEQ ID NO: 344680 - DNA, 1000 bp, Homo Sapiens
ttttttttttttttttatttttgacagtactaatttaatcttattacttcttacataattctgcattcaatattcccaggttatttcagaattgtacatttcaacccacatattttaagtagaaagtctttattcaaaattataatttttttctcaagcacgtgcttgatggctttatgttttgtcccccagctatacatctcatcaatggctttttagagttttcatccctgtctcacttttttgacataaaagctgcctgaaggtttttccactatcctgtcaagatagttttctcactggaaaaatactggtattgactaaggaatgagtaatttactgaggactaccctccattcatgtcattgagagttctacaccatgtgaattctgatctattatagaagtgctgctgtattaagaaaaggatttctcatgagttttcattgaataacttctccactatgaatgtctggaattgttcaagaggcctcatccacctaataaaaaatattttcacatatttcctgtttttatcagttaccttataatgaattttcttgcacacaccaaaattggtgcttagctgaatgagagtgcacagcaattacagacatatggttgcttgcctgtggattttactcatttgtttagaggataaattatcagcaagggcattttcacactgacgacaggcacagaattttcgtgatgtgatttctcccatttatttaacagagctgtggatgaagactcctccacattcctttgatctatagtttcattctctcacgttgtatatggtcagcctagagtctgaagtttgtgccataaacattaaatacatctggattctctctaccttgaattcatttaggttgagcaaagtggtaaatataaataaaggcttttccacactgattacagacataatattcctgtagtatgtttgtccttggtgtatttagtgttaacgctacagctgatgattcttacatat

SEQ ID NO: 344681 - DNA, 1000 bp, Homo Sapiens
ttttttttttttttttgacatgaaagtatataatataaaaaaatccaactccggaaaaccagaatacaactcaccaaatgttttgcttctccaccaacgtaacaatttataaagcaagagatgagaaaaagagattattgggaaatgtactgaataatgaggagtctggggaatagaacaaaagttgtaagtcgtaacctgacccatcttacttcactggtaatcaagtacagtcgaaaggatgaaataaagaagtgagtagtttaaaaactctgttggaccagcaccttgaatcaaatggatgttttagggttctgtttcccactgaaccaagaattgtatccctccatctctccttgaggagaggccctatgttagaccttggctactcatcattaagataaaatcttaatagataaaactggaattccttgaatccatgaaaagacagtgttcattaagggtttgtgcagtggatgctccttatgtcccatggtagaataagatctccttagctccgccaagttaaaggctcttgcaagggcacttagagatgttgcctcttcatgaagatttcatgtaggtaatcccaaaatttcgtctgctctgtttcattgttgtggatcatggcagtgagagcttccccctggtccagaccttgccaataatcttgcagccacatctctttccaactgtcattctcaggaatctcttccacattgccaaagccaggtgtgggcactgggcagtccatgtgtgagggctgggcaatgtggggctcaaagacggggctgtccccgggagaggccgcgtgggctttctcggcatccagccgagccagttcgtagtcacagacgaaacactcgaagccgttgaggtagttaggcagcaaaggatcattcactccccactcccgatgcttcagactatccagaagaaattggttggtgatgcccccaggttgcttgtatgccaggtatttcatatactcctcatcatt

SEQ ID NO: 344682 - DNA, 1000 bp, Homo Sapiens
ttttttttttttttttcacagccgctcttgtttaatggtggcacagcctgcggtctggttcctccatcagggcgctgtgggtatggccctgaggtgaggggcaggcctggggtggggtggggtggggcctgaggcagaagcatgggggctgaccctctgcctgacatggagagaggacattcagaaccctccagccacagatggccagaaactttggtttgtgtttgttttcaagtttctgtcctcaaggaagctgcccagaaagggagacgaggggactgcttcctgagggagcagaggggccagagctgggaggagcaatgccagccgaagacaacgcccagacaaagctcaccagctccagggccacccgtgggaatgcagctgggagaagggtgctggaacaggctccttccaccccatgggagccccagagtctgccccaggaccttcccaaaccctcaggaaggagaagcacgaggaaggggccccagaggtgggaatgaggttgagagagcagcagtaggaaacagacagaaacagagagtgggagatttagggcagggcagaagagacgccacggtgcccacccacctcgggggagagagggggtcagttctgagccccatcaggttcgtgacccactctaggaggagatgactcagaccccagatcagagaacgaagcccccaggaggggctggagttagaagtccggtggccttgggacgggggtgaccctgacgagggtcagcaggggcgaaagcagcagagcagggacagaacttcagtcccatgaaaccttgacaggcgcgaacttccagaggtctggctggcccatgtgcagcaggccgctgaagggcgaggtgctccactggaacgggggcacctggtcccacgtgggaccgctggccgccagcaggctcaggatcctggccagtgacatgctggtcaccttcacatcgatacccccatgggagcgctgacgcagggccttgaag

SEQ ID NO: 344683 - DNA, 1000 bp, Homo Sapiens
ttttttttttttttttttttttttttggcctatgaagtgcaaatgattgagcaaatgtatttcggaagggggggttggagggaaataggaggaaagggcaggaatatctcattgtcttggggtaggccgaaaactccagacagaatgggaggaaacggtctccagggagtgtgaaagtccctctgcaagctgaaccaagaacacacgggaatccctgtggaacccactccggaagcagctgcaagacagcagagaagctgccaatatccagttagcagatgactttgctggcaagcagaggaagtcggtaaaagcttgtctcccagccaggaaacttgacaccaagttaagatttggagctgctccctcctgttcccatgggacctccaagcagccgtccagagtgcaggatacatcattggcaccaagggtctttttcaattcttggtcaatcctctgcagcaagcacccccggatgacgtcctcatagatgccctcagtggtcagagcctggctgcccacggcaaggacatccccctcgaactcaggcagctcctttttgcagcctggctcgagttggctcagcacaaaaggtaaaaagatgcagagaccccagcctcggatgaacctcctctgcgccaacccgctgtccgatttgaatttcttcagcacgcgccccctgactctctccagcctctgggcagcctggtcacagttgagggccgtcgtcagacactggtcagccagctgcaggaaggtggccacggcgtcagccatgagctgctgtgcaagatcttgggccccaaacacgaggctctgcatccccagaaagccaaacggtgctgccagctgccccaagcgcccccggctccgctcggcctcacggtagcatgtctgcatcagcgccaagtcccacggcatctccccaaatgagtaaacctccctgcgcagccgcgtgcctgaggggctctggcgcaggcggtgggacagtcggtccatg

SEQ ID NO: 344684 - DNA, 1000 bp, Homo Sapiens
tttttttttttttttttttttttttttttttttttttttttttttttttttttttttttttttttttcaattaagctatacatttatttatacaatagttatactcaaaagtgtcttcaggatgattatgaaagttgcattaaaactgtatcgttaaaagcagctaccatgaactattacattactacgaagaatatcctttgatattaaatatttttttccttctaaaagactggtattaccctttgcattacttttttgtgacagatttattgaaatatatagttcacgtgcaatgaaatctaccctttgaaagtgtacaatgcattgtttgtaatatatttacagagttgtgcaaccatcactgccatctaatcttagaacatttttatcactcaaaaggaaatcctatactcattagcagtcactccccattcttcctccccaagtccctggcaaccacaaatttgctttctgtctttatggatttgcctgttttggaaatttcatataaatgagttcatacagtatgtggccttttgtgtctggcttcttttacttgccttcaaggttcatctatcttgtagcatgtatcagtactttattcctttttatgaccaaataatattccattgcacagatataccacgttttgcttatccattcacccagttgatagttgatagactttgggtgtttatactttttggctgttaagaataatgcttctattgacattgtgtacagtttttatgtggaaatgttttcaattcctctgggtatatacctaggagtagattatgtaacacttcaaggattaagttagtggcagggatgagaataagttaaatattacattcgtagatttgttatactaccaaggctaaagggacattataaggggaaaaatagttcccaaataacaataagagataaaaatcagaataataggttatagtctagagaaatgtttatcttattcttgttccagtttaagtaa

SEQ ID NO: 344685 - DNA, 1000 bp, Homo Sapiens
tttttttttttttttttttttttttttttttttttttttttttttttttttttttttttaggttttagcagcacttttacttccacatccaaactccctgggtcctcacaacagccctgtgaggtaggtagggtaggaaggtttcagagatccccatttatagatgaggatgctgaggcacagagaggtgaagtgacttgtccaaggtcatacaaccagcagtgtagagggctcaaagccagcattcctccacttgaactcctgcgctccggccctctggcagttcccacatcctctctattctctctgtgtcccccaccctctcaactctcctgggtctacagggaccctaaaggcagcctggcagctgagatttttcaggaatggcaactggggtaggcctggtcaactccagataggaactgaccctgaagagcatgaggccagctttgcttctccccatttcccagttggatggaaggcctagtaggtcccagggcaaggatggagctaggcatgattcatgaacgaatggtgataaaggtaggtgtaagcatatgtgtgtcctgcactaaagacaaaggctcccctaacccaaggccccaaggcagtgtttcaagtgctcacccccatgcctctctcatcccacagagccacagtgagtgtcctcagcagcaaaaggagccatagaaatagctgcctctggcaatgagctgctccagtggacagctcccaccaagccttcagaccccatcacgcagacacagtgcctccacggcttgactggggccctgggccacacccccaataacaaacagccggggcccagcctgcagactagagcaggagcagcgggcagtgggcatggcaggcaatgcctcccagcgccgccgtgcaaggctaaagctctccacagagcccaaaggacatggctggtttccaaggcccccaatggccacaatgtggcccccaagggacccaaccacaaagtctgccctct

SEQ ID NO: 344686 - DNA, 1000 bp, Homo Sapiens
ttttttttttttttttttttttatccttttaaaaagttttattgtgaaatatttatccatgagtacatataacatagatgtccagtttttcaagttacaaaaagcagacagccctccctttttttttttttttttgagacagagtctcgctctgtcacccaggctgtagtccagtggtgcaatctcagctcactgcaacctcacctcctgggttcaagcgattcttctgcctcagcctccccagtagctgggattacaggcgcacaccaccatgcccggctaatttttgtatttttagtagagacggggttttgccttgttggccaggctggtctcgaactcctgaccttgtgatccgcctgcctcggcctcccaaagtgctgggattacaagcgtgagccactgcgcctggccaaaagcagacacccttggaaccacctcccagaacaagaagtggaacatttcaagtaaaaaaaattacacctgccctatgacccagcaaccccacttccggaaatacaagcaaaatcatgcccaggggtcttcgtggcagcttgctctgcaatggcaaacaccacaccaaaccaggaggagctagcctgtgccgacacctgcacacacggctgccccaaagtcccacacccaggggtgggatgctggagatgaaggtcctgccagtgtcacgtgctgcttagtgacagggttgaggggccttagtcggcttgactcaaggtggcctcactgtggccttttgtataaaaaaatcttcaagtgctcattgttccctgagtgactcacttgaggtaacagcctacatacatgaccataaatgtggccaaacatcccactcagaaatattcatcataagccaggcgtggtggcatacacctgtaatcccagctactcaggaggctgaggtaggagaatcccatgagcccatgaccgcacccctgcacaccagcctgggtgacagatggagatcctgtctcaaaaaaaacac

SEQ ID NO: 344687 - DNA, 1000 bp, Homo Sapiens
ttttttttttttttttttttttttttttttttttttaagcggcttaaacaataaagcctttattaccacatagtccagagcagtatgagacagtccatgctagggcatgacaaataccatgtgtaatgtcaaccatttccatgaaaatggtaaaccttcccaggaagcccccagcagataccagctcagctcctccggccagaggtgggtcatgtccacagctaaaccagtcaagggtagggaatgaggcctgttttgggctccactattaacgattctctactgtttagagcaaggagcacaaggtctgctgtcccacttgctgtagggaccttatggggtggatagaggtggatggcggtggataaactcagtgatgtgacactgccaacagccccaggcaagtcagagtgcaatatgggtcccgaaagcgtcccacacaccaggcacacacgggaactctccctggggtgggtgttgggatgtgcaaggtttagcttctttcggatggcactctcacggccactctccttaacctcctttctggaataagacctttcctgatgaacacggtgctagcagctaacgaccttcccatgtgccctgtcctcctgacgcctttctggagtatggactttcttgtgctgaaggagggtggaactatgtttgaaggccttcccacactctgtacattcataagacctctcttcagtgtggaactgctggtgccgattgcggtaggatctggtagtgaaggttttcccacacaggctacattcatagggccgttccccagtgtggactttccagtgctgatagaggcctgaacgggtcacgtagcctttcccacattgcttgcattcaaaaggcctttctccagtgtgaactctctggtgaagaatgaagctattattgtatttaaagaacttcccacattctgtacactcatagggcctttctccaatgtgcactttccggtgccgaatgagggtagacagaa

SEQ ID NO: 344688 - DNA, 1000 bp, Homo Sapiens
ttcccattcaaaacaattttaattgtactgttaactcttcctccattttttaatttcatgaagtcataatccaatctgagttggtctgttggcattagcagacatagtcactggagaggagtgagatgatgtcagagcatggggcacagtatttataaatgtctcctttaagaaagtgtaagtagtatcaagttcagctttcaatggtaagaaatccccaataccagttgtgtcagcaggaagaggagctcttgaaggaatggagagatttgaatggtctcgtgatcctattgattgtaaacttgcattttcacgtaaacaagctgtgtgaagttctgatttcaaggctgcaatgtgacttcgatgagatgtcatttccttctctaatgtcatgattctagtgcttgcaagctggtagacatccatgaaacttttaatcatagcctggcatgctaccacctctggcccgcccttgagcccctccattgcaaaggtctccaggtgcagtttgggtagctgtagggtgaagtcattcctacttgccgcagaccatgacagcgagatctgatctctgaccttgtgaagcgtattttctactgctctcatgtgattagcaacacattctttgtctttggctgccatgcggagggcactctctgcatcatggatgttctcctccagtcgacgcttgtcctgctccagctgggtaagatgtctattgagctgacgcagagattgatcttttcttctcagctccatctttgcctcggagagactcttaacagcttctccaagagtttggtttttgtcagcttcctcactggagtgcaattcaagtttataattcaattcctgtagttgttgtgcctgttcattcaatagcatttgtgcctgctcttcccgaagtaatgcattatttagttcttcacatgcactttcaaacttctcatgggtgatcaatttagactgcttaaattcatttaattgcatttgcagaccc

SEQ ID NO: 344689 - DNA, 1000 bp, Homo Sapiens; identical to SEQ ID NO: 246599

SEQ ID NO: 344690 - DNA, 1000 bp, Homo Sapiens; identical to SEQ ID NO: 160973

SEQ ID NO: 344691 - DNA, 1000 bp, Homo Sapiens
cagtttcaattatgtctttattagcagcatgagaacagactaatacacagggttaaactacggagaattggcttgcattatagactggctgtctatcacattgagcatcctcagagggaaagatgtgtagacaatgctatgcaaacttctaagtttttcttagaaacatttctaatggaactatttcatactggaatcacagattaatcagtgaattttttgtgtgtgaaaaggaacctcagagactaccttgaacccactgtcatgcttctgaatacttcagtgtagaaatacaaagcgtgcttccgttttggtcactcataccatgcaagtaaatgaatagctgaatacctttgattttaaatgtaaatatgacctttagaaataacagctggtttaaaaatgagccaaagtgtaagtaaaatgggcaacggatatacttcagttcccaaagaacatttataaggaaaagttgtgtttcctttgcagctttccgtcttagagaaaagacttcatcatcttatatgtgatgtggctttctgggctcctgacatctttatagagtttgactggaatttccttctcttgaaaatgaatgggcattttcttgctctccacactcataagcttcactcccagggggcccaagtttacataatccttgaaatccttctcatcctcatatagtaagtacttcatatcagtgtccccaaactctgtgcctgagttttcctctttatctatcttcacatactggagatcttcgatgctattttcatgactaagatgtaagatagtgctctcatctgatgaggacatcaagtctctactttctacttctgtgggttgcaattctgacttctcttctatatgtgtttctggcaattccaaagacatttcttcaggtggcacttctagtccagcagcttgggtaagatatagtcgccagcaacgcctggcagagattagacatgattccaaaggcagcagcagcagatga

SEQ ID NO: 344692 - DNA, 1000 bp, Homo Sapiens; identical to SEQ ID NO: 160975

SEQ ID NO: 344693 - DNA, 1000 bp, Homo Sapiens
ttttttttttttttttcttttttttttttttttttttttttttttatttcttttattccttttaatcttttttaaataaagaggggaaagcacttatcatctccattcagttacatagaatcggaatgctgctatgtgacagaaatcatcacactaatgcacaggaattgaagtcaagcaactttggtcttgtctgaattgaattaagtcttgaccttgtaaacatttccgttggaggtagaacatacacatttgactttttgtcaaataagggatagtaaacaatgattctgagatcctaataaattaaaggtattgtaaaggcattaaatatactttttaaaagaaaccaaagataaaaaggcacacagatgtttaataaattagaaagtgaaatgtaaatcttcatagttgaaatgtttgcatcttcagatcttcactggttttatttgataattttgaaactatgattaataatgagctcacattttaaactcttagtgtgcatgacaagctctgcaagtatctccattcactatggagttgtccatagtaccagtgactttaaaacaatgtcagccactgcatattcatttttatttactcttatggaagtctgagtgaataatgatatttgcacagtagagattttttttaaagttttagcaccccctcccacattggtggtttaagtgcctccagctgctgttcccatgaacacagtgttgataggtggtaaagaggacaccatttctctactgcttgttccatgggagtccagggtttcttgagctggatactggttggaagttccatacatacattgggatgaggaagaaggaattggggtttgcaaactggaagctaggactggagttcgacatgcaactggagatgatgtgtctgtgtaaaacgagctggtctgttttctaccactgtcatctaaaatgttaagtggatcgtggatgtcactgtaggggggcagtgaacgaatgctgct

SEQ ID NO: 344694 - DNA, 1000 bp, Homo Sapiens
ttttttttttttttttttttttttttttttttttttttttttttttttttttttttttttttttttttttttttttttttttttttttttttttttttttttttttttttggagtcaaaccctttattctctgttcaggacccagcccattcatgtcttttgtatacagtatcaaacacatagtaggtgctgaataagtatctgctgactgaatggggtgcctcttttatccctatcctttatttcccaaccctaaactggatcttgatccatggggaaaatatccccacccatccattcctagagtagccctgtctctttcaacagtctttgatacataacattggtttagagacatatgcctgaagggaaaagagggagggtttcaggcagagaaagaaacacacaaagacagggcacagagactaggcagaaacaaaaagatctaagacagagagagagagtaactgaaacacaggtgcagagcgggaacaactgtgggagacagggacagaaaaaccaagtcagagaaacttaaaacgcacaccattggagataaagagataaaagggctgggccagaatgatcatcttgaagtttctactcagctttaatgttttctgatagagaaaatggcagagagagaggaagacacggcctaagcaggaggataaagagacaaaggaagttagtagaggcagaggcagccagccaggcgtgcctagccgggaagcctggtcctaccccggcctcacacccacggggatgggctcccatgcccactttcggctcctaccttaagtccagccaccctcttcccctacccgcccctaaagatctccaaaccactcggcaaatcaaatcctctctccccaacatcctccgtgaagcattctcgctgctccagcccgcactcagctcttcccctctcaactcctaaagccacacccacctcccctaaccacagggcagggctgttttcgagtttgcccttggctcc

SEQ ID NO: 344695 - DNA, 1000 bp, Homo Sapiens
ttttttttttttttttttttgagatggagtcttgctctgttgcccaggctggagtgcagtggcatgatcgtggctcactgcaacctctacctcccgggttcaagcagttctcctgcctcagcctcccaagtagctgggactacaggcacttgccaccacaccgggctaatttttttgtatttttagtagagacggggtttcaccatgttggccaggctggtctcgaactcctgaccttaggtgatttgccggcctcggcctcccaaagtgctgggattacaggcgtgagccaccacgcctggccaaaaacccttgctttttaacttcgattgacacttaacaaaaatcctccacatcccactttttgacagtttacattaaagcctgtggtctgaatatttgttttacttagagggggaccctttgggcaacttatttgcaaacacatctaaccttcctgggcttattccacagtattttcatagacctgtatatattagacatcacactgttctcttgggatttaaagtagtactgggtactgcatattgtgcagtaaatctggcttgctttcttaacctttttgctgccattctttcaaatatttttccagggcttaggggaaaccattaaatgatctgacttaacactgtcgtcttgccctccctccaactcctcagtggcaaatgtttcctcatcaaaacagcatgatatgatgcagatgcaaactcaagattctaaacttcagattcgggttaatcttggcttgccgatttctctggctaaaatatcaacagcctggcttgcttatttaggcacttagaagaaaacaccaaacccaagtttcacatttttaaaattacaaatgcctcttacccatctggccaggaaccaactctgaagggggtgacctcaacccagcccttgtttctgtgaggtcctgcttttgcagaatggcctgcccctgggactggagcaggcttgggtgagctctaggtgg

SEQ ID NO: 344696 - DNA, 1000 bp, Homo Sapiens
ttttttttttttttttcacggtcggctgatgttttaattttgcagagatgggggggtctcactatgttgcccaggctggtctcgaactcccgtaatccagccatgtaggaaacctgagatgcagtgggccaaggggtatgttaaaacactgtgacgagttcagtgctaagaactgtaatgctcaggaaatcttacagcacgtgccatcctaagcctgtgtgtgtgtcctcgtgtctctctactttttcttcttcttgctggtgatggtcttgctggatggggacacggtcacatcctccttgggagggtccagtatgaggtgagaggatgacacgtctgccggcttcttgagcactgtgatgtccacctcatagtcatgtctcttggcctcttcctctctcaagatgaagatgttcagccttgcttccagttcgtcatcttccatcttccgctgctgggcctgtgctgtgctacgtaacctgtctgcccttattttctccttgatagcttcttcacgtttatacgcatgaaagagcgtgttcacaaagaagacgtacatattattgacccacgtgttgaactcttcctctcgatcatccttgggtctctcatatttcttgctctcagatgagaaaaaggtgatcccttttccagtcaatttaaaattcattttggagactctttcatgacttacagacttcttgatcttgggctctgatttccttattttgttaacatcaggcgagagttctaacttgctggaagatgacctggcactgtcagagtgagcagcatccgattcgtggctcatgaccgcgctgggactcttgttctgggcgtcctgatttagtattgtataaatagtttcatgtttatttccagacacatcatcagctggaacatttgtataggatttagtcatttggtcagtaacacagatgaatgcaaagcttaagagagcttcaaagaattccaggaaaaccagctcaggttcaaagtt

SEQ ID NO: 344697 - DNA, 1000 bp, Homo Sapiens
tttttttttttttttttttttttgccagctcagtggttagtatctttatttggagacgagggcaacccatgagagatcttaaggagtggttctgacaagtgcaaacttgtgttttaggaagaccacttaggcagcagtaggggaaggacaggaggggcgctgggactcatgagtagctgctatactttgggatctgtcccccatccctgtgtttgcagtgtttcagcgaccatttcaacatctccaaaagtctaagattaaaaatgcaaaagaaaagagagaaactgcttaggcgagtctttctcccaggctggagtgcagtggcgcgacctcggctcacggcacctacagtctcccgagttcaagcgattcttctgcctcagcttcccgagtagctgggattacaggcgcgcgccaccactcccggctaattttttgtatttttagtagagtcaccaggttggccaggcctgtctcaagtgatccgcccgcctctgcctcccaaagtgctgggattacaggcttgagtcaccgcgcccggcccacgtggcgagtcttaaccacgtgaccctccccgctctccagcccggcaggtaccagcaaaggactagcagcctcctccaatatggatagcttctcggatggccccgcccctccggagagctgcagccaatcagacggcgtgaggccagcagtgggtgcggctgcgcttggcgctgcgcatatccgaataccaggaagtgcccggtttcgctgtcagtgctcgggcagctagaatccaggtccctgtttgcaggaggagatttataattcttgttggtatatatctcttctaaactaaactccttcttctttaaccttttgggtcgaggaaggcccatgggggtaagattaggatctggcctaggaatggttttccggatgcgaatctgtgagactttctttggcctcttctctggctcagcctctttctgttctggggggctgctctgtgggcagg

SEQ ID NO: 344698 - DNA, 1000 bp, Homo Sapiens
tttttttttttttttccttaaagaaagcactttattttccatttaaacaacttggtcacaggacgttattttacataaatggaagtaatttgtaaaatttccatgtaaaaggccttgtgtctgagtctgaggtgataagaggatatgaatacaagtatataaaaacagtgcaaaatgtgcagcccacagcctccggagttggcttcagaaatcccccttaatgttgctagaccagttacattaaatattaaatgtaacaccaggtaaatattcctgggtttcctttagtctaacatccaacccagatatgcaataaaatgaaaaactcaaaatccctaacaactcaaaccatccaatcacccagaccattaggatcacaatgagttgagactgcaggctctatactgtgacatctcgtcagtggctccatcttaagaaatacagaattttagttgcatcagtaactagaatagactagctctgcttttaaagctttgccttttaaatgtagatttctagaagttcactttcaaggtgccatcaagaaggctaggccactaagaagtcacaagcccaacctagacatcgcagcctcttaagacatttgtcttcactaaccgttcagtctttaacctgctgctgatcctacaatgaaaacacttagtgccagctgaagcgtggatgcttgtctatcagcaacataattaagtgtagctgattctgcaagaaatttatattagtcacagcagacatccacaggaacatactgaatcgtactcagtagtgagtttaggatggctttcctgctcccctgcatcacccttgcagtgtttaatacaaaagggtgcacatgtcaagctgccgctgagaaaaccagattccaaacaggtgcctcaggaaaagtctcttattatccattgcttgcttaagcaacctctacttttcaaaatggaaggtaccagaatatggctacaattaagttaggtcatataaacttacc

SEQ ID NO: 344699 - DNA, 1000 bp, Homo Sapiens
tttttttttttttttttttttttttttttacagaaatgcggtttactttgtaggccacgttggttcaataaatgatgcagcggacacagcccgcccagccccggcgcccgcccgcgccctccctcgcggtcccggccccactcctccgcccctaggcgccgcggcaggtgtccgcggtgaccggcaggcagctgaggaagcggaagccgaatctgctctccgccgtgttctgcaccgacagggccaccagggggcagctacggtccacgctcttccggcacacccgaactcggtgttctttctggagccgacagtcctccaggcccagcccggcctctgcgggaggcgacggcagggtggggtcacccgggatggcgggcaggtgctgcggcgcggggatctcggggttctcgggccgcgcaggcccctcccgcgcgtggaagagcttccccgagctcactgggggcagcaggccccgcgtccctggtctccggcgactgacccggggctcccgcacccggcctttgcgcaggggtcgaggtgggcgcggcggcttgcgggtgtcggcgccgggcccggcctcagggagcgggaagcggtcgatggacaagtcggtgccgtcggcgaagaccctcggggccggagtctcgcggcgtgggatccggtgctcactgaggacctcgcccttggggctcaggagcagcgtcgcgcagccgcggatggagaggaggggaacgggctcccggctcgaggacgcgcgcagcggcttcttggcgctgcgggtcgcctcgccccagaccgtgacgtggtgccgcggggccagcagcgtgcccggcgggaagcggtacaggcgctccgggaagccgcgcaccagctgcttcagcaccatgccgctcaggtcggccgtgctctcctgcgacgggttgaagatgcggacgaacttctcccggcagctcacagccacgatcttcaggcctgtcgggctctgcaggagttccgg

SEQ ID NO: 344700 - DNA, 1000 bp, Homo Sapiens
ttttttttttttttttttttttagcggttctcacattgtaattctcagaggtgaaaactacagaaattgctggagcagtttgaatctctagaaaacattcacctccccacccactaccccaacccatgcccttgacctccaagacctgagccgagcctggggcacccgcggcctgtgctgcaagggtcaccttgtgacgagggccgtgcacagcctccgggctgagcagggacaaagactcctgtcccatccatggccccagctccccgtgagcggtaagagggcgcccagcagcgcttcctccatctaggcgggtctcgggggcccacgggaaatgccctccacaggtgtcccctgcacccacagcctcttgtcccctgcaccaccacgagcctgaggtgtgaaatgtgtccggggcactgtgggcaccgccagccaggctgggtgggaacgtgaatgccaggcctcggcccatggccctccctctggcagccgagtctccaaagcagctcaaggggtgaggaccacgggcgtcccggcctagccgctcccggccgaggggcaaatggggccgcacatgggcagggcggagcgttccgcctcgtcctccacaggctccgcagcatccctggactcaggggcggggagaggctccctcgggaggtcctggctcctcttcagcttttctctgttaaaaatcacgaagtcttgctggatggcatcgaggcagtcttgaagatagtcattctcggactgggagctgtccctgctgttgtcccgggacttgttcttggccagacgcttcttcttcttgtgcaggggcctggactccaggatcatctcctccagctcaaaggtggggtcgcagtgcagacggcctttgttgggcacgaagcccggctccaccctcttctcgctcaggtggtcccacagcacgccggccagcgccggggctgcctgcacgtcctggaggctggagagccggtgctcggggttcaca

SEQ ID NO: 344701 - DNA, 1000 bp, Homo Sapiens
acatggttagtattatcctcgctatttttactgacatatgaaaatgttttgtgaactgcaaaactctgaacaaatgtcaaatgtcattagctattctacaattttatcagaaatcacacacaacgctactggtgccatgtgaagaaaacactcagggcatggccctgcctccatccggcagcacatgcagcccatggtcaggatctgcaacctgcagaagacatcagtccagcagatatgttcaagcgggttcaagcgggttcaagggattagacgccttgcatcttagggtcaagttcattactgggatggagttggaagaagcagcctagacaggctcctttcctgcaatgataacggttcctacagtcctcttggagaagcacagactttggctgttaggtagcaggtggaggagaaggtgaaggggaggttggagctgttcttggggctgtatgcctgtaccgcagaccccaggcatggttttcataagcagttattagtaagtggacaataaccacttattaaggctaaatttcatgcatgcttgagagaatgaagcaacatggaaaagggaatttactgatactttctggttgtaagttatttctttagaaacattggggctctgttctgccctgacagaatggaggttttggcttttaggggaattcaaaattcaagaaagagattaatccaggagaaaatgatggcttttctgaagggtgtggatagtagtcacaagaatgatgatactagaaatcccgaggaaaagagcatcccgaggaaaagagcatcctcagggaggctgtgcatccagaacaaatagagtgatcctcaatatctactgcggcccatgactacatacaaaaagggcacgaagcactctacacacatcactcattttgttctgtttacaattcttggaagtctttgttattactattatttacagaagagaaagctgaagttcagggagattaaacaatgtgcccagcat

SEQ ID NO: 344702 - DNA, 1000 bp, Homo Sapiens
gaaacttgtttttattttattcacatctactcaaaggcacgtttaattaaagaataagagcctgctaaggattaagcatttaactagataaatcagtcattaaagattttgaagactttttaaagcctaaaaataggcatcatatagatagactacaaaatacataacaattcctctgctgttttgttgttgttgttattttcacatttttgctattgtaggcaacactgtgtttgatagtcttaacataaatcttattcctcaaaaatgacttatagatgaactccagcaacccaaaaaatatgttcacggccgggagtggtggctcacgcctgtaatcccagtactttgggaggctgaggagagcagatcacaaggtcaggagattgggaccatcctggctaacttggtgaaaccccatctctactaaaaatacaaaaaattagccaggcgtggtggcgtgcacctgtagtcccagctgctggggaggctgaggcaggagaatggcgtgaacccgagaggctgagcttgcagtgagcagagattgtgccactgcactccagcctgggcgacaaagtgagactccatctcaaaaaaaaaaaaaaaatgttcagacacagttttacagcgtgggcttgtctgtagatttgatatctgagccactcatcatcttctcaaacaagatgacctcattgtcttctggatgaagccaaactccaggaaggtacagtgttttctgaggcccaatattccaatatcgcccaaggttacgtccattgatgaacacgaatccataattccagttcagcaggctcaggaaggtgtccttgggagaagggccagccttcaaggtcccacagtagaaggccgggccctggtggctgtctgggacaggcttccaggtggcagagcggagcctctcaaagaagctcattttcatctccagggaatagatggtaaagccctccagggaagagttattgatgctgacagatccagt

SEQ ID NO: 344703 - DNA, 1000 bp, Homo Sapiens
ttttttttttttttttttcctatgaagagacctgtttattactgataacacttcatttggctaaaaccacaagaaatccacacacaaatacataaagtgcaaattctcacaggcagtacttataatacaccctggtgtttttgtagggaaaaatgagaagatgttgacagaaactgttaaaacaagggcacaattttgaactactgctacacactttagtcagaaaaataattcattcttgactgcatatattttacctggcatattcaatgaggcatacaaagagtttattctagcctagaacaacaaggcctcaccatacatagaagcagagtcttgcttgagtggctcttgtaagatacatgatgaatcataacagtggacaaaaacataccaaataggatcaaatttgttgtgactcacttggaaggtagtgctactaggctcaaaatgacacttagactagtgatattaagtctacatagacaccatttctttaccttcctggccaacaccttgctttgagtgtaaaataccaggcattatatataatttccacagagagatatgctttgctctctccaaagaaactgagtatttaaggggatgtctgcttaataaacattacattataaagttcagtgatgggacttcattgaaaaaactgaattagaaaattcattttttgattgttccttaaactatttgctacttttaaaaaatcccttaattcctagtatcagcaattaaacactctataacaggtactgaactaggtggtatggatatgaaaaataataaaccacgattcctactctcgggactgagcatcaggtggtcctttttagtcaaggaatgccaatagtaacaaaactgtttcaggtcagtttagtttggcattaatccttctgaaggtcagattccaagggcaggaaatagtctggatatgttctatgtttatatatcttttttttttttttttgagatggagtttcactct

SEQ ID NO: 344704 - DNA, 1000 bp, Homo Sapiens; identical to SEQ ID NO: 160977

SEQ ID NO: 344705 - DNA, 1000 bp, Homo Sapiens
ttttttttttttttttttttttttttttttttttttttttttttttttttttttttttttttttttagattttattttttttaatttttaaaaaatgttgaaaaataaatccatgtctgcataagttcccaacccccatttctccaagtttctggaaggtgggcttggtgggcaccctcagctccttagcatttcccagctggcccctgaagacagagcttctcttccagcctctgctgctgtaaggcccctctgcccacctccccccctgcagcctccctccccacctcaccccagacttattgctaaaagaagggaaagaggaatgagaacagccagcacacccaactgccctctccccactccacgctaaggtcactaccccggacacacaaagggcaggacccagaggccaagccccagcagactaggacacagccattccagtaccggccaggaagcgaaagtgccctcaggccagctcaaaggcccctgagcccggccatggccccaggagacaggcccagctgccaggaacacatgcagaacccaaagggcggggctgggctgtccgaaactctggtcttacaaagaccccgccagagccctagtcccttctgtcctcagtgacaccagagatgcctggggatggccagcaaaggggtcctggagcccgtggttggtggaggacgtcagggctcagagtgagggtgctgggggctccagaggggctccaatcagggtgggtgggggctgagggccagggcgggcgctgtggcggggggcagccagagcggggcggatgagaggcggtgggggctggttgggggccagccggggctggaggaagcggccctgctgcagtgggggtggctgtcggagcagagtgggagccgtgggcaaaggtggcctcagcagcgggggtggctgggacagcgaggtgggaggtggagggggtggtggcgcagggggcactgatcggggcacggacgtggagacc

SEQ ID NO: 344706 - DNA, 1000 bp, Homo Sapiens
aaggatgagttacgtttattgccccatcccttcactgaatgtttacattaacaaacaccagagagcaaactgggcttcctacactgggccatgcagaggacaggccaagaaactccacatcataacagcctcctgatgcctgggcttggctggagctcacatgaggtgctttgatttcttctgcagactctcggtgatggatgctacaactgacttatcatctttgtcatagacggtgagcgtgcagctgctgcggtccttgcccagctcgttctccaccagcacgctgtaatcgccgctgtccttgagcgtgcaggtggggatgacgagggtgcacacgccgctggtggagttgtaccagaacttggagttggccgtgatgttgacgtcgcccttgtagagggtcactgtgggccgcgggttcccaagggaggcgcaggtcatggtgcagtcctggccgcggagcaccgtgtgtggcttgaggggcgtcacgaagcgcggcgcgtggcgccagtccttcttctcgtagggcttgagcttggcgctcaggtcctggatctggtccttattgatgagccaggtgtccctggagtcaagtggctcactgtcaccgatttcattccgagccaccactctgaagtagtacttcctgcctgggagcagccccgtcactgtgtacttgttgctgaagacacgctcggctgccgtgtaccaggtggctgtgcttgcatcccgcttcatgatgatgtagtgagcctcaccgtcctcctgcacatctgggctgtggttccaggtcagagtcactgtgttggggacttcctcaaacaaccgtaggtttgtggggggccgagggaaatctgccacgcgcacatggatgtcatagcgtgcttctccaaactcattctgaagcaaggttcggtacacccctgagtcagagcgcttggtgctattaatgaggaactgggagtggtttttgctcttggtaattgtctctcggccc

SEQ ID NO: 344707 - DNA, 1000 bp, Homo Sapiens
tttttttttttttttttttgcatttaatgattttatttgtgacagcattagtatcctaaataagggaaatgtgaagatgtgtttccacgctgatggttaataagtgtgaagactgataaccaataataattggtaaccataaaatatttcaatacaatgaattaatccatatgaaatgaaaaagagctatatgacataaagcaagtgttgagcaagcagagctcttcaaacaagtacaaatttacttagcaataaaattcagtagtaaatgaaatgcaattatggcactggagaaaaacctcacagagtttgggatgaatcaggtttggaaggacaatgtactcacactctttcatacaccctctcattgcacgcacatacacataaccacgtgaatttgtgagcaaaaacattccctgacctttctacccacaacacatatgtgcagtacccaggttagagctgctccatccacacccagtgcctgactctatagcctggacctcctgccttcttcccatgccattcgtacttgtgccctttccctccttcagccttcctaccccctgcctaggtctccctaaataccttcagaatacagggaatccgaggaggtcttcaggtctgcagactgcactaccttcatgccaggatatggagaaggggcagaaatgggaaagcaatgagggattcaaaccaggttgtgagcttctgattactcagaggataggaactgggaattcccacagccagctctctgcccaattcagaatacctgcaaggcagaggtcttgacagactgtaggcctccagttagagtctggatcatattttcaacacagggcacatgagacagttgaccatgatcatcaaagaccagctctgatgagagaaagggtttctgccttggggcttgaaggatgttggccacaaaagaggttatctgctcttccaagacagaaatgaggctctgacaaatcatgtagtcaaccaggcgggc

SEQ ID NO: 344708 - DNA, 1000 bp, Homo Sapiens
aaagttattgatacattcagataaatttatttcattcttcattggcaaagcagcagcattaacagcaaaacagcactcaacttcaacagtatgcaagtacatcctcaaaattaaatattaatgagacagtaactaaatgttaaatactgacaacacatttaatagcagttttaattatataaaaaataacagttcaagatctatctcctctatttagcaaatgatgctatatttccctgctccttactattggaataacaatgtatggggggcatttttcaaatatgttaaacttaaaatacttaattctatccaatgcaaactctttaagaatgaaagattctgtgatatactcttactacatactgctcaggattttaaaagtgatatagtactggaataagagagagctaggatttaatccaactgttaacatgaatttactatattattacactgaataaatttgtacgagtcacacagcttctctggttatctgttacacctgcaaaatgaggggaatttataatgacttctctataaaccattcaggttttaaataatccattatctatctctaagcatatcactctttattgctatctagatgacaattttaactgatcacatttaccagattaaggagtacatattaaagggtaccttaatttggatagctatagcagactttgcaaattaagaaaaaaagagctactgagtgaaattgaaggaattttgcaaaataaccttccagttgatgagaatatactgtatctgcaccaagttgtaattaaatacataacagcattccagctgaacaacttacagtcatttgattttctaaaatagagtaaagcaataaatttaattttgctattgaaactgtatatattttgtacaaattgctaaatttccacattccaagtctgaaaaatacagtattgttaaacagcataaatctgccacatgcctaagtaatagcaataaaagttaattctat

SEQ ID NO: 344709 - DNA, 1000 bp, Homo Sapiens
gcagtttcggttttctgtttttaaaatccccgccccccaataaaatatgtccactagaagagggtctggtggtcagcgcttggcgtgaggagcgcttgggggatgtgggcgtgcaccttcatggatgaggatggtgtcgctcagtcagatctctccttcctgacccgtccttctcaggagctcttcccgttctcgactgagcaagtggtccctcctggcctctctctcaaagtcctcccttctgaaggcccaggaggcagagacaggagccccggaacctgcctctgtgaggggacagctccaggtggagtgggccgtcagcttcgaggcctcttggggtccagccgtcaccccactccccatccctgaacagtagcagggccctggggagccactgctagtccagagcggggagtgctgggccccgcggacaccctccggctacagcgtcttcatctggcgacggctccacatgcctcgcttggaatggaaatgatggaagaaattcctgagggagagacgctccacgtccaggcccgcttggagtatcctgtccagcagctcccagtcttccccgccccagcggtctcggaactccttggtgttcatgcccccaatcctgtccaggtcagacttgtagatgccaagcagcccgaacccattcacctcccagtagccctcaggccactggggggtggccccacaatgcagcctcatcaccatgggggcaaaggccatctttccctccacacagtgcttccgaatggcatcgatgactccagctgggaagtggatgtggaggtcacagaggaagatgatgctgtgcgggtccttcacgaggtctatgccagcctgaagtccagctgagcgttcaaagtttccacttagcttcacgtactggtagctccgcagcttggacctcttcagtgccatctcaacatccatgtcctcactgctatagtcagtgatgacgatgttgaagtgtgggtcaccggtgacc

SEQ ID NO: 344710 - DNA, 1000 bp, Homo Sapiens
gacacatgtgagttccatttatttaaagcaaaattcaaatttcacagctttaggaaatttcctttacttagtctcagaccatgcacagtaagtcatcgataggttcttggaagctgagacttgaagcaaaaccatgaggctaatggatgtaaacaagagttaaattcctacagcatgttgctgggcacaaaaacatcacccaatttctaaataaagaccaaagcacttctcatattaaactgtgaaatacatgagctacacgtatatttaattaaatcaaaaataagaccatattacctaagttttggtgaatcggtaagtgatggtggtcacagtggtggccgcatacatcagtaaataaacgcttgcaaaggtgagattatacggagcccctccccagtcacaagcgtggcaggctcgctacacgcttttgcgctgtggcatttattgtccatttgtgtgctcatatgctttatatacatttttattttacaataaaatttgtattcattcgttctccaacctgcacgttcagggttgcagatgtgatctgttagtgctgcgggcctggtaccttgaagaggtagctaactggatccaatccccacttcccctgtagtttcctcagttggagcaaaaatggcgatggtagaggtcagacgtcatcctctatcaggacttcctccggactgacaccactgttaattgtccatttttatttttatagacttgttcttccggtccagtgtcgaaaactattgtgccttcttttcccggactaataaaaaactgtaaacttccttgaacaacattgacaatgttctccttcttaaccagcatgacgagtttagtaactgcttcaaacacgtgtccacactgcaaaacggcatccccctggggtggggaggagacaaggcataatttcagtattcacagcttaaagaaacagacactccaatagagaagtttcacggtggtcaacttaacattttggcagtgt

SEQ ID NO: 344711 - DNA, 1000 bp, Homo Sapiens; identical to SEQ ID NO: 160978

SEQ ID NO: 344712 - DNA, 1000 bp, Homo Sapiens
cccaagccaaactgtatccagctttattaaagataatttccataaagaatcatggtattttgggcaggacatgggcagacaatcgttaacagtatacaacaactttcaaactcccttcttcaatggactaccaaaaatcagaaagccactgtaaaacccaatgaagtcttcatctgatgctctgaaccggcaaagtttagtgagggttgacatttcacatttagcatgctgtttcatagcttttcatgaaccgaccctggctttcaggaagtgaaaggaaaatgacagaatttatctgaagatccacaacctagaaacaggaaccactgctcttttgagggcaaagtccagattgcctgacacactggtaaccaattattgggggtcaggtcccagaagatgtctgggtttaagggatttaagtccattctgaaaggtagaaacagagaagaggacataaaaaacgaatttgtttttccataccacaaggcttttataccaaggtggccatgtgtatcaaagtcagggaatccctcttcctgggacccaagaggaagtctctcaaaaccagaaggaaaaggtgttttccccacatcagtccagcttcaggggctttctattagtgacatatggcccttctccccaaaacaacaatgaagtattctgtgtactaacatagcttaaaaaaaaaaaaaaaagctaaacaaaatctgcatttttataaaacttgattaaaaaatagtatttcaaactgtacagtcaccagaagtacacagttatcaaaaatgcacacacttcacttggcatctccagcacctttagctttctgtgcctagtctgttttggcatctccattttctgcagggttattcccctccttgccagcatcagcttttcccttcttctctgtaggtaccttctctctcttctttgcagaggcctttctgggcttcggctgtggctttggaggagcaggtttagcagacaaccttgtggatct

SEQ ID NO: 344713 - DNA, 1000 bp, Homo Sapiens
gagatggagtcttgctctgttgcccaggctggagtgcggtggcatgatctcagctcactgcaagctctgcctcctgggttcacgccattctcctgcctcagccccccgagtagttgggactacaggcacccgccaccacgcccagctaattttttgtatttttagtggagacagggtttcaacgtgttagccaggatggtcttgatctcctgacctcgtgatccgcctgcctcggcctcccagagtgctgggattacaggcatgagccaccacacccagcctagaatatattatttttaaacaatctgagagagtatttctgaaacttaaaggcttaatttttttctcacttaaatttgtttagcaaattctgtaacaaatgtagtacccatttcactaagaagttcttttaggaaaacattttttatatatataacgacataccttacattcattaacttaatatccatttatacaataacaactctggactttccattgccattgatttggtaattgattatccaataaaagattatattcctaagcacatttcatttcaaaaatgtatgaagtacatataacatgggaccttaatgaggtcagagattgatataaaaactataattccaggtatcactgcaaagagagagaaggattctcaatgaactgcttcttttaagaaacttaagctcacttactttcagtgatgatactagtaccatattattaaaaggaaaacacagttaatataattcctttactatgctttataatcctttcaaaaataaactagggaagagtttaagtatccaaccttctataaaaagtagcagctttatatgccatgagcagaggaaagatagcaataagaagggtgtcatctgctcaccacagacaaggggaagccaatagcttcctgctactgcctttcaggaaagaaagtaaaaaagcaactgcctcaaccaaaatgaccaattaattatacacttccattgat

SEQ ID NO: 344714 - DNA, 1000 bp, Homo Sapiens
gtaattttagtagagatgaggttttaccacattggccaggctgatctcaaactcccgacctcaagtgattctcctgcctcagcctcccaaagtgctgggattataggcatgagccactgcacctggcataaggagcctgttataccactgtctcttcccctgtgattgggggctccatgcctctagctaggatgatgatgtccagacctgagaggagcccagggctacccacctttaaaagtcagaggcaggaagcaagaaacaggactgccctggggggtgctgtggtcaccagcccccaggctggaagctgcctctggcctggtacctcccctccccagaggctgctgcccgcctcccagcccttcttggatggggtggaggtttccgactccttcacctcaccaagcttctcctgtagctcctttacttgctgctccaactgcagtgcgctcttgttctcattgtttggctcctcgaagacgctctgtggcttggccagctgctgaaggctcttgtgctgctcctgaatcctctcttcctgcttccgaagcctctcttcctgctcccgaatcctctcttcttgtccccggttcaggagacttatgcgctgattgtttttgacctgggcctggagcgctcctgccactctctctagttccttcctcaggtgctgcagctccacctcagagggcactgctgggggctccgggggcaagggttcagccatctggtttttgagtttggacaagctcctctccagcttctctacccgacgcatatcttgctgcttctctttctttaatgtgcaaatctcctgcgacatttttctcatcctctgctgccaccgggccctctctccttttagatgttcagcatattcatgtctttctaattggagttgttgaaatgactccttcaactgtgtcagctgcactttcagtagtgcctcctcccgcatggactgctctaacttccactccgtacctgctttactggg

SEQ ID NO: 344715 - DNA, 1000 bp, Homo Sapiens
gaagggaagaggaaagtctcttttattagaaggtctgaccctcatcagaggcaaggtttatcatttaagatccattaataataagactgagaacaaccactcagctgttctttctcagaaatatatgaaatttaagttcatttaaaaattaaatatattcacttattcctccaggggtagtagattcattactgagtcgttgtcttctacgtggggtcagcagaatttttttgttacagataagtgatttccttagttcacttttatatctgtcttcagcttccacaatgactttgtgacgatcacattggtatgggcaagagtgcaagagcttgctaaagtttcggctattcagggatttttctactgctatgcaacctgagcacctatacgtcaacatttcggaacaactgggagttgctagaaaactgactacttctttatttattatatctgaacataatgtaaatggatcttgattgagaaacaaaattcttttcaaaagtagtttcttcatgtaagttttgattgcagcttgacttggctttatataaagtcttattttgctcactctccctgtaacaagcatggactggatttgcgctctttaacggtgtcttcatttggtcatcatttgtacatgctttagacatgactccatgggacttataactctgtaactgtctagaatggcttttatcctcatcttctgctttgctacctcgaccaatccgatctgcatggagatgtttccatgtattctgaatacttatgttcatagatgaaatgttatcctgatagttttctctttgtatttcttcctcatttccttctctttcaagctgttctattctgtgtagaatttcctttgctttcctccagtgctcttcaagattattctccttcacacttatgtcctttaattgctgtgtttcattttcatcaaaaggatattctcctagacttagagataatttctcagcacaatcctctgtgcaat

SEQ ID NO: 344716 - DNA, 1000 bp, Homo Sapiens; identical to SEQ ID NO: 160981

SEQ ID NO: 344717 - DNA, 1000 bp, Homo Sapiens
tttttttttttttttttttttttttttttttttttgaagtgaaagaaagaaggatacagtttatgtatttttttttttaaccagagaactaagaaaacagaatttcttagaaacagacacatttcaccaaaatgaaatggaatggtttcagactcttaggaaaagaagcagggcctcaccctgtcttatccctcctgacatttcctttttcacctcaacattgattcaagatcaggtggtttcactttctcaccaaactcttatttaagcaggttagatttgactcatagctattctcctgtgagaaacagcattatcataattattttgctctggaatctttgtccaaaaggtatgcaactctctattaaagtatgatataatatcagagccaccttaggaattctggatcgtcagaagacttcacttgggtactaatggtctgtagtccctgaaccccttggggataacttatgaggaaggcttttggaatgcgtagggtcaagttcccttcagcagtgtgtggatagatacatgtagtaccagaagctaaattacaaaaccttataaacgtcaaccagggagatcaggagtcccactctaagctattgagggccagtgagtgtgaagtcagctgtgaagataacagaggagctggaagctatgtcacactaacagctgccttgtttcttagaggctgtgtttgagtcttctgtcaaagagagtagtaaggtccattcatagtgcttgcagggaatactttttgttctcgtttgaggggatggaaaggtatccatttagatggatgtatgaagtgaattacagaaggttgtggctcagataggggcatgagggtaactctgctaagcccacactctcccttcattaaccaggaattggtgtttgattgtaatgtccctgctgaagatacaagtgtgaaattggcaagaatgtgcccatattaatagggagaggactgtgtagtatcattcagtctttg

SEQ ID NO: 344718 - DNA, 1000 bp, Homo Sapiens; identical to SEQ ID NO: 160982

SEQ ID NO: 344719 - DNA, 1000 bp, Homo Sapiens
aagaattcaagttagttttattcaaaggtcttactgagaatcctagacccaggtcccagcccgggagcagccttagagagctcctgtttgactgcccggctcagtgtctcggcccactgcttggttacgggggccggggctcaggacctgcacagtcacatccatccagctggctccgaagttacattacagcagaatcacatcaaggtttgggcataagagcacttctggttacagattacagaagcataatcgctaaccttggccaacattttctcatgtgcacgaaaagccaaggaccagggtccttcaccttttaaggaatacagtgactcaggcaacagacgcggggccgtgtgttctttcctgttttgttttcaaagcgtctctctggagagctgcagtgtcacagagtaagggcccacagaaatgagcacacacttaggtttgctgctgacacgccctgcctctcctcatgtggttcatgtggccatcagccggggctgaagacccctggcacacacctgcaccccaaacggactacaggtgccgctttcatttcaactctcacccatttagggttcggagccccacacccacttaaccccaagcccagtggcaaagcttcctgagaggcccggaaccgccagccatgagttctacaccacccccactgtcctcctgaaaccctgctcccccaaagacaggccttactgaggacttggtggggtgctggtcaggaactgcccggtctttggggagggggtgctggctgtccgcctggggagagcctgggaaaggcatgcaggcagatgtggttggagctccgactctctgactcttgggcttaggtgagtcctcagcaggtgccctgcactcctggtcccctttcccagccagatcactgctcagcatctgcagagtcaaggaggactctcccaaaaccatgcacggccagatggcccaagttaaaagaagatgccagtgactaaaagcagga

SEQ ID NO: 344720 - DNA, 1000 bp, Homo Sapiens; identical to SEQ ID NO: 160983

SEQ ID NO: 344721 - DNA, 1000 bp, Homo Sapiens
ttttttttttttttttttagtttctaaaaatattgttttattaaataactgttaaataggatttttacaaaataaatggcatagaaaagggtaaaaatgtttatgttcccagaactttctatgccttttcaacagaaaggaaaaggcacagaaagttgtcagctgctattacttctggagagctgccacaactggacggtgttggagtatcaccagttctctctctcatgggaaagaaggggatcaacactttgtagagaggtagcacgtcttcaggtaacagctgctacacacagctggcttcaactttagctcccctgttgatgactgtcagcttcaaggtgtagcatcccatggcactcaggaagaattaaggagctgcacgaggttttcaagacatttcaaataataggcatttagagggtttgcttctgagtttgggaaagttttctttgctaaggagtatgcttcatccactcttctttttactgatgggcttttcaaagctgtttttgccttctgataattgtaaatcagagcccaaagggcagctgctccaatcctctgagcattttgattctcactttccagacaggcagcaagcacagtaatgactttttcattagccaggatcttgggtttatttgcaggactgaagcaaacattatgaaagataagaagaggcaataaagggctgctcttgtgcttgtatttgctcatctctgttagtaagtctagacagccatcaagcctcagaatcatttgttgcccatcttctccagatgatatattcaggagtaacttcaaccaaagaatagtcagattacttagatgtttatttcctccttttggcaatgctagagagaggaagttctgtaagaagttactcttctgaattactcctttacagtcatgcgacaaggccaggtttgaaagaagcataaaaaccatctgctgaaccgtggtgttctccagtggcatctgggaagccaactttagg

SEQ ID NO: 344722 - DNA, 1000 bp, Homo Sapiens
ttttttttttttttttgcaaagatttctgttttgtatcaaagatgacaagctatttcctggttgtaaacactgggaaaaattaacaaaatgaaaaggctcacaggatagaacatagaaacaaggggtatttacagagaagctctgcattgttataaaaatgggataggacagttctcaaaatgtagtccctacatcagcaacaacaaaatcacctagaaacctgttagaaatgttgccttctatggattagaatgaggacaaatcacaacttttgtggaatgttaggaatgtaaaacggtgcaagttttatggaaaagtttctcagttcatcaaagaattaaagttagaagtaccatgtgatccagcagttccactttttggggtacccaataagaattgaaagcagggtctcaaagagatatttgtgcccttatgcttgtagtagcaatattcacaatagccagaggtagaagtaacccaagtgtccatgaatagatgtcagaaataaaggaaatgtggtaaatgcaaacaatgaaatattgctcagccttaaaatttctgacacatgctaaaaaatggatgaactttgaggatattatcctaagtgaaaaaaaataatgaaaaacactctaagattcttcttctgagaagtaccaagaatagtcagagtcataatgacttaaaaatatggtggtcgccagggactgaagaatgtgggaatgagttgtttttttaatggtggttatagagtttcattttacaagataaagagttcaggatattctttgctcaacaatgttaatgtacttcaagtattaaacaagacattacaatagttaagatggcaaattttatgtggcatgtacttcaccattgttttttaaaaaccatataatactagttctcagtgctaaatcacagatttctgggtgttgttcatcattttggctacattcaaggcacatacgtggcctttttccagtgtgaactacatgatgt

SEQ ID NO: 344723 - DNA, 1000 bp, Homo Sapiens
gcattcaaatgtgcttaacaagcagttttattcctaacagacaaaaataagaagcaataacatatccataagcagatgaattcgtatacagtgatttccatagcatgtcatattctaagataaaaagaatgaactactcatatatcatgattgatgaatgtcaaaatatgcatccctgctatgtgaaataaaaataataataaagaaaaaagaagaacatctaaataaatagggctcaggagagtactcaggtatgaaaagaggaaacatgttatatcagtcatataaaattccagaaaattgacattaatctactgttaagcaaatattgtaattcagtgattgtctggaggatggagaggccagagagaaagatagtatttattttttaagagacagggtcttactatgggacccaggctagtctcaaacttcttacctcaagcaatactcccaccctggactcccaaagtgttgggataacaggcatgagtcaccatgcccagtcttattacagctttaaaaatttaatttgaaagaactatctggatttaacattatttttgacaaataggttatgtgattttacattgactctcctaactctcatcacgccctaaggggggcaattagcctgtgtgataccaaatacttatgagccaggaagatcatttccacctgattaaattggaatgctggctggttgcaaaggccacatcactggactaagagatttcctttctccctatcctcttcctcctactaattcagggatggctttttggtatgcagcccagataggctacagaaatccacaaaacctttagatttagtctgacaatgacctaagctacactagattcataattatggaggtcctgaaaatttctgtacctgcttgtccatcacagacatagtgactgaatcattgtggatgcctttttaaaaaaagtatatcccaactattctgttgcagtctgcttcactacctagaaatgct

SEQ ID NO: 344724 - DNA, 1000 bp, Homo Sapiens
cttgagatcttattgtattttaggcatcattctgggtgctggtgataaaagtagaaaacaaggcagacaaagtccctgttctcttggaacttacattctaagggagtcaggataaggtcctacaagataaagctccaaagctccaatgaatcttggcattcagggcccatcgtcatgttttttctcacctgcatctctgaacagtacttttcacccattctccacccagatatgggtcatgtgatgttcaaaggatggggaatgaaagatcttgtccaaagatagacagccaccaagcactgaagttgggattctatccagatatgaaggcttgaaagcctggcgctcttgtaggtgtatctcaggcactgacacacagtaggcgctcaaaagtaacttgctgatggacttgattcatattgtcacatgtatttttccttcttttgacaccttcccagggtggcacagatttcttctcatttagccaaacaacaaattacaaagtgtgtcttcagaggttctaagactaggtctaagagtaaccacctattcaatggagaatgagtgtcaagggatgtgtaggaattgagagggttttgtgagctgaggagagtccagggggctccaggtttattacagcctccagggtttctgtgagcgctataaattttgcagatctttgtaattccagggataatggcgactccaggtatgaggcatgttccacaggcttagctggctcgtttatcttgcttttccaatatccggctctcagaaaatgtggcgactacgggttttcctggttcctcaggcttcagagacatctcaagttcttggcttgctctgactttagagctcttttttgctctgatcgctgcagctttcttcgcctgcttctttctgatatgtttcactatgagagggaggaggcagaggaagagcagcgcaattacaattcccgcatagatagcaccctggatcagccctttcacgaaggcct

SEQ ID NO: 344725 - DNA, 1000 bp, Homo Sapiens
tttttttttttttttttttttttttttgataggcaaaaggttttaattgtatagattaaaattaactttggacaaaaattaaaactcaggcagagaatgttttcttctttttgcaacagcagacactagtaaaaacaaaggcacagtaaaaattgagacccaaaatttgcagtgtagagatatgaatataataatagacacaggcagggaggattaataaatgataaaatgtttagaggatgatcattagaatacaggatatttatactcttgaaaaccgctttcccaagtacttcattataagtaaggtgtctctaaaagggacagatctcctagacccctccttaaccaagtaaccagtcctgatatcataatggtgatggacaaactagaccttctctgcccgcagatgggctgaggttggaaactcacagcattgtctctgcagtgttcccggcaaaatgtttaggctgaatttaatcatgaagacattttcagacaacttcagaatgtagatcattgagccagacagctgacctgtcctctataaacaagtccatgtcaccaccatccatgacaacaacaaaaagatgaggaaatatttggggttcaaaataactaaagaaatgcagctacattatctttttactttttttgaacccaaaatatctcttctcctttttgttgtgtgatttgtggtgatatggactatgtgaaggagacaggtcagttgtcctgctcagtgttctacattctgcagttgtctggtgattacctcctatgaaactcaggctaagcgttttctgcaagaacatggcattgttcatattctgcaccggcagagtcctgggtgacatgctgtctcctgccagcggctcctgactcctgttctctacaggatggaattgagaggagcagggctaaggcctcccaatgctgtttgtccatctagctgtggtcttcctaagtactgacaccaattggaggctgaaggactgtg

SEQ ID NO: 344726 - DNA, 1000 bp, Homo Sapiens
gaatgttagagtgttttattaatttctttgtcagacaagtgtttaggaaactctcactccaggcctaatgctgtgctaggctctgcaaatgctaagagggggaagttactgtccctgcttccaaggagatcatggtctagtgggaaacccgacacgttcaggtaccttcagatgggcactcagaagagtaagcccttagttaatgtttaaagatgtttaaagatgtctgagactcataggtcaaagtcagatttcagttccaccttattagacctgcactgctaaggagctgctttaggtaaggctgtgttcctagtcaccagggtgttcaaacacagtgctgggggcaatgtgggaatagccttcttttatttaggaagtaatgtgaagtcagtttcatgaatagatcttactttaagcattcattgaggtttttggcaagaatagagtacggtatatgaaggtgtttcctaatctccctgacaccaggaataatctagggctcattagagatgtcaaagatctgttctagtttcttaacctaaaacaagagtgttttagttccattttataggcggggagtctgagccaaacatgttatgtcactttccaagtctccatagcacagaagtcttctgtctccccatcctgactttcccagctcatagggactgtcaaaggcagcagctctggccggctgtgatgcctcatgcctgtaatcccagtaatttgggaggctgaggcaggaggatcatttgaacccaggggttcaaaaccagcctgagcaacatagtgggaccctgtctctacaaaaaataaattaaaaaaaaaaaatagccaggcatggggtatgtgcccacggtctcaggaactcaggaagctgaagtgggaggatcacttgagcctgggagttagaggctacagtgagctgtgattgcaccactgcactggataatagtgagactctgtcccctaccaaaaaaaagcaaaactatataca

SEQ ID NO: 344727 - DNA, 1000 bp, Homo Sapiens
cctgagagaaagtattttatttttattctgctttattcactttcatagctaagcatagatgccagtggtcacctgcccttggcaccatccttttgtagttatatatgtgtttgtacgattccttggtgcatgcctattttcttccccaccaacctctaagctccacaagagcaaggcccgtgtttggctcctccctggaaacctagcacctagtccagagcctggcacacacttcagaatgccacaaggagttattccatccactgccctgcctttgggcaggattgtccccaaccatcactggaagcctacgcactcccttcccctggcagtgccactagcccttcagtatatagattctgcctctcccagatggaaagtcctcctttatagctgaccagaatccctcctgctgcaagatggccggggccctttctcccgtcctttaaggggaattacagcagcacttctcaaatttgggtaacatgccaatcatcaggaatcttaaaatttagactctggctcaccaggtctggaatgagacctgagattctcattcctaacaagctgccctgtgacaacactgctgccgggccatgctctgagtaacaaggatatagacagcctgtttaccaccgtcagagcagcccctaagttttcttccttgtctgcatgaccctctactgagcaggctatttggggtctcttgaaattccctgtcccttcttgctcctacgcatacctcgccaaaccctcacaccctgcaaaggaatgtggtgcctgtgtctactgctgtcgttgatttttttgttttaatttgaaataaacctttaagcagttttcaaagtcaggttaaccctgatatgtatcctggaagggtaacaatactctccaacgataaagtcacacagctgggagtgctgaacaggatgggaagaaggtttcttcccaggtcaccagcagtcctcaagcttggctcccatctgccacagtggctggt

SEQ ID NO: 344728 - DNA, 1000 bp, Homo Sapiens
accttgatctttctatattaagtacacacattaataaccccatcatcaccctctgtatccaaagccacaggcaagagagagaatgagaggtctgttcctaatgcccccactagcctgagaacccagcaaaaccctcaacatgaaggatctcccccagggagcacagtgattgtagttcagagagtgggatgtgatcttcgtaatcatctagtgcaacttcccaatccctctctccagcataaaaatcccccctgccagcctctaacttgcaagtatttggtccgtgactgggagattcctctctgtaatgcaaccaatcccactagcctgaagattgggctgctgtagagttcttccttatgcactgaggagacctcatgatgtcatagaatgtgagttgggcaagcctgaattcaaatcctagctccccatttcctaactttgcaagtggggtactaatctctctgaggctctgtttcttcatctgtgaaatagagataagaatgacttcctttaggccaggcacggtggctcacgcctataatcccagcactctggaaggcctaggtaggtggatcacttgaggtcaggagtttgagaccagcctggccaacatggtgaaaccccgtctctactaaaaatacaaaaattagctgggcatggtggtgcacgcctataatcccagctactcaggaggctgaggcaggagaattgcttgaacccaggaggtggaagttgcagttagccaagatcaagccagtgcactccagcctgggcaacagagcaagagagactccttatttaaaaaaaaaaaaaaaacaatgacttcctttattgccatgaaaataaataaacgagaaggcctgtgcaaggtgcctaagatatagatccctaatgcctccttagccagtcaatttcatctagtaagttcactcattggccctgactggactcactggaaactccacaagacttcagggctctccttgggctccagagt

SEQ ID NO: 344729 - DNA, 1000 bp, Homo Sapiens
tttttttttttttttttataaacaacaaatatttatttcttacagttctaggggctgggaagtccaagatcaaagtgtcatcagatttgatgtctaatgagggctgccttattagttcacagatggccatcttctcactgtgtcttcacgtggcagaaggggaaaggagctctctgaagtctctttttttaagggcaccaatcccattcatgaaggttccacactcatgacctaatcacatcctaaaagccccactctaaatacaatcacattggggattagttttcaacatatgaatgggcagtggggtggagggtagggggcacatgaagcagttatccagtctatagcaggagtctttacagtcatccaggctatggatggtggtggtctgttctcttgtcactgctgaggatgtcatcctggggtttattctctgaccctccctgggccaggcgcctatggctgacaaacccttttctgaaggacattatctttctttgaagattttatgtctttatttaggtgtaccgttgcatcttgtctcgggatgttctgccccttcaagggaatgtgtcattcggggttgagtcaggagagagaaaccacaccagttatttgaacagacataagtcaatataaagaattgttaaccaggtataaagttgttaagtaggtctctggaaaggatcaaaagaactctaaggtctcatgggggtagcgactgcagaaagcatctaccacctctagggcttagtgtttctgccctatgattttgctgatgtttgacaaatttgccttgaagatgcaggtttctgcacatggagggtgttgataatagttttcttcttgtgtgttttcctttgatgtttggtgagggctgacctctggctgaaggtttttctacattcattacattcatagggtttttcccctgtgtgaattcgctcatgttttgtgagggctgacttttcatagaaggttttcccacactcaggac

SEQ ID NO: 344730 - DNA, 1000 bp, Homo Sapiens
agcttttattttaagttcagggatacatgtgcaggtttgttatacaggtaaacttgtgtcatgggggtttgttgtatgaattatttcatcacccaggtattaagcaaactttaaaattgtgacaatagctgtaaaatgtgctagcaagtcattaaaacactcttcaaaataataaatacaagttaggactagaatttaattggctaaattcaattttaatattacatatatgctttgtgatagtctgaaatgtattcactacttaaacagagattttgaaacattaatttttaagtgtagcagctcaaagacattgttgattggttagaatgatactataaaaaactaaagctacatcagttaaatgtgttctctaaatggtttgaagagtagtcttaattattctcaccacaaaaaatgatgtatgtgacgtgatggacacattaattagcttgattaacaatttcacaatgtatacgtatatcaaaacatcacattatatattgtaaatatatacaatttttatctgttgattatactttaataaacaaatgtaatagtaaaactttgcatagattatttttacaaaataatgatttagcttacctgtgcttgcagttttacttcattcacttcgttgtttaattcttcaagatcactacccaaatgcacacaaaattgcttaatgcttgattctctatcacccactgatttatcaatggcattccgaacagcaacaatggatggcttcatagttgcaaaaacagcaaagtcttcaggaggtgtgggcacctgatattgttccataagcttgtacatttgagtcactatattcccctcatcttcaaggctttcaatccgttcctgaatttcatcaagaaataataagctatgaacatattctgtggtagtagttggaacaaactcaagtttatactctgcatcttgtgcctcaaagataatggcatccacttttttcttgctttgacgaggaagcata

SEQ ID NO: 344731 - DNA, 1000 bp, Homo Sapiens; identical to SEQ ID NO: 160984

SEQ ID NO: 344732 - DNA, 1000 bp, Homo Sapiens
ggagtgaactgagatttaataatgaattaaatatctttaaaattcataaatatgacactcttgatttgtaaaaaacatgcaacagtaaagacaataaaacaaaaagcaaaagtgactgcactaatatagcacaagtgcagttttttaaataatttgagaaaccaaagttttctcataagttccttagataactggttcatatttcaagtaccatcaatgggcacacacaataactgaaactgatcatttaatatctactgaaacattgtgatcaataaatgctattttacttaatcttagtttataagtataaactggcttttgcagatttgtaactttgtcctgaaataaatttacttaaggatgagaattttctaaatgtttaaaagtaacccacatattgagaaagaactgcttttgttaccaatagtaggtgatccaaaaccagtattctacagtttgcttttactgaaaaaaagaggctaaaaaataatgatgtctccagagtgaaatcatattgtttacagctcagttattatactacctttcaaaaatgagtttattgcctgtcacctggaggaactgtgacagaaatatttatattccacctctcacattgaaaaaatttgtaaaaagaaatcctagtaaaacaaaatgttacaaagatgacacgtgtgactctgttggaaagaggaaaaagatgaaagaggtaaatgagagtaaagggaaataaaaacaaattcttatattttcaattgcataaaggtagttaaagcaagcagatgccatgcttatatggaaatagacaataaaaaataatttcaacccacaatctttagaaatgtggaatgttaaacacagaagaaaacaagcacaaccaacctacagtgctttggaaatttgttaaattattagtactttatatggttaccttttatttttcttaaaggtattaactatgctgctactaaaatgagaggggtctgatgtgagattgaat

SEQ ID NO: 344733 - DNA, 1000 bp, Homo Sapiens
ggctgcataaatgtcttcttttgagaagtgtctgttcatgtccttcacccactttttgatggggttgtttgtttttttcttgtaaatttgtttgagttcattgtagattctggttattagccctttgtcagatgagtaggttgcgaaaattttctcccattttgtaggttgcctgttcactctgatggtagtttcttttgctgtgcagaagctctttagtttaattagatcccatttgtcaattttggcttttgttgccattgcttttggtgttttagacatgaagtccttgcccatgcctatgtcccgaatggtaatgcctaggttttcttctagggtttttatggttttaggtctaacgtttaagtctttaatccatcttgaattgatttttgtataaggtgtaaggaagggatccaggttattcaattaggaaaagaggaagtcaaattgtccctgtttgcagacgacatgactgtatatctagaaaaccccattgtctcagcccaaaatctccttaagctgataagcaacttcagcaaagtctcaggatacaaaatcaatgtacaaaaatcacaagcattcttatacaccaacaacagacaaacagagagccaaatcatgagtgaactcccattcacaattgcttcaaagagaataaaatacctaggaatccaacttacaagggatgtgaaggacctcttcaaggagaactacaaaccgctgctcaaggaaataaaagaggatacaaacaaatagaagaacattccatgctcatgggtaggaagaatcaatatcgtgaaaatggccatactgcccaaggtaatttatagattcaatgccatccccatcaagctaccgatgactttcttcacagaattggaaaaaactactttaaagttcatatggaaccaaaaaagagcccgcatcaccaattcaatcctaagccaaaagaacaaagctggaggcatcacactacctgacttcaaactatactaca

SEQ ID NO: 344734 - DNA, 1000 bp, Homo Sapiens
tttttttttttttttttttttttttactttgtaacaaaaatttattaggattaagtcaaattagaaaacttcatgctccaccacttgtcatatttacctgaaatgacaaagttatacttagcttgagtgtaaaacttgtgccccagagattctgtttggaaagcaaaaaaataattgatgcacatagcagtgtgcctgataccaccacagtgaatgttgtttaaggcctaacaaacagtggtcagcaaagcatacattacttttaagctttgggtccaaggaagatgtcattccctacctccttcaaaagcagactcatcatagcctgggcacctaggcctggagcctattttttcgagtctaatatgaacatctggatttcaagaggtgctaggcttgaggtatctttatggcttaaaaggcacaggtcatgcagctgaattaaaagctatcatgttggtctctggaatgcaggccatgagccacgccttgtaagggggagacctgaggccctgtccttggctcctcagtgtaacccacacatcattggctctgttcctctcgccctgctcctgcactgctcatcagctgtgaatgctggaattggaggacaggttggggctcctgcacagtctgctgccaggtagagagcaacacaggctgcagaatcctaccctccagcatatcgcggggaggggggggacctgctgcacagccaagaagtgactcacatgcaggcaaggacgggaaggcttgttcttcaggcacaacgtggtatggggagaagaaacctggttttcttggaatggtcctactaagcttgaaagtggtgctgcatttagggcagggcacacccagccataggcaacccctttgagcgatgggagaagtagcataagaaggatgccaagaagaacaataggttcttcaactcagtgtgggctctgggaaaccatcagcagtgggtacggaacacttctctgggctctgccctggggtc

SEQ ID NO: 344735 - DNA, 1000 bp, Homo Sapiens
ttttttttttttttttctgatattcaaataaaatataaaatgatttattccaaagccatacccaaaacatacaatgaaatacatccctgttaaagacttaataaaaagagcaatctttacattttacaatttgaagaccttctgttcccacaaaaagtctcataaaattccataaagtgtcaaatgtattttcctgtttatataaaatgtattctctcttcaaatatagccgttttattatgaaattgttctcaatttctgaaattctcagtagtctatagtatcccattttcacatgcttcttaaaatgaggtaagaagacaaacggtgaaacttttttcagatcattttttcagaagtcaatgccttgctgatgcaaagcgcaacatgcttttgtcatccctttcatctgaaatattttcccagtggttactcagtattttgcacacaaaaaacagttacaatacctgccacttaaaaatccataacatgttgtaattcttcttatgtgattttaaggtctgaatcaaagccattgctacagtgattcactattttctttacaggtattttaataaatattcctcaattctagaagactgttccaatcctttaaagtgggggtcagcaaacgtcttctgtaaaggtccagatattttgttttgtgtgtcatttttctgatggatattttttacaactgtaaaatatttttaaaaaattatttagctattctgtaatttgttactccattattttaaaaaatagaagtaactagtctctaaatcagactactcaagtgttaataaaatgtaaacttcacattgtgcagtaaaataaatccatggtttctgactactaaattgaaagttcataagcagtaagaaatgaatcccactcaaagagtggggctacattccagatattctttttaatcaatgacactgttttagagcttctttttcactttcattgaataagtcacatgtctttagtttgtttt

SEQ ID NO: 344736 - DNA, 1000 bp, Homo Sapiens
ccttaagcgtgagaatttaaaatgaagttaggaaaacagtaacaacttatacaagacaagaccagaggaatatcaatagacacaatcaggagaccagtggaatccctaacttgaggtgcaaaggattttgagaacgtgacggggcttacagggagtgagacaaaggattcgggctctgaagggatgacttcccaggaaaagcgagatcctgaaaaaaatgtgctatttggacaggtgaagggttggccttttcagatgagggaagcagcaggaagaaaggcacagagggaggaagtaccactgcatgtgaagaagataagggaggccctggtggggctagggcagagcaggtatgttggggaggcagaggagagaggatggcgcagggacagtagggcttaactgcggatagccctgttccattgatgagtttcttcctagtatgccacttctgatgctggatgaaacttgcattccatctgaaggctttcccgcactccttacactcataaggtttctccccagtgtgaactcgctgatgctgaaccagagtgatcttttgactgaatgtcttcccacattcctggcattcatagggtttctccccattgtggattctctgatgcactatgaagcgggagctacagctgaaagttttccaacattcattacatttgtagagttgttccccagtgtggaacctctggtgctgaagaaataccgaactgcggtggaaggccttgccacactctttacattcataaggtttctccccagtgtggattctctgatgctgaatcagaactgaattagaactcaaactcttcccacactccttacattcatagggcttctccccattgtgaattcgttcatggatgatgcagtcatagctacaactgaaggctttcccacattccttacatttaaagggcttctccccagtatggattctctgatgccgaatcagttttgaattataactgaaggttttaccaca

SEQ ID NO: 344737 - DNA, 1000 bp, Homo Sapiens
ggacataaagcataaagaattcctttattataaatagtgaaaggtaataaaactggaaacataaacacatatcttttctaaacaaaaattcaatatggcaatacaaaacttagccaggcttggtgggagctcctgtaatcccaggtacttgggaggctcaggcaggagaatcacttgaatccaggaggcggaggttgcagtgaaccaagataacgccactgcactcctgcctgggtgacaagagcgaaactccatgtcaaaacaaaaaaagccgggcttggtagctcacgcctgtaatcccagcactttaggatgccaaggtgggtagatcatctgaagtcaagagtttgagaccagcctgaccaacatggagaaaccccgtctctactaaaaatgcaaaattagccgggcatggtggtgcatgcctgtaatcccagctactcaggaggctgaggcaggagaatcgcttgaacccaggaagcaggaggttgcagtgagccaagatcacgccattgcactccagcctgggcaacaagagcgaaacgccttctcaaaacaaacaaacaaaaaattcaatatggcagcccaaaataactaaaaacaacatagtgggtgaagagttaaactttctcttcacacattagcactatatatgtaaatcattcagcctggtaacttctcataaagtgtttcatccttcctaaaatcatattacattaattataatttgttcaaattaattctgacattatgcttataataatcatctctttttaatatttaaataccattggactaacactttgatcatttggcaaaacttccattttgattcaatgaaaaacgtccatatatttacatatttcactctttggagaaggttacctctagatttcttgaccgtttcacccttttctacgaaagtttatgcgacttataagttctctgaacttcagtattaaggagcagttgttcatgttgtctttccatatttcataag

SEQ ID NO: 344738 - DNA, 1000 bp, Homo Sapiens
gtatggagatggagtctcaccatattgcccaggctggtctcaaactcctgggctcaagcaattctcacatctcagcctcccaaagtgctgggattacaggtgtgagctaatgggcccagccctaatttgtttttaaatccaaaaataaatcaacaatagaagccagcactcttttaatattttaaaatattttctgcatagtttccccaaatattagcattctaattgtgaccagcattataccttttaatgagtctaatccaagtaaataataaacaaatgatcatgaaaactgtgagaaataatcattggtgtatgctctataaatagttaccaagtttacctttaaatggcatgtttagtttttccttacaacttaacactagatacaggaaactctagaagtcataaacaaagactaaacaaaatcccctcttcttgccaaaatgtgtacataattgcagtagacttgtgctgaatatacatatatgttacatacatgtctcttattctatacaaaatctcagcaaatattttcccacagagcaggaagaattttttctctcaaatggaaagtttttgctcgttaaaaaggttatattaaatagccctaaagaaatatgttctgaaaataacaattgtatcatattccacttattattttccatatgaaaacatcaataaaataagtttaccagagtcaataagcctgttcaatgaacactgaaaaatacaaatttatccagagtgattacaaatgaaaatgtgtgctatttcaaaattacatgcacctctttaaaaatcagggcaattaatagagcgcttaaatcatattagctgagttcaaatttggcccctaaacaatacttaaaatttccttattcctttatactattttacaaaataataaattacttgattatcataattttcttttgctacttatttcaaactgtaaagtcaggactgcaaactgatgtaggaatcttatattattggt

SEQ ID NO: 344739 - DNA, 1000 bp, Homo Sapiens; identical to SEQ ID NO: 160985

SEQ ID NO: 344740 - DNA, 1000 bp, Homo Sapiens
gttgtatgattccatttatatacaatgtccagaataagcaaatctatagaaacagaaagtagattagtggttgctagggactgaggggagggagaaaaagtaagtaactgctaatgggtacaacgtttcttttgagagtgagtgataaaaatgttttggaattaggtagtgatgatggttgcacaatcttgtgaatatactaaaaaccactgaattatatactataatatggtgtttgtttgtttgttttgagaaggagtctcactctgttgccaggttggagtgcagtgattacaggtgtgagccaccatgcccagcctgtggtatgttttatatcacatgaattatgtctcaataaccaaaaaataagaaatacagaaaaaagtataactgaaaattaagaaatccaataaggatttggtcatacattgattcacaaacaggaaacaaggaaaggaagaaaaaaggaaagtaaggaagataaagagataggaaagagaaagtagggggcaggggagaaagaaagggagaaagggagaagggaaaaaaggaaggaagaaaggggcagcctgacattagctggtggaggtgatgagatgcctctggcttctctgtcatgcaggctgaccttgacattagcaggacagctcccttgaggggtgcaatagaagtacacctgctggacagccgccatcaaagcatttttctgagcagcttggcatgcaagagtcacctgcatattttccactcctgaatgcagcaaaagcttaagaatggcttcctttgtgtaaaaactaaatttgccaatttggttatcatccacctcagagatggctaagacaagagcagtaggagaatatctgtctacccgaccactgtcctccagcagagaggttataaacacaggaggtggctggtctgccctgtccccgtgtgatgcaaattcaaagtgaacaggcctcagatacagatggaactcttcaaaacccatctcccatgc

SEQ ID NO: 344741 - DNA, 1000 bp, Homo Sapiens; identical to SEQ ID NO: 160986

SEQ ID NO: 344742 - DNA, 1000 bp, Homo Sapiens
ggtgttctcattttattaaacattaattcaatcaatatctatgagttacctataatatctttgagttacctacaaagtatatgacactgtcctacccgtgacagaaatgaagtagacacatgtggtttcaaatctcctcctgcctagcagggggagcagacagggatgttcctgggtaatcctaaggactctccaccttcaatccacaaggttgcatatgagataatgaaagaagctcagtgtaaatggtcagaagaaacatttgcctttcaaggttttctaattttataatggataacattaaaatagcttttcttaagagcactaattttctttttgttttttctttctgagtaagagaaagataaaactctcgttttcctaataacaggatatgtttaacaaccctgaatatctttccaagtgagagcctcctaggcaagtattttctgagaagtctttggtgtagtctctgacccttcaactttggccagccatctgtcaattgcagctctggtctctttcctgctttctgccatctcatctctgtcagtgtggccacaacaggaagtcagtgctgataacacgaggacaacctctgcttttacagcccacccgaaccaaggctggctgcatggctgctgccatttgttctatagttttggaaccccaccttggttgtgattttgtgccagagaatctttacctctggagaatgcagtggagacattcttgtgtcatttcacttccagaatgcaaggccacccagctacccattgtgttaagtaatgagctaaacagaggtattcttctctgcaaaattggaaacctcatgggaggaaacaatatttttatctgagcacacactgtctgaattcagatcagtgtgatccataaattgtataaactccatgccaacctactttcttcacgtccatcagtaaatttagaaagcacagattagtgcagctatattgagtctttatttcatttaatgctt

SEQ ID NO: 344743 - DNA, 1000 bp, Homo Sapiens
atcaattagtgggggtttattaaaacaaattatagcacatacacacaatggaaagctatgcaaatcattaaaaaaagatataaaggagagccacattatgtttttgagtgaaagaatcatgtggctgaagtttatattttttatccaatgtgtgtcactatatgtgactttgcctacacattcccatacctatcttaatgcagcagtgattggactttacaagaaagagaatcctaaacgaggcataatcttattttttgcatgcactgataatgcatctgcaaacagaccagcaatttagaaaaatatttgtaagcatagtcaggatgttataagcatgaagttcagctattcattaaaaacatgctgaattaaggtcattgtacattattaaccaggactctgttaatagtgcacaatgacctcaatctaagacgttctaggaaatatcagaagcatgggagttatataagacgatttcttcaaacatatggatttcattaattgcatggctccagattcgactagtcttttctctaattcctttgtcacatgctgaatgttatagaatgaaaaggcataaataaacatcattacagaaaatgttcctttgctactagctttaagtaattgctattcaactctaaataacccacttgaaaaaaagaaaacatcattagtctgaaatgtctgctaacgttttctttctactttgttaaggtccatttaaggagagacttatcacagccatactcaaataatctgatcctctaaaaatactttatagttaagttacactgatgaaagtaatgtatttacccaagaggtaaacacattgcctggaaaattcctaattgacaaaggagtaggaatttaccctgttgtgtgtggggcaaaccaatggtgaggctctgtggccctcagtggagaataaaacctataacagcaagggtaatgttcactctatatgtctacaaaggctgaacttggacgccattgt

SEQ ID NO: 344744 - DNA, 1000 bp, Homo Sapiens
agagttttaattcattttttattttgccagagtccaggagagtgtttggcacttagtaggtgctcaataagtgttgactgactaagtcaaagacagcataatatagtcaaaaagctataagaagcaggcctacattgactagggcccttaactgtatgctggcaacatttgagtgtcacgtaggcactcacttgtctagttttgttttgttttttttcgagatggggtttcgctcttgttgcccgggctggagtgcaatggcgcagtcttggtgcactgcaacctctgcctcctgggttcaagcgattctcttgcctcagcctcccgagtagctgagattacaggtgcacaccatcaagcctggttaatttttgtatttttagtagagatggagtttcaccatgttggtcaggctgttcttgaactcctgacctcaggttttccacctacctcagcctcccaaagtgctgggattacaggcatgagccaccatgcctggcctgtccagttttgtatttaagtagcataaatacaaacataatatgtaaacataatacctacttattgtgagctattacacattctgcattctatgaagcaatttacatcatcgatcacatttaactctcacaactttatgaagtggtatcatccccattttacaggaaatggaggctcagggagagcaagtgtcccaaccatgatccctgagtggagctgtggcagagcaggaattttatgtcggatgtgtctgttccaaagcccaatctcccactgcaccccctactcccttacactctcctctattcctcggaatctctctgaacacagttcccaaagctgctcctctccgtgggatttaaggaacattagacatgctcactgcactttgctgcttggttttttggatcccgaatgtcttgggaagccttttctggtgccacttgtcttttgcttgttcttcttgaagaccttattcacccagtttgagtcttcagca

SEQ ID NO: 344745 - DNA, 1000 bp, Homo Sapiens
gggatggagtgtagctctgtcccccaggctggagtgcagtggcaccatctcagctcactgcaaactctgcctcctaggttcgccattctcttgcctcagcctcccaagtagctgggattacaggcacccaccaccacgcctggctaattttttgtatttttagtagaggaggggtttcactgtgttagccaggatggtcttgatctcccgactttgtgatccacccgccttggcttcccaaagttctgggattacaggcgttagccaccgcgctcggccaggtgtagttatctttaataggaaatgttgatggtccccagaggatatattgagctagagtgattaaaggcttcccatgagagggcagcccagcagaaaccagacgtcctagttgtgctgacaggaagtagaaaccatgccggtcagggaacaggatagagcgggagattgattgcatggtgagttgtccatttatcagtataattcctgcagacatatggactagataggtgacccagtgacaaagtttcagctacactgactctcttggagctttcttgcaaaagtggtagaactggcatgattgctgtaaaggcagaaggggaaatactccaggtaaaagatatgctaagaaagcatttctccttttgggacgtttgaattaccgttgatcgttaagagggggaacttaaagaacccatgagcccactcagtaaaatccctttgtattgacggttggggctgctatccctatcctgcaggccagggagtttgttcctggaggtgtgctgggaggccagagtcttccacgggcacaggtctggcatattcccagcgtttggtagtcatggaaagccagccaggttgagttatgtttaatagactaacagtatggttcatcgcttccctagcacacagaccagcatctctaaaagcacctagagcacggcaggcgagcaccaagaaaaggaagatgttacttgtcttccagatcagcccc

SEQ ID NO: 344746 - DNA, 1000 bp, Homo Sapiens
agacaaatgggatttcattaaacaaagcttcagcacagcaaaggaaacaattaacaaaatgaaaagataactcaaggatggaagaaaatatctgcaaaccatatgatatagttttgatatttgtctcctccaaatctcatgttcaagtgtcatctccagtgttagaggtgggagatagcagtgtttgtgtcatgaggatggatccattataaatagcttgatgccctccccacagaaatgagtgagttctcactctattagttcacctgagagctgattgcttaaaagagcatgacgtctctcttgcttccactcttgctatgtgatgtgcctcctcccgctttgccttccatcatgagtaaaagcttcctgagtcctttccaaaagctgagcaggtgccggcaccatgttgcttgtacacctcttttctcagattggaaggcatctcctgaggttctctgcatcactgactcctcgttcttcaggtctcagctcaaatgctgcttcttcagagaggtgttttctggccaccctattgaaggtagggcaccatgatctcacatccttttcccctctatcacactgttctgttaatttttgtaaaaaatgctttctggttctgttcatttttttgtggcactataatgtaaatttattttaatgaatttacttttgctccaagtttacaatgagaaaaggtctagttggtccctcaatgtgtaattacgacacttcgaatggatcgattgtgtctgtttggtgtaaggcgagctccagagcctggcacattatagaagttcaataactacttgttgaaagattgaataaataaaactgctggtataataagatcatggcttttgatgagcttggaggatcttagaggaagagagaggtgctacaacactgaaaatgggaaattcacatgaaaattttcaaaaagtaaaatcagatttcacaaatcataaattggtgaatttagtggaaattccaggtaaga

SEQ ID NO: 344747 - DNA, 1000 bp, Homo Sapiens
aacacataacagtttatttcttacacttaaaaagtttactgcaagtccatcagcactccagtcaggtcccttctaaacagcgacctaaggacccaggttgcatccgtcttgtaagtatgccatttggaacatcttgctttcaggtcaccatgacaggcaaaagaaaactggagggtcatgcagaactttttacagtccaacatggaaatagaaaatcacttctgtttacaatccctctgcttgaagtagtcaaatggcattgcctaactacaagaggtttggaagtgaacaggagcagatagatacatgatgagctgtaaatgcttttgccatattctacaaataatataagcttataaaaagcattttaatgaacaattctgaaaaactctatatggatacaaaatatcccataaatgtaatagtttttatcagcataaacatatatttttaggaaaaagctaaagttatgaagctccaaggtaatctaacatggcatcactataatgttccaagaactttaatgagagattccagtatttccaatgcaaaaaatttggcagccaacatgtttatgtagatgttttttatctttataattttacttgtgattgaaggtagccgagataaaatctgctattgaaaaacaatagctattgagcttttcatcatgccaaaatactttgtacctatgacattacaattagcacatcctccatcacaggtggttttgagacacaaatttataatttatgttactctgatatataaaaatgtaaagtaaaaatattttttcacttatttttacactagtggtaaaagtgaatcagcaacagatacaaggcaccaaattgtaggaaaatacggacacaggaagatcaatgatgtcattatcatctacatttaacttctatataaattcaatattaatgcttaagacaacaatcttttcaacaacaatcttactaagattttggcagtagtttcatgtaacatacgg

SEQ ID NO: 344748 - DNA, 1000 bp, Homo Sapiens
cctttcctcaacagttttattgcatcttcagaaaatttctgtaaaagtgttacagaagcataaatctaacaaagttgaaagaaattataagcacagaattaaaatatttacattttcaagcaaactcaactgtccttaattttcaatattttatagtgaacagaaaaacaggctgggcatggctgctcatgtctgtaatcccagcactttgggaggtagaggcaggcggatcacttgagcccaggtggtttagaacagcctgggcaacatggctaaacactgtctctacaaaaaaaaaaaaaaaaaaaaaattaacgaagcatgtttacacaggcctatagtcctagcttctccagaggctgattgtgggaggaccactgagcccagggatgtagaggctgcagtgagttctgactgtgcctctgcactccagcctggataacagtgagacattgcctcaaaaaaaaaaaaaaagaaagaaagaaagaaagaaaagaaaaaaggagaagaagaaggaggaggaggaaaataaattaaagtttcttcattagaagatcataaaatatttgagattggttcatagaaactaatttacaacctttaagttaggttataaatctcatacaattagttgtgtttcagtgtaattttaagttgaaatatacccaatagcatatacctggcataagaagatacgcagcaaacaaaacaaagaagttacaatatcaaatgcttttaccaaatttattctcccaaacactcaattttgatgacattatttataaatgtcaatgatctctgtcatcagagctttgtgtggaaaaaagtcaataggtaggtaggtgaggctctttttcctcattatattttccttttaaaagacgttccaaatgaaaacaaatttattcaaagcagtttctatacattgaaaattaaagaaacatttcagcaatttcataacaaaagtttaaaataaaaagacatctttctaaatcttcta

SEQ ID NO: 344749 - DNA, 1000 bp, Homo Sapiens
tttttttttttttttttttttttttttttttttttttttttttttttttttttttttttttttttttttttttttttttttttttttttttttttttacaaatgcaccactatttactgagggttccccacacgtcaggcaccctgctaggggagtctccaatgtcatggacatgccaaatgccagtgctcttcgccctctgagtctcccggagtccctgtgcctcctgcagtcagggtgacagtgtcagtcctgggcaagttgctgtgcctgagctgaaggggaggcctcgtcccgggcctgggcccccctgccagccactgtctgccttgctgtctctgtccctcgcctcctctggtatcatgcgaggcactggctcatctggaagcagatgctctggatggggttgggcagccacacccgctctccaatctctccccactgtttggcccagtgtttctgtgagaggatcaggacaaaggcaagaaagcccaggaggttcactggctggcctgtggtccacagctcccgtttcttcacccagatgcaggatctaatgtggttccaaagctcaaggctgaggctggctggtggattatagttcaagttgggagatctgcaggcaggaattatggaggccagtgtttggggcaaggagaagggtctgcagacttcaggggcctcaggacccagctactggccatcttcagtcccttgggctcctctgccaggccgttggctgctccataacattgccctgcaactgccacagaaccctagcctccaagagacccaaagctcagggctctcatcccctgggtgccaagccacacccagcacagtctcttctggagctcagacttagcatctttcttggagcgaataataggaaaaatggggggtaaaggaagaaatggagcactcagtcatttgtgggtcaggagcacaatcaccacacacacaccacagtcagcagaatgcctttcctgatacatataca

SEQ ID NO: 344750 - DNA, 1000 bp, Homo Sapiens
ttttttttttttttttgtaagctggtcatgtttttactggaaaacaacctttctcatttttgttcttacacaagcaagtaactggagaagcaggccagagtgcatacgaggatttaaacatggttgtatctgtggtactttagatgcaactttaccctgttcatttgaaagtttaaatagacctgtctgctacacagactcggatgggccaaataagtcatctgatatgctgctgaatggctgagagtctattagttggcttatttcattatcaaggtcttcttctgtatcatctgtgtacttgcttatttttttggagtgctggtctaaagacagactttctaaagtttctatatcttcaatgcctgctctgtagtgaatcataagaagtgttagagcttgtagcctttcacctgatttagctaaggcagcagaaagaagtgattttttccttgtatcagttgtctctttttcttctctaacaagggaattattgtgttccaactcctgatcaatttcattctgtagcttatccaacatgaactctagtttctggatcctttcctctgtaggcaagcccctgtacagatcacgaccaatttctttaactgcaatgaaaacactgtcatccagaccaccctcttttctcactaactttattcctgtgctgtttccccgtttagaaggactgtttggaccacagacctccgtgtcactgccttcgttgtctgacgtgttgggtgtgtgttttggtgaaggttctacgagatcggttcctggttcagaaaggcgagttttagagacttgacgcaaatttaataaacgagaactagtattgataatatgccttgtcaaacctgttgttttattgactgacttgctagcttcagcatcaacacgaggaggcaggcctaagagggtttcctgtccttccagcctaaggtttttcagtgtcctgtctattcgcctatcagttgctccacaaacagaagtctcagct

SEQ ID NO: 344751 - DNA, 1000 bp, Homo Sapiens
ttttttttttttttttttttttttttttttttttttttttttttttttttttttttttttttttttttttttttggtggttcatacattttaaaacacttaacaagagaataagcatacaaatttctaatactgtccaggtacaacactgttacacacaaaatctaacaagtgtgaacttaattttcagcttctatttgaaatcagatgaaatggcttttgatacattaaccaccaggggaaattttgagggaaggagtgcttaattccatatgtcttggacttggatttcttcagctgagtccacaaaccctctttatgcaaggttgtgtgttctgtagctgtgtgcatttcttaaaaaccagagtctccaggggccgacctgggagcctaagaagtgaagcctgctggtgcagaggggccagcaagccctacctgctcggcacacctgcctgcatgtgcagtggaactgagcgagtggagcagagtgtgagcactcacaatgctcaccaaacctgggacgtggcaggcagtttcccaaggactaggaaagacattcacagtggcacaaccgtttagctacctcattatgacccacctgtgtgtccacacaggtcagggctacccttcagtttacctgagaagcctagacctcaggaccaccatctcctatgctaccatgcccagcctgacctggctgctcacaagtacctgccataatgcttggcctcctggaagctctaaagcggtgcaattgtcctgcagaacatcgcagtgtcagggtatcctgcatgcaggtgaggggtgggcaagtagggctagcaatgtcctgctccatgttcctgtgagcaagagctcacagggacccaccagactgtgtaggctggtcacagtccccagggctgtgcaacagcaacttgaaacagactgaggaagctgcacaggccaatggcagggatgcttgtcactcgtccttctcctgtggcagagggagatgccag

SEQ ID NO: 344752 - DNA, 1000 bp, Homo Sapiens
ttttttttttttttttgcctgtttaatatctttaataattatatcatttctaaagctttccacaaaagggtattacagttttttaacttattgcaaacatatcttaaaaaaaaaaaagtcagctttaatactgaaactataacatgaattttaaattatggacacataccataaaacacaatgaagaacattttatttaaataaaaagagaatatttcgctaagcaataaacccaacatatttcttttctctccatatctacatccaatggtgatattttataggctagtttctaaacagatgcaaatttttacaaagcgatgaaagccacgttttgctcaggaatactacggttcacataccatataggttgttttacagcagatactagtttgccaagcttcagatggcaaaatgctaagttgtgaattgagtattgtccagctagttgtttctccttgccctagagactctggcagtatgacttttgagagactgccttattgctgccacttctcttctcatagttgaatccgttatgggagaatattcatgtccttaagatgcaagtccgagcaaaaagcctcccacaaatccactggatatcacaatgttctgcttgataaattctgttgcttcttcaattaaattgttgatttcaggtgctgctttgttcgctcgtttcttaatctgtctttttgctttatttacatctttttcaactctcttccagtcaatctgcacatagccactatgactagcaatctgaagaagaagaaagccaccacctactgcagttgctgcaagttttccaactttctggaacagaaatcctgcacaccagccagtaacgccacccattacaatctgtgtagctactgagtatttttctaccataggtcccgaactgtggccaaacactcgattccaccactggtgtcttcttgcatactcagttaaatccaacacttcataagagtcgtcatcactttcatagtct

SEQ ID NO: 344753 - DNA, 1000 bp, Homo Sapiens; identical to SEQ ID NO: 160989

SEQ ID NO: 344754 - DNA, 1000 bp, Homo Sapiens
acaaacattaagcttttatttataataattttattgtgtcttatctaaaacattttgtggtgacttactgcctaaaaattccagtttagattacaatcctataattgtacacagaaaaatatctgatactacaaacaggatataatcttaactttgatctcagtttctgttgcttcatgtcacagagaaaacagagcaggaaaatggcaagtaaaacagaagtgcacattgcactaagctatcgtaaagcacaggaaacaatcttttcaaaatgtctacactgaactgattctttaaaacgattcactaactgttgtaagagttagtgctcccattactacagtgcaaaatgtattgttgtttcaatacaaaatttaaagcaatctcaagagtacatcaaaagcatgtgaagtactaatgaaatgctaatacagacacacccaaagcctcagtctatcccagtgagtcaagcaaagacttaaggcaattgttcagtatttcatgactgcagtgatttgactgaaatgaaagatttcgttttgcttcaagtaaatgaacaactgacttgaatcttcactttactagaacagactttgacaacaaactatctaacgtaggttatactttaagcatgtatgaattagaccctttccaaaattctacacatctcttcaggattagcatgtggtacaattaattgaagttatatcaaaaactttttatttgttaatttcccaaaatatattttatctgatcacctgaaaacacatgcaatattactcatcatcaatgtaaacatttttaaaaatacatttttaaatcaaaggggtttattaggaaatgtcataataaaatatgcaatctttatatgtctttttaaaaataaaacatgaaaacaagaactatgaaaaaagcaactatgatggaggtaaacataatgtattatgatgaaactattgttctttatttcttggaagaatttattaagaaatagaggcca

SEQ ID NO: 344755 - DNA, 1000 bp, Homo Sapiens
gtaggcatgcagatattttattgctgaaaatttacatttctacatttgaagaaaaaattctctgacctatgacctgtggccaagtctgagtagcctgtgctttcgtttgtccacgtggtgaagtcccacagcctcccctgacactcagggagaatcctcttgtgaatcaaatacaaaagcaaacgtttgttttgtattttcatttatggctgccttaacttatacaagaaataggcaaaaagtcttaatcacattgctttgagcgtatgtaacatctttaaagactgttaattgatgtcatactccttaatctttaaaaatatcaccctgaggaggagatttgtagttttacccccattctacaaaaataaaaataaaagattaaatcatatacacaaagtctagaagaggaatgattagctttagttgtcttgttttaatcaagcatgagaaaactaagctaattccatacattgggactgatgaaaatgtgtaaagtaagttggtccacattacaagtaggttcaatttggccaaaagacactatgtttcaaacttaatcccctgagtgcaaaactgtaaggattatgctccagttagccttttagttctgtttctttcatttcaagattccttttgccctaaatagtagcctatacttgctattgtcttttgacatcattgttttcactcgtacgcttaggctgaaagggtgtccatcccactggtgaatacacaattaagagcttcagagcagagccttcatctccactatggcctccaccacagcaagcctaagtgcacttccatggatcctacaatcatttgtctttttgtgacaccataaagtttagtaaccagcaacacgtggttcaatgcaggatgtactgtgggagagagaaatgggcaggagaagacacacttcttgcctttagggctcgttaaattgtctcctctttctttttcaacttgcttttctttggctccactgtcttctagt

SEQ ID NO: 344756 - DNA, 1000 bp, Homo Sapiens
tttttttttttttttttttttttttcagttatggcagacattttagaattaccagatcataaatttaaaataactgattaacatgcaaagggctctaatgcgaaaagcatacaacacgcaagaatgatgggtgacgtaagcagagatagaagctataagaaaaaatcaaaaggaagtgatagaagtaaaaaacatcgtcaggctggcgtggtggctcacacctgtaatcctagcactttgggaggccaaggcgggtggatcacctgaggtcaggagtttgagaccggcctggccaacatggcaaaaccccgtctctactaaaaatacaaaaattagccaggcatggtggtgcacacctaaaatcccagctactctggaggctgagacaggacaatcgcttgattgggggaggtggaggctacagtgagccgagacatgagtcactgcactccagcctggacgacagagctgagactccatctcaaaaaaaaaaaaagcccagagttcaaggctgcagtgcccaatgattaagcctctgaatagccactgcattccagcctgggagcaaagtgagactgtctctaaaaaaagaaaaaatatatatatagtcttcttctgttttgttttgtttgtttaattcaaagttacatcacagttgtcctcaactacagaaacagatccagctacaatgtttaattcttctccattacttaaattaaatgctgccaccattgagtatggcattgtataatcatattccttcagcggttaaaatagaaaaaaaaatgcagatagagatgtgtataattggcatgcatagaaatacagaaccagttacatgacaaaagtaaacaaaactctaaaccttcatattttaaaaacaagattttccatttaacaagaattacattcattaaactggagagtatctcctatagagaaaacttttagagtcagatccaaacattactatattcatacttggaagcactttgacaac

SEQ ID NO: 344757 - DNA, 1000 bp, Homo Sapiens
gtatgagcaacatggctgtttatttcacctgagtgcaggcgggctgagtccaaaaaaggagtcagcaaagggtggtggattatcattagttcttacaggtttggggataggtggtggagtttggagcaatgttttgcgggcaggggtggatctcacaaagtacattctcaagggtggggagaattaaaaagaaccttcttaagggtgggaggattacaaagtacattgatcagttagggtggggcagtaacatatcacaatggtgcaatgtcatcagttaaggctattttcacttctgtggatcttcagtaacttcaggccatctggatgtatatgtgcaggtcactgggatatgatggcttagcttgagctcagaggacggacagagaccagcctagccaacatggcaaaacgccctctctactaaaaatacaaaaatgagccaggcatggtggcacctgcctgtaatcccagctactccgaaggatgaggcagtaggatcgtttgaacccaggagacagaggttgcagtgagccgaaatcatgccactgcactccagcctgggtgacagagcgagtctctgtctcaaaaaaaaaaaaaaaaaagtcggttgtggtggctcacgcctgtaatcccagcactttgggaggccgaggtgggtggattatgcggtcaggagatcaagaccatcctggccaacacggtgaaacttcatctctactaaaaatacaaaaaattagctaggcatcgtggcaggtgcctgtagtcccagctacttgggaggctgacgcagaatggcgtgaacccgggaggcggagcttgcagtgagccgagatctcacaactgcattccagcctgggcgacagagcgagactctgtgtcaaaaacaaaagcaaatgaacaaaaatacaaaaatcagctgggcctggtgtcacgtgcctgtaatcccagctactcaggagcctgaggcaggagaattgcttgaacccagaggatggag

SEQ ID NO: 344758 - DNA, 1000 bp, Homo Sapiens
tgggggaaatcagacatttattagaacatttccagtttttttgtggagggagggctttggtgtatatagatttctcagaatagcaatgatacttatatttcaaaatagcttataaaaccaagcatgaatcttttttatgctttgttgttttatctatcacattgttctcatttattcagttgactatcatagatgaacagatatgggaaagagggcttaaaaaattcatttggcttgagatctcatttgtatattatggtttggtatttacaaactaaaggttctcagccaaataacgtgttttgcttggaaaccaaggtatttttaaggaaattgtatctgaataccttcaggtgcccgttgttttatacccagctgttaagaaattacactctgcctggctcttacaagcgtttgagttttcagttgtttagcctgtaagatcatcaggattttatcaacaggatatttagtctctgttgctaactctgctgtattttaccaggtaaaggttctaaataattaataataaaatgtttccagaaaatttatttttagtttagatgtagttcagctcatcaaaccttttaggaatcagcaacagcaagaaagaatatagtgtggagtcatttgaaactgtagcatctagaatttttaccctgtactgctttagagtaagcagaaagatgagtgtaatacaggaaataaagagaatagcagaaatatcttcaaattattatttcttccttctttctcttaagctaatagagttttaaaatgagtcaaatacatattttaattgataaactgagtttatattcacctattggaaacagtacaacatattttacatcaggttatgaaatatggatgttttactaaaagacaggaagagctttttccagtctttaaagtaaatacatattcaaagaatcttaaggcataccatttattcatattcatatctattgaaatactgtacatccacatacttcaataa

SEQ ID NO: 344759 - DNA, 1000 bp, Homo Sapiens
aagaaaaatgtttaaataggggccttatgttaggcacggtggttcatgcctacaatctcagcactctggcaggctgtggtaagagaatcacttgaggccagttcaagaccagcctggacaacatagtgagactccatctgtataaaaaataattagcaaggcatggtggagcgtgctggtagtcccagctattcaggaggctgaggtgggaagatcagttgagcctaggaggtcaaggtgagctattatcacaccaccacactccagcctgggtgacaatagagaccctgtctataaacaaacaaaaaaacacaagggacttgtatgcataatgaaagtctagatttttcagaggccatgataagtcactacagggttctaagcaggagtaatagggccagtttacatttttaagattgctctggcagcagtgtggagggtggttggaagggacagttaagatgagaagagaccacagcaacagtccaggaagaacagaggataaatgatgactgtctggaacagaggggaaatgacagaaacagaagtaagaaactctttgggatatgtaattggggacctcagacaccttcccagctgctaatgttgtgttctgggtaaggctgcctatctttcaacctagactggtcagtcagtatgtcccattgtctgatgtttttagtgtgcaaagaagtcgattaggtccctaagatccccccaaatcctacatacacagtaggaaggtattttataaaatcctttattttatgagtggcaatcgtcacctccctacccaacacataaacacacatacccatctagtctttgttttcatcacatttcccaaactgatcgcatgtcaatgtgactcacatagaaaataaacaagaggggcccatcacatacgccaagttatcaatactcctttcaccatttctgctcaatctagaagactcagcttggaattattttaagattttatgttatttgcaatattatg

SEQ ID NO: 344760 - DNA, 1000 bp, Homo Sapiens
gagacggagtttcgctcttcttgcctaggctggagtgcaatggcacgatctcggctcaccacaacctccgcctccctgattcaagtgattctcctgcctcagcctaccgagtagctgggattacaggcacctgtcaccacgcccagctaattttttgtatttttagtagagacagggtcttgccatgttgcccaggctggtcttaactcctgaactcaggtgatccgcccgcctcggcctcccaaagtgctgggattacaggcgtgagccaccgcacccggccgctaatttttgtatttttagtagagacggggtttcaccatgttggccaggctggtcttgtcttgaactcctgacctttactatgactttgtaggcacagtcataaatgtttgcaaccactgagctttcaaattagtggtactcaacctagagttcactggatagtagggagccgctgtcttggtttcagtttaattaatgcatatgcaaatgaatcaagatattctggcatagccccaaccttaccaaaacacacatattaaatgtcagtttatgacaagtatctgtatactcagtcatgctagatgatggaactgtgtaaaaggtgatgaggaggaaagtctgtcacaactcctgggaagtatccctcctctccaccttctacattagctaaaatgagtgagcattagctcctgacgaatacggtcagcctctaagtccagggactccatgtgctcatactcctcttccgggggctgttccatgggtcctgtcattggagaggaccaaacatccatcccatgctccagggagatgttgtggaggacacaacaggccaagatgatatggctggatttctctggtgagtactgcagtgcccccttggatccatccaggcagcggaatcgggagcagagggttcggaaagtcttctcaatcacactgtgagttgcagaatgggccatgttatagcgatattctgctggagtttcaggaa

SEQ ID NO: 344761 - DNA, 1000 bp, Homo Sapiens; identical to SEQ ID NO: 160991

SEQ ID NO: 344762 - DNA, 1000 bp, Homo Sapiens
cattttaaatttcatatattctctaaagttttctctctgaaaacctgcctcaggaggcagagcagaggcctgcaaaacagacttgactttaagcaagaataccacagacatttgtaactgtatgtacattctacattagagaactcctcaccatttctctaggcatcaaaaataaacacatgtctctagactctggaaagtaaagtagaggctgactgctagtagaaggtcaaaatactagagataaacctagcacttgtcacactttagcatgcatcagtcaaatgggaaacttgttaagctgcgccccatcctcagaccttctgattcaataggtgcaaaatggggtccaagaaccaacaagttcccaagtgatgccaatgctgctgactggtgggccaaattttgagagcccctagtctggaatactgcctggtgggccctctagactcagttaattttaacattcatggagtaaacataaaattaaagtttcatttactagaccacagaagaaatatacccatttcaattgtttaaacttttttttcccattgggaaaagtaaaacactacacagcaacatactttatacttggtctaaattgaggtctagcacgcccagaaatttccctgagctttatcatgattcctggaggcagtctgatccgaggcagatcaaagtagtttccaacaggaggcacgaggacatcagaggggtaggtgaattctctgtcttcctctatggtcagaggcagtggagaggggctcggagtaagggcaggggagatcacgccattggcctccacctgccactggcacctttgtaaaagtttggaccgcaatagctcctgacaggcttcttcttctttggtaatttctggtccattgtacaggattcttaacatggaacaagctaacacagacagacctaaagccaggtctaccagaaagggcaagcctcctgagacatcctccgaagactcctgagcgcgaactgt

SEQ ID NO: 344763 - DNA, 1000 bp, Homo Sapiens
tttttttttttctaatcaacacttctttattgaagagaccacccctgtgtatagactttggagtggccctgggggagataagtgtgggtgggagagaagatcccaaactaccaaaagtttgctccatgtcacaacctgccctaggcctccaggccaatgtgaacagacaggaacaaggttgagcaggatggatggtaaatgccaagctgggtgcagtgacaggggcagtggcagtctgggtcgacctcccataagaaggagtcacaaggagacattgaagggtgggaggatttgaagaagggaaaaaaagaggttgtcctgaggctggagagctgagcacagtgtggtgttgacagggcctggcctaactggatgtcaacagtgaagtagaggggcatcatgggatgtcaggctggaaagggcagtgcaggtcccacacaacaggcaaaagctctagctttggcctggaggcagcagggagctcctgcagttctaaactggggtgggtagaactcttgtccccaggtatgtccatggctagtctccccagggcctggatggtgggggcaaacccctctttggctccttcctgcatagccacccttagaattgcctctgcttctcaggtctttgagactggtacagactcatccaaaaagccatcttcttctccttgagcttcatgcccactcttgtggtaaaatccagctgcaggtacttttcatccttgttgtagcgtggccagcagggcagattcccatcattggggtttctcggtggtagtgagcagtctgcagtgtggcatacacgaaagtggcatcttgaactatgtccatcatacggtttcgtagcatcttccagtcatgctcattgacattgtccaggtactcctccaccacaagtggtacctgctccttggtgatattataaggcaagagccaattgaattccaggttgttgacacctagaaggtagggcacagatgaaaccttcccctggg

SEQ ID NO: 344764 - DNA, 1000 bp, Homo Sapiens
caatataaacacgtttatttttactgtcttaaaactaaattattaacacaaagggaatgtgtgtttagtctgccattctgttaacaaaacaaacagtaagttgggaaacctaatcttttgaaataaaactgttaaaatggcccatgaaagcaaataagtaatgagaagagtatgaacattctaactcagataagaacatatcatataatcagtagaagaaaaacagcaagtgtcatacttcatttttgctgctaaaaatgttctttaggaaagaattggagaaaaacgtcatgaataatcaatacttatctgtgacactaatgcactaagcatgttttataaaatgataatcaaagacagtcctataatcccttaacacattttgcactgtattttcctattttcacacctaatttttactctagtaggatttatacttaaaaacatttatacaagttttctttgagtggaaaacattgtcattcctaagtaaaagctaaatcatggtgtaatatatgttcatgtttaaattatagaggcctctaagcaccgcaaactgtttcttacagtctcatgtttgttcatttttacaaagcagtgaatatttggaacctgtttttataaggtttctcttggatacgattatgatgatgattgtggttttgtgtcattgttttgttttattgtattctattcacttactttggaagcaagttctcctggctctttcttttctaaaaatcctggaacttttttaatttcaggaagttcaaaactccatatatactgtaatatcaacaataggtttccataaaccaccatgaagggagagctgatcatggcatattttcttctgttgcgaatcatccaaagagtgcacgaccagatcagcagcacgaaggtcagccagctgtgataggtgatgctccaggcctcatcatagctatgagggcacagatgtaactttgtttcataataaattggaatacggagaccatgg

SEQ ID NO: 344765 - DNA, 1000 bp, Homo Sapiens
ttttttttttttttttggatctcactttctaggtaagtataatgttcctttccttacatacctgaaactgcctgttttagtatgttatgggcctttatagctcatttattttggctatttttaaactcctttcatttatttgacatcccttaaattaaaagaaagggtatttaaaatatttaaaatacaactttgtgatatatacatatacacaccatacacacacacacacacacacacacacacacagacacacacaaaacaataaattgtctacttatcaacttttagctttaccctggactttggcaatgttgtagatactagttcaggttctaattttccattttcacatgagctggaaaaatgttacagaccaccatatttaaacaagcatctcatatataaagagtctaacagaaagtctcttagggaaaaaagaaagtccttacaataaaaacgggaggattgctaggtgtgaaaaaaaaaaaggcgttttttctggttatttatcaaaatctattgtaattttaatggtagagataaaattttaacttttgctaattaggagaatacttgctttctataaattcagtatatttttcttaaacaataatcaagtaaaaacatctaaatgtacaaagcactgatagctctgatgtgttctgtggaaggataacttataacagtttaagtcacaatacacttttttaaaacccaatatattcccttctttttcaaacatcagagcctgagacccagaaaagttatgataaaatcttatccaaccagatcagaactaaggaaattttttttaccaataatgtttttgtaacctcttagcagttaccaaatgctacttacatacattcaacatctagcttactggcatgatatcaaagttttataaaaatgaggaactgcagatatatgattagaaggtacacaaattgcattacattaaacacaaaggcagtgtggtccttgtaggagaaatcaa

SEQ ID NO: 344766 - DNA, 1000 bp, Homo Sapiens
tttttttttttttttaggatctaaagtgggatttatttgcattaagctttcagaatacttgctgcaactcgggtagaaataggtaagtattcacatgatatgtaagtctgtagtccagaaaggtatttcaactaaaatatgtcaattttcacatctgaaatcattcagacattactgatatagtatttggaagagtttctgtatagaagatttttttcaggctgacagtacttagcgctttagagggtcaggtaaacccagttctcttttgttcagcaatgtctcatttccactacctcaaacttggtccccagttccactatccgaagcctgctttacattatgtcgtacttcattggtaccacatacagtgattacattataaaaggcctctagatcactttgttcaaatttaacagatggtttcggtaatgttccaggagcaagggaactctctcccataattttcaggttgataaatttgattttccaagtattctccacaaaagggcagcggatgagtccaaaaatttgttcaaaaatgcccaaacaagtgtttcctcgatggacagtcccagcaactccaaccataaccagcccatgaggagaagatgcacatttcagtccatgtgaatctaggttggggctgagaaaaagaaattcttcttttactagtgacagcaaacgaaggctcacgatttctgctccatggtagtccataacattttgttctgatgtgttgtaataaaacctaagcttcacatcatgccagaagtgctgtggtccccattcatcttgaggtggtcctagaaaaggattctgagaattaagaagtccaaagaaccaatgacagaattcttctcctaggcgacgaaaatcaactttttcagcttttttatcttctttcacctgctgttgaaataggtggatgtcctctgtctttgtaactggctctggcgtttccttcaatttcagttgtggttgcttttgccagtaatct

SEQ ID NO: 344767 - DNA, 1000 bp, Homo Sapiens
tttttttttttttttttttttttttttttttctttttttttttttttttttttttttttttttttttttttttttttttttttttttttttttttttttttttttttttttttcacaacagaaaaaaaaaatctttatttctaccaacttgtcccatcaagagagtaagatatacatatgtaaagagatggagtcccactctgtcatcaggctgctggaaggcagtggtgcaatcatgaatcactgcagcctcaaactcccgagctcaagtgatcctcctgcctcagtctcctagagtgctgggattataggcgtgagccagcacctggccaattatacttttaaaaaaatattttgacatttatacttgtttattatctaaaagcatttttatgaatagttctcaagaagtcctagcaaaaattgtgcttcattcttttttgaataactctagctaataacattcatttgcgcaaaaagccttattatgctgctgctaataattgcaacaaatttaccttagattattaaaaactattttttcttagaaaactataattcaaggaatcaagcttggctgcagaaagtaatggagttgaggaatactgttaatttttccagattgaccctggagtcatcagcaatagtttacttttattatttatttatatatttatatatttatttatttattttcttttagttggagtctcactctgtcacctaggctggagtgcagtgacacgatcttgactcactgcaacctccacctcccaggttcaagtgattctcctgcctcagcctcccaagtagctgggattacaggcgcgtgccaccaggcctggctaatttttgtatttttagtagagacagggtttccctatgttggccaggctggtctcaaactcctgatatcaagtgatccacccgcctcccaaagtgttgggattaaaggtgtgagccaccgcgcctggcctatttttattttttaaataagata

SEQ ID NO: 344768 - DNA, 1000 bp, Homo Sapiens
tttttttttttttttttttctggttgatgtattatttattatgtaacagttctgagaaaaaatccaattcaaaacatattactgaggattctgtattagtatattttagaaatcgtataatccaaagctgattttctaatatattttcttatataacacttaaggaatttttcactcccattatttggctctagaaaatcttatgggaaacatttgttacactagaaaacaaaatttaagtacagttgttaggcacggttaaaagggatgatacacacaaactataataattacaaatcagtacttcttttgaatacacatttgaatgtaaacttttaaaatcagtgttttagataaatataaaacatacttcaagaacttattttaacatctcctttactttctaatgctcttcagaaaaaattcctttctgattcattcagtagcaagagcccaaaaatggtgttccaagccaagattcaccttgtcctcttcagaaatgacctgaagagcttttgggttggttaaaaatattgcccgaaggtatcttagggtaaactcgaagagctaaaagcactgaatccagagatcaggtctctcggctgtgctggggacaccatcaaccacttggggttgaattctattgctatgaatgagaggtgactctgaggggctttaaccaggccggggctaatgacagggtttcaaacatcagtaataacaggaagatcggggttgagaagagtgacaagaaatcctgaatggtctgaaccattttacacttgattctatttcttagagctctttgggaaacaggcaagcaaggcttttcctggatagtgtttgcccatgaaacaaatgaatcacctcactaaatgattaaaaaacatttcctgttggtttcatactactaacaattataatattttaatggataggagaaattatgggtttaaaattaaattctctgttaatgcacacgtttcaataaactggttat

SEQ ID NO: 344769 - DNA, 1000 bp, Homo Sapiens; identical to SEQ ID NO: 246601

SEQ ID NO: 344770 - DNA, 1000 bp, Homo Sapiens
tttttttttttttttttaatggtctgagcggatttattgacaatgaataaagggcacgaaggccaggccagggcctgggcctcttgtgctaagagggcagggggcctacggtgctattgctttaggggcccaccacgggcaggggcctgctcccagctgccacgctctatcatatggagcgaggtgttggggaaggcggggcaggcagcctgttgcaggcaggggaaggagaagagactgaggggctgtgacctctcctgaggcccccagcctgagactgtgcaactccaggtggaagtagagctggtccctcagctggggggcagtgctgtccagtggaggggagggctttcacgcccacccaccccctggccctgccagctggtagtccatcagcacaatgaaggagactcacatactccctgctccctgtggtagagacacctggtgatcagaagtgtctggtttgcttggctccccatttgcctcttgagtgggcagccctgggcttgggcccctccctccggccctcagtgttggctctgcagaagctctggggttcccttcaagtgcacgaggggttaggctgctgtccctgagtcctccattctgtactggggggctggctaggacctggggctgtggcctctcagggggcagcctctccatggcaggcatccctgccttgggctgccctcccccagacccctgaccaccccctgggtcctgtcccccacgagagccccagctcctgtctgtgggggagccatcacggtgttcgtgcagtccatagcgcttctcaatgtgtgtcacccggaacctgcccacagagaacacagtggtctcccctgtccgggggcggctttttccttccttggagcgtccctgacggacaagtggaggcctcttgctgcggctgcaatggatgcaaggggctgcagagcccaggtgcactgtgtgatgatgggagggggctccgtcctgcaggctggaggtggca

SEQ ID NO: 344771 - DNA, 1000 bp, Homo Sapiens
ctttcttcagatatttttgtttcttttgttttgaagtgtcctcttcagtggaactggatgagtaagacctatttaaacaaaagcatttccttttgagaggcccaaatgactaaattaggttatggaagggttgaaagcgtgagagctctcatggctgcaatgcagagggctgtggatacagcttccctagaatttaagcatgggtaagcatatgttaagaggagttataaggctccctgagtcttactgagggtatccacattgggtgccaggtgaaacaagaatcagtaaacctttctagcctgtgaggttaagtatacttagctgatttcactatcatgaattcacctgcagccgtatctataggttatcaatttgaaaatttctaagcgcaccatagtgaggtatttgcaatctttggtgctgtgccatgacattggttgatgttcgatgcttctacaacataagcatttactttagtggacataagggctacctaagtattaagcaaagtaacactgatcaatgtgaaaatagaaatttaaaaaacgtatctactaatatgtgtttgaaaatgcttacccatataaaatttccattattatacaaaggctttcatgatgcaactccctggctcttaaattttaaaaagtacagaataaaattctcaattctttttttgacactttttactcttgagtttgccactaaagtaaaagagagaaacatcccaaactggtcatttatgaaaacgttaagttcagtgtgaaacttgctttaaaactacaaattatgtcagacaaaataaatatatatgctcacatttataaaattttccacagtactcatagaaacaagcttcataaaatttatactgaatacaataaaaatcagttctaataaagatttagctatcttcctaaataaaaatttctgtgtttgaggtatcactgtaagacatgccaatatggcacatttgtaaaacaacccaggagtctat

SEQ ID NO: 344772 - DNA, 1000 bp, Homo Sapiens
tttttttttttttttttttttttttttttaaggatcaagtgtaaatttattataaagcatgcatacacaatgacatttgacattattgattttaaaatataaaaaataaaaatataccatactaccgtgaatttctgctggatgaggtaatttaatgcccagcttcctcttcctctatactttcttgtacaaaaaaaaaataccacttttgtgggtcctagaaattcacagtctcaatttatactgatggacattacatacaatgcaaagaataaaagtcagcaaaagttataaagtagtaagataaaattgatcattgattttttaaaaaaaactagttttgtaaaagagaatgggaatagcagaggaaagcttctgcaactgaattactgtctcctaaaaattaagtagctataggttcctactgtctcataaaacttggattaaaggcttcttcacaaaactgtgtaactattaagtttttccttttccaaaagagaaaaacatttcacagctctaaaacaaaatagaaagaaggcaccaggaaagctaaatgatctttctgaactctgttcattgaacattggtttttaaggttccaaacctactaaatgaaaagtggaatgaatggtacttgtagcttggatttaactcaattttgaatattgtcaatctagtacaatttcttaaatttagcttaagatatctgcaaagccaacaatgtttctaagacaagatgaggttacgggcttcaatcaataagaaaaataaaaaagcaattaatttattatttggaacccaccaggtcattaggcattaatttttaaatactgcaacttcatgttttatagaaactagaaacatgattcaaaatgtcacaaagttatattaaattaaaaccactttagacaattcaaggtctcactgacaaagttcattaaggtgacagttttgctgttttgttactgttcccacatgatatcatctcttctcaatttca

SEQ ID NO: 344773 - DNA, 1000 bp, Homo Sapiens
tttttttttttttttttcccgatccattcccacgggggtcttcccttgggaacaccactggcagatttttatttctggctggataagcagacaccttaagtttaaaacaaagaggtcacctcttcccccacgaaatgcgatgtggtggatatggccacctcactgccctgagacccagcttgatctcccaactccaggtgcatgacccaggctctgaccaacagagctgggtggaggccgttcctgcagcactgggggtggccctgacctaaccaccactcctaatccttgaatgaggttcagtattacaaaggctcttgtttctacggcccagcgcagaggctgcaggagggtctttgcctctgtgcaatgctcacagctgcctcgcccaagacagagacaagaagggaagccagaccgggcagccagcatggggtgcagagccaggaaggaaaggcccagcagacggcgactcggggccagggtggagtccctgagccagacggctgtgggcaccaggcaggcttctccgcctctgagcccggcctggcacgtggctccggggtcgcgcacactctcagcacatccccaggatgcccggcgccggggcgcagcccccgccatctccagagcccccgccatctccggcgtacccatggctctgcttctcccacctggcagttttcccagtaaacttctcgggggactggggagctctgaggactaagaaggcttctctgaattcaggttgattttccaggctgaagagcaacttctcactgcagctctccctcaggacccagtactcccgcagaggcgcagcaccccacgcttcgggcgcccctacacctccccgtgcctgtgagtcctctgatgccgcgtgaagaaccccaggtgacggaagcctttcccacagtggccgcactcgtagaacctcttcgtcaggtgcagcctccggtggatgctgaagcccttgggccaccggaaggacttgccgcac

SEQ ID NO: 344774 - DNA, 1000 bp, Homo Sapiens
tttttttttttttttttaacttaaatgcaaaccttgcaatgtgctgagctatgtagtaaaaagtgctatgtttatatatgcatacatatatgggctctggcaagggatgcatgagtacatgcgtgttatgtaaacatagcaattggtcagaaagagagtttctcatcattaggacatttaaggagtggcaagcatattggaagcaagaatgacctagggccatattggcttagttgtcagccaggagtgttgctgttcctatacctggaggtgcccaggtctctccccaagcaggccagtgctcacctgatatgacaggtgatcgtgtatctgaggcctatgagtttgagattcccccaaggtgaggtgggtctgcactcacttgctaccaggtagctcccctagttcttgaacacgtgtatggcccagttctgctcctcatgtaaaaagcagaacacgatctccctgtctctaggaggagggtgcagattgcagatttatggaggcccaaggccccttattcctactccccacccccagaggttatagggaatcttcatttccttcccccctaagggttccattaggacttgtgttttcctgaccacagattcacacctgaagaggcttggaagatgcaaaatcatcacctccaaacagctgagacacacatgacttggctttaaccgtgactgcccaatgccagagcactggactcaggtttaacatgggcagcccccatgtcaccctccacatcagctctcctcctacattgatggtcggcctggaagccagtcatgtttgaccttgcactcacgccctggaggttctgaagtaggcaactttctagttacacaggtcctgcacccaagcttttagctcaggccaagtaaagacaataagttcaggtgggcacacggtctcagtcattttgtcttcttacttgcagtctaggtgaatggaccaattaagtgctacctggaggtaaggctgtatccag

SEQ ID NO: 344775 - DNA, 1000 bp, Homo Sapiens; identical to SEQ ID NO: 160994

SEQ ID NO: 344776 - DNA, 1000 bp, Homo Sapiens
tttttttttttttttttttttttttttggcaagcaggaattctcctttattttccaatagggttaacaatctttcccaggaagagcacggaaggtattttctcgctgtaaatcagcagcagatagggtttgtctatcttgacgacgagtggtgtctccatgggcagagtctgtgctccggtgccagcggccccttccgtacccctctcatccatcttcagctcagccttgtgcacagcctcgcccactttcaggctgcgatgaggggcgatcttggtgagatcaccatgttcctcaaagattttggagacacctatgtaggagagagtcttcttcaggtcgaaggtgcccgtcatgtggagtctgggtacagacacgtctacgaccctgcgtgacagtaatgttttccatctggagaaagtgtccacctgcaatcccttctccaagtgcttcagcttgccctcatcaggaaggatgaagatggctgtgatatttttctggtagggtatttccaggatggtgcaagagagcttatcgtcatagccaacttggtatatgccactacggaacatcatgggcaccttgactgaactgtttttctccagaaagaaatcttcctctttagttacatttggatcaaactcatgtttccacctggctcgaaagaaaatataatttgcaagaagcatcacagtgccggggtctatattctcgatcaggttgttaattttcccatgggttttttgactgataaagtcattgatctgcttctgagccatttccaaattctgaaagttggtaaggatggtttcggcactgtaaaagttcttggcatcttccaaaaacttacgctgtggctgcagcctctggtcaatgaacagcgtgttcccaatgctcagtttgaggtcctgggtcttctgggtcagctcgtggatgatgtaatggaagccctcatgaagatctttttctggcatctttctgaagttgaacccctgcttgat

SEQ ID NO: 344777 - DNA, 1000 bp, Homo Sapiens; identical to SEQ ID NO: 246602

SEQ ID NO: 344778 - DNA, 876 bp, Homo Sapiens
ttttttttttttttttttttagaagaaaagagaagttactttattacaatttgttatctcatcccgaggtcagggccccttgcttagtgggaaaaaaaaccctttaggactgagtctcggaacagcacctgctgtcctaaacccaacttctctgtgatgcccggatttcttgattttgatccagtagctgctcattttcctgccttttacatttaggagattcgagctctgtcatttcctctagctgcccctgaagtccgtccttcctgcagggcccaactccacgtagagtgagtgcagccacacagcagtaaccagatagagcagcctcccctgcagacatgagcaaagaagggatccagagagccaaggctgtatcatagattcttgtggggtcaaaggggcagtcagtatgtcccggcccctcatccagtggtaccagaggatccagcagtcctgggtggcagtcagcaataaggcggcggccaccgttggccacagtgagtgacacagcaagaaggaggcccagggagcaggcaacggacaagagcaggttcaccagagctagtgccagcaggacccagtgcagtggagggcgaagaaggttcctggacgccaggagggtcacaagtcccacggaaacgctcagcagccccgagccgacagagatgacattggctacggtgtactccggcgtgacagcgccgcggggattggccacgtgccgcaggacggtgccatgcagcacggcccccagcagcaggttcacgtggcccaccaagatcagcgcgaggcccacacgcatcagccgcctgggcccccgggcggcgtcgaaagcgcagagactgcagcgcctcatcccgtccgccgcgccag

SEQ ID NO: 344779 - DNA, 1000 bp, Homo Sapiens
ttttttttttttttttctaaataaacgtcctctttattttaccaaatataatttatcagttaagttgacatttgtcaattcagttatagtaactataaataattctcttaagacacagttctgtaactttttaaggatacgagagtaaaccaatattgctccttgcagccaggccaaaagtacatgcagttggtacaatcggggaaaagaaatgaaacttccatgaaagtcaccttcattttctttccctctcaccctacagtcctcctctgctcactcagggcctggggcatgcctatctgtctgctttttaggcaaaggaggtcactccagagtcttctgggactgcctggccaaattccagagatgaggaaggggcgagtgactggggtaggggtggctggagaccacagggacacagccttaggggcagaggagttggttttgatgcctgtacaagaagaatctgtgtgtaagtattttttgaggtggaggaaaagatgaaaaaagtccagagggaggaggaaaaacaagcccaggctggtgttaatgaattctgttggacacaactccaactagaaaacctctaaaattccttccaattctacggttctatgattccagaaggaggcctggaggtctgggtagaaatggagggagagaaaatatggtctctggaggtctagggcaggttcctgggataaggtgcagtgttggtagaaacaggatcattgcctaagccttcccttggaggtgggcccttgaggctacagatggaagggtttctgtagaagcttctgagagagaagttagaaaaagcctacatccaaatccccagatctgtacacgtgtgactgcggatggaggctccagttttctcccaattttgtgctaggcagagaaaagtagaaacaaccagatgatgtccaccctgctagttctaaatcctcttttgggtgcttggtaaggagaggtggagggaagggaatgtgaggaaggg

SEQ ID NO: 344780 - DNA, 1000 bp, Homo Sapiens; identical to SEQ ID NO: 160995

SEQ ID NO: 344781 - DNA, 1000 bp, Homo Sapiens
ttttttttttttctagggagaaggtgctttattctgggatctgcgtaccaggctggctggggtgctggagtgggaaggggaatccaaggagcaaaccaagaaggtcctagggccagcctaggcctccacggcccggccgttgatgacgcggatgtggcggatgacgtcctggatggcttcagatgttgtgccctggcccccgatgtccggagtgtgcatctgtaggacacaggcaggctcggcacacaccaggccctgccaccccccgctgtctcctgtgacgtgcaggactgggattgccacaggagggaagtggcaccagctaagggccagaagatggggccagatccagtaccatcctcccctgggggctgtggtcagtgcatgaggcgggctacaggaggctgcagggggagactgggcggggcagcagggtagggtgcgaggggaacctcacattctcattgtccatggatgccaggacagccttacggatggaggtggcataggagtgcagcttgaggtggtccagcatcatgcagctggccagcagggtggccgtggggttggcgatgttcttattggcgatactcttgccggtgttcctcgtagctgtttcaaacaccgcgtacacatggccatagttggccccagccacaaggcctgggcccccgaccagtcccgcgcagacattgttgacgatgttgccatagagattgggcatcaccatgacatcaaactgctggggccgggacaccagctgcatggtggtgttatccacaatcatgttctcgaaggtgatctgagggtagcgggctgccacctccctgcagcactggaggaaaagcccatcgcccagtttcatgatgttggccttgtgcacggccgtcactttcttgcgcccgctctcctgcgccagcttgaaggcatactcggcaatgcgcagggacttggccttggtgatgatcttcaggctctccaccactcccgccacactctc

SEQ ID NO: 344782 - DNA, 1000 bp, Homo Sapiens; identical to SEQ ID NO: 160996

SEQ ID NO: 344783 - DNA, 746 bp, Homo Sapiens
ttttgttacatctcactactaattttatataaatatataaaagtgaatagccccatcctctcttgacctcaggggcagagtctttgaagtaccttcttccctgctattaagcactgggtggatctgactgcccagagagggcactgcctttccccaaggtcacacagcaatgaagggagacagatgcaggagaggggacctagatgggcaggcagccctgcaccgtctccttggagtcctgaggggcccgggcctcggctgcatgggagaactgctcctcgctactgggccggtaggtgccctccgtctgccgcttctcccgaagcttccgcaccaacagtgccagccccacagccaggagcaaggcagccaagagggagaagaccacgatgatagcagtgatggcttctggacgcaggttgccatcggagctggagctggtggatgaaggcaaaacagtgctattctcatttgcagaagtggtctgtatttgcccccaggctcggccccagcgggccagcaggaacggcaggcccagcgccagaagcagccccagcccggggttcgccatgggctgggtggcgggttggcagcgccgaggaaggggcttctcgcgctcgcccctcctaccgcatctccggccaggggcacctgcgacggggcacctggcccgggcgtctttgacctagctcaggttcctggtccgtgtccctccctcgaaccctcggtccgtcggtcgttctgtg

SEQ ID NO: 344784 - DNA, 1000 bp, Homo Sapiens
ttttttttttttttttttttttttttttttttttttttttttcatttgaaaacaaaaatttattgcttctccttccaaagctttgtgaatttacaaaaaaaaggatgaaagtttacaaactgcttagttccaactaagcataagaggtgagaacgtacactgcagggccaccagcagcagctgtgcactgatgttaaaactggctcccccagacttgtagtgctgtcttcagggggctgcattccttacacgccacctcttgtgacataggtcattggtcaagccgctggaatgctacagaggtttttttggttttgagaggcttttttttgttttgccttcctactataaaagcgaaattttcagttcatttctgaaaaataaattggtcaataaattcattttgttctgcttctactttacacaaagcttcatattcaacccgatacctttctagctgcattttcttttctgctattagggcttgaagttgctgctgttgagcttctctctgctttgctatagatttgagcaagttccgagcaccgatggcctgtagtcccacctactcgggagggtgaggtgggagaatcgcttgaatctgagaggcagagcttgcagtgagccgagattgcaccagtgcactccagcctgggtgacacagcaagactcttcatcttttcattttctgcttcttttgcaagttgatcaacaagctcaattaaaccaccaactattttctgaaactggccaattttgtccacaaagtctttgcactcttccttcagctctatggtctgctgggtaacctctgggtccaacaccctcagcttgttcagttcatcaaagtgtagccctgcttcacccaggatgtccttggccatggctgccggccccgcggcggcagcgcgctgcagcccaggctgatgtagacaggcagcttctcctgggtcagcgacagccggtacccagccagcctgccacggccgctgccacggat

SEQ ID NO: 344785 - DNA, 1000 bp, Homo Sapiens
tttttttttttttttttaatgaaattgaatatttatttgtatttctcctggtaatagcactcaacaaataagaaaaaccgagctgtgagattttgttttaaatgtagccatatttcaaaaggtaaaaagttggcttctatatttaatggcaagtgggacatcttctattttaaaattaacattcaaaaagtagtaaaatatacactatcatgaacacgatgtgttttatagaatggattcatgtccgaatctaatctgaatgtggaagaaatgtattatctgttaaaaaccacactggaaaaatgttcttttttataaaaagtagcttgaagtaaaaaggaacttgctaataaagccagtaaactttcacacgtgggatttttaaaaaatctccacccatcccacctctgaaaaaaaaagaaggagaagaataaaagaaagaaaaagaaaaaacccatatggtcaatctgagtagagccattcattacatgactgctcattctgtacaatgtggaagcctggttatttaggaaatatttcgtttcctaaagtgcatcttttgaagatttgcctagtaaaactgcaatatcatatacaaaacacttaacacaagacatgcaataacaaagctaaatcattccagtgtaaagttgttaaaactacttttaaaacttttgtttcaccaagaaataaagatgtaaaatacagtagcattcttgttctccaacagtatgcattgtatgcttttgttatttggcaaatcttttagagtcgaacaaaaataatagtctaaacaacatttcttctgtcattataatacgaatcccgggcagaacagtaagatgtagaggaagagttagatttttggaagctttggtgcattaaccacaggatttgcctcgtgcaagtatctcctccctgcactcttgtaatcataggtacagccatgagtttctgcataacgatgagatgcacagaagttgtttccacatctgcattc

SEQ ID NO: 344786 - DNA, 1000 bp, Homo Sapiens
ttttttttttttttttttgcttatccaggtggttttatttagtaaaattttacaaaagtcagggctgacttcttggctctgcccttcgaagagcacagttttccttagcagataactgggggaagccacgggcccaccagaggctctcgcaggccagtggtgcgacctcctgtccacaaccgtgagggacaaaggcctgtccttgaggctgctgggcaggggcccaggcagtaagtgagggcacctgcgaggctctgaggacacagcacatctgtacaccctcatggtgccctgaccacacagcagccagggcagagtgtgacagacagagggtttctgagcggtctcaacagctgtctctctggtgacgtttcagtgccttccccttttcctctgaactcatggatttggccacaagttgctccccctggactaagcagcccagaagccatgcccagggtccatccctgggcaaccccccaccaggtgccagcagcattcacatggggcagggggcccatgagtgccacctggaccccgacagcctgtcatggcatccagaaacctctgtctccccttggctctgccaaggacacatcctccatctcctggtcagacccgagacaagcccagaacacaggacaggtcctgttggagagatcccaggaatgggcctggggtctggaaaacagctccacagacagctctggtttccacatcaacccagccaggaagaaaatgaaaaattcctcataaaggtacaaagtcctcctgattttagcaaacgtcgctattaaagagtgtcaatttgagcttgcgtggagtgaacatccttttccttggaatagtgatgtgctggccacctccgcatgagggggtcttcaggaagcggctgcatgtcatcagcctcccctgtttgctgccaggcggccccgagagcttggtctggatcagggctttgcaatgctggagacagaagctgctgacagtgaggagtcct

SEQ ID NO: 344787 - DNA, 946 bp, Homo Sapiens
ttttttttttttttttttttttttttttttgtggggggtttgactttatttgaaatttttggtagattgttcatttggttgactcctcccaagttgattcatgatgctgggtgaatactctgtgcactgagccccgtaccacacactttggaagggtccaaggaaggcagtctatgcccccaaggggctcacaggctgtcagttcaagtgggagggccatcaatctttcctctggccaggaaaagactgaccattggtctccaaagatgctggatagcattgccagatcacatctaaacaactccgactgcagtttcacacaggtggtggtccaaaatttgtaaaaaagtgaaagtgatgtgtgaagatagggctgagatgagaggaaatggattcaagcctcattggaaaagctgagttagtttgttactttaatttgagcatagacaatggggtcaaagtctgcagaatggttctcagccaagtgattgctcttttcttctgagagtttgaaagttgtgctggcataggtaagtgattcccctgggatggatgaaagcttggctggaggatctgagtgaggatctggggcctggggcttggagtgatctgccatggtgccagaaagaagagggacccatctcagcaatgggcctggggaaatgggaagcctctcccttcgatattttctgtagctctttatgatgaggaagataaaggctatcagcagcagtgtcagtagaaccccagcacaaaaggcaaggattaaatgttttttgttgtggtggttagagagacagggtgcagggctagttgttggggctgctgtggagagagtgccttgtctttcagtgtcgggtttacatgtggagccattgcctcccatgctgtcatcccctttcaagaaaaagtccggtcatagcacgacgcagtcgtctaagactga

SEQ ID NO: 344788 - DNA, 1000 bp, Homo Sapiens
gaagtttcatattctttaattgtgaaatatctaaaatggattcaaatggactaacattatcaaataatcacatctaaccatatgatttccatatagtttgatacaatgataaaaagaaaacaaaaatcacaatgaaatacagttgactttaaggaatatttaactactgattcatttattgactatctactgcaaatttttcattctctagggctatgacatgaaccatgaagtatatttttaatttttactttttttaaaagatgggctcttgctgttatccagtctggagtacagtggtgcaatcacagctcactgtagcctcaaactcctgggctcaagctatcctcctgcttcagcctcctgagtagctgggaacacaggtgtatgcaaccaggcctagctaagtttaaacatgttgtggggggccaggcacagtggctcacacctgtaatcccagcactttgggaggccgaggtgggcagatcactggaggtcaggagtttgagactagcctggccaacatggtgaaaccccatctctactaaaaatacaaaaattagccgggcgtggtgacacacacctgtagtcccagctacttgggaggctgaggccagagaatcacttgaacccgggaggtggaggttgcagtgagccaagatcacgacactagactccagcctgggtgacagagcgagacgcctaccaacaaaaacaaaaataaaaatatataaatacaaataaaaacaattttttttgtagagacaggatctcactatgttgcccaggctggtctggaactcctggcctcaagctatcctcctgctttggcctcccaacaaagtgttgggattacaggcatcagtcactatgcctggctgaagtataaatttaaaaggcaaaagctaagaaatggaaactacacaattaaaaatcaaagttattttcatatttatagtacatgaaaataagtcttatatccaataatccaacagataat

SEQ ID NO: 344789 - DNA, 1000 bp, Homo Sapiens
aaacaaaacaaaataccagtggctagcttttctgtaacatcctttggatttggttaaaaaaagaaagaaaagtctacagaacaggatcactgaatgccactttagccccacttcctgcaggctctgttttaattagcgtcaaacaggttactgaacatttcttcagctgcggaaagaagttctgaatgggtgacagctgcccggagtggctctacctggttccattttacccctcatcagtcagtgtggtttcttgccaaacaacacctaacgttttaccccttattcctgcagggaggcgggccctgtggctgactggacacagagaaaaaaaagaaaaactagcacaaacatagagactatacacggagggagagaggagtccctctttctgcttccttcaagaacttgataaataataacctcaaagtgcaacaatgcacaaatgtctggcacacaggttagtctggagtgacttgttatcacggggctcagcggggcaagggtgtgatctccttttgcatctttctttggaccttgttaaaggaaaaacaaaaaaagagacagctttcctatacacatataaatagtcccttaactagaagggaaaaaacaaacacactgtttcaaatgcatttctaaaagatttaaaatagatccaaatggaaaatcttgactccaaattgtctcttgcccatgtgtctcagaggagaaactactgggatgttgggagaggcctgaccctgaccctaactctaactagaggtgctggtattgggaccttgggaagaggagcgtgcacagtgcagggagccaggagagcttgctggaggtattgaacatggctctcacctgtgatagaaaccagtgtcctcaagtccaaatgcacaggtaaaaaggactttgcaagtgttaagggaactttggaggccagtgttgaggctgcatgaatgagcaagacaggctgggtgtgggccacagggacatacagccaggtcag

SEQ ID NO: 344790 - DNA, 1000 bp, Homo Sapiens
tttttttttttttttttgtgaactctaatagatggtttattggaaacgctcatagcatcttttgaaaagaacttgacaggttttattttaataagacatagtgaagaggaaatggcttaaaagatatcatcaatcttttatttaactaagcactgcccttcattttgaaggaaatgatacaatttcaaatcggaacttccttctcaagaagtgatataagaatgtaacattgatttaacatacgaccttcaacaaaaataaagtttatacaactcactgggaaataaaatgcatgtggaatttatcctgtttgtcaacataattcttcatgagtcacaagtattatagccaagaacaaaacaacaaaaagctgaatcagttgatagttactctgatttaaaaaacatttcacaaataagatgtagctttccaaacaaatccattcgatgaccattatcacaactatattttattctaatttataaaacaaaaaatggttagacaagcacatgatatcaagagtcttcaacacagtggattccattttattaagaaaaaaaatagaaaacaagtagtccttaaattgtcttagctctccatagcatacgttatataaaattaaagttttgcttccaaaaatatgtttccatgtggtcgtggtgttgtccagtgctattagggccaaagcaccaaagacatgagaagtttaaccatcgacttgtcatttttcataaaaactaaacatttccttataggtctggagtaaaatcttctaggcattttagtgctaaaagtcactttaaattaaatgtgaaataaaagctacaaaaagtatgagttctttcaatacaaaaagttgtgtagctgaagttgtgggctcctttgacatacataagcagtttcaataaaatatttgctcaggtaagaaaatagaaatttgtctgctttcatttagcatacgttccagtcgatgtcctgcttatccctgccaggacttctg

SEQ ID NO: 344791 - DNA, 1000 bp, Homo Sapiens; identical to SEQ ID NO: 160999

SEQ ID NO: 344792 - DNA, 1000 bp, Homo Sapiens
aaaccaggaaagggatggggtggataccccattttgccctcccccatcaacacccagtcccagatccaaagcctcagtcttcaagtatggagttcaatgcccgcctccgcttggccaccgcaccctgctgctgttcccaagcctctcgccgctttaggaaggtagtcaaggccacatttcgagccacatggtggccgaaagggtctcttatcagctcctggttctgctccccaagctcagcagcaatttccttccgggccctcaaggctgctccactccagatggcatctagcacacggctgccatggcgactacaggccagagccacatattgtccctttaggttctgcagcacacggcggcgcagcttgcgcgtcacagaggggctggtcaggatggcatcgagcacatgagagccagcgggactttgggcaagggacagaagctgtggtcccgtcaaggcacccagacttcgaagtacaagaccaggagtggagaagtgcagcagatgctggagcagtagagacccaaggactgtcacatcccccaaggctctggctgcggccattgccacctggtgctctgcaggcactgccccctcctcctccgtcagtccatagtacacctcataagccatcaaagtggcaaagagaggcacacaggccacttgccgggatgagggctctgcacagtggaatgcctccaacaagagctgtaggaccttggcttggtaggccccaactctgcgacaggcccccaccagggcaatgactacccctgggtggccctgggccaatacagcttccaagacagggctcagctcctcaaacacaggggacagcagctcaggggtagtgactgcatccagtaagcgctgcaaagggaagttggcaatgggatgtgcagccagggtctgcagctgcccctgcaagtgctcctcaaagaggctctggagtcttgggggctccaacaccagcaggacctgctccaggagtctgga

SEQ ID NO: 344793 - DNA, 1000 bp, Homo Sapiens
tcacagtaactgccagttgaatccaaataacatctgattagtctcttggctcctagcaatctcttctataatgcagtgttgttgccagaccaaatggagcttccgataccgctcacgagataaatgaagggggttgcccctcttcaggccagggtctgtttctccatattcatccaagtaaggagctggataggcacagcctctggctttaccttcaaccaggaccactcggcattctctgatttttaggaaaatgcagactccggctccacagtgaagtgcgtgaaaaatgcaagctccaacctcttccccgttcacaatttcctggcagcaaatgttctgagaacatagtatagccccacagaaaaggcagaggacaggatgctttcgctcatcatctgcagaccgtgggcacctgaaatgagaagcttgattcaggaggcagctatagtcatcaggaagctctatcaaactatttctttttctagggtacctgaccacggtgtttttttgcttcaaacagtttagtaaggcaggatctgcacaccacctctggagcaagggccttacagtatcccaatattcctggaagagcaggaacaaatttgtaggtaaagatagatagctacagagtgcactgtactctccttctgcagaattggtatgcagttcctcaggcggagttaccccaagtaaatagtggaaaaacaatgcagcacagcgaagataaggggtgatgccattcttcagtgagacccacaaataccagccaggaatatcacacccaatggagccacttgtatattgagaaatttctgcaaagaaagaagatgcggaatgagcctcttcactgtcttcttgaacctgagcaaggggtaggcctgtgtctactgtaagtagtatctgaagcatgtgtgccatggtgatcaaatggaagagataaaggtggttataggaagaactaactgaagaaggctgcagatcaacagggtcatcccaa

SEQ ID NO: 344794 - DNA, 1000 bp, Homo Sapiens
agtggaattaagtaaaaattttgctatgttaaatttgaccttttcccaacagaaggcatttccttagctaccagcaaggcctagacacaaacgtctggactgtagtctctgactgccgttcccttgggtccaggcctctggcgggagggcgggaccccttcctctgactgttcccggggtcaggccatggggatgcacaaggccacaccgtgaggcaggagttcgggtggggcagggccgtggactggggcacccaccagtcctggaaaacagggctgggacgctgctctgtggcctcagacaagcttggtgggcgacatgctcaagtgagcaggggccccaggccacgtccaactgtccgcgaggcatgtgagtctgagatggggctggtctcctgtcagaggcacgtgagcctgagatggggctggcctcctgcccggcacactcgtttctggccactctttcagacgtgcattccgggggcagaatgttctgggtaagttcaggccagacactgctgggcgatgactgttacttcccccaggctgtggggaggaggcagcctattcttctgaaaattgtccagaaacttctggattctgcatgtggcccctgtgcatctgaattggccccgctaagtaaatgcaacgtgggtgcacccaacattcacaacacaccttcctgaggtttctgcatcggccacgcctgtgggctccggagctgggtctggggaaaagctggtgagccacagacatgaaatgggggccatggggcaggtgggggtctgggtggagacggtgatgggagagagggttcaccggctgaggggctggtgtggagatgacctggaaagtccctgcgctggggggtgaggcagggtcagggcagagcagctccggggccatccgtccacgcactttctgtgacacatgctgatggacacacagtagtgtgcagggtggcaggtgtccccacagtgggagctgctctcctccaagag

SEQ ID NO: 344795 - DNA, 1000 bp, Homo Sapiens
ttttttttttttttttttttttttttcccttgactttatttatcttcataagtcacaaaatgtgagtgcagagataaatgtctgtgtgcatgtgccctgagcacacagggtggcataactcggcacactcataatgacacagccgttcacccagccacagatagtgacagggcacacatggcgacacccacatgtacggagataaatctcccccaccatgacatgggtagacagaaaacacgccgcagtatactctagtatgtttacacaaacagggagacaggcccgtgcaatgcatgtcaccaacacccacactcagagtgacatctgctggaggtgctcagacacagccacccaccgtgacatgccgagactcacatatgtcacatgacacaggcatgcatgccacattcactgtgactctcagtcctattcattcatcacctttctgggagatacactgaaatgtccaccctttgcaaaatgcacacacacgcgcacgcacacacgcacacacacgaacacacgcgcacacacgcacacacacgcacgcaggtgtacacacacacgagcaactccgagacactcattcaccatgactcgaggtttttctatacgtgggacgaggggcaggttcacactaggctggggggggggtcatttcccgtcttcgttggcaggtgcagccccatcttccaagttgtggctttggctgccacaatgtcctctcatttattgaggtgaggactgtggcattttctgcagcacctccaagattttctgtacctttgtgtcaacgttttttatgcctgctaatgtcgtctctaatctatcaatcttgctcctgaccatggtgatgctctgctgaacggaatcccagcctctcttctgtctctcttcgcatgcttgtacggagtttgagacattccaaagctcccttttaaagcccagcagctccttggacatctcagcattcttcaccatgatgaaggctgacagg

SEQ ID NO: 344796 - DNA, 1000 bp, Homo Sapiens
tttttttttttttttttttttttttttgggagggagtctcgctctattgcttaggctggaatgcagtggtgcgatcttggttcactgcaacctccacctcccgggttcaagcaattctcctgctttggcctcctgagtagctgggattacaggcacatgcaccaaccctggctaatttttctgtatttttagtagagacagggtttcaccatgttggccaggctggtctcgaactcctgacctcaagtgatccacccacctcagcctcccaaagtgctgagattacaggtgtgagccactgcactggcctaagattttcattttaacagggaactgttagaacagaaaagaagcttcccaagaggcactcattttaaaaataaattatagcttaaattattactatgtggattatatcagcaaaggcagaaagaattaatgttttcctcctttcatgaaccttgtaaggctagtgttgagtggcttacaaatgtcatataatggactgtaaatcatctgccatattgatcaatcatgtttatttaaggttttcttaacattagagatttttaatgggagtataaaattagtaaacaaccatttcattttttctctcttcctattctagccacataagccagtttaatccatgacacagatttcagctgtaatttgcaaaacaatccaagagctaccacagtccccaaaactacagaaaactgccatccacaaataaactaccaaggtaaatgtaaatacagcgtggttctaattttctttcacacaatcccagacaaccccaaataactttataaataccttatgaaaaaaagcaatttaaaaacctatcaaatctatttaaaatatataaatgcagacctctcaaatttccttcaatcaggccagaaattatcacaaaaattataatcacagttacaaacagaatgagtggaatgtttgtaagtttaggacaaccaaaaaagccccatgtaacttttta

SEQ ID NO: 344797 - DNA, 1000 bp, Homo Sapiens; identical to SEQ ID NO: 161000

SEQ ID NO: 344798 - DNA, 885 bp, Homo Sapiens
ccaaagtgaagaggggaataagaagttacctgttggtgtccttaaacccctcacgtatcacaatatagcaataaattgtaactgtccatctctgtgatacttgtgttctgaaatgccattgcattatttttttcaagtcaatgaacattcatattctaaagtacaaaaagaacaaaacattatataaagtccccctttctttactggcataaaaaatttgagatttccaactgctaaattgtctatccctaggaagtaataacatttttcaagtttccactttattgggaataatcttagtcatgatctgcagaagttggtcctggacaatttgaagataggtcttctttatcttcataggctgttccacaccaaatacaatatagatgttcttctcttaaataactagtcaatatttgtaatttttccagtacgcttaaatcttcactcttatattcatcttcatcctgttctttttcttcttcatcttcttcagtctcctcttcaagcctcaaccagtaccatgcttccctgggaacctgaatatttttctggacatccagttgttgacaggctcgctggcttcttctgagatctccttctagcttcatttcatcttgcttatttttaagtcgcattcgaaactgttctgcagctttttcttcagcttggtttttcatgtgaatcttttttctgtagctttccaatttttcctctgctttccgttttaatgatgcctcatgaccaatgccacttttcctggacattaatgaaggaatcagacatatagtcctcttcttctgccatgttcaacttcatatggctatagtatctgacagctctctgctcgccccggttcagcgccgtagagcgcgcgctgcgcat

SEQ ID NO: 344799 - DNA, 1000 bp, Homo Sapiens
ttattaaacataatttttatttcatccaaggcaaagctaaatacaattctacaatgcaaaacttgttgtagaggccagactgattatatccgttctgtgctcgaacacaagtcagtgctggctgtgtgggcatctgcgcctcccagaggcactcgcacacctgaggcctcccaaggcctgttgttgcatcatttgatctatagttacataggaaaattgactatgggtattgttgtcatccaagccagaggaataaaccatgcataagatagtcaaaagcactgcatatcaggtgggaggtgggagggtagggactccaacctgggacaaagtaaagtaaagcaagttataggattttcccgagaagtccccgctcctggaactccctactgccagccctctgatggcagctgtctgtgacactgagatgaagtcatggagtgacggaatgcaggagcacggctggtcttctctgcctttgattctttctcagtctccagatgcctcaacaggcatagctcaggccaagaaagacggctcctcaaatgtccagcatctgcccatcatgcatcaccccttacatgcagagcccatccactccacagttacgctgccatgcacccacactgcctgcacacgcacactccacacaagcacaccccacctcctgccatctcacaagcatgctctcaagccctcgctccacaagagctctgatcggcctgccatatgtagtctgagccccatcggctgctctccccaggcctctctaacatcaggggtttattcgggctgccttctgttcaattacgacatggggagaagcccagaacctggaatgctgatttcatattttgtagttgatgaggagctcagaactttgtctttagtctcgctgacatcactcagcccagctgcatgtggccaggtctctcaagatcgactttgtaagtggctctctctagcccacaagccctggaagccaccatcagagatttgc

SEQ ID NO: 344800 - DNA, 1000 bp, Homo Sapiens
ttttttttttttttttgctaaaaatttaccaaaatagtttgaacacataaaaatatttttaaaaaaacaaaaccaaaaacccagcataaatttagttgtataggcattggttagaggacactgtcttcactaaggattatattcaacaactttctcttgagttgttactaaaattctgattctgaaccttatagcttataatggtgccaactattagaaatgggaaaatctaattcagtccaatgtaacatgtattatgatataatagatgaagggtatgtctacactataataaaaaataaacatatttttggttatttaaagaccatcttcctaacctgtaactaaaataactgtatttgatttaaacttatttaagtgcagtgaattatggaaagctaacttaaaggtttgaataatcaattatgagtaaggaacacctgttgacagccccgtgacccttcagaaccaggcatttgctgaaaaaaagaaatcactagcattgaatatagcccttagtcacgtgagagattaacttcatgagcaacccagcatgtagaggatgaggtggactttcccagccacccactccttgaggggacagtagtattcatagtgaaactgctcaaactctggtgtctggcggatttcgcataagaaggagagatcaatacctgactccaaaaggaggaggagcaggggaaatacaaagagcagcagtcccaggcccaccacaaggagcctggaaaaactcttgaccagtgggttcacccgaatatggccagtcagaatgtcgtagctccacgacaaagcacggcgagcctccttcagctcctcttcttcagcaatcaaaaaggcgttttcatctgcttccagatcctcaaatgaatctgtgtcttctctttccaactcaagcctagaaggacagtcaaagagcatgtcaatctcatcgtcatccacaggggtggggagcaggctggcacttgggttgtacactagt

SEQ ID NO: 344801 - DNA, 891 bp, Homo Sapiens
gaagaataaattgatatttatttagtactcagtgtcagccaagcacttaaacactttacattcattaccccatggcatcctcacagccttctgaggtagaaagactcactgaaggttcagtaaagtggggaggaaggcacgacttgaactcaggtctgtctgactccagatgtcttagaaaggtagaatctttcacttggaagacagtatggttaagatcatgttctccgggccgggcacagtggctcacacctgtaatcccagcactttgggaggctgaggcaggaggattgcttgagcccagcagttcaagaccagcctgggcaaaatagtgggaccccatctctggttgatcatgccaggtgggttgttgattggggtcctcgatacggaagggtctgggagtaccagtcttcttcatttctcttcccataccctccgggcggtgacctgacccggggcacagaatgacgtgggccaagactacggctacgccctcccgctggccgccgctacgactaggcctagtcgaagctggggtctttcagcggtttcccgggtttagttcacccgctcaccgaggccgaaagctgcggagtggtctcagacactgaagagtgggtttttcgcgtgagcatcttgcgggcgaacgagatggggttggtgacggtagtggcttatttgggcggagtgaagcgcgcgggctgcgactgcgcggctttccggccgtttgcctgtggtggtttctctcctttcgctgtccactgggtgtcccgaaacaaggattcctgaaaaaagaggcccggagctgaacacagatttaaatgagccacagtagtgaccgccgtctgctgatatgcgccactgctccgcattttaactttggagctt

SEQ ID NO: 344802 - DNA, 1000 bp, Homo Sapiens; identical to SEQ ID NO: 158522

SEQ ID NO: 344803 - DNA, 1000 bp, Homo Sapiens
tttttttttttttttttttttttttttttcagggaagagctttattgcttccatgggggtggcctgggacggctgccacagcttgggtaagctccttgggcctcacttccctttggtccaggctaaaggcagaacccaaccacctggcagtcttgttgctgaaacctagaacatgtggcaagttggtgagtccgggcctgcggtagtcctatggatcagctgcagctgtggaggggagctcttcccagcaggcggagctgggcgtcaccctcctgagctttaaagttctttctgctatagccctggggcggtcttgttggctccgaagggatggctccagggtttccccatgggacagctagggctggtgagtgggaataccccgccttctccccaagaaaggccaaacagtgtcatgagctggagggggctggcttgagatcctgcccaccatcctgtagccccacagcaaggtacaggctggtcctggcactcctgccccacagggagctaacaggtaacactgcctgatgggccctctagtgggcctcttcctgcatggcaagtgaacccaacttgacatctccaaccttatttaaaaataaattatccctaccctcccccctacccaaattcacaaaatgataatacaccaaacactgattggagaagtgattccggcagcagccttgctgcccagtgtcccaccacctgcatgctgggcctgctgggcacagccaggagcctgctggccctctggcatcaaggacccatgctgaatgaggctgagtgctggtctctgagactggctgctgagcaggcacagctctggctgctccaccaaggccttgctgcccctggggcccttggcaccgtccttctctgggtctgaagactcctgtgtaggtggtgctggctgctgctcctggtggtgcctgggcctctatggccatgtgctgggcccactcagatgccactgcttagatcagtgatgacgcga

SEQ ID NO: 344804 - DNA, 1000 bp, Homo Sapiens
tagttgttttctttattatgattatgccagatgtgactgcctttgcttccaggaaagtccctaaaacataagctatgtgcaacaagggaagtgggttagggtgggaagctgagcgtgcaagtcagacaaagcctgatgtaggcagctcctatcagaggcatgtggcctttgtggctggggccctcaaaagacagccactgccagaaatctggagactgaattgtctgggtctccagaagagagtccaaccccaccacacatctgctcctgtccaaggtgctgaaatccaccccacataggctcctcctaatcatgtacagctgttgagtcacctgcaccctaccttctggtcctccattcaatgccacaaatatacactgagcatctactatatatagggagtggaagtaaaaaggatttagatatgtctccaacccaagttgctcacagccatacggaaggaattcaagcatacacacctgccttagggtaggtgaggacaaaggctaggggattcattttgctatttattgagtttcatgacacccacttcttgcctttacccttgctttttcctcttctgcaaccttggtaccctccaaggttgtgcctctcatacctttcttgatctgaccacagtagatgagttttccccagggcatctctttctgtactcactaacgtcacagagtcaggaggactaacaatcaatttcagggagggagggagtgtaggatataaacagagaaatcaaagggttaggaggtctctgagaaatgagggagccacctagacaggggtgagctccttatcatatttctgcatgccctcgtcagggagcaggacctccactgtgaagctgaccttcttggcgtggacaaagctataggtgttgtcgaagcgtaggacatagacgccggcctctgagcaggtgaggttcccatcctcgggcaccatgtgggcgttatagcgctggctgggtagaacatctgtcatctcc

SEQ ID NO: 344805 - DNA, 1000 bp, Homo Sapiens
gccaatctgctcaaacacccagttggaacaggaatgcctcgtggcactggctttaggagtttaatctagatggtttgctgtttctagcagcagagcacctgttcagactctacgtatatgcacccatgaatggtgcagctgccaagagaaccaaagctaaatgttggcaggatcacagcaggtgtggaggggaggtcactgggaattccctggagactcagtcgttacccactcaactggaaggctgagcatggctttttcctctgatggttacccatgccaggccccacctctccatgtccaatgttctttctttatttgtttgtttgtttgtttgtttgtttagagacggagtctggctctgttgcccaggctggagtgcagtggcacgatctcagctcactacaacctccgcctcctgggtacaagcgattctcctgcctcagcctcctgagtagctgggattacaggtgcacgccaccatgcccggctaatttttgtatttttagtagagacagggtttcaccatgttgcccaggctggtcccgaactcctgatctcaggtgatctgcccaactcagcctcccaaactgctgggattataggcgtgagccaccacgcccagtccatttccaattttccatccagtggtggcagaacaaacttggatgggccccagtgctctgctggaaccaggaccctcacccagctgcctccagctgggcctgcccacccctgctgacctcctacatgcagagaacagggcttctctgctcttcaggcctgaagctgtgatgtccacaggacctaggaaccacgcacaccccctgaagctggaacaccaggcatgggtgagtcctgggtggctggatcttgtcaagatgggtgaaagggcagcttctgcaagcaggacccatcctcagtggactggatcatcttcagcgttctcattctcagccgcattctctgggaacagggaaagaggttcctgtctgaatct

SEQ ID NO: 344806 - DNA, 1000 bp, Homo Sapiens
ggagtcaaaccctttattacttggtaactcagtacagctaatttacaaagcacaaaatacaatgatattgagcaaaatgtttacagaagttcatcaaatcttaaatatcttcacttaagctatataattaattgacaaatactgaacacaaaacataaagaagaaatttttgttattgaaggagacaaaattgtaaatgttcttcaaaaaatatttaagcaaaaaagaatattaacaggatcaccactgatacaacaatccaattttcagaaattactcttgccctttacatttaatttttagccattgaaagcattagcataactcataaaattagaattgtaccatgtgttatattagaagaaaataacacagattttgttattaacataaattatttgaaattattattacagtaccactctgtatactacatagtgaagcagaagtgaaacccaataattttaatagaaatttttagtagctaaagtacgcttcagcactaactctggagttactactgcagttcttgttcttatcaaagtaccaacaatacttccagaaaaaaaccttaggttccaaggagaagcaggcttaatatttaaataaagagtaatgaaaaaagcatcaaattctattaagattaataaaagttctacctgaccacggctcgcaaaatcaaaaccaaaataaataatgattagttaatagcacacacaaaacccaaaatattcagtatttcaatatttcaataaatataatcaaataatgtaaacattactgctttatcaataaaagaaagcagtcttcatgttttaagcaataatgtaaatttatgccctcatgaacacagaacagtaaaataatttaaggaattaatgactagctcaaaaaaaagtaaactgtgttgtattttgtgaggaagatgaaaaaccttttaaagaagaagaaggtattgaattttgaccctgtccaaatgaaaatggaaaactaaaatcat

SEQ ID NO: 344807 - DNA, 1000 bp, Homo Sapiens
tttttttttttttttttttttttttttttttttttttttttttttttttttttttttttttttttttttttttttttgccgtcatctctttatttgctgccagcagagtccaccaagcctgccgggcagccctgctgcccaccacggtggggtccaggcccagcccaccaccccgtggctgtctcctccaggctggaggtgaggggtgaactggactgagctcagggttagggttcccccagacccttctgggattcctacttcctgttccctgccgagaggggcaccccaaatcctccagagggctgggatggattagagttgagaatgggacaccctcaaaacccagggggtccttgcaagtccctggcgggcatccctgctgccctcacccgaccccacccccgggagctgggtgaggatggagggtgggggtccagagaagagtgaggggcagtgggggcttttccccaaggccctggggggcatcctcgtgcatccccacagttcccttgcacaggtgcaggaggctgtcaggagtcagggccgggcatcacggtcccagcgtcgcaggcgggtcggccacagcaggaggctacagagacacagggcagcggccacgcccacgccgcccgtcacagccaccatcgcccagtggtaaaagctcacgcaggccctgcagcagagctctgaggggcaagggtgcaggctctggatggccatgactgccagcccattggccaccttatccaagaagctcatggagccgtacacgaacgctccgctgttcgtgtggggaccgatgaggtcggccgtcatggccagcgaggtgacgaggatggtggcacagccagcacccagcagcacagccgctgcgtacacggccacacccagtccctccgccagcgccacccaggcggcaaaggccaggatcaccaggaggcctgagaagtaggtcatgttcctcccaatgcacttgttgatgggcttcatgaggaag

SEQ ID NO: 344808 - DNA, 1000 bp, Homo Sapiens
atcaggttaagtggtttataaggcatattggaacgagttaaaaatcatttatatccatttaaaagtttattcttttggatgaaggggttcccgaatgcctcagtcatcatgtgtgttgtaaatcagttgaatagtttgttaaagtataatttatttggcttaggatggagccgcagaaattggaaggaattgtggtcatcccagggttgaagggtgtcttctgagctgggatgggaacagcagctgtcacaacacattcagaattccaagtagacaaggatgccaaaggcaggcagcagtaagccgagaagacttggggatagggtgggtgcacctgaaattttgacttgagacaccactccatctcctccatcactgtgcgcgcgaacctccacaacgtattctccatctctggggattgggacttctatggagtgtttgtgagttgaatacagcttgccatcatgctggccatcaggtctgtagagtaccttatatcccgtcactgtagattcatttgatagtgcaacgacatgatcccaggtgattatatagcgtgaaccagaccttactgaactgatgatccttggaggctggctaggaggtgctttcttggtgaaagcctcaatcatgtcacttggaggtccacaccctgcactattgcaggccccgacttctataaaatactgggtgtctggcagaaggttctcgagcctggccgagtactcttggctggtgacttgaactctgtttgcagcttcttctttgtcatgggcagcccaataccgaatctgatagctttccactattttttctaaaacatgttcccaatgaacagatatctcagaagatgataagacttttacacctacttctgttggggcttcactgggagcgtcttgtgctgaattaatgactgctactaggctgtaaggtccatctcctttgttgttgaaggccttgactttaacttgaaatgcagtggaagggctcatggttt

SEQ ID NO: 344809 - DNA, 1000 bp, Homo Sapiens
tttttttttttttttttttttccagaaaacacacgtttacccgtacgttcctgatacggccccggcagtcacaactccaaggccccttcaccaatgaaccccaggctctcggctgccccaaccagggcggccagcctgagaagtgtggcaccaaaaggtggtaggggcggctggggagggaggaccaggactggcacaaggtcatgatgctggtgagttgggggccatcagccccagggacaaaggccacttgacagacctggaggtggggtgagcccccaaatgccatgaattactcagggagtggagcctgagatggctccaagtgtcgccagaatggggtgggaaggaaccttaggtccacccagcacgtggcaggaggcaggatccataaattaaatgtttttgtggagtgtgatggcttgggatgggacatcccggaggcctcgcaacggcatggcggctggcaggacgacggaagctactcagtcctccaggacggatgggcgaacacgatgggcctcttcttggcccagcgggagaagaccgccttctcagtgatgaagcggtgggcgcttcggggcgcctgctcgtgtgccaggtacatctgacactcatctagccggcccttctcaaagtagtggtaaggcactgaggggtggctcttctccctgcagtagctgtcgctgaccatcccatagaccacgatctcctcacacagctccagcgcgaggatcatggtgaaccagccggtgctgaggaaggagcccgactgcctccggttcttgcccgtctcgtcctggaagatctggtcgcagtaggccatcatgcgctccgtgaaggtgtacacctgcaggccggggtacatcctggtgagctgcagcagcgtgcggtaggtgcggccgccgagcacccggtccatgtgcctgccctggccccacaccatgtagagcgtgtctcgggccttctggaagtagtgtgaatagttgcgcagcagcag

SEQ ID NO: 344810 - DNA, 1000 bp, Homo Sapiens
ttttttttttttttttttttaacattttaaacaattattttattaaacgatcatcttttacatgtcatcagaccttacccctgaagtgcaaaaaacagtttgaggtattaaaactgaagaaacatttgcacatattttgtaaggtttttcacactataataactgtaaaattcagtataactaaatactccatataactgcagatttataagaacaaagttgtaaaaaacagacctggtttatctcattataactctgattcttccatttatgatgaaagggtggcaaaaaataatgtgatacttacgttgcttcccaagtgacatgtgtccattattcaattctataaaatggagtatagaattgaaaaggccaacagctgaaacagcagccgttccaaaagcataaaaatcaaattgacaaaacagcttaaatgatataatgtcctattcacagaacttaatcgtagaatcaatggcaattcacttaaagtatctgaaatagatttaccagcatatttcaatactatccatgtatatacagggtcacattagtagtatggtcagttaatcatgttaacacagataaagctcagaatagtcacttcaaagttattttaaagtaacacagggaagagtagattggctttttatgtgatttaaactttttttgtaaagaaattatccagagactttccagatcccactttacttggcaactataccttgaaataaaaagttgatgcaattatatagctaattattataatataaacacttcctcctgaaatattcaggcaaattggagaaaaagtgtttttcaacttgaggattgatttaattattaactcacattgtagacatttcctttgaagcaattgcttgatgatttgcatgcagtatagtaaattaagtccggactaatgggtcacaaatgttgaatagaaattagtgattacagcaattgcttatagttaacatggcaattctagtaacttcac

SEQ ID NO: 344811 - DNA, 1000 bp, Homo Sapiens
tttttttttttttttttttttttttttttttttttttttttttttttttattaagcaacatgtttattggcgttgatgcagagacttacacaagtcttcttttttaagagaaaaattacaaggtattcaagttacgatttttagataatctctacatttgagacatcaaattataaaaggtcagtgttaccccatatgacatttgttttaaaagtttaaaggttaccaggtttgcagcttttaaagatatgaatgtcctgggccttacccctttggtgtctgagctagcagctgcagagaggccctctgaatacacagtatattttgctatcccttcaagttattaaataccagaaacacaaaaggttttccataagaaattgtgtgattggactacaggaattaaaaccgaacaacctcagtcttgggagaatgtattcaaacgtgcaatctctgaagtccctgtctactgtccaggtgtaaagcatggatttttataaattaataatgcccagacctctgccaatgactgtggcgtcaggcagcaggttggctcaggcttgtggggtggcttttgggacaagtgaattatgagtcagtaggcctgcatgaagagggcagcagaaaggtgagtcacatctgggaacactcaacaggctatggagacaagaaccgctattacaagcccggtaataagtagcacaggccagttagagcatgttcagtgcaaatcagaagcttctgtaaacacaatcaggcaggattagagaggcaatgagcggtaacactaaaagcaaaggagcttgtgcaatgaattagggaaagaacaatcaggctagaggtttagggaaacatgggatttcaaacaacagggaaaagtcaaatggaatgtttccaaagggacctaaggtgactgtggacagggcgcagcgccaggaagcgccaccagggggcagcacaggcctccccagcaatcccagacaccctgaggcctctgcac

SEQ ID NO: 344812 - DNA, 1000 bp, Homo Sapiens
tttttttttttttttttcttttttttttttttttttttttttttttttttttttttttttttttttttttttatttttgggtcagaggcagtttattttaaatgtgatttcatttacatttataagcagcttttcttgacaggaattttgattaaattgccttcagttctaaaacaaacctctgttgctttcagacttaatgtgctctgtccccaacaaaacatatgaaaatataatttaaagcacagttttcacagacacagtacaatacattcactatacacagtataacaaaatattcccatccttacctgtttagtaatactgtcacaatgaataagtaaatagaaattggaatttatctttgaaagcattgaaagaaatttaacatgcacaatgactattttatgactgtttagctgttgaactactgatccagcctgcagtttcttgcactagaaagagcgaagctaaataataattgctggcctaaaaaattttttttggtcaattgtaggtagatatgaaatagccaagtggggccttcttatgcaccaactagttgcgtctcatgtctggatcacccttttaaacataggataacactgtatattcaggaccaagaccatacttcagatctgaggaaatttttagagggcagtgtttttataaatactttgaatccctcataatgaaggattttagaacttatgaatatagaggtttactcatctaacaaacagaactgtcatcctttcaaaatgtctgaaaattgaggagggacccctgcttcccagttatatgtgatgtaagacttttcatcaaatgggaacatgggaagaaactttataagcaatttgagtttgttttatgggcagttagctatctcaaagcattttttattgcattattaggcaactggtaaactctcgtgtttaaggaatagcacttgggagaaaagaacactcaaggcatgatggtactgtcggtgaggaaaaac

SEQ ID NO: 344813 - DNA, 1000 bp, Homo Sapiens; identical to SEQ ID NO: 161004

SEQ ID NO: 344814 - DNA, 1000 bp, Homo Sapiens
tttttttttttttttaaaattgatccatacttctttaatctgtaaacaaaaaagagagcaaatgttttaagaaaataaagggaccgatttagaagttcaaaagaggtaaaaataaaattccaaaaaagaaccactgttactatccagtggacatacaagaagctattcctccctcagcaaaagatgaacatgcattttaagatacattttactcccaaatataagctttgcttttccagtatttgtttacgtatttgtttaataagaacaaagtttaatttgtcaagttaaacaaaatttaacataactttggaagattcatcttacctcctgactaattttctagcaaaagaaaagaactgcatgacagctgcatttatacgtgctacatacaagaaaaaggtacggaagttctgaaacagaactacaacacagagcagcatgaaaatcattttgtgagaaactgcaaatcattactgctgtattatgggagagcatcataaattcacatctccagtttctgcaaaacatggactgataggtgaatatttctgcaataaggcaatcaaatgtacaatccctgcacgtgttcaccaaggagtcacagtgtgtgtgagagttcattaaataaagaaacagaggtccaaatatcaaatataggcaaaaagtagactctctattctttctaacgcggaaaagactcaacaactacatggtatactcataaaaggccaccatgtcggggcacacttgccacgcagcccccctcactccgcctcctccgggctatctgtcaggtggcctttactctgccgtcggatgctcaccagcctccctgccgcgcgcaggctccacctggagctgttggcagagctggccaggctggtgtacttggtcgagcccttggcgtcatcctcccagcctgaccaggatgggtggccacccacggtgtcctcagggtcagccgatatgtcttcaagagcaagttttggaggctccc

SEQ ID NO: 344815 - DNA, 1000 bp, Homo Sapiens
ttttttcacatacttgaataaatcaaatctttaattgagaacctgttgatgatacctgataaagcctttcccaccccacctgtagcttgggaaccagtaggagcactggagggggtgcctcccaccccatccctctttcttcctctccctgatcccttagcggatccagcagacctctttctgtttatggaggcagcagggaaatcaagggctggatttggtgtaggctgtggtctccgtcttggcattgtggagagagggcttagcaccttctgatgcccctgcccagcactgaggtgcctggcctcactgcagtgtgctagacttaagaggtgttattttttattcggccacaagatggcaaggccagtgtgctagggaatggtaagccacaaaatgaaatagagatctgagagctaggctgggtgccgtggctcacacctgtaatcccagcactttgggaggccaaggtgggtggatcacctgaggtcaggagttcgacaccagcctggccaatgtggtgaaaccccatgtctactaaaaatacaaaaaaattagccaggcatggtggtgtacgcctgtaatcccagctattctggaggctgaggcaggagaattgtttgaatccaggagatggaggttgcagtgagctgagatcgtgccattgcactccagcatgggcaacagggcaagactccgtctcaaaaaaaagaaaaagagctggggctgttgtcctcaatgggggacatttgaggacctagactgtccgaagtctttctctttgctctggaggtcacatagagcctggaccatccaagatctgctgctacggtaagacatcatctcagctttcctttcccttctaggccacagtcctaccttctgaggtatggtggtggtctcaacgagacttgtagattttctgaaaatgactttctcgttgactctaggggttgtttctaccttgtgggtggggcctggttaatggtggggatgtaga

SEQ ID NO: 344816 - DNA, 1000 bp, Homo Sapiens
tttttttttttttttttatttttcttttacatttatttaaaatgattaaaaatagtttatgacagttttagaaaatggaatggattaaaggctaaaaatgtttagattccatttaagtaggggtgtgtgtgtgtgtgtgtgtgtgtgtgtgtatgtaactaaaaacacaggttttttcacaaaatttaattaagctcatgctgaaactcttatagggaaaatagtaattgagcatcagacatcaccactcctgaaaaaaaccttctacaagaattgaaaagtgttgcaggacctaatactgaaataggaaatatggactatcttcaaattgcacaaatgatgcatgaatccacatctgagacccgcaactccgaggtacctaatgtgaatgattaaagatattttacaaaccggggagccctttcaagtgctttccactttcaaccttctctctttgaagaccccaattcataatggtgagcataaaacatgcatactgggaatttttatgggccccatatatacattccagactgtacatgaatgtcttgatctttggttctgatatttatggcaaagtctaaatgttatatgaacattaaccttagtttactcaaactataccaatatgcccaaaccatccttttttctctccccacaagtatttctaaaagagaagcaaaaagctagtatacttcttggatgcctaaggatttaagatttcctaccctgatgaatagaaaaagtataaaccaaggaatgcaatgttggtgccttaggaactagtacttacagagtatcaaagactaaaaatactacaaaaaggctcaacgcctgataatcactatttctgtctcctatgcgccaaaacatatcacaaccatatgctttcctaggaaaaagcatcccaagatttcccccagatggttttaacatcagtcattttgcacttaacatttcaaaatgcagccttattttcttcaggtaataataattttat

SEQ ID NO: 344817 - DNA, 1000 bp, Homo Sapiens; identical to SEQ ID NO: 161006

SEQ ID NO: 344818 - DNA, 819 bp, Homo Sapiens
ttttttttttttttttttttcacacacagacacagaatttatttctggacgcattctgcaggctggaggtcccggcaggcacagggctcacaccttgggttttgcaaacacctcccagccctccagccggcccatcttgaccagggaggccgctatgccaaagtacacgcaggcggcggcgccaatcccgtagttgtgcgtgcgtgctcccagagtcaggcctccggcgcagccaccgaggaagtagttcagggggtcgtcgggcttctcgcggacatgggcgctgatgcaggtggtgaggccaaacacggccccgacagcagctgcagtgaacgtgtattgtccaaccttagccactccttcaaggaaggtgcccggaggattgagtgtgactctgtaggcagcggcggtcaggccagcgacgctggcaatactggtggtgctgtaggctttgcggtggcaatcggtgccatcggggatatcccagtactgacgaaaaaccttcggcgccatagcccgcaatctcgatcccgcaccacggaccccgccagctcgggaagcgcaagggcagccgcggctggctatcgcgagacttctcggtctgcgcgcgcaacctttcgggctagcgggccggcaacaagtgagcaactttattgataggcgcggacatggacatggatcgcgcgcacgcgccggggaccggcctggaggaagagagtagcacgtgcatccccaggccgattcctagagggtgaaactgaggacgactgcgatcagtgcagacagatttcgctagtcccagctcagggagtcctaggt

SEQ ID NO: 344819 - DNA, 1000 bp, Homo Sapiens
tttcggtagaagaacttttattgaacagtaagattcaagatttcaccaggtgagagggggaattgaaaattagtagaaaaattccaaggggaccagttagccacaacaaagaatggggttcagggaacttcttagggatgtatcttcccctcaatacaggtagaggagcagcatcagaagcagggcgttggagagaggcatagaagagaatcaccttctcctggcccacgcaagctacctggtgtaccttcaagttcaggccagctgctgttcctgcccgctcttggagatgaaaaggtttcccatgcccccacctcctcccgagttaattctctccaggtgcttctcttgatgtaaacccagggtgctattagcaggctccttcttgttctcttgctcaaatcctttccaacctttccaacctgtggagctctgctgtttctaatttctaacccccatcttgtttctttcccccaatattgaattctgccataatcttcagatcaactctagttgtctccattttttttctgaatgctaaaaccttccagccgtcttctcttccactccctgaccactcacgagtcacctgcatttcttaccccagtcgtcatccttgtttccatgaacgatcctctccagggcttcctgccagaaaagtattttgcaagtttcatttgaatttctacacagtataattctgaacatgtaaataatatataaagtcaacctatgtttggagctaagagtgacaacaatctctcacactacagatccgtcccaaattggtaatgccctaaaaatgctaataaaaataaggtgcttgtgaaatactcaaatcccttcagttagtacaaaaacaactggtgacctaaaaattcaaggaatggcccagagtaaagggaaatgtaatgttgactctggtttacagaaagtgaatctgagtcatggcagatcctgaaatttcacatgaactcattctgcctgtaaatgccccagc

SEQ ID NO: 344820 - DNA, 1000 bp, Homo Sapiens
ttttatgcaatgtataaatcgtgttgcaatacctttatttgaaggctttttcagaatacactgcctttcatgaagtattttgagaagggagaggtggaggagaggcacggaaaagctcactcgtctactccatcagcgcatgcacagcaacactgactttcacctaaatgatgtatttgaagctgaaagtgctgtcacaggacaggcgtttgcctttgcatctaccgcacaaatcttgacggtggggccgtttagggtccacgtggcgaagttttactgggcaggaacatctcgtttgtttacaactttgacaggtgatatcctccactcggtaagggttataagacttctgacaagttctgcaaaactgtttgaagtaaaccttgttagttccctgtacacaccacacataagcactctcccagcggatgttgcagtccttgcagtggtaatagccatatttctgctctaagaactggaagcgcagccgctccttgcccagctccgggctccgtggcgacggcccctctcccgcgacggccgcctcccgtccgtcgccgccgtctcgggccctccccgccgacggaggttgccccgggctccttagcgccgaccgcggagccgcctcgccctcctgggcctctcgcggcggcagctcgggaccgtcggccggctgctcccagctcgctcggactgcggcctgggcctcgccgtcgtcgtcggactgcggccgccggggcgccttcttcgtccacacctccccctcctctgggccttgaagccgcgcgggcggcggccccctctctccgtccgacgccccggacctctgctcgcccgccgcgggcccgggcccctccaggaaggcggtgagacggcgcaaggccaggggcgagtacacggcgacggtgcgcgggaagcgcatgggccgcggggcgccgttctgggggctgccctgctccaggcctcgacgggatggctgctgggagaaagagccgccacc

SEQ ID NO: 344821 - DNA, 1000 bp, Homo Sapiens
caatctaacatttatttatttcaggttttttttttttttggcaactataaattacattcactagtacacctggaattcttcatagtgtgttcaactaaagaataagcaaacacagcatagatcagtttaaaagaaatcatggtacttcttagagcaatttgcaaaaggggaaaaaagtcttaggctcactccttggaaataaatatcaagtaaccataaaaatattcagccatttttcagttattcggggagttcaggcatggtcccacgcagagcatcagagttcctctttgaaataacccagctttgccaatgacatctcttttctcaactgcataacctcccaaaacatctgatcaacatcctgctgtttcacgagtccctgctgaatgtatcgaatgtatgtaaaaaagttacatacagaagtgatcctgtatctgcaaaaaggagaaatataataatagttgcttgagtcccctaatttaattctgtgtttacaggacttactctggccagtgagagcacatttttttggtcctccgcattcaactgcagaagctttcacaaaccggataggttgtaatcccactggttcaatgcttagagtattgttttccacagcctccagaacagctgaagccaactcactttttgagaatgttaaacatggaaagatatcttcctggtagattttgtctaagaaaggacacgtcctgtccattgtgggctcatccttccacaatcggaattcattatacaaggataagtcagcctctttgcagtcttttacaattggctgtatcacactgaggtcctgatgactgccactcatagcactgcttgtgcttttatttcttgtatgcccctttttaaaaggtgtctttccacctggcaaaggctcctgcgtaggtgatgttggagaactggacaatacaagtgtcttcaatgcagctacttcagcttgaagtacatcaatttttccttgtgcttcttttagctg

SEQ ID NO: 344822 - DNA, 1000 bp, Homo Sapiens
caatctaacatttatttatttcaggttttttttttttttggcaactataaattacattcactagtacacctggaattcttcatagtgtgttcaactaaagaataagcaaacacagcatagatcagtttaaaagaaatcatggtacttcttagagcaatttgcaaaaggggaaaaaagtcttaggctcactccttggaaataaatatcaagtaaccataaaaatattcagccatttttcagttattcggggagttcaggcatggtcccacgcagagcatcagagttcctttttgaaataacccagctttgccaatgacatctcttttttcaactgcataacctcccaaacatctgatcaacatcctgctgtttcacgagtccctgctgaatgtatcgaatgtatgtaaaaaagttacatacagaagtgatcctgtatctgcaaaaaggagaaatataataatagttgcttgagtcccctaatttaattctgtgtttacaggacttactctggccagtgagagcacattttctctttgcagtctttgacaattggctgtatcacactgaggtcctgatgactgccactcatagcactgcttgtgcttttatttcttgtatgcccctttttaaaaggtgtctttccacctggcaaaggctcctgcgtaggtgatgttggagaactggacaatacaagtgtcttcaatgcagctacttcagcttgaagtacatcaatttttccttgtgcttcttttagctgtttttctgctgttgcctgcttgatatttgcttctctcaccattttatgagcttcctcaaatagactagctgtgagttcttccaattcctgtccaagttgatctcgcacttttgaaagcctctcacattcttcatcttttaacttcagttccctctgagcttttgcgagttcttcttttaatcgttcatagcccttttctctaacttccaaaacagatgggcttcgtaaacgagacagactatc

SEQ ID NO: 344823 - DNA, 1000 bp, Homo Sapiens; identical to SEQ ID NO: 246440

SEQ ID NO: 344824 - DNA, 1000 bp, Homo Sapiens
ttttttcttttttttaaatcatctttaatgtatttttaataatttttttgcctcatttaccagataaatcatctaaataaatagatgctatacagtctcttaccaatgtcagtacaaaaataaaaccgcgctctacatccactctgactctcccagcacacacacactcagcaaaggcatgtgcttggaatcaactcgtgcccccgacccctcccagatacattcatttagtctgaacaaagctcgaagctcattctgtgcaaaggaagcgctcttgtgctgagacctggtggccgcagctggccacttcgaaagcaaaagctaaaccacctcacagaagcacagcgcctgcccccagaacaaggggacaggaggagcttggcaacgaggtcatcacccgaacagcagtgacagtcctgcattccaggcggctgtgccaggggtgggggtacctcctccgcaccccccaccacaaaaggaaaagtgcccacgggtctctacattcaaagcgggtgggggctgggggaaagaaaggcagatgggcaaatgctttctaaaccctccccccacccccaagagtactggccttttaagagggctgcgggggtggaggtcactgtctgccttgctctactgggccactctgggctggaaggaggcctgcacggccacagccgtaggtgacctcatagaggtcacctgtcctggaggatggtcctaacggcccacagccttttcccccagggagctggctcactacagcccatgagccacctggctgccctgagctgggcacctcaggcccacccgtcccaggtcacacccctggagttcagctctccctgagccacggagttccccatgggccataaagggctgagtaagaggaaagatgtgtcctgctgctgcagacaaaagcaactgcagcacccacacagaaagccccgtgaatccacagacccacagattgcgcaaatagttctttgaaagtgaccaggaa

SEQ ID NO: 344825 - DNA, 1000 bp, Homo Sapiens
tttttttttttttttaacgtttgcaaaggtttattaactggcagtgactgatagaggggaatcggatgaggggagtacatgctgaacaggaaacagagtgaggggggcttgaccaggacacatggggaaaagcagttgggagatgcctatactggtacttggtgtgtgtgtgtgtgtgtgtgtgtgtgtgtgtgtgtgtgcgcgcgcgcgcgcatgtgtgtctgtgtggcatgtgtgtgtgtttgtgtaaatgcagaggaaaaaatctgaaattaaacactcagaactgccctcagtggtcacatctgggaagagaggagggtagtgttgttctatgcagagaatacctgacgatacttgttttctgaggtaggtgcatggatacacaaactgaaatatgcattaagtatgtcttgctcatcagtgaaaacgctaatatctaacagaatggcacactgtaacaaaatacaacagaaacactaacatcgaactcttggcacactaagaaaaatgacgctcaacttttcactgttgtgaacacttgctttcacttgctatacacctgatgacgagggatccgcagccatgcccatgttcgtgaaaggtcaccacgttctgcttctcatcatgggcatgtgtcatatccccgaggggagttactcgtcatcttcctgagggtcgctgatctcttcataaatcaccagttgctttctctcacgcactctgtgggtccaggcatgtttcccccttttgggtccagatgtcttgttaaccttctcagaggtatttagttttcctgaggggcgcagctgtttcccattgttctgtgggccagatgcttctggcactcccttcgaatcatttccttcctctgctggcttctcgggcgtgatcttcgggaagattccctggagcctgccgaaagtcatctgaggatgttcaacctgattcccacggttagggtcattatcaaaatcattcccctggaagtctgcgaccc

SEQ ID NO: 344826 - DNA, 1000 bp, Homo Sapiens
aatattctattccactattgtactatagttttgtaagatgttacccttgaggaaaactggatgaaagagacacaggatctctattatttcttcccacagcttgtgagtgtgataattatttcaaaataaaaagtttaatttaaaaaatggatagaagtagaaacaaaacttggaaaaaaaacaggcaccaggtctaggagagttggcgctaatgagaagcctagacacttaaaaacttcactggcttcatggcaaatctattcctgattgaaaaggcagtagaccgagagaaaattagtcacaatagagatatgaaaccattttaagacccacgagtgaacgggtacgtttctgggattaccttttttgatcacaaggaaggctgccaatgtaaaataaacataagctacttacccacataaataggttggctccactcactccagagccctgcctctctgcacatggagctcactgctgctctcacttgaacatcgtacttagaaagatcatcaattattgagatgaatgcattggtcatcaatttttctatctgcaaatatccattccttgtattgtgtatttttacttcataatcaaagcaatggattggaaaagcagacactggtttctcccattggatagagagacgagttccttcaatctctgctgtgacattcagtggaggatttatttgatcaatggcgtgaagggcaaacagctgatcaaagggcctgatagcagagtgcttgctggagccgttaacaagcaccgcaagccagtcacgccctttgctgaggataaaagtcctgggaaaccagcatgcgatatttctccccagtgtgtctttgctgtattcttggcattcttcagtccaagagccatacctatagtagagaaaatactgcgtgtcctcaggggcatctgtgccaacaagccaggtgcagtgaagggaaacttggtatgaccttaaacgtgaataattgtcttctgtagtgtt

SEQ ID NO: 344827 - DNA, 1000 bp, Homo Sapiens
tttttttttttttttttttttttttcaaaaggagcatttactaggaaactaaagggcaaccaaacagaatgcaagagaacagaggcagagttgcaaatgggctgagggagttcaaatttataaccagcctctgctcacagctgtactggctaggcaaagctttccagacacaaagccacctgcctgccatgtggatagtactctttgcctgcttgcccctacaaagccaccttctatttcataccaataagccagttgcatcctcattagtatcccaaggctgctggctctctgggcaggaagcttctgaggtggggaacagtaggcacagctgcctcaggatctccaacccaggcttccattgccaaggacatgtcagaatttattgggattgctgcctgatatctattggagccagtctgctttctctgggaccattcttctgggctcatctgcctagctttacagacaatagttctgctaactatcctggtggcgctagcccttcatgttttgcttctaaacactggtatggtggaggatgtctgaatgaggagggatgagcagaggggaaccttgagcagaggaagccaagttttccttatgtcatcagacataggcagaaccttggattctctttgaatcccagtggttggaagccaatcagagaagtgaagcttgaatgtaatgacactgcttcctacaaacaaaggcctatagccttcttagatctgccatcaaagtagagcttcttgtatagtactaggcagctggggcaatgagaactttctgaagacgtataacgatccttcctccgcccagttagttccatgctgaaatgttaattcaaacaaagataatgagctttccaggaaggtaaactacaatccaactctggattctgctgtaaagagattgtgtgaaaagaaaaatactatcttggagtagtggtgcaaatgtgtggatggggtgccttgcacctataatgggacagagagga

SEQ ID NO: 344828 - DNA, 1000 bp, Homo Sapiens
ggaactgggatgaatttttaaactgtctatcatgcagacagatcagtttagctaacaactctcttgcctttctttaatggtatgtgttgtaagttttttgctttccaaaactttcttctcttctgcctttgaaaaatggcaattgataagagtagaaccagggtggagaagaagcaacaacccaggaatatcagtggtttcttctgcacaaggaataagcagacagtgcactctgtattttcttgggtctgactgcatctagaactactgttctcaaaagggaagcccctgctgctgatcactttgttgtaaaattgtattgaggatttagctttaaaatcagatgtgaagaatccaaatctgggtttagatttctcttcagccagtttgaatgcataatagcctttgattctgactttatcaatcaggtatgctttcagcacctcctgaaggtacttccctaggtagtacttccggagccggtcatcctccagagcctggtcgtcgatgccactggcggtgatgtaaatgtccatgtcgccgtagttcctccggacccaccgcagcagcttgcgcaccccccagggaatcacagccaggcgcgtgggggagctcaggcgggtgatgtcctgcagaaactggatgtccctgtccgagtcgtagcggctgccggccagctgctcgtgcatcacgaacctagtggtgaagtggttgagcgcgcagaagtcgaccgtgcccttgagcagcctcctttcggcctcggtgaggcgcggcagggccgagctggaaagcccccgtcggtgcttggaggcaatgtattccctcatggccgcggggtagtccccggtcttgaagagcggctcggcgaaccaggcgatctcgaactgcaggaagcgctcggccgccctccagtgcgagtcagcataggggttggcgggttccgcccagtccgcgtgcagcgacagcgacacggccccgcgctgtgagggcctgaactgcc

SEQ ID NO: 344829 - DNA, 1000 bp, Homo Sapiens
ttttttttttttttttttttttttttttttggagcctgtagcctttattcatgcccccctgaccaaatgcagtgagagacaaggcccctgccgaaaacaactccaggggcctgggactctgggtcccctactgcagacactttcctgtgagccagaagtgtataaagtgctggtgtgtgaccatcctttggggaaggtcaaagggggcaagatccccaggggccctgaggaagggcagggcataggcgtggctcccagagcgctgggagggagggcccgtgccaccacctcggggctagaaaacaatgcagtcctgggcaggagggaactgaaaatgggagccttcagcatggagccctcaggaggctggggttgtagggggataatttctgtacccctgtgaagggagggggcatgtaggaaaggccttggggatctcagagaatgggacagcccctccgacgcttgttcttgcggacctggaggccagcccgagtggccatctcaaacacctcccgcactccctccttggtcttggctgagcactcaaggtagccaaaggcactgatccggttcgccatgtcccggccttcctcagaccgaacgggctcctgcttcatcttggccagctctctcctggtgtgctcgtcttgcctcaggtccttcttattccccaccaggatgatgggcacgttggggcagaagtgcttcacctctggggtccacttctcaggaatgttttccaggctgtcagggctgtcgatggagaagcacatgaggatgacatcagtgtccgggtaggagagaggccgcagtcgatcatagtcttcctgccctgctgtgtcccacagagccagctccacctgcttgccgtccacctcaatgtccgcaatatagttctcaaagacagtagggacgtagacctccggaaactgatccttgctgaagacgatgaggaggcaggtcttcccacaggcaccatccccaacgatcaccagct

SEQ ID NO: 344830 - DNA, 1000 bp, Homo Sapiens; identical to SEQ ID NO: 336817

SEQ ID NO: 344831 - DNA, 1000 bp, Homo Sapiens
aatatttatattcttagtgacacttttattggttgccctgttgggcattgatattccatctcctggcaacagttgagcttcaaaaggaacctgtaatttctcactggactgcatttgaaatcagccacaaaatgcgcatgttaacattcactcagaagaagggaggaacccatgattaacagtgtaaccccgtgtaacttggttgatccatgatgcttgtaaatcaagtctgatcattgcaactgcttagatcacagagtctctagttcatagacacagcggcatgaggtaactcattttattttgcacaggttgcatatttccacaggaaacattctggctaaattgtttggaaaaagacgacagtttgtgcttgggtgtttggcctcccagctttatgccatggtttctttacctggcaaccttctgtcgttaaatgtgtgcatgttgataacttcttctgttttcacaataactggggcctgtggcttatgttttaaccgacgctggcacttcagggacatcctcaattcttctaccatggcactacagaaggacctcattattaaaaacctcttttagtaagtttcaaaagattactaaacagtgtctggatggtatggtggcactaaccaaatagaagattccttttccaattgagcgttttttttggatttgtataaaaattctcccactgccacaaaaactgaaagcaccaagccggctgccagaacaatgaagatgccaccaatattctgaacccccagggcactggcctctttgctctcctcttctgggcaaccattgcccctccaccatttctccttcatcatatgcagtttgccttcctcttgcagctgaagaattgctatggtaattttgtctcgatatggagaacccatgggagtgccaacgccataacctttagagtctataaggccgccaatctgtgtcaggttacagttccgctgggtaacaaactcgatggttgttgactcca

SEQ ID NO: 344832 - DNA, 1000 bp, Homo Sapiens
tttttttttttttttttttggcaggggagggagccttttttattatcccaaaatgcaaagtattgaaggcacttacaataacaaggcaggacagagggtaggcaagtgggggcacgggatccagcacagaggtaactcaacggcccacctgctcacggcccagcctggagaaaaagaaaagctacagggccaggtctgaaggcagtcagggcggctagctctacagaagataaaaatcctttctacagaggatcaggaaggcaggagcacacggcagcaaggggcaggctggaggtcacgagttagtggctcttctcagcagcgaggacagccctcaggtcccctgctggaagaggtctcggtacatctcaatgaggcgggcagcctcacgctggccggacagcagagcaccgtgggtggtggaatagtacttgcggtgggtggcctcaccggaaaacagcacctgcatgggctttacggcgcccctgttagcatccaggggctgttctgggcacttggaagagaaaaggtgaccaggctgctgctttgtggagcttccatgcgctgtctttgagctctctgtgtacggcaggggcttggccagcttctccacatccgccccgctggagcccacctgcgtgtatgaataggagccgcggaagtaagggttgctgccccaggccgagcgcaagattcgccgaggttttggaatgttggggttccctgtgaactgacgcagcatctccgtgcagatctcggccactgcctcgtcatcacacttctccatgacgagggcctcctccccgcagatccagccgctcagcacatggccgtagcgctcaggcgggtagaggacatcaaagccgcagatcttgcggtaccagagctcaggtgggtaggtgagggtgtggctctctgcttcgtcctcccacacaaactgtaggctgttgcactcagggccccagaagggctcctcgaattccagaaagatcttgtcggt

SEQ ID NO: 344833 - DNA, 1000 bp, Homo Sapiens
ttttttttttttttttttagacaaatactgattttaattaaacataaggtaaactctaggcatccgtcatctttcagcctaaaaattagcaaaaactgttgaaacaaggcacagttttttccccatatttgttacgtcgtggctccagttacaaaaaaaattttaatgaaaacgttaaacataaaaatagaagtttgagattttaaaaagtgtataaaaagccccacaaaacttgtcaacgttgttccttattctacaaaatagcaccagtaagaagagtaaaaggtgttaaaaaccattatgacagcatttctgaaatgcagcttgtctgaattcccgttctccctaaaaacgacttcttatggaataaaaaaggattaaaaaatctccaaagggagcaccgagctttgcagttttccctgtcatctctcagatgtggggaaggtatgagaaatgtatgtctgtccctgactgctgtcactgcctctgagtttagtaaaaagatgagaaatgagggtagcagacttctcatctggggacctgtgcctgtggagggtaggtctcctggagagggaatgggtttgagggggtgtcttatctaagctccttgcttcacactcctctcctagggaagagggagatatggaggagccatacttgtctacaaaatatatggcagcttatattatagaactcagcacaccccttcctgagctccccagagggttctattgcagtcacggggagggatttagctaagagtggcccctgcccttgggtttgtgggggaaaaaatagccctgaatgtgatgatgacgtcatccctgctgaaatcatcatcattgtggaaaatactctaataggtcccgtgcagactccagcccttgtatttaggcaaggggaatgtgccgggtaaaagacatatacaacattttctcttctgcttgccctgggaaaaaacgatcctgggcccttaaaaatgtcctgtagctacatgcct

SEQ ID NO: 344834 - DNA, 1000 bp, Homo Sapiens
ttttttttttttttttttttttttttttttttttttttttttttttttaaggcaacagactctttatttaatgtggtttaaaatacatcaaaatcaagtccctggctgttgtgaatacccaaaggagacaaaaaagctgccagtgcagcttcaaacaagtctgagtggccgggctgggccataaggaaagcagttacagggacagaaggcagctcccttcccccaggaagggcaagaggagcaggtgcctggctgtccctggggtgaccacctctgtgctgtgcaaggcggaaaggctggggcagcagctggagaatcagctcagcaggccttggccctcccccgtggacaccaggcagctccactggcctccgggtcagccctcagggccaccgtgatggggtggaggagggttaaataaccatctttacagaaataacagtctcctacagaaagtgcctgagctcagcccatggtccgataacctcatggaaaacaaacaacaaataaaaaaaaaaagtgctgctgacacctctcagaatctggtggacatgaagctctcagctggacaaggccctgaaaacaatttactattagcagagccatgcgctcttgagcttcacctgctgtggtcccctggaggaaaagctagcaatctaagaaaccaacacagatcttggtcctaaaactgaggtcacaagtgtgggacccacccaggtgaggaagacactggccttcactcatggataggcacctcccctgcatctggcccaggacctgggctactttggaaagcagaagcagagcagctgtagtgattggttgatttggtcaatgaagagaagaaaaaggtagggaacctcatctgcagactggcctgaaggtctagacatggatggagctgtgagcaaaggctgcaccttgcctggggcccacattcctgacctgggaaacccagctggggccacctgctcactgtggcctcctacaccaccacact

SEQ ID NO: 344835 - DNA, 1000 bp, Homo Sapiens; identical to SEQ ID NO: 161009

SEQ ID NO: 344836 - DNA, 1000 bp, Homo Sapiens; identical to SEQ ID NO: 161010

SEQ ID NO: 344837 - DNA, 1000 bp, Homo Sapiens; identical to SEQ ID NO: 161012

SEQ ID NO: 344838 - DNA, 1000 bp, Homo Sapiens
tttttttttttttttttttttttttaaaaatttgtctatttattttaatttattcttaaccaaacaggttctaaaatatttgcaagattactcacaggaaatctatttatgacagaagtctttgttatatcaaaatatttacgaattggcacaaagatgaattattcagtgcatattgttaaaaggaaaacaacaacaaaaacaagataacttattaatggtacaaaaaggggttaaatgattttggaaaagtaagtagaaaataaaagaaggagggagtaagagcggacagaagggaggaaggcaagcaagcaatgatgaactgtgtaaaattttcactaattaaaagactattatattgaagaggtgcctattaggcagccttttgatgttaaccatgtaatatacaccatgaacaaccttgtagaacacacaagagccccctcagagaactggatgggtcaggtctcccatccagttgccttaggggttaggaacgctcccatgttgttctctggtttttgctcctgaggacacaaacagccagtgtttcctccccggatgaatagagaggcccctggggagggtgtgtctggcagctcactctgcacctgcaccgcggaaggttttagatggtccctctcacacaataatacatggcggcgtccgaggccttcaggctgctccactgcaggtaggcggtgctgctggagctgtcggctgagatggtgacgtggccttggaaggatgggctgtatctggtatcagagttcccaggatagatgctccccatccactccagttctttcccgggcatctggcgcacccagtggatccagtagctggtaaagctgtatccagaagtcttacaggagatcctcagagactccccgggtcttttcacctctgctgcagactgcaacagctgcacctcggcaaagacaccttggagaacagccaggacgagggaaaggatgacggttgaccccatcctggagga

SEQ ID NO: 344839 - DNA, 1000 bp, Homo Sapiens; identical to SEQ ID NO: 161013

SEQ ID NO: 344840 - DNA, 1000 bp, Homo Sapiens; identical to SEQ ID NO: 161014

SEQ ID NO: 344841 - DNA, 1000 bp, Homo Sapiens
caaaatggaggactgtttatttcattgctcaatcaaaacattccatgaaagactgccttaagtaatttcaaaggcttcactgatacatatgggggtggggagggaagctccactaccccatgccacaaaactatttgatataactaatgacatgcaaacacaatttgcaaaagcagagcattatcacaatatgacatttaaaaaattggttgagtaaacagatttcatatctttaaaacataaaataattacactgtattgagcctgggaaatcttggcaatatctacaaactttctcatttacagataggaacaaaggcccagagaagttaagccactcatccaagctcactgagcagagattctgcatttgctattttggaataagttgtctactttcaaatggttttttaaaatgggtattacatactttttgtttgtacagaacagtcatataaaatagttgctccttaattgtatccattactatttaatcgctcatttttctgtaatactattacttttttaatagtcacctatttcactgaaaggctccactggatttgaaaaccagattcagaaacatggcacaaaggtgcaattcacaaaccacaatttttttaaaaaattaagtagtcatgccaaatcaaaatagccacccacaagtgccaaacacgtttctatttcatgatggagacaaccacaaattaaaagtatctgtcaaaatgtctcttttctctaagtcacctttactttcaagatgtacttgtttgcaaatatttagcattcacagtacaactgaaattagttacattcataatggtcacaatcgttattctgtgttcaagactctccagaatcttgattgcctaaaacgaggtagataaacttttaagtttgttggttgggattaatttcctttagatcttgatcatctattttttaaatagaattccaaagtatttagcaaaaaaaaaattgaaaatgtctaagcactttg

SEQ ID NO: 344842 - DNA, 1000 bp, Homo Sapiens
ggtggtgtaatccgataactttattttaattgaaaatggaggcataacatgtcctagaaaaataaagatttaggatacaaaggagacacagcggcagggctgcccccagggatgagggaatctttggtctgggccggataatgaggacaagggcttgagtcgaggggagctggtgaaggaagacccccgtctccccacagctgccccaccccccgcccctggcaggaaatgccacactggggagggtctccagtctcaggggcgcggggctgcctgtcctccaccttcggattccaggcagttgtgacaacaccagctatcggcagagctattaatagtgtttcagggagtgacagggagagggctctgggggctggaagtccggccctggggcagggtgttccgcttacagctagtaccaagtggagggggcagggcccctgagtcaggaccctgagtcccccacgtatatggcagggcacagcatggggagggctgtaacagagaggcctcccatccaaagggggatggagacctggacaggaggtggccggggatacaacccccagcaccaccagggcttggagaggccacccaggcagaaggatgtggtgactggggtcttcagcaaccgcatttctggggctcccccctcccattcctgtccctgcgtcttcagcaccaatgtcgggagaggccacggggccacactgggtcacagttccaagggctcctccacaggcaccgactggagctgggtcagaaccttggcctcagcttccaacccctcgtcaacctcaccccctgcggtggcccccaggagcagcccctcagggtcggggtctggcagcctcagcacggtgtggggggcctgtgtccccagccccttttccgcttccagcagcccctctgttcctgcgcttagttccagccctgctgaccagacaggcacggccgcgggtgacaacatcagcccctctggtgggggcgccgggaagtt

SEQ ID NO: 344843 - DNA, 1000 bp, Homo Sapiens
tttcttaatatcacttttatccagtgtaagacaatttttaagctttatttttatgaaacatttcagattccctcatatcacagcacatcaataagcagtatgtacatagactgacttttatagtacatgtcatgtcccaaattcccaatcctaggtaagatatcaagttacaaaatacaagtgccgataattaaactataggtagtatattaaacaaaaatgagtttttagcaattatgtgaaataaggctttaaccaaagcaagacttaatgccacaaggtgtcttttttccccaagagtaattaattcaatcaagcccatgattccaagctcaagtaacaagttttatattcttgaagcaaacaagaaaaggcaatcaatgcttaagtggtatattttagtatatattacatttctggacaatctctcattgcattcaatttttagaacttgtcttgggtctaataaaacagaagaattagagaagaaagcccatgccactttgaggaatgtaacataattgttttgtctgggtacaaaggtacgttacaacactgggggtctttagtcaagttcccatactaattgactcaccaaagcatacttccttcagctacaactgtaattggaacacacagattttacctgaagaaaatcctgtacttccagttttaaaaagcagacaattctatgaagaagcaaccatttaaatatctaactatacacattcaagtttttacaacttcatgccttatgaggaattttgatttcagaagtatcattccacagactcagcatcatatatttatacatatttcatacagtatagtattagaaactgtaaatggcacagaataatcataattatcacaaaattttatcaatttccagtgatcttaaaaagacaaattataaccgcctttgctcagctaagatatccagttatggttacaactttcgaaaatcctaaagttatgtgaaaaaaattagtcaaagaaa

SEQ ID NO: 344844 - DNA, 1000 bp, Homo Sapiens
ttttttttttttttttttttttttttttttttttttttttttttttttttttttttgcatgaaaatgtatctctaatgtcttctgtgtgccggacactcagcaggtaccggctctgctactagaaatcttggtcaaattgctcaatttggtgtagaaaaataatttctggggatgaggggcagtgagtgccccaagaggggcctcagtcacgaatgtcgatgaccagtgggcacaggtggagtgagtgcttgatgcccatggtgaaagcagggatgtggggcttgtgcacagtgacctgctggacctcgtgggagccggggccaggccgtggcgtgaggtccagagggtaggcgaagcgcttggccatgctgtaagtagggctgcggttctgatagatggatggctcaggtcgggcgtacgtggtaggtccagggcctcctgccacatcctccttgtagaaccagttcttgtccctggaggccagactgtagcagggagcagctcggctgacaggggtgttgggccccagcaagagtggcatctggtactggttgggagccgggttgaggtccatcactctgtatgggcgccggtagccaaacgtgtactggggagccctgcgttcccccggtgggtggatcttctcaaagtagtactggcaggatgcgagggtggggttcaggcgcaggttggagatgcgctcctccatggggacctgcgggcagctggacattccaaaccgagttattttgggatccaagagatagcaaggcccagggctgctgtggcacaccatccgcttctctgagtgccggctatgcagggtataagctggtgccttgaacatggagatgtcatgatctatgtagcccgtgcaggatggccggaggtacttggcgggccccggacctttgatcttggccatgatgacaggggtctgcttgacctcctgccttgagggcaatggctccttttctgggtgctgtgcaaagtacacag

SEQ ID NO: 344845 - DNA, 1000 bp, Homo Sapiens
atatttaaatacgtattttaatcatacttcatccagtaggaaaacaaataaacactgttgatctgttcatgatcgaacacacaaacaacaaaaacccacatgcaaacacatagaaataaagtcagtgaacaatcaatagcttaagaactctgtgccaccacttgagataacaaagctatagcaaatgcttcaaacccaagttcagaactcactaatggagaattaagaacgatgatcaaggacacaatttttgaatagcacataggacagaagtgccatcaaggaaattacttggagattaattgttaacttacacccccatgtttatcacggcactattcacattagcaaagatatggaatcaacctacgtgtccatcaatggaggactggactttttttaaagtggtatcttaaagaactagaaggccaggcacagtggctcacacctgtaatcccagcactttgggaggccgaggtgggcgtatcacctgaggtcaggagttcaagaccagcctggccaacatggtgaaaccctgtctctactaaaaatagaagaattagctgggtggggtggcaggtgcctgtagtcccagctactcaggaggttgaggcaggagaatcgcttgaacctgggaggtggaggttgcagtgagatgagatcgcgccactgcactccagcctgggcaacagagtgagactctgtcttaaaaaaaaaaacaaaaaaaagaactaaaagtagaactacctttcagtccagcagttccactactgggtatctacccaaaggaaacaaagtcattatgtaaaaaagacacatacacctgcatgtttatagcaacataattagcaattacaaaggcatggaaccaacctaagtgcccatcaaccaatgagtgataaagattgtggtatatgtacagcatggaatactacttatccataaaaaggaaccaaataatgtcttttgtagcaacttggatggaactggaggtcattac

SEQ ID NO: 344846 - DNA, 1000 bp, Homo Sapiens
taagttttcctgccacaaatgaccaaaggcacttggataatcaagaattccacactgggccatatggtataaacactataaaagcgtaaagaagggtcagtattctgtgtgtctcgcctgtttgattcctgtggtcttcagctgtcaaagacctagaactgcaaacatataatgagtggcaaaaaggttaaaaaaaatgttgggacaaaaaaatcaactaaaaatcaactaattttcattatgtttgtaaaactgatgaatattagtctagacatttcttgttatccaacaacaaaaacaaaaaggaaatagatttcgcccaaagtaaccttaaccagttatttgataccaagaaatgcctccacccctcttgatcattaatagttctaagaattctaatgggtattctgtttatcattttagtgataatgtttacacacatccatctctcctatgcaactcccattttaaaatacattatccttgtaaaatacattacaaggataatgtattttaaaatactttaacgcataatattcctagatttgtatgttagaccaggacagggggccaaatcatctccagtcggattccagtgactcctgtaaccaaaaccagttcttcacaatttattcattttttttaatcacacaccatatggtttcaatgcatttttttattcaattcaaaagaatttaacaagttaacttttcctaaacaaaagttttcatgtgtattctaccatttttaggagctcagtaaatataaacattgtttcaatacaaaacctttaaaaataccttgaaaatgtttaaacagttgtattttgcatgtctttgtttgtaatcactgagcccatacaaatccttgcactactaacagtcacaagcttgaacctcttaaaaaatatcctcgatcaaagctttggaatccagtaaaaattaggaaacgagtgggcttcagaataccctgagcacaaactagtgcaacaccacatgtt

SEQ ID NO: 344847 - DNA, 1000 bp, Homo Sapiens
ttttttttttttttttcttttcaatataggctttaattcaaaatgcactcaaggagagggaagggagggactaggacactgtttagaaggggtaattacactaaatacactgaccttcgctgaaaaatagaagggacaggtggctacagaagccagctcttaccccttttgccgtccccaccccataccccaaaccatcttggtttcttgactcctctggtccagtaagaacctacaaacgtgtttgtttgtttttgttttaacacttgaggttgtgattaaacaatccccaactcgtcttcatctcttttttctgaagttgcttttattaattgaatttttaaaaatctggtttcatctccacgtgcattttcccatcgttcttcagatttaggagaaacccacggaggcgcggcgctctccacagccgtctctaatgaagggaagcgtgcctcgaagtcagtcccggtgcgccccctcctcccccggcgccccttcccaaaccccgtcggatctccaaaggctggaataggcggtgcggctgtagcccgcgctgtaatcgtaggacacctgatggggcggcggcggcgggggcagggcgcagtctggaaagaagggggcgaaagaggccaaatggccccgcccgtcctccccgccgggagaatccgcagcggcggggtacagggggctcaagggctcgttcaaggtcaagccgccgcggggggcagtcagggggctctttttggtcggggagcagcccgggacgctccagggctcggggtacagtaggtttcccaccactgccggcggcggctcaaagaggccgggctccagctccgggggtccccgcagtacggaggctccggcggggaacacgtcgagaggctcggcggcaagcaagactgccgcctccgtgccggcgccgtagtcgggccccagcagctcaaagaactccacggcctccgcgcccttctccaggtcgcccaagctcacgtccggc

SEQ ID NO: 344848 - DNA, 1000 bp, Homo Sapiens
gagacaaagtctcactctgtcgcccaggctggagtgcagtggtgcgatctcagctcactgcaacctctgcctcagggattcaagtgattctcctgcctcagcctctctagtagctgggattacaggcatgcgccaccatgcctggctaatttttgtgttttttttttttcaggagagacggggtttcaccatattgggcgggctggtctcgaactcctgacctcatgatccacccgcctcagcctcccaaagtgctgggattacaggcacgagccaccgcgcctggccccgctttcatttctgatcttttgttttctctctctagaaactttttagggtctcattttttctccatgatcctcttattcaaacttggtgttttcataattcacagcaattttccttaatgtaggtttcccttgaatccatcctgctgggcacccagcatgtcctttaaatctggaaacttacatttcctttttgtttctaagtttgtttgtttgttttttggtcttctctaaccataaagagacttcatgttggggaaacaggttcaaaaaacttaaagaagagttcatgatgaaagccaagtgtctaaccaggaaggacagcgaggacactgataaaaagcatgaaaataaagagaaaaaaggagaggcacagtgggcctaactatggatagccctatgcttggacaggtgtcttctgagtgtgtagtttctgatgcagaatgaatcttccacaccagctgaaggttttaccacacactttacactcataaggtttctcgccagtgtgaactcgctggtgctgaatcagggttattttctgattgaatgccttcccacactccttacattcaaagggcttctccccagtgtgaattcgctgatgctgagtcaaggctgtgttggagcttaatcgttttccacactctttacattcataaggtttctccccagtgtgcattcgctgatggacagtgaaacttgagctgcaa

SEQ ID NO: 344849 - DNA, 1000 bp, Homo Sapiens
gtttacattgtatttattttcatgttttaccttctattgatggcaaatgagactggttttccatttacagaagtgatacaaaagattcctgttgcaataatttcattaagtgaataatgagccaatttaaagaaaaatataaagcaaataattgtacagatggtaaactaatatggcaaaatcactaatattcaaggctgaagtttggccgggcatggtggctcatggctgtaatcccaacactctgagagatggggatgagtggctctctcgagcccaggaattaaagaccagcctgggcaacatagcaagaccctgtctctaaaaaaaaaaaatagccaggtgtggtggtacatgcctgtagttccacctactagggagactgaggtgggaggatcacttaagcccaggagttcaaggccgcagtgagctgagattgtgccactgtagtccagcctgggcaacagagtgagaccctgtttcaaaaacaaaaaaaagtggccgggtgcagtgctcatacctgtaatcccagcattttgggaggctaaggctgctggatcacttgagcccaggagttggaaacctgcccaggcagtatggtgagaccgtgtctctacaaaaaaaatacaaaaattagctgggcgtggtggtatgcacctgcagtcccagctattctagaggttgaggtgggaggatcgcttgagcctaggagttcgaggctgtagtgagttgagattgtgccactgcactccagtctgggtgacagagttgagattctgtctcaaaaaaaaaaaaaaaaaaaaaaaaaaggcaaagtttggaaaattaaacccccagggaaatggaaactacatctgctgctcacccacctgcctgcctcccctaaagggaagattgggtacttggggtcccatttctgtagggtggagcattataagtaagcctagcttgtggcaaatctgtctctctggacactccagcaagctggaagggacgatga

SEQ ID NO: 344850 - DNA, 1000 bp, Homo Sapiens
gagactgagtctcgctctgttgtccaggctggagtgtagtggcattgtcttggctcactgcagcctctgcctcccaggttcaagcaattctcatgcctcaggatcctgagtagctgggactacaggtgcacgccaccacgcccagctaatttttgtatttttaatagagacggggtttcaccatgtttgccaggctggtcttgaactcctggcctcaagtgatccagctgccttagcctcccaaagtgttgggattacaggcatgagccaccatgcccggccttttcttcttctatttttatttttttaaatacaatccacggtcctggactagatttcaggacttttcaagagaagctggaaatccattttgcctgagaaatgtgttgttgttgctatgccaaattaaatgcacacatgactggatttgttgtttctgcatgttgtaatagttctgagcatgagttcgggagtctggggtttgaattttggcggtaccactcatccattctgcataattgagggtcccagtttcctcgtctctaaaatggaattctacctcataaggttgtgtgggtttttttttttttgagatagagtctcgctgtcgcccaggcagcagtgcagtgctgtgatcttggctcactgcaacctccgccttccaggttcaaacaattctcttttctcagcctcctgaagagctgggactacaggtgcacaccactacacctggctaatttttctatttttagtagagatggggtttcaccatattggtcaggctggtctcgaactcctgaccccaggtgacccacctgccttggcctcccaaagtgctgagattacaggcgtgagccaccatgcccggccctcaagatttttatgaggaccacatgaaatgctgaaagcacttagtagtatgtccaggagcagggtcttgctctgtcatctagacttgaatgcagcgagtggcatcgtcatagctcactgcaggctcaat

SEQ ID NO: 344851 - DNA, 1000 bp, Homo Sapiens; identical to SEQ ID NO: 161016

SEQ ID NO: 344852 - DNA, 1000 bp, Homo Sapiens
gcttttcaaaaaatctgtaattttttcaagaaacaaagtataatctgaatatagttattattctacaaaaaatcttttactcctcttaacattatatacaaataatttttctaccaactttagttttattttctatactcagaactctcatttagtagaatattcgaagtgtcgcttcctcatatatttctactataaattctggtatttacatagacaaatttggattaaaattttttttatttttactacacctttgaaaatatattttcgtataaactctggtgttttctaagctgtagtttttgaaaatttgttttcccaaatttattacatttgcaagacagctctccaatataaattccctgatgttgaacaaagtttgagtgacctcttcagagtttttctgtagtacaaaatgtggacaataagatctgatacaagtaaaggtacttcaaccctctttatggttgtaatgttcatctttaatataaatactctccttcactttaaaggataatattttctgaaagatcttttggcagtaattgcacttatcatgcttttattaagcatgaactctctggtgtttagtaagatgtgagcagatattgacgtctttttcacagtctatatttctacaatttttctcaaatataaatgattttctgtgcaataaggtgtattagttaaaaactttgccacattgttcttacttgtaggaaatttttccaatatgaatattacctataatcaagtgtgacaaccatttaaatactttgttacattctccacatttctaggatttctcaccaatatgatttcttttatgattagaaaagtttgagatgttgtcagaagcactgtcacatcttactggtttgtagagtttctctgcagtaagaattatcgtatgtgtgttaagaactgaggactagttaaagcctttgccatatttttcacaatcatagggtttctctccagtatgaattttcttatg

SEQ ID NO: 344853 - DNA, 1000 bp, Homo Sapiens; identical to SEQ ID NO: 161017

SEQ ID NO: 344854 - DNA, 1000 bp, Homo Sapiens
ctgcagcagaagctcagcttggaagacagaggctgcagaaagtcggtccctctaggatgccaccagggaaaagtcttcaaaatgttgttgttactgtgaccaagggcagaagtctaggcatcttaattattggtatttgcactaagtgcaagacgagaccaagttgagccactcctgccctcggctcggagtcagtgcactcttgctccaccctctcagctccagaccgtgtgccctgcccaggacggcgcactcagagaccatctgggtgggggtggaacaagagcagcaccgtcacttgcataagcattgctagttttgcccctctagaattaatatattcattttaagtaaaagaaaacttatctccaaattcaaagaagttattcaatgggtaggtttttttctgtttttgcaactcatctggcagctgacctagctcccaatgaattaaatgcttcacatctaactaaatgtgtgcctagaattagagagagagagagagagagacagtgtgtgtgtgttattagagcaaagacctccacaagaaaaatacaaaatctgttttaaaaatgtaaggcttcaatttaaaatacaattaagacttgatacatttaaagtctatcaagataaacattaaaccagttattggcttttacaaagtcagtcaaaaattgaggtaatacattactcttttataaccagccttatctgattataacattttatttccttctcatccttctagttagatattctcagatacatggaagaaatatgtagaaatcagcctccagttagcgggggaaaggatatggttacgaaacagcggaggagctttactctctattcaaataatacacagaaaaaatgtaatcagccgagcggtttccatggaagcgctcattgaccagggctcaccagcgcctggcgatgcctacccttccgctttggagactggaaattcggttaactgagtttcagggatgtctaataccct

SEQ ID NO: 344855 - DNA, 1000 bp, Homo Sapiens
tttttttttttttttttttttttttttttttttttttttttttttttttttttttttttttttttttttttttttttttttttttttttttttttttttttttttttaggaaagcagatatttatttggagcagcatgctcagcttggcatgttttctttcttccttatttatatactgtgtcattcccaagaaggatttaaagtgacttcaatcaatacacaatatatatgaaaatataaattagatatacaggtaaaaaaagagcaagaggaaaacaaggcacaggaataaggctggtgcaaaactgcttctctgtgattttctacacttacaataaatagtccatttatgggctggcaggataaactcctaacaagaaaggaccctcaagacatgccatggaggaagatacattcccatgggaatgtccctataatactccatagatttccttttcctgaaacatgtttgatttcttcttaaacattcccaagttctcattttgagaatggccagggttctgggcagtgtagtctactgaaagactcaggctactaagttcctgagggatcacattccagtcagggtccattacaagtcagagattatataaatatgcaagagagcatgaaccaaggctaaaactacagttggtaattcctcgaactctaacttttttgttttttggccttttgggttttttagtaatggggacttgctctattgcccaggctggaatacagatgtgtgatcatgggatcctggctcattgcagccttgcactcctgggctcaagggatccttctgcctcagcctcttgagtagctgggactacaagtgcatgccaccacacctaactaatttttatattttttgtagagacggggtctcactatgtttcccaggctgatcttgaactcctagtctcaagtgattcttagcctcccaaagtgctgtgattacaggtgtgagccactatacccaatctcaaactcttg

SEQ ID NO: 344856 - DNA, 1000 bp, Homo Sapiens; identical to SEQ ID NO: 337820

SEQ ID NO: 344857 - DNA, 1000 bp, Homo Sapiens
ttttttttttttttttttttttttttttttggagaaagccaaagacctttatttcttcctgcctccccgtgggaagcctccgccctgaggtccgctggcccaccacccctgggtgctcagtttctaccaacatgagccagcaagtccttgtggtagccctggggtagcctgtagtagactcgggtcctgtccacagccctagctgccagcaatgctgtcctcacagaggcatagtcgcccccagctgggttgtgctccactgtgacggtggcccggggggaggatgccagcagcctgcctatggctccagctgtgctgtggcccagcagcatggcctgcatctggaaggacacaggttgccagagcccctggcacaactctagcatatctgtgagcagctgttccctgtagccactgcccagcacctcctcaggccagcctggtgccacagtcacgtgggggaagacctcagccacagctgtaagcagctctctgccagccacatggccggggaccgaaaaactcccgtgggagattttggccccaacccacacaggccaatgcaagaggccaaggctggagaggcgtgccagcaaggccagggatggccggagggctgcgggctccactatttgcaaatggatgccccagtgtccgggatgtgtggccagctgctgcaggcaggactccagcgtcaggatgttgccacttggagtatgaacaatgggcacggggttttcagccacagttccctcgaggccagtgttcagcaggatcatgccttctgtgtctgggagggtcattgttgctgttttaccgctgccctggacgtcaggaaccagccactccacattcagaccgtcatccccaggcagctggagaagagggatcaggctgcctcccgtgtagtacattggtttccgtgtggcattcaaggccagctgcttgaactgtgacaggagaggctcaaagatgtcatagtagacttggtggacagcag

SEQ ID NO: 344858 - DNA, 1000 bp, Homo Sapiens
ttttttttttttttttttaacagccatcaagccccttttaatctctagaaaggtgcctcagtaaggcacagagaggtcacaccaggtggtcatggtgccttacctgtgtccactgggcccaggctggccctttaagggtatgagggcagaacagctgagagaccacaccccacttctcagagaggtcagggataaagaaaagggacaatggaaggaagaacttgtggccaggatgctgagggtagaggctgctccccacaggcactgagcagaggggttgaggggggagcctccagcctccatccagacaggacctctgaccgctgctaggggccccttctcaggaggttcagtctcagacaagggctccagaaacttcagtccattttcccaaaatggacatgatgcatctggcgagtcagggacctagaatgtccaggaccgagccttgctgaggacagaagggagcaacatgccctggaggtcctcatgcagcccaggcctctggcagtgaccagccagcacccaggcaactccttgctgggtctccaggccctgatggtcacaagaaaggccacaggccagggctgggatgggcccagagctctgtgtgtttcctgggagggctgagaggtgccatcccccatagcagcccaaggcacagtagttgttgttgttgctgctgctgctgctgctgctgctcctgctgccctctgagtctgggggagccggcctagtcagggacgtgggggcccagtcctcctgtggcagataggcaagcgtctgtaccctccactccgtacaccctgctggcagcacatcctctgagctcaggttccccgggagcctggtcccagggccctcctgttcctcctccagggccacagatttccaaggacgcgctgggccacaagtgagcagtgcagtggcctcctggacgcagggctccaaggctccctgtggggtgccagcacagtcctggctcaacagcacaccggcc

SEQ ID NO: 344859 - DNA, 1000 bp, Homo Sapiens; identical to SEQ ID NO: 339320

SEQ ID NO: 344860 - DNA, 1000 bp, Homo Sapiens; identical to SEQ ID NO: 161020

SEQ ID NO: 344861 - DNA, 1000 bp, Homo Sapiens
tttttttttttttttttttttttttttttttttttttaaggagacggatggtttattaaggggacttccatacagggcactccagtggcggcgggctgcactggagaaccattcccctttgtaaaaaccatgcagtttttatagcattttcacttagcatcctccccctaatcacctccacctggcaaacttcatttaacccaaaacaaagggccttgatcccctggacagcatgtgttccacaggatgggctaggggctcagatgttcttcatagataaggagtgaatctctaggttggccacttgcagatttggaactccaaacatacattgttttgaggccataaggtcattctcaggggatgcttaagttattgctgtcaggtgcatctgccatacaacctgcccctatccctgatcgctgatccctgaccccagactgatctgactttgagccactgtccctgcctgtcttcggaaccacttactgctggttccttgttccctaggatgctgaggccttcaccttgccaaccagcttcgaggaggggaaggagaagtgtccttatgacccagcccgtggcttcacaggcctcatcattggtgagcaggccttcttccctatcacagacatggtatttttaggatgtggatctcatctctaggacctgccaccatgtatatgtcatgtgccctgttgaatatgacatgtctctcatgcctggaatatccccacgccagatggaggcctctacacagccactaggtatgaattccggagcattcctgacatccgccggagccgccacccacactccctgagaactgaggagacaccaatgcattggctcaatggttaggaggatgaggcacaggatgatggggggtaggggactatttcttcatttttactcccttggccagctgaccaccccacccccaaatccccaggtgagcctgtccattccattcctgtgtgttgtcaagtgaggggtcagc

SEQ ID NO: 344862 - DNA, 1000 bp, Homo Sapiens; identical to SEQ ID NO: 161021

SEQ ID NO: 344863 - DNA, 1000 bp, Homo Sapiens
ttgctgaaagaattttatttgtgagtaaaacatgttacactggagaaaggacattcaggacctgtcctcccaagtcggtgtccatatatgcaactatatttcatgttgtaatacaaaggattaaactacaaaagtgaaaattaaaagtcattgcatatgtggggtaaaggaggggataaaggaagagtccacggttaaggacttttcattctgccttggcaacaaaacgacacagaagagaggcagcacgcttgcccgcgtagcaggccctgcggctcagaggaagctggaagcggcggtcagtgccatgcagcagcctggttctcgctcggctggccaatcagtgggatccgaggtggctcggcccatcatgcccaggatctgagcccacatctggcaccagctctaccaagggcctgttgggcccacacaagcttgcctgtacctagtcaggctggtaccggcacctcctgaaatgggtcaccctccggttcctgctcagcagctctgagcccttttccagcctcttggagggaagtaacaacaacagcatctgccgaggagcacacggttcaggctccatcaatgacggtgatgtcgaggggccccagggctaccctccacctcgagttacctttgatcacaactagggcatctttctggctgagttaaggtgagaacagtcccctgaagcctcccccaaataagtgaaaagtgctctactgtggggtctggaaagaagaaagcaaaaagcagcctattcacgttcacagtcgaaaaatgtaagctaaattgtaaacctgctcaaagaaaattctagaaaggcctcttcccctcctgatataccttccctatgacaggaatccagagacccaagtgaaaaagaaactgagctcctgaatctgattctggtcgagggatcgtcggtcagacatgcatagcatcacgttgggtgcacacaggcccatctgccgctggggtttcctgcccagcatctggc

SEQ ID NO: 344864 - DNA, 1000 bp, Homo Sapiens; identical to SEQ ID NO: 161022

SEQ ID NO: 344865 - DNA, 1000 bp, Homo Sapiens
agtttggcaccagcctgagcaacacagtgggaccctgtctacacacacaccccacccccacacaccccaattcacataccacaaacaaaaaaactcctagaaatcaccttggctcaggcagcttcttcagattcctgagaccccatttcctggatcatcacaaccatctcacaggatgcaatgaaaagagctgttaagcactttgtagacttggctacaaatctgtgcagatttggttgcaaaatgttactaccctgacaagaagccatgaacgcagccggcactgactcaatatacttctgccaaggtcccaccatcaaaactgtcttattgaagttaacttaaggaaattgttatttctaaacttcatatggtaaatgaaaaatactgaacaaggcaaataaaacaagataaatgaattccagaaattaacattcagtcagtcctaggtattgttactttttagagcattaagatacattgctatattggtgatttagccaagctaagatccctatactcaatcaaaatagttaaataattttttgtttttcccaaaaatcattattttttagttttaggatgttggcaaacactgtaatgtgttttttttttttttttgagacagagtttcgctcttgtcgcccaggctggagtgcaatgacacagtctcggctcaccacaacccccgcctcccaggctcaagcgactctcctacctcagcctcccaagcagctgggattacaggcatgcgccactaggcccagccaattttttgtatttttagtagagatggcacatgcctgtaatccgagtcactcgggaggctgaggcaggagaattgcctgaaccgggaggcggaggttgcagtgaaccgagatcacaccactgcactccaacctgggtgacagagcaagactccatctcaaaagaagaaaaagaaaatgtagaaaatatttgatttaagtgacctcctaaaatttagaaatacctaggaaac

SEQ ID NO: 344866 - DNA, 1000 bp, Homo Sapiens
tcagcacagtgtccgggaatctgccttgtggtcggctcttaccttcaggctgctctgagcccagagcagaatggtcatcacagctctcctcaacttggcattgcctgagatcaggatggctgcatgcccagagggacaagctgccattatcccaacacaaaccatcacccctattttgtcgcgccacagaatcagtaggggcacagagatgaaggcaacacaggatgatatcacaaagaagcagaaaaaggagacaagagacttgagggctttaatgtgggcctccaggctggggtcacgagagtttctggtatagaccttcattgtcctcatgtgccttcccagggagacagtcagcatcccagaagaaaccagaaacaataggaaaggaggcacagaccacagatagcagaagagaaaggaataaaataaattgagatctttattctgccagttgagccttgtattgttattcatgaatagcacagttgtgactgtgaagtgaggtctgctaaaaaagcaccaaacacagaggacagtgcagatgcaggagcaaagaataatacccaggagcatctgggagatcttcctggagacccagcttgccaagcagatcaggaaggtgtgagagaaacggatgagcttggagcagtaaagcaggctgaggcaggcagcaagccagaggttggcttggtttgcaatcatccatagcatgatgatggcttggtagctgtggttcagtggttcactcaacttctggaagtgggtaagctggatagcactcaggaacagcagtccatgcaggaaaagccggctgatgctgagacacagcagcacacaatcactgttgctcagtgcctgcctcttcactacatcccaaaaattcaccaagaaaacgaaggcattggtcagaaaccccactgcaaactccaggactgaaatgaacagaaatgtactcctgacttcataggacacagtgcggatgcgagttagagtcaac

SEQ ID NO: 344867 - DNA, 1000 bp, Homo Sapiens; identical to SEQ ID NO: 161024

SEQ ID NO: 344868 - DNA, 1000 bp, Homo Sapiens
tttttgactctactagaaattgagttttaatatgaaattgaaaataatggtaaataaatgatgctcctagtgagaggcagtaattctttaatccaataatattaaggccaaagaaaggagagcactgaagcttatctggtgctggtcagaactcttgtaaaatgcaagttacaaaaacaataagatattatctcacacttagttaaaaaaaagtatatatataaaatctgtgatgaatcaacccatttcctgggcaagaataccaaagaaactacctcgcagatttataagggaacatgtatgagtatgctctcatggtgtttttatagtggcagggaaccagaaacaatctggttgtttatcaaacacatggtcttttatgattttctgcttcttttcacattgttccctttgccctcttttcttcctggaaagttgagatcactcttcaggagcctactgaaaaaccacctgcatgtgggggaacataagagattcctgtagagaaggctgaataaatgtcagtcagaagaaagcaaagagagacaggagtgacgtcacagtgaattcagcaccacggacagctcacagcactccagcccgggcgacagagtgagactgcgcctgaaaaaaaaaagttattggaatgttttgatatcagaatttctggggaacatttggatttccagaatctctttcacatcagctgtaatgtgagtgtgggcatagagctgtcaagtattctttctctttagtaccaatataatgtccagtagctattaattattccaaatcaagtaaattcttgctctagtatgtgttagaacaaaggttgaattctgatcaatatgacactaatacctgtgcccttaggccttgctctaaaatgtcctccttccaatgcagaatgacacattgccccaccctattccttgacactctttcgaaggaatattggatgaaatcaaatcaattttctatctggtgactggagctctgg

SEQ ID NO: 344869 - DNA, 1000 bp, Homo Sapiens
ttttttttttttttttttgtgttttatgctttttatttttcctaatgaagatgcaattaatttaagatggcaccttgaactactgttgatatatataataaatagcagtgcattacaaaatattcaaatacagtcattaatttttttctatttttccccaagctgtggcaaccaacaaaaaacacaatgacgttctagtgacctagatataattatgttcctttcagaagtaaagttttttaaacatagtaaaaacaatatgaccttattaaaataaaactctcttaactatacgtgcctttaacaaatttttatatttatatataaatataagaatatacaaagcttgcacataactaataagtataatagcatatcattaagaagcactgttttctaaaaaattcgtgagtctgcccttcttgaaacataaagcttattttccattatctgtatgccattttaaaacctttcaatattcccttgaaattaataaatatgaattaagattaatgcacaaaacttctgtagccttaatgtcatatatgataaaaagagatctagaagatactagtgtaggaaaatctaagatggcatcactatttctgcactcttcacttgaagcacgctgaatagctccactggttacagcatgtctaattaagatcccccgactctgtgtaagctcttcttatttcctggctacaatttatagcactgagccaagtccagcatttccacaaactgcagcagagtcataaaacactaccaagcaaaaggaatatcagttgcaaatcaatcctatctcctagaaaaaacaattggtaggttatttccactagctggcaacatacatagtaaccaggacacaaagcaagtaccagtacttgggttctggtcccagctttacaaaatattagcatgtcctcttaatcacaaaatttcactgagaatcagttttcttatatgatttgacaaattttacaacagttgtgaagat

SEQ ID NO: 344870 - DNA, 1000 bp, Homo Sapiens
tttttggggatacagataacttttatttatttacataataaaaaggtgcttatttgaagctcatatacatatagttaaaactcagtggtaacctagctattatttagaacttaggccaataagagtttttcttttcacttttcttttctttttttccttttttttttctctttttcagggagaagcattttaacactgacattgtttggaattgccagtgcatggtaataataaaaagcagtcagttaagaccagcctgggcaacatagcaagaccctattttaaaaaaaataccctacgaaatccaacaaaaagcattcagaattttagttggcttcattcttcctcttattgtctgctcccagggtgaactgctcctactaccctcagctatggaatgccactatttgggactaaaagaaaagggtcaaagttcaaaatttgtgatttgctgcagtcatttatccatgcacttttttactccctctacaagttctcaagggcacttgctgtgtgccaggcactgcattaggtactaggagtaaatatggcatgagactgaacccaaagaattaacaattgagtgagaggtataaataagaaattgaagagtaaatacataacaacagggctgcaactgggacaaatatgggaagcaagggaaaagaacacctcacttggtttagggcttcccaaaagggtggcattgaagccaagacccaattacctccatgcctgggagccatgcccatgctgacgttgttgacagccatcctgtctcctcctttctgctttcaccaggacgtaacttgggttcccaaaaggccactgtcatgctttctgtttcctatatgacctagcactgggactattcaccaagttttggtcttctgacatctcctctgtgcacttccattttattcccacccaccagtgagggcactcaggccatgtttcctcagggctggctgcaccagggtttccctcaaagtgttccttc

SEQ ID NO: 344871 - DNA, 1000 bp, Homo Sapiens
ttttttttttttttttttcaatacctcataaggtcactttatttggaaatacattttttacagaggtaatcaagttaaaatgaggtcattcaggtgggtccattatgactggtttccttataaaaagaggagacttggacacagagatagatctgcacagagggaagacactgtggagacacacagagggaatgccatgtgaagatggaggactggaatgatgcatctagaagccaaggaacacctgaggctcccagaagccaggagggaggcgtggacagctccttccctagcactttcaggagaatggccttggtcaacaccttgattttgaacttctggcctccagaactgagagacaatgagtttttgttggtttaaacaatccagtttgtactactttgctacagcagccctaggaaatgaacacaggctccttccagtgatgaaaacctatgctgttggtaagaaacaacagtacagcctgggttaaaaatggcacagtggtttaatctctagaatctcagacaacagatttgaggtattcattcctataggatctggctgtgcttcctacactgaccaaaaaagattcatgtgttcagatacaacaaagctagctttctaacttactaacttacaatgtatatgcatatgcacatgcctgtgtgtttcccaccatgtatttattcttcatgcttggttttctagcattttcaagtttgcagtaaaaggttcaatacacatttatttctctagtctgcagtggagcaggtaacatatcctaaggagacaagagttttttttttttgtttgtttgtttgtttgagatgggttcttgttctgttgcccaggttggagtgatgtggcatgatcttggctcactgcaacctcttcctcctgggttcaagcaattctcctgcctcagcctcctgagtagctgggactacaggcgtacgccaccatgcctggataattttttgtattttagtagagacgg

SEQ ID NO: 344872 - DNA, 1000 bp, Homo Sapiens
taatttaaaattcttactgtttatttatatattgcatagctcaaaaagtttgaaaaaatgaagttttaacaggaagtcagtaaatgctcatagacccccttgtctctagcacttggagtccttagagatgggaatcttgacagcagaatttcagatgtttcaatcacttgccaaggaagtgccacacttgctcttcttcattactttctttatttggtgaagatgataccgattcaactaatgatcttgcttcctcttgagtgcaacggaaagggctatcagatatctgcacgtttgtgcaatttatagctcctccattacacttcttcataagcaatgctttccaacattgatgagtggatttaataacttcaagagcaaaagccttgtttttgaattctccattaaaagcaaactggttttctggttttccatctggtaccttatataatctaaaccaattaagagtagcttccaggtaacccggtttgaacttcttaacatcatcaatatcatgaaactttgaggcttcaggatcattcgcattgatagcaattaatttccaatctgtttcaccttcatcaataagagccaaaattccaaggatcttcacatgaataacttctccacaagaaagaatctttgagcctatttcgcaaacatcaataggatcattatctccaaagcagttcgtgctcttatctttttcatggggatcttcccaagtctgagggagggtaccataattccatatataacccttgtaagggaagatattcgccacatagcgtagctttccatcctttacatattgtttaatgggattcattggctccttggtggcaatctccattttagcatttgtccaccgaggtatttctacaatcatattaaacagattctcatattcatcatttcgtgctttcttcataggaatgccattttcctctttagagttcaccttcagaggaatatcatgaaagggggaaatgtagtgacc

SEQ ID NO: 344873 - DNA, 1000 bp, Homo Sapiens; identical to SEQ ID NO: 161025

SEQ ID NO: 344874 - DNA, 1000 bp, Homo Sapiens
tttttttttttttttttttggtaggaaatatttttatattaattctgaaaagctacaaaagtgcatttttacaaacttaggggaagttgaggttcctggggtgagtcctcggttctcccagctttgctctgtaatgcaggtctctgcaagggtccctgtttgtcccctaaggggagagcgcaggttggcctgtgcctccaccccactcccgattcaagctcacagcccaccttttccctgccccatctcagtgcaacaggtgatcgagaaccacatcctcaagctcttccagagcaacctggtgcccgctgaccctgagtgaaggccgcctgccggggactcagacactcagggaacaaaatggtcagccagagctggggaaacccagaactgacttcaaaggcagcttctggacaggtggtgggaggggacccttcccaagaggaaccaataaaccttctgtgcagaatgagggactttgctgtgcttcccggagggcttcctggaggagacagcccctagaggtctcacaccttctccccaagcacccgcaggtggtagatgaccacacggccaaaaaagtcagtggcatcctcaaacgtcaccttcagccggtccacttcagcagctggtatggggaaagtctgaagcgagttgttgtcctcagggtagaaatctacaatcttgtggagagcctgagtgccctgtgaaccttccaggcagccccggcgactggagaagccaccctgaaactggatctgcagctgggagacacggatgagctggggaaactccagcgtcacccactgggaggggccctggtctgagttccaacatgtctcctcatcctggtcgaaaagatgtttttttccaaactgccgagtgttgcgattcagcactgaactcaccctgctcactgtctctggacaaaccaaagagtgggtcatgtcggttccacaagacctcgcagggcttaggattgggcacagccttggttcga

SEQ ID NO: 344875 - DNA, 1000 bp, Homo Sapiens
gggctttattttatcaaacatttattgattgcacaatgaaacaatctctcctttcagatatatacatcagttactaaaagagtagatacaaaggtcaggaagtaattacaatgcaatgtgataagtttaataatataggtgtgacagcatacagaggagggggtgattgggtttgaggtgatggtgggatattggccaggtaatatttcatggaccaagtgatgacaacatagggtttcacagatggataagagtcttccaagtgtaccagggggaaatatacatgtgtggtgccaaaacagagtatggcattttctgaaagttagaaatttatacaagagtataaagttcaagagatggataagtagctaggaggtaaggccagaaaggtaggcaagttctagggcctttgaggccatggaagaaaacgtgggcttcaccctacgatggtcgtgttggagctcgtggcacatttacagagcttaactactcctttatgtattttttctagaagatgtagactcttatccatcatttcagaaagccacattttacttttttgaatcacagaaggatgcaagaaaaaataccaaggtaaataaatacaagcagggtcaccatcctttgaaaaatctctcaatatggatgttactgattgtgggtcagcaattacgtctttgtatgtatcgagaatagcaattctatttaaaacatctgtagaccatggactgtaggtcgtattatgggagataccaagaaaatctggcatgtctgtctctcaagaagctttaacatttttagcggatgcagtcaagaatatagctaactagaaaagggagatctgcattgagaaccctatcacacacccaaacagtagaagtatttgtttttaatgaggagggtggggcagggggataggggttgtggtccaggaaggcattgctgagtaggtgccatgtttaaccatcattagagtatttgctggacagaaggagaattc

SEQ ID NO: 344876 - DNA, 1000 bp, Homo Sapiens
catttgtaagagattttaatttcatcttggtatgccattaaggagtggaataaggatctctattcattttcactcacatagtatctcctacattctccaactggtctttaccacagaaacctgtggggccatacagcatctgcataattttcactcatcagactggtttgggtttcttggtggtttgcataaattataaacaagagcacaaaaatcacacaacatagactctaccataaggggacatgttccctctggccttgccagagtgatagggacgtgtctctgtgttcaagtctccaatgatgtccccagaaatgaggccaagcctatcctggcccctcctggatgggtccacagtgacccgctgtcttccccaccaactcattctgggttcccaggagacttcctagcacagaacaataccatcctagcaccgcaactggagaccagggtgtggaactgtccccatgtacaatggctgctgggtcttctgtgccgaggatcagaggagtgagttggaaggaagagccaagggtttccactggaaccttctgcctctatgagcgccatgaggttctttagaaacagaccctctaaaacaaggggccccaaactttttctgtaagggccagacaatacagatagcaaatatttcaggctttccaggccacagacagcctgttatatattcttcttctccttttttttaatgacctcaaaaaaaaagtaaaaaccattctttgctggcaagccatagaaagcaggcccgcaagcaggagtttgcccaaccctgctctagaacaccaccaggccctcctctatcccctcagccttcacctcctccccactctgggactctgggatccctctgaactgctctgagctggtgtctccttcagcacaggctttgcagagggacttcagcaggcagaactgccctctggagttcaggagccctcctgctctgcaaccctatgtaccctcctttgccaagtga

SEQ ID NO: 344877 - DNA, 1000 bp, Homo Sapiens
ttttttttttttttttttttgtgtttcattttctgtttattacttgaaatcacggtgctcgtgtaggtttttttttttttttcaattttatgttttcatacatgaaactcacgccaggtgccgggacccccacagcccgaccccccgagggcgggtaatgctttcttgggcagcccttaccgggcagagggtggcgagccggttcctgcctggaggttccaccctcaaccagtggaggcacagacgttatttaaaaatcgttaaaaaacaaaacagaacacacatttaaataggtatccaagacagttcttcaaaaaacaaacccgccccttttactccttttttttctatttttttttcttttttttttggaaaaatgaaaacaaaacaaaacccaaaatccttgagctctaccctctgggacccctccctgcccaccctcccacaaaaaaatttacagcgctacagttataacacgtgatgttcacatctgaaaccattaactttcaacacataaagggggggagttgaggacctggggttcacctacgagaacaacggtgggggacaggcagagccaggacaagaccgacaggtggggtgaggaagggtccagacatctccattatcattaaaaaataaaaagtgagtggggaaaaaaatccaaaaactaccccattgaaatggccccagtaggggatttgtccctcccctctggagacagacacccctagggcaggggcactgagaggcagggggtccaaattagaccagcagcggaccccgccacgggggttaatgctacacggagttgtcgccccctgcccaggggattcacagctcagcaccccctcccatcctcgctgcaggaggggcccccagacagtcccaaatccacatccctcaggttgggccgggaaggagggctcggaggggggaactccccagcacccagccattctctcccctttttcaagagttccccaaccactattggctc

SEQ ID NO: 344878 - DNA, 1000 bp, Homo Sapiens; identical to SEQ ID NO: 246604

SEQ ID NO: 344879 - DNA, 1000 bp, Homo Sapiens; identical to SEQ ID NO: 337526

SEQ ID NO: 344880 - DNA, 1000 bp, Homo Sapiens
aaaaattctattattatggttaaacttttataaacaaatgttagagttaatttaaaaacatttatatttggacatgcaaccatactcaagtgccttgtaacatattaaataggccgttttagatcattattaatgttccagacagaaagctgctcatgctcccaacaagtgacaggttagtgtgacccatcacataccgtccatctgcatcttctttggctgcatagagggggaagacatagaagaagtcacccggaagtttgcagggagagtctctgctgacccagcagctaagccacgaatgtcctttggtctaaacttttttctccatgaaggtgctctcctaaagcttttatcatcatcttcatcaaaccttctatcagtccccatgaccaaaaggttgttaaattctctttccaagacagcacgagcctgtgtgttctgcgtcgggatctgtaacagcagtgccagtgcactgaagtcgaaggtttcatctaaggccagaagtgctccgtgaacaccactctctataagattgtttgcatattctttaaggccaattgacaggatccagcgaatcactcgatcattgctccaaacaagcacgtcttttatttcactctgactttcttctctttttctttccagttctttccggtcataatttaaccttctcaggcacataattccacactggaaactgtttctgtgaaaactgtcgaccattttcagctgccctcgaaggtctttcttggtcaagtggtccagcatcctggcgtctacaaggcactccatgaagtagctgcggtactgggggaggcccaggctggggagccactcgttgccgatccactcgtggttcatgtccccataggcgagtgtcgttctagatgtgggcggggcagacgggctggtcagcgacatgatctcctggatggccagcctcagcttcagcctgtgcagggggttgctgatgccaatctcacgctggatctctgtg

SEQ ID NO: 344881 - DNA, 1000 bp, Homo Sapiens; identical to SEQ ID NO: 161026

SEQ ID NO: 344882 - DNA, 1000 bp, Homo Sapiens
ttttttttttttttttttttttttttagcatagttattattgtatttattgtgttggaattttaaaaatgcagaaaaaatgcagacaatttttccaccccacattaacatgacagcatactgcctgttagtccttttccttttttttgagacagggtctcactctgtcacccaggctggagtgcagtggtgggattttggctcactgcaacctccacctctcgggttcaagcgattctcctggctcagcctcccaagtagctgggattacaggcgcgtgccaccacatctggctaattttttgtatttttagtagagacggggtttcaccatgttggccaggctggtttcgaactcctgacctcaagtgatccacccgcctcggcctgccaaagtgctgggattacaggtgtgagccaccacgtctggcttagtctttttcctgtctccacctctatctacgtacataatgagatggagctgatcctgcatgctcagtcagtgccttgcatgttccactgccaagatcacagggacacttccccacactgtcagagctcaggcacagtgccctgcagtgagggccaacccccaggacgactgggtgtgccaggccagcccacctgccccactctcactcacctccacacagaatgatggccgcaatgaatagggccaggtcactgtcatcaagttccagggcgttgaacttgacagcaaattcaaacttaggctcaatgatatcactgaagggtttgcggaggctgcgcaggaactcacgggtgacaaagccactgccgttggctaccagcagcccgtccttgttgacgatagaggccagcatggcgaagatggcctcgtgcacgccatacttgagaagggtaacctggtcgttgaggaagaggctgctgaagctggggatgctcttggcgaactcagtgagctcccgcacggtctccactgtggtgcactggcagcggtagaagacgtgcacgctgatc

SEQ ID NO: 344883 - DNA, 1000 bp, Homo Sapiens
ttttttttttttttttttttaggtacatattttaggatttttattgctgattacagatttgaaactatgaaatgtgcactgcttggcaagtaacacaagtaattctttacttattcacatttccaataaaagcgtaaataaacagacaaaaaatataaaggacaagagaaatacaaatagcaacagcttcaaaacaaaaggatttagtaacagaaagtctccacagtgtccgtcaaaatttaagattatccaaaccgtgcaaacgctcaacacaaaccaacgccatacactgaactattaatacttgtcccttgaagttgcaaactagaagccacccacataactgtatgatcacacaaaccaactaatttgctcaaggttcaggttaaagcaacatttaatatcctttacaagatggaattcgtgacaagttcaaaaggagaacttcctttgttttaatgcagctgtgctcagaagcctgtgatttcctaggaaaccatctgggtttagcccattagaaaaatgcagtttaaagcagtgtcacactggctgcctgaaggtacccttggagatactggagcgcttctgcattcaggctggtgctcaccattgatggaacctacaagagatgggaaacacacactggctgttggagatcttggtgcgccaatacaaaccccatcttctacgggagagctgccacagctctgggaagagcagccagtcaagtcattaatcaccatccaaaaattctccagaaactcaactgcttttatgccttcaaaaataggtctaaagaaaagatccataaggaattactattattaggtgtgatagtggtattgtggttaattaaaaagtccttactggttaatgatgtagaataaggtacttacgcgtgaaacgtatgatgtctaagacttgctcaatacagagaataaaaggagaaacgaaacaaaactggcaagatattggtaattattgaagctgggcacatgca

SEQ ID NO: 344884 - DNA, 1000 bp, Homo Sapiens
gaacagacgataactttattggagatttacttggctacaattattacaaaaaaaacaactaaaggtaattgtgatccataaggtgcagactgcaaatttctgcagcatgattactgtatgaatgaatgacatcatgttccttaaaaaacagctgcagcatgtgatggtaaatattttattgtcaatcaaataatatgcattagttttacttgattttagtaattttccttcactatttacagcagaaaagccagaaatttacttcctgttcacctttgcatttttgctatgtaacctgctgctgcagtgaattcttagtgcatctataaaatttaaattgtctgtggttgatgtccaaataaaaatggactagaaaaaaagaagtaatgattaaaatatatttacaagttagttgtgaaaaatcattttcactgctagtggaaaatacaatggtctcaatgcaaatttcctagatattgctattggcgtctccaacaactttaaaaatcattttaatagtcttggtcttaaacatatctttaaaacttttcatgtacaatataaaataaagaaatttatctggaaataattaaattcctgaaaagtaatcagtggttggaaaaatataattattcaaatgtaattaaaacaaccatataggtaataaacatgacatgagtttctcttctgcagataatgcaaatgggttaaagactcttaacataatttcagatgcagttaaaaaaaggtatcaaggtctcagtttggtggcttcaatcttgtgtaaagggattaggcaccctaacggagcaagatccaatattttaaatcaacggggccttgtgcatgaactgcgctcgatctggattccagtgatcctctgcagtgcccacctgcctccagggagcgactgaagaagccgactgccgggggaacacctggattcatgaaccaaagcagcctcaagtttcatgttgtcaaggcagggtatcagaatctt

SEQ ID NO: 344885 - DNA, 1000 bp, Homo Sapiens
ttttttttttttttttttttttcttttgaccacaaaatggaactttattcagtcacagacactgaccctccaatagccccagaagcaagagcctagggcccagcaatccatacccagtccttggagttgggcagggtaggacgctggccaagggccagtgctgtctcttgcttacagcctgaggactacgggagcagcagctgtggcctggccgctcccaatgctgggggcttggcttggtgccccatccccttcctgactgagctctatgaaggactcttaaaaaaataaaataaaatgcaagcaaagtgctttgaaagaagggaggacaccctattcctgctaaggggtagaggaagaaggtgaaggcggctaggtgcccataggagaaggctggcacaatcttcactcccgccagtgtgatttcagtctcaaaagatgagtatttggctgagaaatggaaggatactccaggctccctacggagttgtgctggggccatgctgagctgcccttgcaggcagccctgggtgctgggggcagacatgcaggacactgggaagagtcagaacacaggtgggagggaatctcagagcccaggctccccactgagcttggccagcagctttgaactccttcagaggaccctaaaagtgaaggaagatgacatcctcatttctacctgagttgtgctcgcacgggagggacatctgtactcctgtggatgagaaggggaggccgcatacttgcctcctgtgtcctatggaggagatttccatcacatcctttccacccctccctccccggcccttgggcccagctctggccaggaaaagtggggaggccataaaggagaaagaccatgcctttcattttcttcctatgtccttatcgtccatacatcccaaatactaggaagctgaagaagacggtgactcccaccagggagacagtggcaggtgctgtgaagaattggcggtaattgattcggaagtaccag

SEQ ID NO: 344886 - DNA, 1000 bp, Homo Sapiens; identical to SEQ ID NO: 161027

SEQ ID NO: 344887 - DNA, 1000 bp, Homo Sapiens
tttttttttttttttatcacattttctttagtactttattgttttacaagtgaacctttaagtttctccccacctactcccgcagaaaaaggcatattcaattgtcccatactaatttttgaataacctaactctccctttgtttctactaagagaggtttctttttggctacaagtaacaatatacatatacccaaagcaaatggaacaatataaagaatatctcacataacaaaaagtccaaaggtaaagcagttcctggattggttaattcagaagcacaattcaggtgctttctatctacatcccactattctcagtgtgatagctttcatctccatacttgtcctttcatggccatcagaaggctgttgcagattagcttcaaacatccatatcacatatcttcactgagaagcagaagagggatgctggcaaatccctaacttgtatcaattgttaagagcaacagaaaatttcttattcaaagccttcagacttcctttgtctcgttagcctagattccatcaaatgatcaagtaagccaattaccatgattggcacagaatctaatcaacactcaccctctctaggctagggaagcaccctattctatagcacaaggcagccatacagagttttaggccaaaaaaaaagaaaaaaaaaatggggctttgtcagcaaggaagggagaacgaaatggctgatgggtaggcatatgaatgtctaacaaaccaacttatttgaacccagctttttcacacacacaattctcacacctgttttattttgaagttctctattgtgttctattttgatctacttctgtgtcattagctattcctgggtcattatgacttttaataaactttatacatgtatatttggtaggaactttcctaaattttttcaaaattaaaattttttccccaaaacatgtgagaattaggattgcagtcatgcattgcttagcaaaggggatacattctgagaaatgcat

SEQ ID NO: 344888 - DNA, 1000 bp, Homo Sapiens; identical to SEQ ID NO: 161028

SEQ ID NO: 344889 - DNA, 1000 bp, Homo Sapiens
ttttttttttttttttatctgcacatattttattttagtgttcaaaagaaactttcacatcgactttttttttaaatttcatagcctttaagtgactgagttcaggtttttagaatagaagaaatatattaaaaccaatttagcctaaaagtatcagtgagccttaaaccaaagtcatagattgtttttttcagatttgtaaaaagtttcccttgacagctaagcttgcttcattgttgaggggaagaaaaaataatttttaaataaaaactcagtattagagcattaatttctcaaatttctaaattaacatcttacttattttgtaaagttatatccaaaaacaaccaaagagctggtgtctccctctctaatgaccaagtagcttcttgcccatcttatataaatgtaggatttacgtttgggatgatacaatacacatgctctttaaagaccaaacaacattttctttgtgataactccagagtaacatcagtccaagtcatttatcaagttatttttaagtataggcagaagaagacgtaatagtaacatttaaaataatatgatgcctgaagtcagttttgtttctaaatgttccatggggtagtcaccatggtagaggcaacatttttggaggcaacttgaggagtatatatttcactgttattcttaagagagtcaaggccaaactggctggctgagcaacattttcagataactaacatcttgaagctattttacattttgaaaacttagatactgtaaattcatcacccaaaaataaatgaataggccagaaaaagcattccttggtatctttctctctgattactgaattaccatttactctgcttgagacatgtccaagaaccatgagattgctcagtctcattttcttaagttcgtactgcaatttacaacaagaagcaagaataaacagcacgagacagcagacacacaatccccattggagttaatttatgggaatcagtgggcg

SEQ ID NO: 344890 - DNA, 1000 bp, Homo Sapiens
aaaaattggttttattttattttatttttttaacagaatctcactatgttgcccaggttggtctcgaactcctgggctcaaatgatcctcccacctcagcctccaaattgctgggattacagacatgacctaccgtcccgggccctcaattcatattttattcttgagccgcttggtcaggtttgattcgcacactccctctgcagtgactccaggagcccctctcacagctcagagcggaagctgaggctgcagcctgccatcttctccgcatagtccgcatcgaagcgctcattctgcgccacggtgaaggtggtcttccagtccccagccatgcctttcctcatgaagggggagatgctgtggtccatgaactcctgggggacggtggtgtagttggtcatagggttcttcttcatctccttgaacgacgtgtgctgaaccacgaagtccacggtctcctctggcagggagcgccccacaaactccaggatcttttgaatctcccttttcgggttctccttcatgtcttcatagaagaggtagagaacagggtgggtgcggctcagctcccaccactcctgcacgtgctggtaccaggatccgtaggacacttctccgaccatgaacttctccaggaagctgtcccaggtcccaggctcagggtgcaccttggccatgtggtagaagtggtagtaggaaactgccacatcctttgcgttgcgggcaacatagaccaccttgaccttctgatccaacagagtctgggggagcagagccaggggcaggtgtgtcttcaggagtcgtggggccggtgtgtctttcagagtctccatccctgagggaatccctggggctttgaactcaaggaagggcacccgcatgaagatgggagctcggtgacacttctccaggtcaccaccctggtagatcatgtccagaatctggcttacccaggtagtgccggacttggggtaggtgctgatgagcaggtcatcag

SEQ ID NO: 344891 - DNA, 1000 bp, Homo Sapiens
tttttttttttttccaaatgacaaatttctggaagtttattgaaatgaaataaaaacatataaatataaagaatcaaaacaaatttatattttgaagaaatctgattttagtgtttaaagctaattagtacattttatatatcataaaaatatttttagtatattttcatgaaaatgctatagacttttgcctattgcccaacaaagtagctaataattcttatatttttgtttcagcctattcttcggaacagcactttagtagcttcttaaagttatattcaaagttgaaactgcagccataaatatttccaagagccacattcttccaaccagacagctaattactacagtcattatctgggcatatgtacccacagttgatgctttgctgttgctgctgctgctgctgccactgctagagacagactctgccagcaggctgaaagttctggattctaccccaacaacattatccagtataaattcaatcttataattttttcctgttctaaggggagtaaggtctgtgtagttggcccaacagctgctaaacggaattgttgtatttccactaaggccattgacttggttattattggagtccttgagtatggccctcaaagttagtgcagtaattccaactgatacacagttaccgtcagaatctgttgcctttaccgaaggctgctgaggaaatggctgtcctggctgtgctgccaccggctgagtgatcactaagagtgaggacacgaaggccacgtgatgaacaggaaatgcagacctttcaactggctgggcagtcaccttaatccacccagagtcacttgggctggggaggggattagtaatagacatggacgaaatgttaaatccaaggatactactgatgtttcctaaaattacagcttgtccaagagaaccagcaatttcctggagttcagataactgcatctgacctgtggtgccattgcttatgaactgaataggagggtctcca

SEQ ID NO: 344892 - DNA, 1000 bp, Homo Sapiens
agagacggagtcttgctctgtcgtccaggctggagagcagtggcgccatctcggctcatgcaacctccgcctcccgggttcaagcgattctcctgcctcagcctcccgagtagctggcattataggcgcctgccattgcacccggctcattttttgtatttttagtagaggcagggtttcaccatgttggccaggctggtctcgaaatcccaacctcaagtgatccacctaccttggcctcctaaagtgctgggattacaggcgtgagccaccgtccatggcctatttccctctttcatcttttaaaataattttctgaacatttaggctttttatttccttttgtcacaataaataacaatataaaacatatctttgcagaatgtctttgtatctctggttattttcatatgataggatcttacaagtagaattataggataaacagactactaaattgccttcaagaaaaattatatctatttgtatttttaccagaagtttgagtccccatctcatggtgatttattgagtatttaatgttatcatttcttaatctttgctaataggccaaaatgtgtatttatttatttattttactttgtacttcggtggcatgtcagttattattttactgtctctcagctccacattcactgttggttgcccgctccgtgaaaatagatatagactcttgaaatgtttcctttgcagcttgcatgatggcatactttgtcagtagagggcgctggagacacactgcaagaggaaggggtctttcctgattcctccaggctgacaggccaggctactggagagcaggcttttttccttcactactttgcctggagtggtttctgcagtgctggttgcctgtagggtgcagctttctccagcatttctccacttgcttctctagcttttgctttgggcagtggtggtataacctggagccacagtgcaagccggtcctgaagctccaattgctgctctccatttc

SEQ ID NO: 344893 - DNA, 1000 bp, Homo Sapiens
tttttttttttttttttttttgacgtctcttaaatatcgtttattcctgtcgtgcccaagccaaatcatgtcatcacctctgatttcctggggcaaacaaatagaggaagcaggaagcaaagggctggtgggttttccttagctttgggcccacttgggatagccaaacagtggaagcctccacccaaagttaacgggctttctaggctcatttgcacaagagcagactccaagaagtttcttctggaatttcaaatgtgatgtggtctgcaaatctgctccctgtcagctaagaagatgttgacctgtgcagatggctgtttccagaagtcgagctgtcagactctttccaagggcaggacccaggcctcccccatctgtctgtggagccctcataagcagcatcctgccttagagatgggttttacttagaattacagaacatttttcctctgggcattatctcagctcctaacttatgtttaacatttgagccaatgtccttctttgcctcatcttgggcattttgtggatttgttcatgcttccactcgacaaacatgcattcaattcctgccatgagtctgtctgctccgtgcgggagctgtaatggtgggcaacagaggcaacgtgcctgctgttaggtgttttgttctggtggcacacgcatgcatgtataaccagaggtgtgctagtgtaccagctctatgcccgagtaggggtgagggagccctaatttgtactatttgccaatttctatgatgtaaatggtgacccagccaatttcaagttacccacactcaccgaatgtggagttaatagagatgtgtatgttcatctctcagaagcctgtttgacctgctccagcacaattaatttaatttaactgtttactttgtaacctttacacatattaattcactcctataaacaatatcatagctcttccaaatcagagctgaagtcatctcaaccgggaggctattgatggattggcgatg

SEQ ID NO: 344894 - DNA, 1000 bp, Homo Sapiens
tttttttttttttttttttttttttttttttttttttttttttccgcgggagacagagcatttaatgagagcaagagctggacagtgtggtcaggaatcgtcccacccaaggaaccagacacatactcggtccttgatggggtttcctgaggctctcatactttctcctgccctggaaaatgccatccaggagctcatctctttgctactgcctctcttccagagcagcacaagaaggaaataaaatggacttgcgggggaaagaagatgcttgtctctcatgtctgtctcttacaggggggcttctgaagattcccacagcctctctggagttgttgccccactttggggtctttgtccgagtaacttcaagtagattggcccacgggcaggggttgtttgctgagagatcaccaagcgctgctcaatctcaacgatcctctgttgtcaccagccatggctgtgaaggccagtcaacaaagggaagattttacccagaggagctcaaacgctggcatgaaagactctgaagtggcatagccagtggaaattaacagctgtgtccactctgggcctcaggtgagggagggcctagatagcccactgtggcccccagagcgccatcactgcccatacttggagtgtgatcctagctatttggggatggcaggggaagcatctcccagaaaagatgacctgcctgggagaaaagggggaccccagagggtgccagccaaggcgtctcggcaaatgttgacccagacaacaggggaccaaggagttgaaggaggctcactggagaggtgggacagggggccagtcgattaaaacagaaccaagtgatgaagggcgtaggttggcctgtggtgcactgtgggtggcaagccaggtgtcgtcctgaagttggcaactcagattcctcatcctttggtggtggccacaggaggagttcccagaggcttcaggaggctctgattcccactcgcactccagcagtggg

SEQ ID NO: 344895 - DNA, 1000 bp, Homo Sapiens
ttttttttttttttttttgtctcctatcaaaatttattgaaatggtagatttttggtaagtacagaaacacaagcgaaggaaccaggaggaacgtgcacccctctaactgtggggcagaggcacatttcccttttaatgttaaaagcaaacagaggtgggaaacagctttctatcctgaagccgttttaactgcccaacccttagattactataaacaagagaggaatggattgcattagtcgctggttgaaagcagcaatgccatttcctttcccataataacactgtttagctcagtcccttctggggctaatcccctattacacccaccggaaacacagatattaaccaaagcgtgtgagtctcttccctgagtccatttctgctaaagcttgtctgaaagatgaattggtccacggaagccaggtgacctactggcttgtttaatgatgcctgggctccctccaggagcaacacaattccctccaatctcagctctccttatccctgctagagctcacaagcaggctagatatcaccccaggagctgagccccctccagtctgaggcagatgtgggaagaaggccaacaagtcacaagtagatctctggctccaactctgctcagcagaaatgcctacaatttgcccatcttcagtcctgcgagcgtcagagatgaagcaaaagtttcagatgcctagaagctttactctctattcctccaggattcctgcggtcacaccttgcaaccagtctcccactcatctgccaccgtttccctaaatcgcattctctgaatctggaagttccaggaaaccttaggccgagtccagtgacattactcgatgcaacagcccaactgtttctccagagatcctggttcttggtgacaatgtcccttcttggcatggttatttaaggagaggttgggcccagataagaggggctccatggctcaccggagttggccattaacgcctctggagcgcctctggtttt

SEQ ID NO: 344896 - DNA, 1000 bp, Homo Sapiens
tttttttttttttttttttttttttcattttgcaaatttaatgtaactctgataccaaaatatgacagcacacagaaagcaaacaataaagcaggaacagcaaacagatttttccatcacatgacaccctcagctgattggccataactgccttgactgctgtgtggacaaagattccaaggatgtactttggctccatgggaaggactactgcaatttattagcggtatctgtaaacatggggaataaatctgaaacctcactagccatacgagaagccacaggcaccaagactggcggctccactgccaaagccagcactggtgctcggtccaccaccaaagccagcaccagtgtttggtccaccgccgaagccagctcctgtgctcggtccaccgctgaagccactggtgcttggtccactgcagaagccaacaccagtgcttggtccaccgctgaagccaacaatagaactgggtccactactgaagcccgtgctggtgctgggttcgccagtaaagccagtgctggtgttggaaccactcagccctggcttcagcctcagccacagccacagctgcagcttggacttccatctccactgcctcgcggtactgcacagcccagtccttggggtctttcttctgcaccctgcatgcaaacttgaggactttcatcttgctagtctcgtggtaggagcgcaagccccagaagaactcatattcaggtggtctgctgttagggaccctcttgtactccaggtacttctgcttcacaaactcgtctgtgatgagcttcctcacttccccaaagagtgaatgcctcaccccagggcgcagccccaacttgcgcagcacctcccagatgacagcctcactggccttgttgccattcataaaaatgacactcagaatcaccatgaggagacccagcttgggtgtgtccttggtcgttcccagtatgcctgcagaggattcctgagtgctgatgagaatataca

SEQ ID NO: 344897 - DNA, 1000 bp, Homo Sapiens
tgggttgtgcaaagaaagctttttatttgagaacacctagatacttttggaaatgttcttgttggatcacaaacaacctaattgacagtctatcgccaacatccacaaacacagcaaacagtccagtcctgcagaccacacagggtacatctagagggttctacttgcatcacccacacttccactcctgtgaaacaactgtcttgggcatgagaagggccaggataggccaggtgaatggcaggctgcccaacaaccccaatcccaaaccaacctcccaggccatgggcccaagtccctgcaggaagatgctaataggtacaacaggtagaacatgtagacacaaacatctagtttattttttctgactgtaaccaaagtcagcaaaagaaacaacaaaacttcagtgccctagaaatcctcctggattcaatgacaacacatcaatggccgggcacagggttggattccttttatgaaatcaccttataatctctcatcatcccaggacagtgccttttgggactgcatgaatctttaatagctacaccacattttctcatcctttaagttatgacagacaggttatctctctccaagagcatcaggttagatgctctttcactcttacaaactgtcaggtggagggagaatcacgacatcattcataaataactgtggagtctgggatgctggctgaaggcatctccaggaaggactggagggcgattttgctaaagggctgctcactgctcatttcactgcatgccgcttttctcactttggttgggagtttgaaggaccatgtaatcacagagattagagctccctgtgaaatcaatcactgcctttagatctccacaaagacctgttctccaatagcacatgcgtttctctgtgagctgtattcgcatcagcgccggagcctcagaaagaatgcgtgtttacactctgtactctccaatgggtaatatttatcatagaaatctaatacatattc

SEQ ID NO: 344898 - DNA, 1000 bp, Homo Sapiens
acttaataaatgttaacctttattgttactattatttattaaatgacactaaaacatggcagaatgccccagcaaaacaaaagtcaaccaaaaaactaacaaccctgcattctaggtaattaagggtgctcgattttcttaattaattactatgtgccagaacattgtaagtactttgcatatattacctcactgaatcctcacaataagccttatcttcaccatttatctatcatttcagagaagaaacttcaacctacctcatttttaatctaaatatttcttccattcagtatgttttccaatcaatcacttgcttcattcccaacacttttctttttcaaaaccgtcctaaaaatcaatacccattttagataaataaaaacacaaagatgaataaaaagtaaaaaagtaaagatcactcattattcttctacccaaagataactactgtttctatctggatatctataactccagtttttagtgtccttttaaacatatgttttattagtctcaaaaaatggaactatacttcgaatacttctatctacccttttttactttctgacttcacaacgcataatgaatagcttttcctggcaatatagatttccatcagcatacttataatatcctactgtgtgaacattccttgctttataaccaatccaatgtgctagatacttaaattgtttccaatttttactagcttagacagtgctgggatgaacagcctcatacatacaatctttgggcaattattcaattacttccttaggacaagggtttacatagtttaaggcttatatctgtattaccaaatggccaccactaggatgtgaaaggctccattttgccacaccctcattgacactactcagtaatagagactttcatatggaccccaattattttctagtaaaaaaagatttagtggctctgggtattcaatgggataatattcaaacaattctccacaactggcttcacccagctt

SEQ ID NO: 344899 - DNA, 1000 bp, Homo Sapiens
gtatcaaacagtaaaaaggggaaaaaaaattaaagtgagtagtaatttcaataatgcaggcacagtgggatgtaggtgtggtaggtcaatgcttgcatgcgattagaggtctttaacgtgcaaattaacgacattaggagcctaaaatgcattttaacgctatttttaaaatttttttcttgttttttttctacctcagctcaccagcattttcatgttttaacactattaaagtcatgtcaagtttttccacttagagaaactgcataatatatacactttactgcatatatgcaataaactggaagtctctgcagaattatgagaaatatactccagaaatgctcaacttatttcttaatcttacttggcagttacttttctgccaggtggagaaatattatgtcttttattgaggtctatcttgtttaggtgagacagtttatggcttagggaagaagctctgaaacagtttaaagcaaattttttaaagctgtgtatataaagttgctaatgatgaggctgtgattttcaagttattgaaaaaaggccctagagattaaaattaatatacacagcttttcatagaaagatggtattcaaattatcaccatcacaatctctttgtaattaaatagaccacaaatcagattttcccggcataaaattactcatgccagtgaattcattaagaattttaaagcacacaaacattttagccttttaaaacaaaagtatcctgaacagaatgtgggttactttccacactagttgttatttctaatataactgtgataggacaactgcatacatcttaacagctactacagaaatgtccttttccactttcatacactagacactagctgtcaaagacacataaaaatctaaaagctaaaatgttaaagtttgattgtgttgaagatttttctttaataaagctacttattttttgttaaatgatccaccttctactctgcattccaggtacttgtccaac

SEQ ID NO: 344900 - DNA, 1000 bp, Homo Sapiens
ttttttttttttttttttaaaaaattcaacagatactttaatcaaacaccaactctgggccaacaccatcctaagtactacagacagcagtgaacacaagagaccaatctttgccttcatgggacttacacatttaagccttttattctgcctgtgtgggtagcagcagaggatggcagggggtctggagaagtataaatggaatgaaacttcccttgcgttttcggtaaagctgcttaaactcagacttttattatgaaacaccatttgaatctagccaaggcagagatgtcaaaaggcagtggcagatggctcgaaagtattgggacttgggtatgtcataggttcaggggcaggagcaggagcaaccactctggctgggctggggtgatcagtgagggtgtcctcaagaaagaggcagctgagctgaatgttggggatgggtaggaaaaccctagataagatcataggcatcccaatacaattatcctcaaataatcatctttaatggaagcttccagagggcttaaaggccccatggatcagtgggaagtgtgaccaactcagattctgtgttctgaccacgttcattcacagctgggtgaccttgggcggttccccacacctctctcagctttgggtttctcatctgcaaactgggcaaacccttgcctcgcagggtcactgtgtgagatgtaaacgagacactgatgtgggggccctgagaatgggacgcaagttaaagacacacacacactaactgagacattcataggcatttcatgccaggcactattctaaaagcttcccctagaggaaggcagaattatgacccacattttacaaatgagaaaacttaacagagaaagtggcttatgcccaaaaccacatagctgataagttaagtagggcccagattcaaagccaggtgggctcattctgcattccacgttctcagctatggtgcaatcagccccatgagtatacaaaaaagcagcac

SEQ ID NO: 344901 - DNA, 1000 bp, Homo Sapiens
tttttttttttttttttttttttttttttttttttttttttttttttttttttttttttttttttttttttttttttttttttttttttagagaagagacgaaggtgattcagggccgagcagggctccctggaagccccctcttcctgccccaactttattttggttctagaatcattccagttggcatacccggtccccaccacggctgtcctgggcacacagttaacatgtcatgcagttagggggagggagagaggggagagggcagggggggagtcagtggcctgcaccgcacagccactgggttagagaaagtcggggtctcccaggctgcaaagccttgtccagccatgtgtctcctggccctgggctgacctcctgctgtggccatagggtagacagcctggccttggggctgggccatggctgtgtcaggtagggaaagccaccatcctgcctccagtcccctgggcccttgttctagcccctcctccccccatatcactggggataatttgttggcctgggtctccatagctcaccagttatggaccaaggaacaggggcagccagcctgagggtccatgctgtcacctgtgggtggccccaccgagcagatgataccccacctgctggcctgggtgagctcagcccttcccagcactcagccatgaaggcaagaagcggcttcctgggactgcgggacaccaggctggggatgacaagctctgcctgctctcctcctactggggctggggggtaaccaaagactgatgccagtagaggtgcaacagcccagcccctctgcttctgggtgggagcccccagggtgcccctcgtactccaggcccctgcccccacagcgatcaggccaaggcgatggatcttgaagccacacttgcgtggcttcctccatccagcctgagctccctttcttgatctggtaagtttctctgagaacactcacccgcaagaaactacttgccccagaatcccc

SEQ ID NO: 344902 - DNA, 1000 bp, Homo Sapiens
tttttttttttttttttttttttttttcattgtataatttaaaagctttatttccccccataatttgcaaatagatttcatattagttccactggaagttttcttcgtacagtcgcctttctcattgactatgctgttggtggggaaaactgctttctcatgaggggaagggttagatttcatagagatgctctgagctaatcacataaacaagagggtttgacctggcagcctctgaggcagtcaaggaggtcaagaaatcctttcagctaaaggcctagtcaggtgggactagttgccaggatcctctctgcagaactgcccaaacgtagctctctttgaccaggaagcctggaagtcagaccatcttctcaggccctgccaaattcccatcctcagtcctgtggcctcatgcgggaacattttatccaagcaaaccactggctttcgccttgaggtccaatgtgcactcttcaccaagtgcaagattgatcttcactccaaagttcaccgttcacacagtttttggcttgtgctttagaggctggtctctgcctctcctaggaatggtggcatcacagcaatggaagcacaaagacccaggcaagcactggtaggtagagtgtgggggcactgctgccagatgttctctgagcgtgcattacggcaaacactgcattagtgtgattggtgggtaattctacattgcagatcattccttcacagcaagacctacactccgtatgttcagaatctcggctgtggtggcaaccgacaaaatgacattcacttctggaggcacactttttggtgatggatgtgcttcttccgtggctggtgaagtgatgaactgtcaaacagtactgtgtattttgtggacaccatttgtcttctgcccatcgattgcagttataattatcccctgcgttttcacaagtaaagcacttgaagctatttggaaatggtgtagggtcgagaggaggcctcacattatagaagt

SEQ ID NO: 344903 - DNA, 1000 bp, Homo Sapiens
ttttttttttttttttttctttttttttttttttttttttttttggtagcatcaattttttatttatagttttttctaaacaagatccgaagaaacttccactttaattttccccttggagtacttaaagtacttcaaggttcaatgtcaaatgcagataaaaccccttcattttcaaacttactaagtgttaacaatacatttgatagtgagcagaatatgaaagtacagatgttatcaaaagaggaaattcttatgatactaggttcagagattaaagaatttgaaacaagggctttcatgactggggaaaatcaaagcttttcttgaagggagtgggcttttaatactcgagctattaattaaatgcagaaatgagataacatagttatcctgaacatcaaaaaagcaacagctaatacagctaatgcattataaataatgtatttcataactgaattagtaaagcatggttaccactctaggctagacactaatcagtataaccatttgtagtttctaattttaaaaagtttggcttcatatttaaatttcattttactatatatatattacatatatacacactgttgtctgtaactcaaactataatgcttgtctgtaaaaagaagttttttatttcagagatgcttaaaagtcccactactcaacctttttcctgtttataaaaaccaacaattttgaaattacttctagtgtagaaatgctcaatgattcatccaaaatttcaagcccatatcagtaggtagtttctcataaagtaatgtgctgtattttctaatatcatatggtcaaataccctgttcatttatgaacatttttcatgggcaagagtaactgaagacaatgggatcaagttgaatatgttgctactcactttgaatactaaattgtgcttgcatcctaaaaattaaaatgagctgcagtaagaattagaatataaactgtgttcatttgtaccatacactaaaaactaaaa

SEQ ID NO: 344904 - DNA, 1000 bp, Homo Sapiens
tcatacattatttctgtttcaagcaccagtaacccccaccctgccccctgccggaaaagtttttttttttctttttttttttttttgagacggagtctcgctctgtcgccaggctggagtgcagtggcgcgatcttagctcactgcaacctccgcctcctgggttcaagcaattcttctgcctcagcctcccaagcagctgggattacaggcaagcaccaccatgcccagctaatctttgtatttttagtagaggcagggtttcaccgtgttggccaggatggtcacgatctcttgacctcgtgatccacccgccttggcctcccaaagtgctgggattacaggtgtgagccaatgcacccggccaaaggcaggtttttttaaaaggagtataaatatttctagagtacagaaggggttaatattgtcctgtacagtttggttaattcctctttggaattaaattttcagaaatatgccaaccatataagaagtttaaaataacattaaaaactgaatcataccaaatagtaatatgtcacactgtttttatcaattctttatttaggtaacaagttggttatgttcactgcattgtatgaaacatcacaatatcatactgggaagtactatcagtacagggttggatcagagtggacagtttgaacgataaaccattttgcattcttcattccctatcttttaacaaccccccaaacccagtaaagggacaaacagcttttcacatcatcatgtaaagcactttaacttacaaggctaaaatctaaagaataaataaaatatattgtggcaataattccttttagaccaaaaatcaggtgcacaataaatcaaatgatcaggaaagctgtctgtatttaaatgtgtggctctccagaaacagcttcaggaaaacgttacagaaaataccatgaattccatttcacaaaggaccagatgatgactcattttaactacacacaagggcaattacatcctgc

SEQ ID NO: 344905 - DNA, 1000 bp, Homo Sapiens
tttttttttttttttttttttttttttttggacagaatcgacgtgtttattatgagggtcgtgggtgcggggtctcagaggcctggccggggctggggctggggctggagttgggtctgggctcacgctccaggctggtgttgggctcaaggctgggcttgggctcaggctcagggctgggctcaggatctgggctgccgtcctcctccgggtcttcatcccaggggaaggtcggcatcccccgcatctgcttgcggtaggcacgatcgaaggcttcgctctgggccaccgtgaagtggttcttccagtcgccgcagacccctttccggaggaaggccccgcgacggtggtccagcaggctgggaggcagcagcgtgtagttggacatggtgttggccttcatggcgctgaaggttgagtgtgccacgacggagcccagtgcctccttgcccagcggacggcccaggaacccacagatgcgctccacggagccctgtaagtcctgctgcagctcctcgtaggtgataaataggaagttgtctttgcccttcatccgaagccagcccttaatgtggtcgaaccaggagccaaactgcacttcgcctttgaggaagtccctcaggaactggtcgggtgtgcccgggtcctttaactgcccggcgatcttggagtaatgatagagggagaccacaacgtcccgggggttgcggcccatgtagatcaccttggccttggagctgaagaaggccttggtgaagatctggatgggaagatgggagctcatgaggcgggggctgtactggtccgggaggctgaaggcacccacaatggtctcacaccagggtgcccgctcccagatgggcacggagcggatccaggatggatccccttccttcaggattaagcagatgatctcgatcatccaggtcgtgcctgacttggggtaggtgatgataaagatgtcgtcgtcccgcacatcttgggtgttctccgccaagct

SEQ ID NO: 344906 - DNA, 1000 bp, Homo Sapiens; identical to SEQ ID NO: 161031

SEQ ID NO: 344907 - DNA, 1000 bp, Homo Sapiens; identical to SEQ ID NO: 308655

SEQ ID NO: 344908 - DNA, 1000 bp, Homo Sapiens
ttttttttttttttttttttttttttttttttttttttttttttgaatcaaagtcctccgtttattaacagcaatacccacatcctcttcatagcctattaacaacagaggtaaaactattattcaaattcaaaaactacggtattgcctttgctgtggcagttaccatcaccttcacactctaaggtagcaggtgacatttaaagcctgcttaaatgtcagaatttataaagtgggaatctcatctgaactttatacctgatttttagaagcaaattagcttctaccaaattagctaattagcatgccatattcacacttagaacaactgattagtaaagtcacttgactaaaaacagaatttctttataaaccacttaacatatttactcctgtacacagactattcaagaaaaacaaaatggtaaatttaatagttcagacatcttagacaagacttgacttttgggcttcagcaagatgtggaaacttttttaaaagaatttttgctttctttctctctaaattttccttccgtgctttgatgcgggctcgtttctcacgttccagtctgagaaaatggtccacataaggcaaggcaaagaatcgtttcctattgtatcttttatttaggtgccaaggtataacccactgcttgaacttgtgccagatgattcttccaaagatgtctcttctccaagcaccaggtctagctctttcttgaccagtctgaagaagccttagggcatcttctctttcctggacaactttatctaatgcatccatggaatctactaccttatctaaccgctctggacttggcattggcaatctctgccgcttggcctcctgctctagggttagaagcatgtttctttctttcagtaagacataccaaagtttgtgtaaatcttcattacttttgttccttagttgctgacaggtccatgctgctccctgtgcaggcagggacctgaggagttattaacgatcgggaaga

SEQ ID NO: 344909 - DNA, 1000 bp, Homo Sapiens; identical to SEQ ID NO: 161032

SEQ ID NO: 344910 - DNA, 1000 bp, Homo Sapiens
atgggttgctctttttatttttattcaaataaatacaatacttatgtatagcctgattaatttcccttgtcatatctcttttttcaggtttcaggcttagatttttagttgtgccatgctatggtcacatcataactgttctctaagttgaaacaagtatttcaacaggcaaatagcaaactcgccaaaagacctgtgggtcacttgcccaaatgaggcctactgagatgagaacaaacatctttttttggtaaaaactctatttttatagtgtatctttggatataatgcaattgtttcttccccttctttcccaggccaggcacttgaaaataagacatttcagggatgggcaacccactccattaacatccactggactcaatttcccaagaaaattaaaacagtgtgaaagaacactgcatttagcatttggcatttcagttaatgagactgataatgactgaaatatttttgatgtgctagaagtcaattcagaaatgtaggactggagaaatttcatttgttctaaatgagtcttgcttcccctgaaattccgtctttaagcagtaacttctttagttcgaaattagtctgattaatatcacctttattgggaagaactattatcctctctgtggcttggcctctggtatctacgtatattaatttaaataaaagtatggcttcaactgataattgatggttcagcttacaaggaactagtttaggcagtcacccttcttacatgaagccagttagggctaatgcaacctgtatggtcaacttcagtttaaaaatcttaattctcattgtaagaaagcagccaaatataaagccttgaggcaagtgggtctatggagtggcagatttgggagtgtggggccagggccacgctgctcatgctaatacaccatcagtacaaacagtggcccagttttgacttcctccagctccaagagtcacctctgcagagtggctgtggcatctgagagagcag

SEQ ID NO: 344911 - DNA, 1000 bp, Homo Sapiens; identical to SEQ ID NO: 161033

SEQ ID NO: 344912 - DNA, 943 bp, Homo Sapiens
tctaaaaatgagaacattcttcactgaaattatatattcctcagagacagatgccaaccagacattccataaagaagggctttttttaaaagacggaatttggccatatctttacactggaaacaggaacccacacgaatccacagctgcaaaaggcaacgcatccatagtcacatagaaatttagacgttaactggagctacgtggccgggcctgcctgtttggaagcaggaatgggccgctgggaatgccgcgggagtggagagcccgagctgcaggcggcagaagtgctggtgtcctgtctcctgaaatgctcttggctgggttgttagtcttccagtgaggcgtgcagctaagctcgagaatactcctccacctgactcttacagaggcagggaaggtcatctcgaatccttaaagggtcccttttctcttctttttcctttggaagttcacatcaagtttcattgaggcacacttgttcaacgtatttagtcgtctgcaaagaggttctacaaggtccttttcaagaaaatcatgatcattcttgacagccacaatgttgatgggaaattgtgaatcctcatataactgagcgtattgcgggaacccggcagcacggagccagtcacatgcttcttttgcctcaatttcttgttgaattttagtcactagctgatggcgtgctagaatccggctcatcctgtaaggagagcgtcttgtagtctgatcaaatcgcaagtacatctcctggccctcaggtgtcatggaatttaggtagtagcagcctgaggctggggtcctgggcacctgactgaacatctcggcagatttcctattgccacctcagtctgcctgtggctgttgccgtctgtctccagtctcagtcaaagagcaaggcacccagcccaggacagctcaacagcctcgtgccgattcttgc

SEQ ID NO: 344913 - DNA, 1000 bp, Homo Sapiens
tttttttttttttttttttcctattgataaagtaacaatattttcaaacaataacctatgtcaagcaaacagcacaaacaagttgattatttcagcttctaaagactcaggttttcttaatttgatttgaatgaactttataatacaattgtataatcaatatatgatctgggctggtgtcaaattactctgagttatttctttgataatttggaggtgaatcccattatggatagcaatataaacaatttagaacatattaaggatgtttaccgtctacttgagtgataaagttctccaccatggctcatatctatattgaatgagctgtacatgtttaaaattcttcctcaggagagaaatgatgtagtgcacaacgcaaaacaaattcatatgtttcctttgaaatgtttccaaaataccggtctcacagttctaaataaaaagttgtcttaagaaccaggcacattttgcactgactgatggttacttttaggtaaaccgcaatgggttaattaggataaaaattgctactgtacaattattatgcactatactcccaccttggcctgaaaataatgagatgtaacaaaagtttttatttgtcactggcagctgcaccttttaactgtatcacaaagtctgttgctgtggttacggcctttgtttccagtgatgttttgtccatgctttcccccaacccttaacaatggttactcaaaagaatgaaataatgagtcattcattcggaaatatgttaaaatatccctctttatcattacatttcactgcttagaaactaggctgtaattcaaggcaacagttaagtctgagaactgttaaaaaaatctttgatttttttttcatttttaagaaaaacctgcctatgtaattgaagaacctcttacaagtctgaacaattaaatcctttttggttaatgtattatttctggaacaagtagataaaattctacgcagtaagcataataaaaatcgtgca

SEQ ID NO: 344914 - DNA, 1000 bp, Homo Sapiens
tttttttttttttttcaactaatatttattaaaggtattttaaaactcaggttgatctctcatcttaactgtgattggttcaattttaccataccgaaagaataaattcatttgagcttttacctacgcctttgctttttgttaaaggaagaattcaatgcaatgtgttcagaaagttacatttaaatcgttaataaagagaaaaaggaagagaaagagaggacaccattccgacacaaacgtttatgtgattttagccattacaacagtaattcagaaatatctcaaatgttacattgatgtcatcaatattacaaaaaaggaaaaaaaagtgacaggcaacagtgaagagcaccagagacccagcgcacacctaaagtagaccatgcttctttccttccactgccaggttatcgtcccgggaagccccccaccccctcgctttcctcctccgctttccctaacccgtctcgcgggggcatctacgcctcgtcctcgccctcctcctcctcgaactccccttgttcgtcggccgtggcgtcctggtactgctggtactcggacaccaggtcgttcatgttgctctcggcctcggtgaactccatctcgtccatgccctcgcccgtgtaccagtgcaggaaggccttgcgccggaacatggccgtgaactgctcggagatgcgcttgaacagctcctggatggccgtgctgttgccgatgaaggtggccgacatcttcaggccgcggggcgggatgtcgcacacggccgtcttcacgttgttggggatccactccacgaagtagctgctgttcttgttctgcacgttgagcatctgctcgtccacctccttcatggacatgcggccccggaagatggcagccaccgtcaggtagcggccgtggcgcgggtcgcaggcggccatcatgttcttggagtcgaacatctgctgggtgagctcgggcaccgtgagcgcccggtactgctggctgccccggctgg

SEQ ID NO: 344915 - DNA, 1000 bp, Homo Sapiens; identical to SEQ ID NO: 161035

SEQ ID NO: 344916 - DNA, 1000 bp, Homo Sapiens; identical to SEQ ID NO: 161037

SEQ ID NO: 344917 - DNA, 1000 bp, Homo Sapiens
ttttttttttttttttttttttttttttttttcaattcccatatcactgttaaaaaaataaaagtccatgataaagggaaaaagtgaaaaatcaaaataaagccaaatgcaaaaaaggcacagggaaggaagctgaaaaaggacatcaaatgagggcagtccctgagccaaggtctgtcccgaagctctcactacaacccccacctggggccaggtgtgtgtgtgtgtgtatgtgtacacgcacccttgcatgagggaggtaaaaaatgtgctagcagctggccgtggtggctcacaccagtaatcccagcactttgggaggctgaggcaggaggattgcttgagttcaggagttcaagaccagcctgggcaacatggtgagacctcatctctacaaaaaaccatttttttaatttagccaagtatggtgttacatgcctgtagtcccagctacttgggaggctgaagtggaaggatcacttgagcccaggaagttgaggatgcagtgagccagattgcaccattgaacttggcctgggtgacagagtgtgatgagattctgtctcaaaaaaaaaaaaaaaagaaagaaaaagaaaaagaaatgtgccagcaataaacaaaaaggtttatataccataatcaaatggaaactgccccaggaatgcaaagttggtttaatatccaaaaaccaattaatgcaatagagtacattaataaaatacacgacaaaaccacatgatcatgcccatagacacagaaaaatcacttgacaaaacctaacaccgtttcatcataaaacactcaataaactagaaataaaagagaactttctcaacctgataaggatgtccaagaaaaacccacagctaaaatcacactaaatggtgagagacttatgctttcttgtcagagtcaggaacaagacaagatgtctgctcttgaaacgtgtgttcatcattgtactgctcagggcaattgggaaaaataaataaaaggcatt

SEQ ID NO: 344918 - DNA, 1000 bp, Homo Sapiens
aaatggagtctctgtcacccaggctggagtgcagtgacacgatctcggctcaccgcagcctctgcctcccaggctcaagcgattctcctgcctcctgagtagctgggattacaggcgtacgccaccacgcctggctaattttgtatttttagtagagtcggggtttttgccatcttggccaggctggcctcgaactcctgatctcaggtgatccgcctgcctcagccttccagagttctgggattacaggcgtgagccactgtggccggccccatccatatttcttaaacatgttaaagcccgttcaaaatttttccatttcaaatggtatcaaagtccttgcaaatctcaattgagatacctcatcaatgattcaatgagtaccgggggttagaggtatatgaaaagatgagaagctcacactgggcttcttcagttacaaaaccccgttgggatcacacccactcttcttcgtgccctctttatggtgacattggtttggggtgcagatctttaggtgctaaagggcaactagacttgccgatggaggggtttggggaaaattaagggcaacctgcactgagttttcaaggctatataacttcagtagcagttgtatgcccatatgaaaccatgaccactaggagaggggcatggaatgacaagtcctagtgtgatgggagtgggacatttggttaagtgttggttcaatgatctagactcaatgagacactctgaaagctacaaactgcatccactctgccctacagcacgaaggccacgtttattactgaactcctagccagcctccagtgcccaagaacggtcaagaagattccttgctgttcacagagaccagacagatgatatcggtcccggaaatgcttcttctcagaagcagtgtcacagagggcttccttccatccgtttttctggaggggaagtgatggagaatgctgagatgaagaggagagtcacacacccagtggctgagagtggc

SEQ ID NO: 344919 - DNA, 1000 bp, Homo Sapiens; identical to SEQ ID NO: 344918

SEQ ID NO: 344920 - DNA, 1000 bp, Homo Sapiens
tttttttttttttttttttttttttttcaagaaatcataattttactgtctcaaagaaactttataacttatttacaaagtttttttcccaagatacaaagcaataagttaacattctcaatataaaactaaactttgacatagagaacacaaaacacagttgatttcaattgatcacattttccaaatttcacaagaaaaatgtcaagattctcatttcacaaagcatggggttttacagccacacacaacagaacgcaaaaaggctaagcttgtgcaacatgtttacagaacaacaataataacaataataataataacaataatatgtacagtcattagatcctgcactggagattgtgcgttcagggtggtgactggcattattctgtggtcgagcctctagggattgttgtaaagctgattttgtcttattttaaagcccactggaattagagtgcttgttctcgcctgttttctctctactccccatttgccctcgctccctctttctacccaaggaggaaatcagcattttccttcttgtccaggcgaagcaacagagttcctcccgaaatgagaaaatcatgttggcttcatttatcgttcttttcttttaaaaattatttattaaataatgtcggacatgtaaaaaatgcaaatcattcggctccaaactctccataccagagaagtacaaaagttactgtataaattaaaaatcaccacgtcctccttattcgtttctccccgtgcgcttaaagtaaacagtgcgtttgaacagtgcgttccttgcgcccagcagaaccctgaattggcaaacagcctcaggcgaagtccatttctcaataaataaaaccccctccctccaatgcccccagattcccacaccagctacacagatggtcaggcagagtgtcccaggatccggagatggtcagcccggcaggacccgggccgctcagaccttgtggctttttgctgaggccgcagaatgagg

SEQ ID NO: 344921 - DNA, 1000 bp, Homo Sapiens
atttcatgataaattttatttctaaaggggtcatacagttctgttattggactacttcagaatttattttgcttttagactataatgagaaactaaattttattaacaattgctattttagttcctgaaagattactctgatataaaggattacactgaagtaattatgtatgccttcttcctcagccctcctcccctaaagacaaagtatcttcagggtagttaataattttgagaatatttttcaagttgaaaaagagaaaaattagaaatagtattccattattaataagttcttaaagatctaaattgttcacaataatttttcatgataaaacatgcttatttattatatacacatgcttacatatgtatttcctgtctaaaatacatgcaaccaccatgaaaaaacaaatattaaaccatcctcacagtcctaagaatgcccttttaaataaggcactcatgtttggaaataggatgtaactactaaattaaataagatgtttaaagaagtcttttattaagcacaaacaacttttaatacattatcaatacaaataggaaaaggtcttttaatgactatgatatatcaaagatctgaaaggctttctctgtattgacacaataaaaataatcaattctgaagaattacaaagtaaaattttgaggacaccactgtctactaacaagagtttaactactgtctaaatttactaaatcacctgtggaggaagggcaactttttttttttctttttaatagagagaattcctactcttattagcaccattcaaagcttattatcagttgtttgtctacaaactgacaggtcaggtaaagctttaaagcaagttttcagtgcaatgtttatagttccttcttttaagatacttggaatctacagcctcgaagcatgttaagtaattatgccttggtagtagtaaggtgttaacatgtaaagagaaatgtgtcataaaaagaaatgagacttattttg

SEQ ID NO: 344922 - DNA, 1000 bp, Homo Sapiens
tttttttttttttttttttttttttttttttttttttttcatctacaacacatttatttgtacaatccagaaactagcaggaccaaaattagcagcaatgctgagacatttactggcagctttgccttctaccctaaggtcaaagtacttgagacattgcctgtgtgcctaaggaggcatcacacaaggaaagccccaccccctacttccttcatctgagcaaaggaacctgtttacatgcacagtgcttagtgggtgggactctccaaagcagtggaaattcagatttaacctaatgtatacaggtctgcgtcatgatggcaaattgaaggtgtcatgatttagctggtttctctggaacattcctttcaggagcccacacttgtcacacttcatgccccaaagggatcaggtgctctgggatgtctacctggaatacatccttgcctcctttcctaggtatgggctccagtaaccacctggggtttgaaatcacagtcaggtacttctgcttcaggttggtcagtacagcttgattttctagttccacaacctcatcgggagttaagtcttcggggcattgcaaagtttccccaatgtcaacgagtcccgctatcactcctcgaccaaacttttcccctttcctgagcaaggcctgaatctgagcaggagtcatcccgagtctctccaccagcagctcccgccaggcatcgccttcccagtccctgtgagcaatgtggacggcgatggtacagttccgctggctgctcagcaggggacgccagcgcgtctccacagtcttgattccatttaagacaaagccagcataaggctgccggaaggagaggcagccaaacttcatcttcgcaagcgccccgggcctcccgtagccttgatggtctcctgcttccgtctgtcactgatgtccagcaccacagcaggcccaagggaaggggctgggattcggctgactcaggtccatcccatggagtctttgggg

SEQ ID NO: 344923 - DNA, 1000 bp, Homo Sapiens
ttttttttttttttttgttctcatacaagatttattccccagcacacccctcccctcctcagttcacagtggagactatggagattcagggcaggatccctcaggtacaagaaacacattccgaagattttgctctccttccttccctccctcttgccaactcccaaggcctgaagcgcacactcatgcaaacacacgaaatccccctccttccccacacctcctgtctttccacatcagagctctgaacttgagaggtgtcaaaagtctgtttgagaagcctaaagtggggagatgccattacccctgaccaccccactatgagtgactatgagacacctaactcttccctcttctgtcaaccattttcactccctggcctctgtaccttctccatcaaccaagagcaaacatgtcagcacacccccacctgcagtacatgaaaacaggctctgtccaacatccctcacccaagtacaggggtgttgggggagtggcccctgaggatcagcaaagggttaatgcagaaggaaagaggacagaagcgtttggcttgagctctgcttggggaggcagaggctatagactggcacaggtttagaatcaagtaccatgtttaggtttctgtctcacatcacatgatttcactaggggctgcagaacagatacccctcagaggggtctctgctgattacagccacattcttactattggctcatccttaaaggaggccccaccaagttgggaagcagttgaaaataaaagctgtaaaggagctgaacaggaagtaagaataggtggtgcaagagattatggcccctgggatgaatgacatggagccatttgtaaagtgctactgtatcatcccccatgaattattgcttctccaaaggaggagcagaggaaggaacaggaacatagaaatgagtatggtattgctttgctcactgctgaggctgatggccagatggacccaggggttatcagaaaccgaagatt

SEQ ID NO: 344924 - DNA, 1000 bp, Homo Sapiens
atttttttgagatggagtctcgctctgtcacccaggctggaatgcaatggtgcaatcttggctcactgcaacctccacctcccgggttcaggtgattcttctgcctcagcctgccaagtagctgggactacaagtgtatgccaccacatccagctaattttttgtatttttagtagagacggggtttcaccatgttggccagggtggtctcgagctcctgatctcgcgatccacccgccttggcctcccaaagtgctgggattacaggcatgagccaccgcccctggctggctatttatactctttccctaactctgtccctggggaaccttctcccctcacttcccctggagttccctcccgacaaaacacactcacttttatcttgctgatactgtggcctggggaactgctgagccagtgtcttgcacaggttcctttggctgaggatcgaggaaggcctgccaaaagcaagctcaccctaaggtccccggggagagggcaccttggtgggcagagcctgaaggaagcaatagccaaggccgtgtggggctctcccaatgccagggaggtcccagccgagggagctgaccctgctctctctgtgccccctgctatctcccaggtggcccctgcacaggatccctcttcaccctgtcacctccctttaaccctaccaaggctcagatggagcagggggaaggacccagctctttagtcctgagatgaagttgctgaggtccagactgaccagaatgcacagccaccattaccgcttcccccagacacccctcaaaacccagaaaagcacgcaaggcaggtggcccccagaccccaggcctgagctcccctgcccccctgcctggccggtgcctccactctccaggtccaccaccagccactgagccacaccccctggaccagcagcagcaggagggccagggccaggccagggaggggcagggtggctgcaccggcccggcctcattacagccccaca

SEQ ID NO: 344925 - DNA, 1000 bp, Homo Sapiens
ttttttttttttttgccctgtgcacttcaaagctcatgtttttttttaatgttttatttttattttttacagagatgagttctcactgtgttgcctaggttggcccttgaacacccggactcaatcagtcctcccgcctgagcctcccaaagtgctgagattaccggcatgagctgccacgccttgatggaggctgagactttttggaatccctccctctctccatgtcctgccaagaacagaagtaaagttttccatcttaaaacatgtgtgtgagtcaatagacctgtgttatcttttcactcaaagctcaaccagtgaacagactgagtcagcttccaggaaacatccacggctgtaagagggggtgtcggctgctctccatagccaagtggctgcaaaaatcatcatactgacaaaaaaaaaaatcgacgcattttgcctgcttgcaacgtcttcctttgctgggggacgtcagggttctcgcacgttgtcgaggaaggatattgtctcggcttcctctgactcaagctctcatttttgtttacaaggcagtttagggatcgtccgtgcgttactgtgaagatgctactctgaggtttttcacagttttttttcccccatgagacacacccaaggcccacgctcagcacttgcgacctgtactcctgcagcctggatgcttctgtatcagctttgctttctagggttcagctttggaacagtctagagaagcaggaggttaattttcctccttctgtggaagttctgggtctcttacgcatcctccagttccccctggaggctctaggggaggatccttcctgcctctcccagctcctgggggctccaggtgtccctgggcttgtggccgcatcactccagtctgcctctgtctccacgtgtcctcctgctctgtgtctgtgtctcctcttctgtctcttggaaggacacctgtcatggcatttagggtgcttaataatccagcacaatctcatct

SEQ ID NO: 344926 - DNA, 1000 bp, Homo Sapiens
agatgggaagttccactgaacatccatgtcatatttattaggcaatcagaagtatggagctagaggtcaggaaagaactctaggacagaactttagaaaatttccaatactgagttggtttttaagtcacagtattgttatatataagagatggagatggacagagcctttattgtatatatgcccatttaaagatggaaagtggggagaggactagcttcaagaggttaaagtttggacacttaaacgtcttttaaacaggattgaaaatgagaggtaggacagagtaaagatgtgagaacattatggaaaggtagtttttggatcaaggtagataggctttgagcttgaagtacccaaccttgacaagagtaaagaaaacagcaaaagcatggagacctttcgtcagaagtgggaagttgcaatgtgtgtccccaaaatcaaggtccctacgaagatgaggtgggcacagagtggctgcgagcatgagggaggcagaagaatttgaagtaagaggtagctaccataaggaacatgggcatctccagggggttacaaggctggtcaccagcagtgagggtgccgctgaggtgggatagcttacacggaaagaacagtcatgtttggtggtttttctagagcaacatcagcagttggtatctggaggaggagtaatgaatggtgggaggacagtgaaaaagggaaactgtcttctaagtggagtgtctgagcaggacatccatgccagggggaaaagatatgagggagtcacaaagagtaggtagactgagaaagggaggaatttaggggctagaggtgacaatgaggacagagagtgattgtgcatatcagtaagaatggaattaggtttggtctagggcgaggagtagatcaatatgtaaatgttttggaaactaaaacaccagataaaaattaccattcctaatctacagctaaaatgtggttccctgttcttaatagatgatattttccctgatca

SEQ ID NO: 344927 - DNA, 1000 bp, Homo Sapiens
ggtggcagatattttttattatggggaaagataactgagaataaagctatcatgcagatatttgcagagataaaagtaatgcagatactgagtggagttttgatcaaactatgcttgaaagccactctaccactagttacacaaaccaataatttcccttcgcagtggaagtcagcttgagttttttcaggtgtttttgtgggtttcaccagatacagcaaagaaattaaaattactgttaatggatgtcaaaaccagtcagaagtatcctaagttatataatttgtcaaacaaccatatacatatattttgtattatatttatccttttgttcttcctttggtaggaaaattgtctcattaattcttatacgaaaggacttaaaattagcaaactttttttgcaaacacatggattccattcttggacttgaggacaacttgacgaacaggctggggaggccttgagtggtctggagccagcttgaagcggagcagagttaatgccactgccactttacactcaattatggcaaaatgctgcccaatgcagttccttaatccagctgagaatggtatgaaggcatagggatgtattttttcagaattttccctggagaatctcaaggggttaaagacctgagggtcttcccagaaataggggttgtggtgaagagcccaaatattgataaacacagttattcctgcaggtaaggagcgtccatctggaaaggtgatgggtttgtcgagtaaccgggatatgtttactaccggtgcgtagaggcggaggcattccttgatgcacatcgtggtgtaaggcatctggctcaggtgttcccaggtaatagaagacccatcccctaggagttccctgatttcatctcggcatctctgctgatgctcagggtactttgccaagcagtaaaggatccaggagatagcactggatgtggtgtcatgtcctgcaaacatgaacgttttcacttcagcctggagatctg

SEQ ID NO: 344928 - DNA, 1000 bp, Homo Sapiens
cagagtttagaagtcaaacgttttattttataactacaagaggttatttttttaaagcacaatgacatatttatttttagtgaattgtttttgtgacttttaaaaaaatcatttgtttttaataaaaacaagaggatagtccatgcaaaagcattctataatacatgtgaaaaacacacaaaacaagattagtcttgatgtagtgggagtcggattattttttctattaaaaaaaaaaaggctgggcacggtggctcacacccgtaatcccagcactttgggaggccgaggcaggtggatcacgaggtcaggagatcgagaccatcttggctaacatggtgaaaccccgtctctacaaaaaatacaaaaaattagccgggtgtggtggcgggcgcctgtagtcccagctactcaggaggctgaggcaggagaatggcgtgaacccgggaggtggagcttgcagtgagctgagatcataccactgcactccagcctgggcgaaagagtgagactccatctcaaaaaaacaaaaaacaaaacaaaacaaaacaaaaaccaaaaaacctttctttcttccttttcttctcttgggtccattgtttcttatgtaatagccagtacagttccttttcctgtgttagctttaatttttgagcctaaaattgtctaaacatctctgggaccaaggatatatgaaagcataaattacaaagaaaaaggttatcatggggctagaacttaaaattctgagatttaaaatagagtcggtcacctttcataatgtatcttataagactataaaaagggaggaaatatagagggtccacttttggtggacttcagagttatacagaagacagaatcaagtaataaagtccagaatagagttgcaccgttttgggctaatgaaaaaggaagaggctagggaaatctttcaaatgctgaatcttaaaatatgtccaggttgagataaagctgcctgctgaaacttgatctctta

SEQ ID NO: 344929 - DNA, 1000 bp, Homo Sapiens; identical to SEQ ID NO: 246605

SEQ ID NO: 344930 - DNA, 1000 bp, Homo Sapiens
ttttttttttttttttctcacttcttcagttcaatacagcacacctttattgagcacctaaggatctatgctgccagaggagggcagagtcgacaaaacagtgggcaggcctcccctgcagctctctgtgtctgtgatgatggagctgggttggggaaatcctgctgtgacatttgccctgacgcagttccgcacagcatggtggcttccaagctatgctcttgatgggcacccgtaaggagcttctacatgcattagagatggagcctctcctatctttgcaagcctttgtggttcttccctttaaatctgccatccacggacctcaacaggagaataatttggtcttcagtttgctctgttttagacaaatacttcacatgactgatgtaaactgttgcatagtttcgcaaaggctttctcattcattcctgaaattctccatcagtcacaaacacaaattgttcagtatctggggaattcaaagccctttcctcaaaacagacatttctccttatcattcttccttcaggggaagtattgaaagtcattgaaagtcatccccacccactagaggagagaaacgcaagcccagaaaaggcaagaggtacacaggcatccacgggacagtggtgatggggctgagcactgccttccagagctgctgctgggcattgagcgggcagcaccctctcaatgccatgtggaccctcctcaatgtgattgaatgaccgtgtttcttgcagcaagctccttgtaagaatcgctttaggtctctctgatgaagtaaagattgatttctgcagagaaagtgagatacttgtggccttattcctggtctcacctctgtgttggggctgagctgtgcgaggctcacagggtgatattggaggcttagaagccggggacactgtggcaaggtgatggctgaaagcaggctagatctcatacctgctggcaggccctgcttttcccagcagcattcctgtggggcagcgtg

SEQ ID NO: 344931 - DNA, 1000 bp, Homo Sapiens
ttttttttttttttttttttttttttttttttgcagtaatttaatttaataaaataaaattataagagcaaaaagttacatttctaaagtaccaaaacctgcaacaggctcatggaacagagcctagggatccaggagcataggaggtggtggtgctgggcagggctctgcatcccctttcctcagcacagcaccatcttcaccctcctgggaaagcagcattggagcctacaccgcttgtgcttttctcaccagggtaagaaatgcaggtatttgcagaggggagtgagtctggaaggtggcagagcacagctagggcaagacttaagggaacttgtgggaagagtaactgtggaacctacctatgctctcttgaccccaaactccccaaaacccctcactgaggactgtctacccccggggctcagaataaactgcttactggaagatgggtgacttaaggcaaaagggaaggctgcctcctgggctccccaatcccctgctgcagagctggtctgtgatactgagaaaacacctgcattttgccctttcagccagctccctcagaggttacagcagaaggggatggtgggagggtcctatttcacttcacccctcaggccctttccaccctcaaaccttctgcacaggagactcaacaggcacagccttctttccccgttgctttagacggccccgcgcgtagactctgagcaggagggcagcaaagaccacagccacccccagccctcccaccacagtgacagtgtggccatagagaaggcaggaaagaaggatggcaaaggcctggcggagggtcatgatgatggtgaagacggcagccccaaactgcccaatggtgtaaaagatgaagagctggccacatgcggagcagatggagagtagcagggcatgggcagcaaactcactgtgtcgccccatgaagcgggttccctccagtagggccccctgttctagcagtgagcccactgtgaagagg

SEQ ID NO: 344932 - DNA, 1000 bp, Homo Sapiens
tgccagtgctatggtgcctgtttaattgaaatcttgtaataaaagtttaaatacataaatttttttttttttttttatcaaaagaacatcccccacttccctgaccagatacatccagaggggaggcaagtggagactggctgtctgtagggagtggagaaatggcaggtccagcttgggctggtgtcctcttcctcagaaagtgctgtgggtgaacccagagtctcagggagcagaagcccccctcgctggctttcttcacgcggggtcctcggcaagctgctctgcactgcggagaacgtgcgccttgtcctcagaagacgaggaagagcagggcctcatgccggggcagtacgatgttctccacagtgcgctccatggcgcgcacctgctccggggaggctgtcaggaacgccaggggcccgatgcgctgctccgcacaggagtggcagaggtagccccccttgttttccttcctgttgctataggtgatgggcagcttcttcatggtaaggacggtgtcaacagggatggcattgttgcactgtcccacgcagcagcgcaccacgcctgtttttaagacgttgcttgtcagctctgcttgcaagaagtactccccagccaaagtcaaaatgttttccaatgatttggtcatgatgagacgcttcttggctcgagttactgcaacatacagtaaattccattcatcctcagaaaatgactcaactctgaagtgcggaagctggggcaggttatgccgggcacaaggcactttcacaaaatcatccaaaacatgcacagtgtcaaactccaggcctttggctttgtgcacagtgcccagaatgtactctgcaaagtccaaatcttctatatggcatttttctatcctttgcaccagctctggaatcctgatgttatacttttcaacaactgcgatcttggcttcaagctccttgtcctcggcagcggtcacatacctcttgaagccactaaagccttc

SEQ ID NO: 344933 - DNA, 1000 bp, Homo Sapiens
tattgaaatcaaattttatttttggaaaatgacattacacacatcttgcaaatgtacacagaaatgagaatgcgatgaagaacagagcttgagagccaaaataattgcaagagcagctctttggctgcctggtattgaatgctgcgaatcttcagcactcacagttcacagcaccttacacacatggcaaacttctctagacaaccttgaagtcctctgacccaagaaagccctcattgaattgcggagggggtgggggaagaggggtgttacaggcacaggagatgaaaagggtctgctccagctggtttatgggggcctcaccaaacctaccagtccaagtggggtcagcaaaccaaaaaaggagaatgcctcttgaaatactgcttttgaatcacaatttcagagtaggttaggtattgcctaggacactgatagtaatgcatttgaactcatgcccttgtttttttttctggctataactattctaaataggtggctaaagttcttaaatatctgttttatttctctcattttttctttttttttcaaataattattggtcatcggtcaagcagagtcttctgaggtctctatcttaaaacagctgcagggataagggacatcactacctactgtctttggattacatgtgattctgaaaactattcaatcctgaaatgtaatcaaatggccaaatacaaccccaatttaccactgatttttacgtaaagttgagtctttgatcacaatgctgttccttaagaaatgatcaataactgctgagagatggttgagaaatgccttttccccacattttggtttgtttgttgtttgctgactttacttggcaagagttattgggcctcaaatcagatatttacaactgtaagacaactgggagcagggagagggagagggcaagggggtgggaagaaggactacaaagaagaatatattcttttcagaggttaaaacgagttaagaaatgtgatgtaca

SEQ ID NO: 344934 - DNA, 1000 bp, Homo Sapiens
ttttttttttttttttttttttttttttaagctgaaaaactaaaaagctcctctttttatcacagttcttccacataaggctgatcaacatatcatccaatgatataaaattctagaaactttacaaaattcctttttaaaatttattttttgttatcaaagagaatgtccagaaacattgagtactaaagaatttgttcatggcattgttttacaaaattttctaatggagagtgaatattttattttctgatgtattcttcacttattaatgatgaggtcaatgaactgatgcaattatttaaaaaaaaaaaaacagacaaccttataaaggaaaaaacaaaaacaaaaacaaaaaaaaaccaaacgtccattctcattctgaatctgttgactggagtgaattcagtggtcacaataccaccatcaaataagaatcaacttcctcagagtaaggagctgttccgatcttctcaatagttcacacaggtctctcagatataggcaccatgttttaagtctcacacaaaatgtctgtgtcacttaaattacacaatatggcagtgtttgtcttatggggacatactgaaaggggcaaagtagaaaacaacctgtttgcatgttatatgtgagtacattattgtactgtgcatgggtatgagggcattgcagcccttgttaaagaggaattccaccaattgaagcctatgtcagttcccagctgctcttggtgctgagagtatctactcatataaccttattttgttagatcagagccctcttcatctacagtttggctgaaatggtttgaactgagtttggtcgaactgagtttggtcgtttatctcttccatctgagctttatttctcagcctcaggatatgtggggtacttgaccgtttctatcttctctcgaactttgtaggagggatataggcccgtccttcccaatttcctgttgacacctttagaatagccatcccaatgatttccagccaca

SEQ ID NO: 344935 - DNA, 1000 bp, Homo Sapiens
tttttttttttttttcacaatttcttgtctgcttttaatcctgaacattcttgaagcacgaaacagccaactgtttacacaacacatctgtgacatctgactctggcaccagtggcgccgcagctttcagctctgaggccccacgggctgcagccctcagctttgggagggcccagatcaggccactgtgacctctggctttgccagcaacaacaggtcccagcatcccagcccttccctcccctggcacctcccaaaagcacaagaatgcaaaccgagactggcccaccactgaggcaggggtggactcccgcttgagtgtgccaacagggcgggtggactgtcctggtgacttcctggtgggcctggccaaccaagaggccaagtggcctcaccaggccttacctggctgcctggcagcccggagaggaaggaggaaggacgctcacggtgcgacagctctggccacgctggcgggagctacgtgatgatcctggcgatggcttgcagggaggggaagtcgtcgtcccgggcagcatgcagcgcctggtggctgctggcatcgccatgcgcgagcacctgctggcaggtggggcacacacggcagtccaggcccgcctgctgggtggtggcctgccacgcgctcttcttgttcttcttggacttggtgctcagaggcttctcgcggttgcagaagtccgtgtgtgcagacaggagctcctgctgcttggccgtgtcgggcagcaggaccagcagctcattaaagaccttctggaaattctcccccagcaggtcccggcaactcttgtaatactgggctgcggagatcaggccctgtctgaactcccctgagtggctcttgaactcgctgaagcgggcctcgtcgctctgcaggaagtccctgatggactggatgagctgaaggttcctctcccggaagttctcggggactaggtacgcccgtggggcaggcagcagcctgggtgcttttgtggtggtg

SEQ ID NO: 344936 - DNA, 1000 bp, Homo Sapiens
ttcctagattcctgtgcctttcgattcacatggatagattcctctgacattaaaaaaagaaaacaaaaccaaacaaaaaaccagacaggtagtttcaaaataggacaagtattcagaaagattcctagttaagctttttaaaaaatcaactgcatatctgtaagcttaacagcatcatcacataattaaaataaccaaaaaaaaaaacacccccagagttcatgcttccaagcaccctcgaatgctcctgatgaggcgacaggttcacagcttgccaagaggtaacactgcggtgctgaacaacaagcttgcagagtcccttacatgggacgctaaggtgcaggatgctgtgtgaccaggtttggggaacaaaatctacagatagaaaggcgaagaccctagcatagtggggcaagacagcagccctctgagaagagaggcacttgctgctgttttgtacatcggtcctgcaccgggcctcacgggcagggagccccgctttaatcaggcttccacacctcacggagggcttcttccagcttctgcctgtaggctgtgtagcgcctcttcaggttctgcagctgttcatcttcttccttgtccaagatgcgcaagaaattctgtagttctggaaggctgaaggcttcccactctccaatttcatgttcacgaagaacaaaactaagtgtgtctgttctgggccctgctaccaaacgcaggtagagtggatgttcccggtctgagagcttgcaggcgtagacttggtcttccctgtgacaacgcttataaagtgcaaacttggcagggctctcagtcacgagaaactttttgagcagggcctcgatcacttccccgacagtgtttgtgctgctgatatgaagtgtattcatacagccattgctactgggagagagttttccagaatttggagaagtctgtggaggtttgcagagttccatctgtactttaatgaagccagtgtaaatcccatttgaattca

SEQ ID NO: 344937 - DNA, 1000 bp, Homo Sapiens
ttggtggagacagcggtctcgctatggtccccaggctggtctcccaactcctggccacaagggatcaagggatcctcctggccaaagcactgcctatgcaggtgtgagccaccgccgccggcccagacttattttctaactgggctaggggaaagggtagggtctgtgtggagctacagctgccttcagccttttttgttttttttttttttttgagacggagtctggttctgtcgcccaggctggaggggtttacgccattctcctgcctcagcctcctgagcagctgggactacaggcgcgtgccaccacgcccagctaatttttttgtatttttagtagagatggggtttcaccacgttagccaggatggtctcgatctcctgacctcgtgatccgcccgcctcagcctcccaaagtgctgggattacaggcgtgagccactgcgcccggctgccttcagcctttttatggcaaggctctggaggccaccctgcttccaaaggctaggtctgccttctaactctagccaggctggaccctggggacactgactgaagggaggaaggggtaggaagggcaaagaggtggtaggagaacaaagtggttgaggtttccatatccaaggccaaaagcagagcaggggttttgccagccctgataccccatgatgacacaatccaggagacagctgcaagtcatgccttgggcacctgcacttttcagagcattcagaggagaagcaatatcagggtggtccagaggtgaatccgggtgcctcagggggggaccggctcatctgtgaccgatcgaacagccaggagggtgtttccatggcaacaggacacggaagtcaccgtgtaagggtgtgtctcatccaactgcactggccgagggagtccggcatcctcatccctccttcccaatcgacctcgcgcccctttgccccaagagtacacttcgctctctgccccaatagctacagtgaaggcatccccac

SEQ ID NO: 344938 - DNA, 1000 bp, Homo Sapiens
cctaagattgacataatattttccattaattccagtaaagcttgttttttggggaagtataagtaggagggattaggataggaaattaattaatcttctttttttctcagttttgctgaaacggctcatagttttaaaagtctgagtgcttctactcctagaatatttaagcacaggccgggcacggtggctcacgcctgtaatcccagcactttgggaggccgaggcgggcagatcacttgaggccaggagttcgagaccaacctgggcaacatggcgaaaccccgtctctactaaaaatacaaaaattagctgggtgtcgtggcacgtgcctgtaattccagctgctcgagaggctgaggcaggagaactgcttgaacctgggaggcggaggttgcagtgagccaagatcaagccactgcactccagcctgggtgacagagcgagcctccatctcaaaaaaaaaaaaaaaaaaaaaaaagaaaagtaaagaaaatttaagcatcagcagatgggcttagtgggttgcggagctggaggggtagggggtgatatatggttgggcaggtggaagttggttatcatgggtgaccagctgagatttcagatgtcttcagctgatggctctgaaatgcccttaggtggtaaggacacagcaccacgaggttgggaaggcattagggagtcatgaagcagacgtaaaaggcaaattaggaggccttggtaagctgctgaaggtgagagaggcctgcataaagagcacagaggcgagggagggtgtctgggtcccacatatattgggggcccgatctctgcacttccaggccactcagcccgactagagcctccgtgagggtcagctcctcgtccccaagggaggagagcagctcaggttgcagggggaaaacaccctctttatccagcaggaagttctgttccatcgtgctctccaccagctttagctgcacgggtaggatctttttctccatggatttcacca

SEQ ID NO: 344939 - DNA, 1000 bp, Homo Sapiens
agcttcaacacagcagaaatttatttcccacccaggtaaggggaccctgaggtaggcagtgacttctgtcggcagcgagctaggcccctctcaccaggctgccctaccgtgctcagtgctgcctcatggtgcaaagtggttgctgagctccagtcatcacttcagccagcagaaggaggaaggagaaggagaaagacgtgaccccaccatctagggcatttgccttccgaccccccagctaggcattgtgtgttttattaataaggaaaagaagagaacagttagcggaggcctcccgctgtccaccaggatgaacttggcaggccggacaggactctgggcttcccagttaatggagtgttgaactggtggggatctaggggttctttaagtctcactctgtacttctcagaaggggaaactgatacccaagtcagtggctgagctgtggcccaggctcggcctctgcctgctgtcccagagctctgtcctggcaccagctactggtgaaggcagagcttgcagcagtcacagccctgccagaggacaccctggggacccccctgtaatgggccacccaccttcccggctctgctacccagtcctgcttcctctgcaggaagctgcaggcccattctgccccctccctggcacagggtagcctgtctgacacccccagatccatccatgacacccactaggctgagggcttggggactggagtctagagggcaggccaggatgaggctggaaaaattccatctcatctactcctctcctttcatcaactccacccctccactgctctagcctgctttagcctctgctagagcagagacaggtattcccagcctcaggcgctgtcctaagcccagcaggtactgaccctagatggtcacctcaaggtgacaggcacccacccagcatctggcccttccccatccaaggctgcaagttcactttccaagccagggtctcccatagcggtgctcacgccata

SEQ ID NO: 344940 - DNA, 980 bp, Homo Sapiens
ttagctggatggagtctgattgttaggtggattctgggctggcccacacgaggtccctccacccttgttccctcccgggaagattactgtggcatatgtcacaggcttggagcagaccaggaccttaggaggtagagggggcaatgaggatggagctgggagtgaaggttttcctgatggggaatcaagaggtaggctggtgtaggtggtattgtcaaatgaaggtggtgagtcaagcctaatgtgtggtacatccaaaggcaattcagcagccggtccagagtcactgacgtggtggaccactgaggagggattcatgcctgaaactctgctgctcaggaatcggccacagacaccaagcctgttcccttgtttcctcttggccatcacagcaaacagcaccaccgctgccaccagcagacctaccaggagcacagcaccccagatcaaggggatgctcttctcatcctggctgggttccaaagggttggcactgcctgcagggtctgagaatgcgttctcagccagactgccaatcttatgggtctcttcttcttcctctgggggcagtatgttcagagagactctgtgcaaaatctggggccccctggccccatccaccatgcagccatactcgccagcatcctcttcctgcagggtaaccatttccacctgcagcaggcccccacccaggtctgtgagaaacgtacgcctgcccgctggagctctgcgatccacagctgaggacaccaggggctggcacccctccggcaagaaccggcaccacaccttctgagctttgacatcctggagcctgtagtggcactgcaccagaatggagcttcccacgggtgcctgcagcacctcagggaggctgccaactatgccctgaccttctagtcccaggagcagcagcaagagcagggtgaggcccatggctgggcagagaaatgtcaactcctgggcctgcctgggcactg

SEQ ID NO: 344941 - DNA, 1000 bp, Homo Sapiens
tttttttttcactgtcaccatgaatttaaatttattgagtgccccacaaatgctagtctattctcagtacatttgatgaacaccatttctttatctctaaaggatgagagaatatttgctactatatattttttttgctcatcacccagccagaatacaaatggaactcctatgaatattctaaagcataatgaggaaggggctccaggctaaatgcaagtatccttgattaatgttttccccaccactgggaatcaccctcccccgctcccctgaagcttccccacaaggtgcggggggaagcaggagaaaaaaaaggaagagccaaggtatactcctgataacgacacaaaaattgagcagtagtactccagagatgtttgggggtgacaataaatacttgggaatgaactgatgaactgtgtgaatggagtggtaggaaccagctctgcccatctcgtgctccctccctgcacaactattcttacccagccttagctttggatcctattttgcataaaggggtactttgggtcttcgggttagcacgacttgccagttgggtaaatgtctgagaatgtttcctctgatgaattttataaacagccagtgacctactggcttaaagataagtgaaaatgaacgacaattagtttaaaaagcatgcaaacactaggctatgctaatgacagtcagatgacaaatggcctaatccttagtacctcttttcagggctccctcctcccctttcccaccctctccaatcttctttcaaagctcaaggtttgaggcaatggtcaagctccatagcataagaattggtattcctcatgatgctctccaccaatatgacaggcttggggtttcttccagcaaagcaagagagccaggtgcagatcaacatggctgcagctgctccacctccagcacagtaataggcccagccaagccgacaggtacctaactgaaattgattggagacattcccacatgtttgcat

SEQ ID NO: 344942 - DNA, 1000 bp, Homo Sapiens
tttttttttttttttgtagaaatgaagtctcactgtgttgcccaggctggtcttcaactcctgggctcaaacgatcctcccaccctggcctcccaaagtgctgggatcacaggcacgaggcactgcgctgggcccagaactaccttttattggaggcatggagtccacagtgggtggaggtctcagtgccttgggctcaggggctcagcgaaaggccgcggccaggcctagatgaaggtgaggcaggtggaagcggggaccccacagctttccttgtgctcctcgaagagctgctccagggccgtcatgtagagggcgtgatagtgattgacttcctcctcggtggggtggaggcgctgggggacggggatggggcggcccaccacagtggtgatgggcacagcaaagggcagcaggccccaggaggtggctgagaagagaccgcgaccccagaagatgcaaggagagaagcccatgagcttcttgaaggtgagctggcaccaatgctgccaggagcctgtggcaaaagccttaagtctaaagatgtcattctccccaaaggagtacacgggcaccagggacgccccgtgcctcagcgccaggcgcacgaagcctttgcgcttctggagcgtaaggcagtgctccccggggactgaatacagggcctcgtgcgcaccccccaccatgatgaccacggcctgcccgagctggggctgggacaggatgaagtccaggctctggcggctcaccggacagagtccaaaggacatgatgtagtcgcgatagaccgggaggtagaagaggccagccagcacggctaaccagggccggagccccgggaagagctgggagaagccattgctctcggtggagaaattacagaggaagcctgtacacatgatcccatgagggtgggcgcccagcacgtagttccgatccgggggcagctctgctgttttcaccagcttgacaggataataatcccttagttgtctccaaa

SEQ ID NO: 344943 - DNA, 1000 bp, Homo Sapiens
tttttttttttttttttttgaatgcaagatttctttttattgtgctgaaatggaactacataccgggtgttcaccaacaagcctgtctaactgcctagcaacccacttcctgaaactcttgctgggtccagagtctaagtgtttcagaagccacagatgagaaacaggaagggagcctcacccaggcagactacccaggaaacaacgaaggtgctggaggaggaagaaaaaggaaagtggggctcactcactgctttcattttgtggatgttggaccaaaacttggaactgcagccggaggatccctggactttgggcatcttggtcacagccttgcagagagaggttgaagttccccgccatgttcccaggctgcttgtcctccagcttgaacacctcggggttggtggtggagcccgggatgtagtattcaacccgctcctccttcctctcacagttggagaggttgaagttgaggaaggagacgctggcccgcaggtgtgcaggaacgacaaactgccacgtcatgagctcatcctcagggaagccttctgggtagttggcagacatcagggttgctgagccttcaccctcaaacacagactcgatgatgcacagacgttttatagatgagcggtttgcaatgctgaagccggagacatttctggggtggaaccatgggaggtgtaaggccattttcactccttcttgcatcttgatccgggacacagtgccattgctgcagaaggttccgatcctgaccacggtggcatcgattcggccgctgatggagtgagtgactccgtctgggcagctctcacccggaccgatctgcctcaggcgagggatggaaaactgcagctctaaaccgatgctcttatgagctttgacatcccagatgaaagttctgttgagggtaggcaacaacgatgtcgagggctgaagctgaacctccccaaaaggacatgggcctgacatacagtcaatatttttctggatc

SEQ ID NO: 344944 - DNA, 1000 bp, Homo Sapiens
tcagcagcatttcacgctatttattccccaaaaccttctgccatagaagacagccaccatacagattggaaaatgtggacgaggagaaaaggggtgtatggtaagcaaaataaattgtatttttccatccttggggaggataaaggaactctttgcactgctataataaacagcccccaaatgccagtggtttaattcagtggagttcagacctcattcctatatcattgcagtgtggatgctcctggatgaaggctcttgtaggtaactctcctccagtcggtgattcagggacccagcctccttctgccttgcggctttgccttttaaaggtcctcagggtgctctccatgtatcttgccaatggggaacgagtgtggaggactcacaagcgggtctcacatcacgtcctccggggctaatacacatcccttctccccacactctgttggtcagaagtcactgcttggcgccctgctacctttccttctcctccaccacaggaggaggaggcacagcagtcccaaaatgacagttttgagcacagcgacagccaatgcaaccctgatggcagtgtccagacttaggtgccatgattctgagtgccctttgctttctgtgaccctgaggccggctatggtggttgtgctgctgggcctccaggtggtggtggttgtgacagcctgggtgatggtgagtttggtccccttgatggactgcaactgctgcctccctgatctccgggtgtccagctcgactcggcagaaatacacagactggtcctccttccgcaggtttgagatcctgaggaagccgctctcctgaccctctgtccagttcagaaagagccggttcacataatccttgtgaatggaaggcggccttgtgctgtagaaggactgcccgtggaagtggccccgtctccaggatattctcacgttgggaactatggctaactcccaggggtaatagaaggagaaggggatttccacagagccac

SEQ ID NO: 344945 - DNA, 1000 bp, Homo Sapiens
ttttttttttttttttttttttttttttttatacttcaaacacaatttatttttaatttatcaaacaaaaatcaacaatttaagtcactgattggcaagctacagcctgcaggccaaacccagccctccacctgcttttgtaaataaagttttcttggattacagccacactcatttacacgcatattgtctattgctgcttttgcatgtcaacagcagagttgagtagatgtgacagaggccgcatggcctgcaaagcccaaaatatttcccgtctggccctttacagaaaaagtttgctgacccctgatttaagtgatcatgatttaaggacagggtgatatctgacaaaagtatcagtaagaatggggacagtgacccatcaaatagtaagatccccgcaaacagaagggagatcaagaagtgtatatttgacatcgtttctttgacaaacgttttgatataaattataattacttcaactacacaatcaaataatttaacaagaaccttttcctccctgattcagtcactttattatttgagcaagagaacagattgctgcttagtccaaaagaggtcacatctgaaagggtgaagaacagcttaaccatctcttatctgctggttcttgaagcaagctgagagttgctgtttgtcttccagatgcccatttcctcattgcagcagctgaagacttgctgtagccatataacacaagctgggaagcaatgaactcctcctcatctctctgctcctaggctccatgattgttctatttctttccggggaagggttactgtcatttgttttgttttgttttgtttttctgagaaacagtgattggctcagtcatgattgctattgagtttgtatgctattggcatatcaggcacttgctgactagaaaagttttatgcaataagttcatgtttttatggtgccagatggaagacagaccttcaagttgagttcccaggattctacacactcagaatct

SEQ ID NO: 344946 - DNA, 1000 bp, Homo Sapiens; identical to SEQ ID NO: 344945

SEQ ID NO: 344947 - DNA, 1000 bp, Homo Sapiens
ttttttttttttttttttttttttttattagcctaatgttttaatgaagaaacgcatagaaagcacttgctgcacccctggaatctcttgaatccaggaggtggaggctgcccccacccacacacacgaccttgatgccctagtcctcacccaggtcctctgacctcctctcctcttccctcccagtggtcacagcaggcccagctgtgcccaccctccctccaaacggctcagcccaggaaaataaggagccggcccatcctgcaggcaggtgccctctggatctcctgatgcgaagaagaaagaaacccatatggtgagggtccaggaggttcgctgtcattctgttgagtgacttagcttggagccaggaggtggaatgccctcctcccttgtttttcttccccaaggacttcacgtcctcctggccaaaacctcgccaggcatcttctcactcccattttcctggggctctgggcacagcctccatccttgggattggcttcccgggccagtgcaggtgtcggaagtgaagcttcaagggtccaggaccatcccagggtgaggtgaggctaggtgctgggttctatgacaatgagggtggcagtgctgactgcctggcccagcgtgttctcagccacagccttgtactccccgctgtccttcggggatacgctggggatggtgagggagcacacgcccagcaggtcagtgctgtacaccgcggggtttccttccaggctgcggtcattcttgaaccaggtgacgtggggccggggcgagccctgcacggcacagctcatgcagcactcgcagccctggggcagcaggtgggaccgcaggcccaccaggaaccggggcttctggctcaggtcgggctcccggtagcacggagccttcactgtgaacctgtcgcgctgccgggggatgcaccagggctggctggtgtccgagggtttgctggcccccagctcattcttggccaccaccctgaagtggt

SEQ ID NO: 344948 - DNA, 1000 bp, Homo Sapiens
cgaattgaggagtcctttattagccagcgaccgagagacggctagtgctcaaaattctctcggccctgaagaaggggctagattttgttttatactttggtttaaagaggggagggggagcctagctgtagcagtcttacagaagtaaaacaggcaaaagaagttaaaaagacaaatggttacaggaaagcaaacagttccaggtgcaggggctttaaatccatcacaaggtgatagacgctgggctttgggtgctatcaaccagacaaaaacacaggggcttagggtaatatcaactggacaaattcctgggaactgcggacatagcttgccacagcatgttatcagttaattgcattctttgatgtgctgggagtcagcttgcacaagttaattccttgaggaagggggtgggtaaggagcccttgatgtcttgcaaatgaaggagccaaatggagtccgttcaggtttctcagagttccacatggctggggaggcctcagaatcatggcaggaggtgaaaggcacttcttacatggttgaaccagttggtgacggtcatcatcacatacagggaagctaggaagaacacgaagtggaagtaggagtagatgtagacggtgcctttcttctcgtcataaatgacccgtggtccctccttccccggctgctgctcttcagtgtcctctccaccaggactgaagcaaaaacaacagcgagctatctccaattcaggagctgcgtatcgcccctgcagagcgtcagaactcgatcttgttgttgatgtcaaacatgaatacaagatacatccgattaagaggctggtccccagtatagtcaccaagttttcatctctgtacaggtcttgaccaaagtcaggcacacagattgtaacatttttcccatgttcatctagaactacttctgcaggtttgctggacagagctgagaaggtgaggtaggtgacatagcagcttatgacccctgattgtaagagccc

SEQ ID NO: 344949 - DNA, 1000 bp, Homo Sapiens
gctacatatagcacagtactgtgccctgttagaataactgaatgtgtcatacctgttagattctagttgtcttcttcattatgctgtaatctcatttaatttcatttcaattactcatgtaagggtttcgctgtaaaatcttaataaagtaaaaagctcacaataaataaacaaaaaataagtatgctgctttaaggcaagtgggcatccatcagttaagagactcaaacatgaattaaatgcaaacaaatatgaaaccaaggaaggctatgaattaagtaaaaattttaacattttgggtgaagtggaagccaaaaagtcaaaacccagaggatttggaaagggtgattcttgacaaatggtagtaaacttcacagtccagaccatggctggtcactggctgtccgtctgctattaaagtttttgtagttttggtaggtttgagagcggtaactaacccgtggagatccctgttcagctggcaaaccgttttgggaaacttgttctccttttgaagtatcccactgctgctgggactcggcttcctctgaaaccttcgtgctcggctcgggagaaggcggccgcctcttcctctcctcttcctcttgctgtctgcgcacttccagtaactccaatgtagtcagcctttccagggcagagaacctctcatcccaggttgctgcagacttttcaaatgcctcgtggcgcttgatgagcttctccacctcgtccacgctctggcctatctctcggctggataggtacggctcctgtccaagcagccaggcctcggccacactggcgtctcttgagaactgatggacctccagaatcagtcttaaccattcccatcggtcttcccacttgtcgatcatttctttcctcttttccgtcaactgcagtaatttttccttgatctcctcagatgcatagtgttttctcgccaacagggatttcccaagttcaatgcaggttgtgaaactgtcattacgtgcatcaa

SEQ ID NO: 344950 - DNA, 1000 bp, Homo Sapiens
gcaacatctcatccttagcaactttgtttggttagtactgcataactcacagcagattccaaggcacctgccttgaacattgctacatgctctaggcattatcaggaacgcagccagggtgcctgcaaagttgtctccagtttctgggtaagaggaccatcatccatattgtctgtggctttgtgtctgagttgggctactgagcctgtgacttcagaccccttgtctgcctgatggatacattctgtataatacgttaccatcacaatttcatgaatgtaactaatgaagatctagcccttccatgcctcctgctgaactatgtcacctgtgataataaaacctctacacatagcattttatacaaagcaagtcaaacagcaatggtagtggcaagtgatgtatttggcttaaagaagcttgtgttactgaagttaacgcagaagtctggcctccgtttgtgggattattaaatatatatcctacgggatcagagtcatctattagaaacagtgatagccctgggtataaataaacatttctttagagtttggcgtcagtttttcaatgtccatcctcaaatcagacagtctgtttgaggggtcagttttcagggtgcatctgcaccgagaggcttgaggcagcaatgacccctgggctgcagttcggttgcaggcgctggtggcgggcagtccaggttggagggtggagatgggccaaggtcacagatgctgcagggcttcctgtccttgctctgtgtaaccgtcatcgcggtgggtgtttgcccactgtccaaaggactcctggatgtgcacgtttctctgtgtgttggccaggcgcttcttatctcgggagaagaagctaaacaagggaaacaagtcgtcggacaggctgcagtgtggggtcatctattatcagtcccgctgctaccataggcattatggctgtaaagatcagtcgcttgatgcccgactccggctggggggacgtcctcgggtgg

SEQ ID NO: 344951 - DNA, 1000 bp, Homo Sapiens; identical to SEQ ID NO: 161041

SEQ ID NO: 344952 - DNA, 589 bp, Homo Sapiens
tttttttttttttttttttttacaacataaagaactttttattggatatgtaaatttaaagtgcagatttagttctaccttcaagtgatacttgatccagcagctccaaaagatatttccaaagaccaagactcttcctcttctctctgccttcttattagctttctcttcaggcttcatggagtcagttcagatgtcccaggtttcccatggtggcaaaatggctgcagctgttccagacctcacatcctgggacaatggtggccatgagaagagactcctctacttgtagaaaggtgagggaagagtaggatgtcatcttgtagcttgggtgcaagctcagccacagtaacagaactccaggccctggctcccaggcgacatctctggacccacctgggaacagggggaatgtgcctgcccttgtccactagattctagccagcatgatcctgcctctgtccacaaagactcacagcaagcacaggcacttcctgcattctgaggatgtgtaccaagaaggagagtgtagaactcgacctgattcccttacatgttggggaacatgctgagctgcttatccaacatc

SEQ ID NO: 344953 - DNA, 981 bp, Homo Sapiens
ttttttgattgccccaaagacattaactttatttttagctaaagacaccagcatgcaatcaccttgggtccaaaggtccaggggaaagatgttgaaatgctgagcactgccctgcaggcccatctgctctgcattagcccgccttcctctgtttattattccatgtgttaaatctcctccaattcttgtgtgaaaagttcgggcgcacaataacctctttatcacattttcaaattctgggcctgttctggaaagtttacacctttttcttgttgccattgttttcatgtggattcaaatttctgaaaaaggcatttggagcactttgctgaaaatatttatgtgtaaagcttgatgagaccaaatattgccaaaaagtgaaaattagatgtcagaggaattagcaccataccacgtgggccatgtggtacagctgtggctgtgtgaggagaatctgaggctcgggttggtggttgagagcctgtggccgggcaatactcttagccgctctccttcggggaataaattcaataatacttcaagtgatacttgatccagcagctccaaaagatatttccaaagaccaagactcttcctcttctctctgccttcttattagctttctcttcaggcttcatggagtcagttcagatgtcccaggtttcccatggtggcaaaatggctgcagctgttccagacctcacatcctgggacaatggtggccatgagaagagactcctctacttgtagaaaggtgagggaagagtaggatgtcatcttgtagcttgggtgcaagctcagccacagtaacagaactccaggccctggctcccaggcgacatctctggacccacctgggaacagggggaatgtgctgcccttttgctggtccttttgccttggaagccttccctgacttcactggctctcttctactcctcttctaagcctaagaccaggtgtcactctctcaatgatcag

SEQ ID NO: 344954 - DNA, 1000 bp, Homo Sapiens
tttttttttttttttttttttttttttttttttaattttacatttaattttattgaattttattgcatgcaaattatacagcactaaatgtgatttaatttttttacaatgcagattcatctcatctatgtgcatgtacatatgtgtgtgtgaatgcatgcacatacagtatggaggaggagtccagggagattgttagtggaaggagtggggaacgaggaacacaagaatgaagaggtgatagtgggaaggaggatgaagtcggcctcctggccatgcctgagggatgcggttacataggtgaaaggaaccagaatttgaaagaaaaatatttctcaatgctatttcagtcccttggtttaaaaggaaaacaccgaaagaagaaaaaacacaaaacacacagaaatgcaagctttttcctcctgacccctttccccatcctctgtccaccaaggcctcagcagccaccagcagacacaggggagcagaacaaggatgacacaaacaggaaaatcaagcaggctggtagcaagttggggggcagattctggattttatttcttcagttcaggcagcacagaatacagcagcgtgagctggggaggaagtaggtgtgtgctttggagttcccagggcagccatggatctgcagaagaaagtctctaaatgccattaaggagaaagattttgggtttcctgacaccagagcagagggattctccaggcaagacttcaagcttttgctggaacctctcagctattcaggcagaatcagaaggaagaggaagtcaaggtccacttcagcagcagcctccagagtgctggccgctgccccctccacagcagctggagccccctgagggctggctgcagcagtcagagctctggggtctgtgacggtgggacctgtggtgcctgtggtggctcaggcagcagccacctcccccagagctgcagcagcccccagagctggagccacagctgcccccagagctggagc

SEQ ID NO: 344955 - DNA, 1000 bp, Homo Sapiens
ttttttttttttttttttttttttttttttttttttggctactgtcacagtactttattgcatccaggccataatccagaccacccagccccaaccccacttttccttccacacctcttggtctctgcacaggtttccctctgcctggaatgcccttcctattctccatctgcaaactcctattcacactccccaacctaagaccctgagggtcccaggcagcacaggttaatccctctccagcacctcccttgacagttcattctgatatcaaagcctttgtcggccaggcgcagtggctcatgccggtaatcccagcactttgggaggccgagacgggcagatcacctgaggtcaggagttcaagaccagcctgaccaacatggagaaaccccgtctctactaaaaatacagaaaattagccaggcatggtggtgcatgcctgtaaccccagctactcgggaggctgaggcaggaaaatcgcttgaacctgggaggcggaggtgcagtgagccgagatcgcaccattttactccagcctagccaacaagagcgaaactcctcaaaaaaaaaaaaaaaaaaaaaaaaaaaaaaagcctttgtcatcttgcattgatccacagggcccagtggtgacctgcctctgagcagaggcccaggaaacactgaatggataaatgaatccttaacaagggaaccaggagagaagctgggaacaggccgtgtgggacacagaagccagagctaggagatctggggctcactgtctgggatagtgactgaaggagtatgaagcactggatgggacccatttgtatctggcacaatctactacctttggggtctctctgcagctccaacacttgtggctgggcttcaagggacagtaagatcctgtatatattttgggcctaccccttccgcatccagcaatgaaatctgagtagaagtaggttgccaaggcctcccctggctcagctcaaatctgactctggcctaa

SEQ ID NO: 344956 - DNA, 1000 bp, Homo Sapiens; identical to SEQ ID NO: 161042

SEQ ID NO: 344957 - DNA, 1000 bp, Homo Sapiens
ttttttttttttttttttttttcagtttaaatttcactcattttaatccagaaaaggacatactgggggaaggcatccagatgtgccctagtggttttcaagtcccgactcttcccctctctcccaagaacccaggcaacgcccaccccaaaacccccacctcatggtcagagcattcctgctgatgttactcagaatgtgtcaggatcaggaggacaagtgaggggggaggcgtgcaatgtgatcagaaccctatgatttctgattcctgaaattaaagacacaatgtgccttatgtttgtatgtctggagcttaaactatagattcctctggttgtgggtgcctgttgtttatgaactggaaaggaatgataaagccgcaatcaagatcacacaacacaagaaattttacaaaaggaaaaaatattttgtttgaaaatctttgctacatgtcattatttttgccactgtaaagcttagcacagatgccagcaatacagaaatggccaacaagaaaacaaaacagtcaaaaataaaaccctgaaggaaaagcaaaaacaaaacccccagagcatcttctcgctatcctccccttccccaaaagccctataataactgtacaatattatagtcctgatcacatttaaaaagtcgattattaaaaaacaagggttccattggaaactcaactttttggtttcgtaaattgtgatataaatatatatgtatactgtaagtgtgcacatagaataaaaaaataaactgtctccttttttactccactacctggcaccagactggagacataaggaagggaaactcagcaaatggacattcctttggcctcttcaaggccacccttgctcctcagtcccctatgactacatttaatatatcttctcattaattcagtcttgcactttagctactggccaaagccaatttaaaaaaaaaaaaaaaaaagctggtatctacgactgttacctgaggaaggtaaagg

SEQ ID NO: 344958 - DNA, 1000 bp, Homo Sapiens; identical to SEQ ID NO: 344957

SEQ ID NO: 344959 - DNA, 1000 bp, Homo Sapiens; identical to SEQ ID NO: 161043

SEQ ID NO: 344960 - DNA, 1000 bp, Homo Sapiens
ttttttttttttttttttttttttttttttttttttttttttttttttttttttttaccaggaagaaaatatttaatgattaaaaacaagtatgacctggaaagatattagactaaaaggaggaatcacaatgagcaggtgaaaatgttaaaggaaagctttcaatacaccaactgaaaaaggcatttctaattggccaaccaaattattcttttagattattttagccaaataaaaagaaatttacagatggataactgaggtccactaacataaggtagaaacaaagtttaagctaaaaattaaatctatattttgttgcagataaatgtgagatttacctacagcaattttctattgatgctaaattaaaagcatgaattgacatcgttctaacagaaatggtttgacagatattttcttggctttaaaatgttcttacgcatatgcatagaaatgcaatgaggataagaataatcttctgtattgtctgtacagttcataaggcctttgtcattgttagtcaccttcgatgtgaatatcagtagggccattaaattaaagctggcctaaaaagttttcaaagtgctactgtttccaactgatgaaatcttcagttttctggattttctgggtgacgattattttcaattctttttttctggtgatatatacaagaagttacagcagatatataaagggaagatcagaagcctgctgtccaagttcatcaccacttgttcctgatccttttcaagtgtaagtatttgatagccagttgttctactacatattagttttccactactatcaaaagaagccaaacgtaatctaaatgctatgctccttcgaggctgtaaactgacagatccgctacatggctgattcagtgtattgcgtttgaaaatgatgtatcgattggtgtaagttacaagtaggtcgaagccgaagttaaaacctgtccaacgccagcagtattcaccatctttggcaagctttc

SEQ ID NO: 344961 - DNA, 1000 bp, Homo Sapiens; identical to SEQ ID NO: 161044

SEQ ID NO: 344962 - DNA, 1000 bp, Homo Sapiens
acaataaaatattaatttataaaaaagaaattttaaaaagtaacaagaaagaactcgtttgaaaccatgtttcatcatcctgtagctacatctggtcttccttgtgtgctgggggactgcagataggtcaggggtatcagcctcagccactcagacaaggaaagggggcaccacatgagctcagggacccccacccccatccctggcctgggtgatggtacagcgtctggccctgccaggtccttggcctgcacaaagtcagtgacagcaggtgaaatgcccagctgggtgcctgcctggagcgggtgtggggcagtgagcccctgtgggtgtgggcttgggagtggctgtgacagggtggtgagcagggcaggggcaatcagacagccctcagaaggcctcatggcccccggtgagctgcaggaagaggtcttcatccagctcctccccacgggcccgctcccgcgtcgacaggaaaatgtagcccccgatatactcgtgtacaattcggcagctggcagacacgcagctgaaggccacattgatgtgttcatcaaactcgatggccacctgccggatgtcccagttgacattccactggcgcatgttgctgaaacgccaggtcttgaccacgtcgcccacggccaagtcgatgcggatcagtcggttgttggcgatgcccaggatctcgtctttcctgctgcccttgaacctgaccatgacataggagatgccgaagtcgggcagggactgccaggcctggatgaagcgcagctgggcctctgccagcgacaactgggccacattctggtgggcttccaggatccgtggggtgagctgcttggccttgaactttcgctggaaacggggggcaacaaggccgtaggggttgaggccctcggcagaggcatcagggccgtgggggtggttgcccgggcccccactgcccgtgcgctgcaggctgaggaaggccaggatggcctgcacctcgctggtgtag

SEQ ID NO: 344963 - DNA, 1000 bp, Homo Sapiens; identical to SEQ ID NO: 246607

SEQ ID NO: 344964 - DNA, 1000 bp, Homo Sapiens
tttttttttttttttgtagagatggggtctctcactgcgttgcccaggctgctctggaactcctggcctcaagtgctgggattccaggcgtgaaccaccacgcccggctgagatgttccttttccttggaacttgatcaacacaaaatcctgaggcctggtgtgggtgtgttcctctggggcagattctcaactggggacacttctgcccccaaggacacatttcaacatcctgagacatttccgggtgtcatcacagtgtgcacgcacgtgtatgtacctgcacacgctactggcacctcgcggatagagcccagggacgctgctcacatcctgcacggagactgacccgcccagcgtcctagggcaggctccaggcagggtctgcatgtgcctctgccagccacctagaccctgccagccggggcctttaaattctcccctcgtggtctccagggccactcactagcctgatttcaagctgtaaactgggaggacctatttcttttcaccttgcacggaacaccaaggctgaaaggcagtttttccggaggtgccagcctgtctcacatttccgcttcagctgcggggtccagctctatgtgggcggtctcctgatgaagtcaccccgggacagacactgttctgtctcctgcttccagtccagtaaagatgccaggatcccccagggcatggcaggcaccctcaaaggcagacgtggggaggccctggtgggcagaccccagcctgctgacggggggcttctccctggctgccactggcccacccactgcgctgcagtccacctggtgctggggctgtggggcacaggccctcaggacctgcaccctttcctgcccaggaggtccaggcctgacatccttatgtcccctggaaagcccactcccatcttcagggtaggagggcagctgcatgctgggctgacttgggcctgtcctggggcacccctgcagaccaggtgcagcagggaatgtggctct

SEQ ID NO: 344965 - DNA, 1000 bp, Homo Sapiens
ttttttttttttttttgggtgttaaaatgtttatcatgcctaagggagacatttataattaaaccatttatgctacatataactggggaaaactatgatgctttcggtgctgggaatgcagtgaggtcccacgtgggcagagcttggctgggctgggcaactccgacacacgtctctgggggtgtggcggcgctctcagtcggcaccggagaagaggctgcaaggaagtcgctgtccctgtctccagtggaagtgagtggtgcagcatctctttggcaggtggggggcatcagtggctggccagaggggtcctcgtcgctgagctcctggatcaggggtcttggggacttggtgtcttgttttcggatttccgagtccctcttagcttcttttttaaagatgtctgtgaagggcacccgagccgcctttgaggtgtctttagagactgcaaatatatttgacagagtgtctgtgggcaggttttccagcacagggagtgacgtgtagtccagttcagggtcactgtcatcactcaagctcgagatgacctcaatcttcggaaagcacatattctggtcttccagagatttgcctgtttcatcatcatcttccaagtcaggtaggtcatcaatgcagcatgtctcctttgtctccagtctaatggtttctaaatcttccgttctcgttccatcaagttctgtaacgaatacaccctcagtggccacagcctggggagtcggttcttccctggcagctcccaggggcagtggtggtggggcctcagctgggagggtcccctctggctctcgatctccatcctctcctttaaccttcacaggcggtgacagtagcagggtctcagctgggagggtcccctctggctcttgatctccatcctctcctttaacctccacaggtggcgggggtggtggggcctcagctgggagggtcccctctggctctccatctccgtcctctcctttaacctccacaggtgacg

SEQ ID NO: 344966 - DNA, 1000 bp, Homo Sapiens
gttatgacttttattaatcatatctgctgttattcccaaacttctcaatgttacatgaatactaacccttgttttatataaaatatgactaaagtaaatttacctacaggtgcctctctccttcattggtgattaaaatttcacgccagagactaaacttcatgaaactactgcaagcatgtgtatgatagaccaattagcttagtatctggcattgtggccagaaaaaaaaaaatcgttacctacaaaatctcttgggcaacacttaagccatggaagagcccacatgaatccaggtctactttcctttacaggtagattccagaacaacaacaaaaaatgtaagactacaagaaatgatttaatatgataaaactcccatttcaaaacccagttctaaaggatttactgactaatgctgattatttagtcatggaaaatgtctctcataaaagtgctcctaacaaaacatgatctacaataatttataaaatgtgaagggttgggatgtgcagactgattggtgcacgtcaggttgtttctcttaaataaggtataaaaaaactatgatatcatagtcttttgactttattttctgagataaaaaagtataggcataggtgtttttaatagtcttcttgatgatatcctttagaataatctatcaaatggcttctttcatgtttcctgattatcagcattcatcagtgttactgtcagccttgattaagtggttgaaaatttcagagaagaataagcaacttctgtgaacctttccccaatccctgagaatcataatcattacagaaatattttatcctttcatcaaatatctctggaaagtagccgtgttcgttcattgttaatagggcaaggtgcagtgtcatagagggttaatccatgtaaattggcttccacccgtaaagaaattttctgaaaatcacgaatgtaagtcaggaaaaaaacaaagaaggaaaatgacatagaccattctgctgca

SEQ ID NO: 344967 - DNA, 1000 bp, Homo Sapiens
tttaagagtaaatatttatttatttattgacttaaaactttaaactctaggtctccagaggcattcaaccagtacatatttacttattgccttttatttgctaagtattagtggagaaatgaggcaatataaagatgacaattgtattctctgttctcaagacatttacaactgacttggagacgcatgcacacaaatatatcttactgctatataacaacaattatattagcctttataacaatggttagaaacaaaagcttactttttggtatttcttaaatgacttttagtacaatttattatattaagttgttcggatttgtgactgaacagcaatgttgtgtgtgtgcaccaagatagcatctgagtgcccaaacatctaagggaaaacagacataacaaattactaatcctgggtcagcacagcctggccagttttagaaatgacaaatattgcttctcacttccagtagtctcacatatggagaagtacaacctgttttcatagcagtccacaatttatatttatctgcgctccaatatacttttcttcaacctcatcctatttattttaaatctcacctatcttgaaacgaacttcctgtgttcttgatattgcatactattacattgagagttataacaccactactttttaacaacacgttatactttaggaaagaatctttgaacttcacaaaataaaatcttattaagaatctttttttcagaatgtgctatttttggtctttgttttttttattgtgaattacctcttaagcagaattggaaaatgttaaatatcctcaaatataacattttataataaaaacagcaacagcaaaaatatctagtctataccctggatcagtatacattctgcccagcctgccatacattccacgtttacatttcctgcttttcatgatggctccaatgccctgtgcaagtttttcaaacaacatacattcaaatatattcacaagtcttgatagta

SEQ ID NO: 344968 - DNA, 754 bp, Homo Sapiens
ttttttttttttttttttttttttttttttttttttttttttttttttttttttgaagatcaataatagttaacatttattgagtgctttattacacaccaggccctccactcattgtttaaggtgaactctctcgcatttgatccttgaggcaatcccaaggtagcttctattattattcagatggggaatctgaagcccagagaagcaaaggaacgcagtcaaggtcagacagctggtgttcaatggcagaggtgggattcaaacccaggtccctctgattcaggcgctgggctctcagccagcacatttggaggacaacatggaggaggatgtaaggggagtcttcgaagtgggaaaaggatccactagcaaaggctgaagacaggcaggagggtggtgtgggcccaggccactgtcctccatggaagtgacagtaaggcttcctggaggtgacaccgtttggactaattctatgtctccagacaataaaggaggtctttttatagcttaccagttcctgggcatacgtccagtgagacatacgtgggttcaaatcttcattgtgccactctctgtacgagtcagctgttggctgccagccaccctgtgggtgaggggaataaactccagggtgaggtgattcctgagatggcagttctccgtagaaatggaaatagtaagccattcgaagccaacaactgaagcatctggggggatggtgttggtgtgctagccccatgaagggctcaag

SEQ ID NO: 344969 - DNA, 1000 bp, Homo Sapiens
tttttttttttttttcttttttgtctctttaaaatcatttttaaaaagttacaaaacaatatcattcatcatatattcttattttcctttttttaaaaaattaaagtaataaaaaagtcactttataaaataatataaaagggcttgatgggtggggccggtgggtgctgtctgagctggtggactgaggaatccagtgcttctcttctggctaccccctcgttgtcaggaaggacccccaggccacagatggggatgacagcaggtcccttgtctctggctgggctgtgggagaggggcagggaaagccggggcaggagggcagtgggcagacccagacaggggggacggctggggccctgtcccgaagagacgggagggcctgctggtggggggtgaggtggcactggggcagcgggtgtctgggcccctcagtgccggctcctcctccagacagtctgcctagcttccgttgctcagcatccccagcagctcactgggctccagtccctgcggctgggccaccgtctgcatgtcgaagcccatgtgcatgaggaactgggccacgttcatctcttgccccgtgaactggtctcggacggtggggcatgaggggttgcagtggggccaggggcagctgtccaccaggtggacggggcagcccttgaggggggtcttgctggccttgtggctgtcatggaggctcctgtcccagcagtgcagtgctcggggcagcgacgtccccttcacctggacatccgtccagtggctccggatgatgatctcatgggagaggcaggcgggggcaaagctggccggcacgtccttgagtgtgtggcgcagctcgcggccgaggttctggatgtacagccgcaggccctcctgcaccggctgccccgtcaggtgcacgttgtccaccgtcagctgtgcctcgtcaaacagccactgcaccacgaacacagggcagcgcagggtcgggtagaccttgtagccaaagaag

SEQ ID NO: 344970 - DNA, 1000 bp, Homo Sapiens
ttttttttttttttttcgaggccagtatgtttctttttttattatttttgtgtttgacttagatggttgaaatgttttcatttttcatttataagcattacattaatttccatgcaaaaacccaagatcgcatatgtctgatttcaattggccaaaatccaacccttgagtttggacattcaagaccaaaatgaacacgttacttgccctttctatgagtagacatcatgggtgtcctttgaaagatcagcaggcctcctgacctcttaaacaccagcttgccattagtccacaccaaaacaaggagccaataccttccagcacctaatcaggcaagtaacttcactcatgaagacaggacacctctataccaaggctgccacccacagatatttcctgggtgctgctctatagcaatacctgcttttgaacagacgtggtatcttctatttggggattgtaagttcttcctgccagtttttctcaaaactctcaggaagagtagagattttacaaaaaagcttacctctatgaccccaaaagaaataaatacaaagacacctacttcatcaagtgtatattttccccagctttagatggggtcaacatgtataaagctttaacaacttctctcagtaagacaggaaccaggaatatcaaagagggcaaagcaggaccccacaactgaaggagaactaagcaaatgcaaagaatcatttcactgatagaaatgggcaaaatgaaaaaatgatagaatttcgagagtggttgttaatttatattgaaacacactttgcaattctgacaatggcaaagattagtgcaaataataattataatggtatgttctttaataggatttaaataaggcttcaaataattacatatgctaaaattaacatttggaaaccttaattcttcttggaaaactgtcaaagacacccttcaaaccacccagtgttctctaatttgaggacaattacattcaatgaagttgctc

SEQ ID NO: 344971 - DNA, 744 bp, Homo Sapiens
ttttttttttttttttttttttttttttttttttttttcccatttaaagattttatttgcataaatatcctgtgaccataagaggttgaggataaaaataacgtggttattgtccaattttgcaaccatcaataacctatgatccaatatcttcactgctgacaaagagaacagtttctagtcagtgatgtttaggatacttaatcttcaaatccaatagttttagtttcgaaagataaaacagaaatctttttgttgcttttttctgaaggataggcttttttttgcttcagtatgtttgggtttctcttccctctcagctttcctcagatgagcttcctctctggagtcttcttctggggaaatacctataagtaaggtaacggtgtggccaataaaatggctggaatggaaaacggtggttacaccttgaagggacgaaaggtctgtttggaaacctaaaatggattctgggccttcgtggaaaaaaatggaagggacacctgggtgtctttgtgatgggctgggcccttgtgaccggactcctcggggcaggtggaggggtgagtgtaaagatctggcagtcggtagcgtccgcattattttgtgaatctccaggaagcgtaaatacctcttcttgtccttctgccacagttaccaccaaccagcataccagtaaccagtaggagaagcagtgtctgcgagccatggcttctactgagcagtcactgcgttgaacctgat

SEQ ID NO: 344972 - DNA, 1000 bp, Homo Sapiens
ttttttttttttttttcaaacattcagttcaatttaattctccagtacttgaggaaggtaaatagggtgaaggaatctgaagaggaagtaggtagagtcaggctggatcattgaagaacagagactggtaggttgggtctggggtgtggaattgaggggagggccaccggggccatccccctctaaaaatgttgctggaagtcagtctccagatgaccctactgtaaagggtcatccataaagagcatccatgagggtagtcaggaggcaggaacacaggcaggatacaggaacatgatataggcaaacactcctccactgagacagctggtcaacccaggcccagcctacctcagggcgctgtagggcccaatgggtatgttgatccggctctgcagccagctgatgtaatcctcttgaggcatatggatgatgtgttctcgcacaaactcaatagccacagcgatgtcaggggagcacagttcccaaatcctcagatcctgcagcaccttcaggaggacatggggtcgaatccgcaagtccaggttttctccaaacttctgcagtttcaccaggatctttttggcggggcggaagttctttagatcctctggcagtttggacaacagatcaaagtaccagtggtctgcaatttcttctgcatctccttttactacagatatgtgatgtctcatttttgctatgtccttttgaaaatttgagacaaggacaaaagcacggaacttctggatacctctctcttcttggcgcttcatgaggatttccatcttgtcctgcaggcagaagccagcctcctgggctacgctgtaaaacttggccctcatggtgttacacaccccactcttgtagtggatgttgatgtcacaattagtgcggtttttagacttcttctggactggttggatgtggctttctgcacttgtactgctggatctctcacttgatttgagagtggtctgcatttccttataagcagaat

SEQ ID NO: 344973 - DNA, 1000 bp, Homo Sapiens
gagttgcatattttactttatttttattaaattaaaagctacagtctggcagcgattccagaacagggtaaggaggttcctcacaggggtcagagaagagcggagaaagacagactgacggagactgagacacaggagagaaaggacaaggttaagggagaactgtatctgatgaacacacacagccggctccatggcgggtgacggggagctcacatcagcccaatttctcctccccggcacccgaagttcagcggtggagcagtatgtgggggcggttaggaatcaagagaccctcccttccccaccctaggtcctttctcggcttggtcgtggagcacagcacataccagaaaaagccaagggcaatggaggggcagggaaaccgggagtatatgtacacggggaggggagaacagagccttggaggtcggcctctgccagaagggagtggctcacactgcattgaaacacttggccagtgggggatgggggaagggattgccccctccctctcggaactcccttcccagtcagacaggtcccctacaggtgtggtgtggggggcagggggcagagaggagaaagaggcttctgctgggtcctagtagaggcagacagcaggggccttggcaaaggcgatgtccttcagtcatctgtgatacccttcgctctcagctcctcttgcacccgggtcaggtaggtggggtctgggtacccaaacagctggggtccccctgtgcagctggtcttgtggtggatgtcgttccaggtgatgacattcggtctccctgtggtcatggacgtgccgatagtgaaggtgagacgctggtcaaacgccttgcggaacagggtcagcaccttgttgccctcagggcagtccgggaggtaggccacccgtgtggtgccaggataccgaactcctgggtttgggtgttcagccccctggacaccgggcgggaagacgtactggatgacaatggtgccgtacttctcatag

SEQ ID NO: 344974 - DNA, 1000 bp, Homo Sapiens
aaacttttggatgttttataaatttgtccaatttagtcatccaactgacaaagcaaagcaaccccgcgcttgatccagtgccgagtaggttggtctgtttttaacaacattgcaatgacaaagttagtagaatgtcccgtagtggaaagagttcctttacgttcacttgtcttgtagaggggacagacataggcatccgactttataatccgagatttttgagttggttttatccatatgatgggcatcaggtcaaacagaagtttgggatattgttcagcaagcaatccactttctcggtcccagcgtgcgccatcgagatacagtccgtggatataaacaccatcttctggtgatgtgtcagatgtatcagatgggataacctcaaattcatatcctagcaaatcaataggggtggtatattttctggcataattctgcatagctccagttaaaaaggcctgagtgaaaaagaaacctgacagccaaaacacacaaggttttcctgaattataccagtcctgtaaaaagttcaaccgggctaggaaatctgtgatgtaacttcccaggggcttaaggcttgggtatgaacgtttggcccatatttctggaacctttccaacaagtaagctaccggagagtgcctccaatgcagaatccatcacaaccacacccttaatagctttttcaaggtcccgtagagtgttacgtatagttataattaaattgttaaatctttccatttcttgtactaacacagtattcatgctttcttcatatctcacaggatacttccgtagtgccatttcaatgtcgaaatcactagggagcttgttgaggatatctttggtaatttctaacagaatctgatcagtacttcctgaggctcctgtctgtttggagcctccctgggtgaggagcaaggactcaaagagggtttttgtttgttgaagatccttggagatgtcaacgttttcatgtaatccaaatatctcagggt

SEQ ID NO: 344975 - DNA, 1000 bp, Homo Sapiens
tttttttttttttttttttttctgcacacactatttaatgcatataataaaatacaaaggccactcatagcaaaatagtataaatataaatactgcagagaaaatattcttatatggtattctagtaagaaagagacagaggatgaaatagatgcacataaaatataagacttagcagttaattattcaaacattgtttaaagttactccctgcatatggaaacttatttgaagcctcaaagctgtaaacatcctccagccgcctagtttaaccccaaatcagatgtttctgagagcaaatcagaatgtcctctaagtaaaaagccaagtctgaaattagaaaaaaaaaaaaatcccctttttttcttgtaattcaagactgtttggtatttcatttgcgtctctgtagtatacgtcaccatccctctttcttagcattggaggagggctaaagtggacagacgcctggcatttgcaattctttctctcctgtaacaggaaaagttggttaagaattatcaagaattaaataccaaacattgttacattcaactctgaaagatggatagaaatcttaaagcatgtgcacctacaaatgcatgcctttccagagctttggaaatgttcaattaaataatgagttaacaattagtattataatagtgaatcctgctattccttggccatatctatatggttctataaggtctgaagtgctatttgttagtggaactacaacagtgccaaaagtaaatttgtatcagactcttcactggaagattataaagcatgttattggccaattcaaaattttatttcattatgctattgaaacagctcaaataaaaattaaaagaataatcaaagataaagacagtttactaatgttactatgtcaagtcatgtcctctgagagtcatccagtaagggcaaaagaaacccacaagatgatcatgaggtgtgtttccgcacagtatcattgaaacatgcacattgtgtt

SEQ ID NO: 344976 - DNA, 1000 bp, Homo Sapiens
ttttttttttttttttttttttttttttttttttttttttttttttttttttttttttttttttttttttttttttttttttttttttttttttttcaagtaaaaacttaaaacgtttatttctggtagaaatgataaatactttgcactaaaaatctggaattcaagttttcctcgtacttcatgctccctccctgccccagaaccttacaaaaatatttctgtgtagagagggaaagagctggtgcctgctctggaggcaacgtccaggtccgggaaaggcactcgtggtctgtgatctgtctcagtgatgggaggtctccactcgccccacaggcagcctcggggccagagatgagaatatgctgtaatccagtacaggggctgcgtcgtgggtccccaacagctccttctttggggatagtgagccccttgttggggagtaggaagggactgaggggccagctccttccagatgtgtgcatggggaagggagttgtgtctggggaggtgggtgtccaggtatagactccttttagggtctaaacgttcaaggagttcaacagaacaaccagaggccatcatgttttggcagcttgcaagtgaacactccaggggagatgcaggagggaggggtgtagatctggggagcccttctctccctctctgcccgcaaggaaggcacagggtgggaatgggggtgccttcatgagaccccctgccatgccacacccccttcacagtcatgtgagatggggccagaggggcccaggctctagggccaggggagtggggagggagggaaataaggcctcaggtgggggttgccaccccctctagtggctggtgaagagcagtgggcccagagcagccacccgccaggttgctcccaccctagcctgggtagggatcctcatcccagagacacagctgcctctggggcacgtagaagtcgaagctgtagctcttctggcagctgcggatgccacacttgtagggc

SEQ ID NO: 344977 - DNA, 1000 bp, Homo Sapiens
tttttttttttttttttttttttttttttttttttttttgaaatcaaaacccctagccacaaaacattttatttacaaaatatatactgaatactatacatctggccccatcaccatggaaacaactccaaagcctgcctggggatttgtgcccaagcccagcccaggagggctagagaaagcaaaggtgtctaccagccgcccccatcccagaaggaaagcctcttcccatgagtgcctgtgggtgggcggtgagctcaacacccacaaagggcagaaggcctgggggcagtgaggtgatggtgagggcatgggaagcagatgctgctgagggtgggtggagggagaaatggagacccagcacccagcagggggagccaggtgacagcaggggaagcagatggcagggccccaggcagtccaggaccccaggctctgaagggtggggcaagggggtcaggtcacgtcttgacatccagcagtggcatccgcttgtgctggtagccactctgccagccatgtaccaccttggggtctcccatgtcagagagcagctcctgctcagcctcatgcagttcctcagctgggtcatagctgtacatggggagcaggtgatggcgcagccggtccacccgctttttcttctgtacatacattaccacagccaccaccaccccgaccagggtgatgaggaagaagggccccaacacatagcccaccatggagtcgctgttggcctggggggcattgggcacagtggtgttactcatgacatcagcagccggagggctgggtggtcagcatgggcagtggcgcttcgggagggcgcctccactgggctccccagtcgtatgctcatcgtcccaggtcaagggggcatgccagggtggggagggcgtcaggccgctgctaggatgcgggccagcaacagcggacaggaggtggttcccacggcgctgggaggctcaggccggaggtgggggtgttgggggatgcggat

SEQ ID NO: 344978 - DNA, 1000 bp, Homo Sapiens; identical to SEQ ID NO: 161048

SEQ ID NO: 344979 - DNA, 1000 bp, Homo Sapiens
tttttttttttttcttgaaatttagcaattttcagagttacattactgtgtaattcaggtgctctgtttacacattaaaacagaaacaaataatatttatttgcaaaccaaatcacttggtgtagggagcctgcattgagttaactgggttagccctgacctgccctgctgctgagctgttcccggcacgcactgctgttgttactgggctgccattgctgcatcccatcccacacactcacaccccactgtcttttatggctgggaagggttgtgagtgtcgaatatactttctatataagcttacacttttaaagaaaatttcagaaggaatataggaatccatgctcatggtaaaactgccaacaacatagaagctgattgtcttagtctgttctctcactgctgtaaagatactacccgagactgggtaatttataaagaaaagaggtttaattgactcatggctctgcatggctggggaggcctcaaggaacttaccattatggcagaaggggaagaggcacgtcttacagggcggcaggcaagacagagcgagcaagaggagggaaaactgccttataaaaccatcagatcttgtgagaactcattactatgagaacaactgggggaaaccacccctaagatccagtcacctcccaacatgtccctccctcgatatatggggattatggggattacaattcaagatgagatttgggtggagaaacagccaaaccattatcattctgcccctggcccctccccaatctcatgtcctcccatttcaaaacacaataatgcccttccaactgtcccccaaagtcttaactcaaaagtccaagtccaaagtctcatctgagacaaggcaagtcccttccacctatgagcctgtaaaatcaaaaccaagttagttacttccaagatacaatgggcgtacaggcattaggtaaatgattccatttcaaatgggagaaattggccaaaacaaaggggctat

SEQ ID NO: 344980 - DNA, 1000 bp, Homo Sapiens
gtcattactgttttaattgtctggcttctctctggactgggagctcagtgaggattctgaccagtgacttacacaaaaggcgctctatacatattataatatattcgcttactaaatgaataaggactttccaactgcgtttctgagttttacagatgggaaaactaaggccaaaggataggagtggggttcacacagctaagtctgaagggaaactggaagcagcaaccacctctgcacctcacctggtctaagaggggttcaggacttgggccaccaaactctagggcctgtccctcaggtgcaattgcagctgctcctaggctatgccaacctctgccagagagcagctgtgagggtgtgagcaaagacaggaacagcagaggccagtggagggagtggggaacagggccaagggagctcttgggcttgactctcaaggcctgaatcagtgtgtgtgtgtgtgtgtgtgtgtgtgtgtgtgtgtgtgtgtgtgtgtgtgtgtgtgtaatgggagtggggctgggaaaattggtgccttccaagaaggagtgtcctgtccaaccccccgcacccccacggaaccttcaggagctgctgctcccagccacaggaagtagaccatataaatatggaataaatacatgaccagtgagagaggcaaaatgtcggaaagcagaccccaggccagctgggtctctactaccaggaccccaggctcaggccatcaatcaccccaggagaagggagcccgacccccaccaggacccagtgagaggtagacagcacaaatgctgaaggagcaccaaggggccaggtaagggaagggagagactggagtactgggacaaccaaagccatctcatgcaagaacaagtttctattcccaaaccacccccatccccatcaatgctcagctctcttcctgcccccatgccttccctctgctcaacagagagctggaggcaggagggcgactcagtttgccagacatgctgct

SEQ ID NO: 344981 - DNA, 1000 bp, Homo Sapiens
cacactgaaatgtcaacataaacatttcattttatatttattgtaaaagcaatatacagtaaaaatacagaatagcataaggttacattaagatggaaagtaaaaattttcctccccccaccccaacagtctttcaatgtcacaactataaagtttctttaaaatactacttaatacattctaacaagtcaaaaggctttgtttcttcttggttttattgttgagatacattaaaatattaagcattggcccagtgtggtggctcacacctgtaatcccagcactttgggaggccaaggtgggtgttatcacttgagttcaggagtttgagaccagcctggccaatatggcaaaaccccatctctactaaaaatataaaaattagctgggcatggtggtacatgcctacagtgccagctactcaggaggctgaggcaggagaattgcttgaacccgggaggtggaggttgcagtgagctgagatggcaccactacactccagcctgggtaacagagcaagactctgtctcaaaaaaaaaaataattaagcatcactgctgtttagatgactgaaactattttataataaaatatggttaacactgttgccaaaagcacaatttctttacaattaatattcctcattaaatattgcccaaatacttatatatcctactcctgctgatcaccaaaattgtacagtcttatcttgcaaatatagtacatatacaattaaacagttggaaaacatatagagattgaccacaaataaggcccacaaggtactgctgtgtaatgtatctaccatcaggttgatcaggccagttgttatatttgacagcaagaaaaatattaactgttttctgtttagagctgtgattaaacaaagactgggttccattctttcggcttcagggactagagattctgaatgctttttatttgtaacaggtgactggataagtttccaagaacatggtactagagctcctttaattag

SEQ ID NO: 344982 - DNA, 1000 bp, Homo Sapiens
ccagcaaagagactggattttatttagatccatagcccttcttaacgccacagccggggcacagcctgcggccggggtgccaccatgtcacctgacacagaggaatccaccagcgcccgcccatgtctcatggccacacgggggccatctaggctcccacagagggctgtgttggaggggcagctgaggctccaggaggagggacagactttgcagggggcttcaagctgttcctgaccctgccccggcctggtgctctgggccgggcaggggtgtgctcagagcccatccttggccagagctccagaagccgctgccccagggcttttctcctccatctgacgcatctgctccccggcaccagcctggctcagacaccctccagcccgtgtgtgtgttcccgtggtggctcccatgctaggccaaggcttgggtggggctgaggcccagggtgtactgagcaggccgggcacccaggcactgcctgtcatgactgaagagggcctggaggaaccatggggggccggtggagtctgtgcggggcggggatgggggtgcctttgaggctttcccggtaggttaccccttgcctccagaggcctctccctggggccaggcagccaaaagacccttgttggaaacaccaccagctgcagccccagctccacagactgacggtccagtcccctggcggccaccactggggtttggggactggggagacggcgcagctgagaatcctgggaggcctggagaccgcaccaccgggccgtgcatcaggatgggggacacctggcaaagcccagctgttctgtgccagccctgagagacctgcagccagctggccaaggtagggggttgagcctcccctccccaggtggctccgggacccaaggagagagcccaggagggccggctccgcccaccctccccctttcctgggaggtggggaacaagaacaaggggctgggttgggccacccacatctgctccccggcac

SEQ ID NO: 344983 - DNA, 1000 bp, Homo Sapiens
cagataaaatcggagatttaatagaattcccgcagggtgctgagctccaaacccaggccacacatggcacacgcagggcctgtcagggctggggctgatgaccagggtcaaggggatcccagggccctccagctctcccccagctcctgatgtggaggggagggaactcccgctcacccccagagagaagggagtccacacaccgcatctgagctggcggtgggcagggtacccacctcggtgagcagcctggggtgggcctggggtcaggctgaggtcccggtgacaaaggctggggaggtggatgcagacagcctccactttcaccatggcctccctcctctgaggccaggcctgggatgcttctgccccacggctccggtccacctgccaggcctgtccgtccttggatgagggcagggagaggtggggtggccactggcaagtagagacttcaaaagtgcacggtggcccttccacgccctttgcttcttagcccccaaccctctgccaggctttctccctttttcccacgccccgcacagacaggtatcctgccctcagcatctcacaggggtgagtggcagccaggagcagcagcagatgcctgtggggagatgagacgccctcagctcccaggccccgctcctggggaaaaacagggccccaggaaggtgccccaaccgttcctgggggccccagccccgaacagggggtcttgaaagggaactcttgtgtggtgagtgccccctgagggctgagccacaaggtcaccttgatttctcagcggacggaggctgagctggctagggttccaggctgggtgtgggagggtcaccccaacaggcgatgcccgagaggtgtccgggcctggctttccacgaggaagaaccagtcccctgtgccatctgcagggcttgccacacaatctggggacccggtgcaggaggagaattcctggccacttgtttaggaggcaggaaaagggcccggcgcggtg

SEQ ID NO: 344984 - DNA, 1000 bp, Homo Sapiens
ttttttttttttttttttttttttaatgtataaagaaaagagtttaattggctcatatttctgaaggcttaaatgaaaacatggtgctggcatctgatcaccctctagggaagcctcaggaaggttaaaatcatggtggaaggcaaagcgggtgtcggtatttcacatggtgagaatgagggcaagcgacagggaagtgctatgcacttctaaacagccagacctcaagagaagtcactattgccaggacagcaccaaggggatgacgctacatctttctcagtttgagaaatccacttccatgattcaatcacctcccaatgggccccacctccaatactggagattacaattccacagggatttcaagagaaggggtaaatatacaaggtatatcagtaagtaggaattattcggtgattccagaaactaggacaacgtctaaggccttgtcacattgagtttagttgtaaggctctctccagtatgtcttattcgatgtttagtgaggcctgagcgacaaataaaagatttcccacactcattacatttataaggttttttgccagaatgaattctttggtgtttgctgagggaaaacaaccgcccaaaggctttgccacattcaatacatttgtatcttttctctccagtgtggattctctggtgacttacaagatgtgaactatgcctgaataccttgccacattcatcacatttatatggtttctttcctgcatgaattatctgatgtgcagtgaggtttgagctccgtttaaaggttttgccacactcattacatttgtaaggtctgtctccagtatgaacagtctgatgaagtctaagatggacacgctgactaaaggaattcccacactgattgcatttgtaaggtttctctccggtatgaattctctgatgtctattgagtgtggagccctgattaaaggctttgccacattcatgacatttgtatggtttctctccagtatgaactctt

SEQ ID NO: 344985 - DNA, 1000 bp, Homo Sapiens
ttttttttttttttttctttttttttttttttttttttttagaagtcatttaagtttttattaaatatactctcttggcacaaatctttaaaatatataaacattagatataaacagtgtcttcatggcatcaaaatataactccagaccaagaccagtgaccagcagggaggcgagtgaccgcagagcctgagggcctggctgtgtgcaggggtgggggacagcactgtccccaactcctgccgggtcccactcagctaggagccatctccggggagacacactggggtcagcatggactgggggaccctcccacctaccccttgtctctcctgcctagcctgtggccccaaatccactcatttggtctcacccacctggggcagacccccaattcctactgctgttgcatgcttgtgggagttgggtgccctcccatctccctgtgagggttgccctgcctctcctgccaagtttaagtgctgggtaagggatacccacacagtgggacagcccctcacagccatcacaggctgcctgggcctctggggacaagatcagggatggctggtggccacatgcaaggaaggcagagagagcggtctgcacacctgcaggtccaaggcaagaacaggaggaggacagaaggaagggaaatgaagtcacgactggagatgaacaagctcagatcccttcacacagcgtgtgctgagccagctgtcgaaagcaacactcacggtcacgctcaccctggcaccaggcagaccagtcaggggttcgatgtgaatagatcatagacccggggtcagccaagttgaaaaccaaaacaaaacaaacaaaaaaaagaaatcaagaaactcaccatgtcattaggaaatgggtgtttctgagtccctgtgatagctggcgggccctgggggactcctctgagagaccagttagctgggggttcccctgggtacctcagattttcctcacctcccacccccaagctatactc

SEQ ID NO: 344986 - DNA, 1000 bp, Homo Sapiens
tttttttttttttgttttttttttttttttttttttttttttttttttttagacaaccataaaactcaactttatttgatttttaaaaataaaatgaaaggtgacatcaaacagtactatgcaatatgagaatattaatttctcctaaatttcactgaaagcaaaagttacttacttactgaaagttactaagattgtggaatataattctgtttttcaatatttaccaaactgggaaggggagaatagctatactcgggaaaatattagggaggcactaattataacaatttcacaaatgaaaattacaggttctatgctttagagagtaacatatcagttatacaacactttttataatgcactatgttaaaatttgctcttagctggaaacagggtttcatttggtaggacatatgtttcagtgtattttatattatcctgaagacttttttaacatcccaagtataatgcaactacttaaaattaagaagttttacagaagtccatccattgcttataaactaaatgcagcagtaacctgtttcagtggcttctaagtaaactccttgcagataatcctttagtatttgagcgaggaaagtagtttggtctttaacctgactccacacatcatatttgtatcattaatacccttttctaaaatggtatccagttttcaactcatcttttgtcttccatttatattctttcctggttgttcaaagaccgtgttgactgaggccatgacattggtgttactatttctttgggtaagctcagatgcttggattatcagcagcttgcttaaatcagaagttccctgaacctgctcacaggttgtaggtataatgcaaggtgcaaaatatggttcctctgtcttagtatcaattacactgccatacacaatgataacaaatttcatggtcatattatcaataatcatgtcactatagcttgataaagtttccacatatgcttgattgaacatcacacagtt

SEQ ID NO: 344987 - DNA, 1000 bp, Homo Sapiens; identical to SEQ ID NO: 161049

SEQ ID NO: 344988 - DNA, 1000 bp, Homo Sapiens
tcaagacgcccccgtgcgagagcccttcctgctgcggacgctccacatgcccctcttggagtggtagtggtgatagaaattccgcagtcggagccgctccacctccagccctgcctgcaggaccctgtccaggagctcccagtcttcacccccccactggtctcggaactcctccgtgttcattcctccaacccggtcaaagtccgacttgtagatcccaaaaaggccaaagccgttcacctcccagtaaccgtgggggtcccggggcgagctcccgcagctcaggcgcatgaccacgggcgcgaaggccagcctgccctccacgcagtgcttgcggatgccgtccaggatgttgggtgggaagtggatgtgcaggtcgcagaggaacacgatgctgctggcgtcctctaccgcgtccactcccgcctgcagcccggcggagcgctcgaagttcccggttcgtctcaggtactggtaccggggcaggcgcgcggcgcgcagggcccgctccacgtccatatcctcgctctcgaaatccaccaggacgacgctgaaacgcgagtccccggtgcgcgcgtgcagcgcagccatgtccgccaggaactgtgccacccaccgtgcctggtttttcactggcacgatgaagtgaaccatcacgtcctggcgccaggccaggcgcagtggccggcagagctcggggcggccgtcggggcgcacggaggcggcgggagcgggttcgggactttctccgtctgcatcccctacgcgggctcccggcagccgcaggaagacgtactcggacagtcgcaggcggccgcccccgcgctcctgcagctccagctccagcaggaagcgactccctcgcgccgagtcccggcgcttctccacgttcacgatgcgcagaagcgcgaagcgcccgccgtggcgcgcgttcagccgctccatgtactgagcggtcacgtccacggcctccgcctccggcagctgcaggttccccgaa

SEQ ID NO: 344989 - DNA, 1000 bp, Homo Sapiens
ttttttttttttttttatgaaagagagtccattttatatcccaattttattcaccttttctgaatagtcacaacattaatctactggggataatctagttagtatatttgaaattccatgttttttttctattatatgcatgtattacacttgtatataatacagagtttccagtgttgatttaaagaacatagtttaaaaaatgagaagcatgatgtataatttcaaatctcaaacaaacctaggacaaattcataatttccaaaaagtatagtttttcacttggttacaaagaaattaatgatattctaattgatgcagaaaccccagggcaactttttttttataatttcatatagtcttgagccattgtgaaaatccactcaaagccatctaattcattttatgcatgattaaaatggaggcagaaagccatttcattccatgaacttatgagacagtggattttagttcaatgtgagatacatacttttcagattttatttttaaccaattttacatttttagttgctcttcccaggaaagtgtctgagtagtgttttggcctttgaatattgtcacaaactaatagaccaaagctccccaggatatatgggcctctatcctggaaaccaacgtatgtctaactgaccacgtcagtgagtttttagaatacaaagtatttccataccttcttccataccaccttccatgatggaaattctaacaggacaatttttgaagcatcttctgaacagcctaaaatgagtaaaacacagaaatccttctccttgcattccttcaaactataggtttacacaatattgttacagaatggctatgcacttttctttcttctctcccttcatatcacaaatgaaacaaaataaatgtagtacaaaattatacattctataacttagaaaaaaaaagtacatacatgtttaaggcctttaaatatttatgactttcctgtagaaccaaaaccataaacgttaaa

SEQ ID NO: 344990 - DNA, 1000 bp, Homo Sapiens; identical to SEQ ID NO: 161050

SEQ ID NO: 344991 - DNA, 717 bp, Homo Sapiens; identical to SEQ ID NO: 161051

SEQ ID NO: 344992 - DNA, 1000 bp, Homo Sapiens
gcagtggttgcttgctattctggctgtcattggtgagatagagctgctgacatctgtttggactggtaccctctgcttccctggtactcttggtgtgagggcaaaacacttgcccaagcgtgattccctctgtccttccttcaaggctcatttcaccctgagaggagctggtccctccagtgttcatggtaaaaacttacccaactttcccccaacactgaggattgtgacacccttcagggtgctcttcagtagcctccagagagactgagcctctacttctgggagtttccagctgcctctgcctgtaggtgaaaaatggaatcttttcccattgaatgagttaaggcaacaagtcaaaagccccttcttcctcatgggggaggaaatggggaagggatcatctgtccccagtacatctctgaatgaatgaatgaatgaatgaatgtaataaaaaatgtttcctcaaaattgaagtataaattatcccttctaaccatgtgttactaatttgaatgttaaagatttgtatttgagggttgaaagcatttcttaactgaaaacgagggcaggagccatcggacacatgcccttccccatcttctttgagaggagagtatgggaaaagagtaccctggtctttgttcctcatccacattctggtatggagaaagctattttacttatcatgagcctcaatttctttatctgtaaaatggcagcaagtatctccctgattttctgtctcagaaggttctgtgaatatttaatgtaatggcacagggtggagtttccaatcttggcgctattgatgtttcgggcttgttaattctttgttttagagggctgccccatgtattatagaatttatggtccctacctactagactccagtggcagccccctcacctcagttatgacaaccagaaatatctctggacagtgctggatgttttctggggacagggggcacatttgctcctagctgagaaccactggt

SEQ ID NO: 344993 - DNA, 1000 bp, Homo Sapiens
tttttttttttttttttgggtcagactttattagatacacggagggctgaatggggccttggtgcccttggtcctcttcagcctggagacagcagactccacaaggggctcccagggttcagagcaggagaacacacctgacctccggccagccagcccctcagggtgtctcggggactccccgagatctggtgcctggttgggagggttgggtttggagggggtgttccagggggcctccgtggccctggaactagactgatgacttttggagaatgagctccagagaaactggcctctttgggccagggcaaggcctgggcttcagggaggtagtgacctgttttggtgcccgaggtggaggcccggagaaacatcgtggggagtttggtgattgaaggcctgcagacctgaagctcctggtctgggagggtgtgcctgggactgggtcggcccgggcctgagctgctggaggctgagatgctggcaattgatgcccacaggcctgagtagccttgccctgaggccctgcttccttcggccttttctcgggcagcagatgcaaggccctggcctggccctgaggcaggcggaggccgaagccgatgcctatccggagtggcccagattcctggccctgcacacagggcagtagttgagggaaagcaagcagccggggtccagtcctgtacctggggagggggcaggaggggctgcggggccggaggcacaccaggcatataggatactccacgactggggcctggccggttctgcctagccacaggtgctgcaaaagcagtagccgcaggtcgtgtgcgatgcggcggtgccccagctggaccaccagggcctgggccagggcccctgggtccctgaactgtgcaggatccttctcgcttggcacgcatccctccaccactccaggggacccggacccagtgtccctgtactgatgccagcgccatgtctgcctgttagagtggagcctatgagaagg

SEQ ID NO: 344994 - DNA, 1000 bp, Homo Sapiens
gtgagggattcaagaatagtttatttcaaaatagagtttacaagacagggtatcttttattaaattttcacataaaaagaaaaagtacacagggcactaattacgagtaacaccacaattaattgggcctcattcctctgtaaagaataggcaagcaacgagtcattttagtaacattttttcctggtcttttactttctgtatcctcttttcttgatttctgatcattgaagacattgcttggttcttcagctgtaaatcttctaccagagtttgcaagctttctagtctgttctgaagcttcctgcatgtttttcctgttgtttctattggcggagactgtgaatctttaacagaatcagatgaatgaataggtttggcagatctatactgtgatgtggaacctattgaaccttcaactgaactagttaggagtgagtgcactggagacttcttaggagaagaattgaatgaacgagaagctgagtttttcacagatggacttgctgcagatgtgaatgtgaagcaaccagagggatcttccctgtctcctgcgtgtaatgtgactggctctctactaagagtttcacttgatttgcttccttcagtggagtccctcaacgagttgttgcttctatggcacatgtctgatctcaggctggattgatcacgctctgtccgggcttcagttagctctgagttggcaaggactaactgcttttccagctcttctgtcttgtcttcatacatccttttggcttcccttaattcagaacgtagctgagaaacagtagattccagatcgctgagctgacgcatatacatagagttttggtttcttgcttgctcttgaatgatttccatttgactctggatactattggcttggcttcgagcactgctagctttctcagtaagtcctgttatttcaacttcatgttcacttattaactgctcaatcctatcttggtgttgttgcagaagtagttctattttgttc

SEQ ID NO: 344995 - DNA, 1000 bp, Homo Sapiens
ttttttttttttttttgttaaagaaatgtttaattataaaattaagcttatacataatctaaaaattttcaaatgtactgcatttatagcataaaagtacaattagtaaaatgattcactagtaatttaattacatttaatttaaagtaaaattaaaaatgcttttctctatgatgcagaatattactccaaacacctacctcatgcatcactcaatatgaaaagtaaactaacagggcctctccacttagattttcatcataaaccttacattttaatgcccatactcttccacagaaaaaaccataaataatgcccatctaataaaaaagaatctctcctatatctgacacagcaacaatttatcacatgctttcacatgtgaatacaataggaatgaaataaagtaatttgagagttgaatttcatcattatttacttttcaaataagccataattttttcaagaaaaaaagtatactttcaatgtaattataactctccaaagaatcttctactccttttaaagttatttacaaataatctaacaacttatagatttttttatactcaacactctgttttagtgtaatgtctaaagtgtcagtgccttagttatttctactgtaaattatttaatatttacatagactcaattttggattaaatatttttcatacttactgcatctgcaaaaacacatttcaatataaattcatgttttctacgccgtagtttttgaaaaaaaatgtttttccaaattcattacatttgcaggatttttctccaatataaattccctgatgttgaacaaagtttgagcaactgcttcagtgtttttctctagtacaaaatgcgtacaataagatttgtaatacaagtaaaggtactacaaccctcctatgctccttatatttgttatgtttgtcttcaaaataaacatgcttcttcactttaaagtgttatgttttctgaaatttcttttgacagtaattgcattt

SEQ ID NO: 344996 - DNA, 1000 bp, Homo Sapiens
tcactgcactgactgtgcattcactaacttaaaatatatgtctcgatttctcaggagctcttgatgagttccttgttcctttatctttccattgtgcagaaccactatcaaatctgcgttctgaattgcagagagcctgtgagtgaccactaggcatgtccttcccgtcctggctttatcaagggcatgctgaaccaccttctcactgtcattatcgagggctgaagtggcctcatccaacaataaaattttgggtttttggagaagagcccttgcaatagctagtctttgtttctggccgccagaaagctgtgctcctttcagtccaacttgtgtgttgtatttctcagggagaccttcaataaaagaatggatatttgctgcatttgcggcttctttgatctcatctaatggcaccacacggctgttgtcaccataggcgatgttctcagcaatgctgcagttgaagagcacaggctcttgaggaacgattgctatttgggaacggagccactgtacattcaattcttttgcatccacaccatcaaacagcacttgtccttgcacggggtcataaagtctctgcagaagttgaacagaagtgcttttcccacagccgctgctccccacaaatgctactgtctttcctcgctcaatactgagggataagccacggaggatgaaaacatctgggcgacatggatagaagaaagagacttctcgaaactctaaattcccttcacatgtgtctggctttttcccttcttgactgcggctgtctatatttggtttcttttccaacaaggcaaacagatgcgcagcccccgatttggctttggaatattcaggagccaaaacgagcgtttttccgatggccatagctccatatgcaattgcagtaaaaactatgaacatgccctctggggtcattcgtccagcttgaattaaataggctccaaatcgaaaccctgctgcataggcaaaatatataaaggcatgg

SEQ ID NO: 344997 - DNA, 1000 bp, Homo Sapiens
ttttttttttttttttttttttttttttttttttttttttttttttttgcttttaagttcagtttaatcagtagtacaatgttatgtatttgccactgaaaccatttagaaccatgcataatcagacagtttagcatgagggtttccatctaggatatggaaattactttagattgctaattttgagttggaaggcgtgagaatttgaataattttgtaaatagtattggaatatttaagataactgagattcacgattttgtacctttaatttatttgatatgcgttagtaagtcttgctttggtttttggcttttggttggagtgctgtggtcagcagaatgccacccttccccaacaaaagaggttcattccttaatccctggaaccagtgaatgttagtttacatggcaaaatgtgtcctgcagatgtgtttaatattaaaaaccttgaggagggagattatcatgtattatctggctgggcccaacctaatctcatgagtccttagggacaacctttcctgtctgcagggaaccagagaaatggttcgtgacacagactgaacctgctagctctgaagatggaggagggggccaagagccaaggaatgtaggcagcctctacaagctggaagtggccttagtttacagtcagcaagaaagtggggaccttggccctgccaccgaaaggatgtggattctgccagcagcctgaaggagcaggagacagagtctcccctagaacctccaggaaggaaggcagcctgccagccttgattctagtccagtgagacccatagtcagacttccagcctacagaattgcaataaatttgtgttaagtcactaagtttgtggtaaattttacagcggcagtataaaactaatacagtggtgtgccttcctggttgacatttgaaatgcgtttagaaaggcatgaatgcgctaatgtatacatacagtttaaaatgcttaaggccatttcactaagtttggaat

SEQ ID NO: 344998 - DNA, 1000 bp, Homo Sapiens
cttttttttttttttttttttttttttttttttttttttttaattttgaagtttttaatgcacaaaaaagaacatcccaggaacaacaggtattgacttattaacgatgaagcactatataaggagaccccctccccacttagtaaatgggaaaatagtgtaaatagacatgaaaggaggtaacacttcaggattaaatgtaaaccctaaagttgtatacaacattcatatgtggcttattatctcatagcaatattttcataacgatgtatatgatatttatccttattggtaagatgcttttgaatcaaaagttaaaaacactgaagaggtagttttgccaatgcaaggtgaaaaaaaaaaggctttaccttgctttgtttcaaaatccacaaccattatttttctgttctaattttctcctggatcagccaggaagataatcatgctttgtgaaaaagccaattcacaaccttctaaaaactggttcccctaaaaggacaatgatgtgtttgaaacaactgctctgaaagtcacctgggaagtttccatagtgttcctctccatcttggatctgaaacagattctggctcaacagaaacctgttaagatctgactggcagtcacagaaattcatccttttatctcctaaaattctatgcacaggctcatggtagtagcttcttcagtgacccaagaacattggtaggtgccttgtcatttaaagccagggattgctttaaatttgggggaaaaaaattgcagtcagaaataatgtttgtttggacaattctgtagctggcctgtgaaactggctacaagtgactggatatagtccctcatgttttcagttgtgtttcatcaaagtcatcacatcttagactcaaaggcagtttgggcttctgattgccagatgccgcctgctgctttatctatatgtgtgggacatgtggagtggagaaggtctacccaatatgcaaactctttgacactggtcatt

SEQ ID NO: 344999 - DNA, 1000 bp, Homo Sapiens
tttttttttttttttttttttcttgtccaagatcatttattgttattattatttttctctcttaattggattcagcgtttctggctcctcacacacatcctctctggtgggggattcaggtttgtgcaaagcacaaaggagcttgtacccacctgggcccccggccagcagcacggccggctttgatcggagcccctcttccctgtccgggctcgcctgccccagtccctgcttctgacccctgagtccggcctcccgagcctctgcctgcaccctgagcatccccaggacggctgggagggccaggtcttccgtgatgcagaagtgcctgagatggttcatgaaatgccctcattgttccccttctgctaaggcccccgacgcctccctcctgctgtcccacacagggcccttgctgggtcacacaccaaacagcctcaaggaaaaattcagcagctgagccgtgcgggaggcctgggctcaagcccggagtctccttggcccgtccaggccgtcactgaccaaacgctaggctgacgacacggtccgaccctttggactaacactgtggatgctgcctggcctgctggtttccagatcccaaagccccttccttccccttctccatctcgctcaccctcggggcctggctccctcatatacaataagctgcttctcacttctcaccctgaagccaacagctacgacagcaggggtgacagggcgctccagggtggcagacaggcttgtgttgcatataaaaacaaggtgatgctctaaatatctaagaatattggtcccccaaagtgactcttgctgcctcccccttcctcaccgtcccgccgacaccttgccccaggcccttggcaaggccaggtcccttggagactatcgttgccagtttgggattctagacaaaaattctatcactttgtttttgctagaaatcaccaatacaatccttagttcagcaaatacagttttctgtatagtttataaa

SEQ ID NO: 345000 - DNA, 1000 bp, Homo Sapiens
gagatggagtctcactctgtcgccaggctggaatgcagtggtgcaatctcggctcactgcaacctccgcctcccaggttcaatgattctcctacctcagcctcctgagtagctgggactacaggcatgcaccaccatgcccagctaatttttttgtatttttagtagagacggggtttcaccatgttggccaggatggtctcaatctcctgaccttgtgatccgcctgccttggcctcccaaagtgctgggattacaggcatgagccaccacctggcctcatattggctttcaatgcttttgggagcagattctgcccatgccctcaatgtgcacaaactttctagcacctgacctctccctcctttgtacgtcttccaggtttcctacccttcaaagaaagctaagttcaaggtgagttccttccttctgggaaccctggccacctcttggtctatcagtgtttctcagcctgaggctgcacctcttcaacggggcagaaagaaacatactgggacatctctgtagtcacaagctggggaatactggtatgcaactcccatttggtgagcagggcaaggttgccaactgtttgtaatacatgggatagtcctgcagaatggagaactggcctgtccaaaataaaagtagcaaccccctctaatgaaccactctccccactgaaaggacacgagcatgtggcagtttgagttagggtagcagtgggaagaggatgggctctggagccacacctgggtttgaatcctggctctgttgcttattagtggtgtgatcctagcaaatttcttaacctctctgggcttcagtttccatgactatcatacaggtgtgaaagcaaaagcaacccatataaggttgtctggcaggttaacacagataatgacagtaacagctaatagttactgaacactttaaatcaccagatactgtgctaaaagctttccacatgaccccatgggaagggcactattatttttctc

SEQ ID NO: 345001 - DNA, 1000 bp, Homo Sapiens
ttttttttttttttttttgctgtttctatgaacttttttattctgtacataggacattttgtacaaaatatgaagtctacatttttattacttattaccataaaacaaagatacaatgtatgtacaatattaaaaggaagccatactaaagccacactaaaaagacacttggaatagtgacatttctgatgtacagatacattttggaaagagtgaagatgccaaacgcagaactttatgaagaaaaacagtcaccggtttattttcaatgtagtacttttgaaatcagtttggtacagaataaacagtctctatacaatgatatgtaagctgacaattagcacaggagtccgagtactaactagggaaactttaggaggccaaaatattaagtaatactcttgccaaagaaaattagtttctctgaaaacttttatttttctttttggtgagtgtttgtcttcaataaagagcagaaagaaaacctagacaaaaagatgttcttacacactgagctttacacagtcacccaaacattgatattttgctttttcccgagggcaaaaagagagtcttcccagaaacctctctcacaaacatactgaacatccaaaatcaaggatatttgagaatctatcagctaaagacggaagttcaaacaatggtatatcaaaatacataagacgctgctttatacaataaaaagcaccctttttccctcaaaaggagaaggcatctaaactgttttttttaatgatagttttcataatggtaaaatggagagatacttgtcaagtttctcaggaagtattcatctcacaaagcggacttgtccacttttagctggggcaatcttcgcatttcatacctgcacttgctcttaccacaagaagtcccctccccccaggtgattttcctccaagacacgaggacagaagcattgccagtggcttgaagtgacagcagtgggcaggaggtaccagagctgcacaaggagcag

SEQ ID NO: 345002 - DNA, 1000 bp, Homo Sapiens
tttttttttttttttttcttgagacgcagtcttgctctgtcacccgcctggagtgcactggtatgaccttggctcactgcaacctctgcctcctgggttcaagccattcccctgcctcagccccctgagtagctgggattacaggcacctgccaccatgcccggctaatttttttgtttgtttgagacgaagtctcgctctgtcgcccaggctggagtgcagtggcacaatctcagctcactgcaacttctgcctcccaggttcaagcgattctcctgcctcagcctcccaagtagctgggactacaggcacgcaccaccactcccggctaatttttgtatttttaatagaggtggggtttcaccctgttggcgaggatggtcttgatctcttgaccttgtgatccgcccacctctgcctcccaaagtgctggaattataggcatgagccactgtacccggcctaatttttgtatttttagtagagatggggtttcatcatattggccaggctgctctcgaactcctgacctcaagtgatccacctgcctcggcctcccaaagtgctgggatcacaggtgtaagccaccactcccggcctacaagctatttccctgtaatatgtctgatcactgttaggacctggttatacagaattttcattccaggaagcacaaatgtgatatacttacagtaataatggtcagcagcaaatcttttctttggggaggaaagggtaagaaaagaaaaaagaaggaaaggaatctaccatataggctgtgataatcttaaatgctctaagtaagccatgtaataagtcttcaaatgcattagagatacattaaaacatatttgaaatgaaatttccagcatctaagagtgcttggaacgtgaattttaaaaaatagtagcaataattattattgctattaattcttatcatactattttagaataataaaggaagtcatagatgctgtatctctaggtctctataaacc

SEQ ID NO: 345003 - DNA, 1000 bp, Homo Sapiens
agaaaaatgctgtatttgaacttgcaaggataattgaacactttggttataacatacttaaaagatttctgttaaaatttaatttccttgttttcaaattaaaaggtagaacagtctcctgaaggtaatgtaggtgggtcccttgcttttcacttactataaactgtgctaaccaatacatggaggtgaagggggatataaaacacaaattatttcatcactgaaataattagctgctaacatgacttctaaagaacaggtataatataaaactaagaacttatttcaaaatatgaataaaggcactaattacaaatgtacattttttagacagtatcttacagttcactgatttacaatgaatgtcagaaccaatgctctagtattagatacttgcttgggttaaaacattctcttggagtaaagaataatcagttttcacgttactgtgacaggaaagattgagtgaaaacctaaaaaatactcttaaaaagtcttacatgaatttcctaatcatgaacttttcccaatcagcaccgtctacactgatgccaatttcatcttcaacacatggctaacataaatcatttctaatccaaaactaaccaaatattttttaaaggatttacaaaataaattgtattttaaaaattaaatagcaaatttgagtctatactagtagttggcaaaatacaatcaactattaaaaacacttttaatataatgctgatgtggtaatataaaaaataaccatataatttgacagaagaaaattgagccagccaatcttactagatacaagaaggcagatagtcatttcataagaacaaatacaggagtactaagtatgctttttctcaggacagacttagggaaactaccctcagtacttacggtaaacaacacaaccaagcagaaattcaggcaaactgtgcttaggtaaatggcattttcttaattcccccacatcccacacacaccacaaaccatccatatcgat

SEQ ID NO: 345004 - DNA, 1000 bp, Homo Sapiens
aatatgagaaatactagataatatttgtatgttgatgacattgatccagtagagaagaaaacaactgaggatacaggagggagaaaggataatggcagatgcaaaatccttgagaagacaagaagagatgaagtccattacctgagtcctcagatgggaacaaagatgggtgatctattgtaacaggagaggagaggtagggcaagtagtggggcaccttcatgaactatatttttattagttcatctcaaatttgcattaattttacaagctgctacaccacaaaatcaatgtctactgcagtgagagtcaaccaagatcctgtatctcttccctgtatgttgttggtaggtcacccaaccaaaatgctcttaatttttaagaccaagttcactaaggacatcacttcagctttatgttaatgcatttggaatatttagtcctaatgtaccaccacaagctaatcatataggggacccaagaccatctcatcacgtcatagaaggctcctcaaacccttgggctctggccatgacctcactttgcttacaatgtatgtagcaggtacagtatttcagtccatatactcagatgataggcaagaactgtaactctatttccctgttactcaacataatctctattttgattcccctagttctactcttgtcaaaatgtatccagaaaatgtcatatctgcataaattcaggtttttaaactcaggtaaaatttccatctccctatccttctccctgagaccaaaactaagttcttaacgctggactgaaattgaggccccagggagaagcccaggaaggtctatggctgtcagcattgactcctattagcaagtcatatgaagtaataggtgtaggtcctatcatggccagtccctggttctttatccatgtatattctgaattttcccaatcccgacctggaggaccctagtttatcagccctctctcagtcactttctcacctttcagggggaaatga

SEQ ID NO: 345005 - DNA, 1000 bp, Homo Sapiens
tttttttttttttttttttttttttttcctcttgatttgcatatattttattttcctactcttccctgagcaaatataagcagtaagcaagcaggctaggtgtgctcaataaactcagcaacacctgggatgacctctgcactcgaggggccactgcaatctttgtcaaaggcataggatgctcctgctctagttgcacttgacctaggtgccctttctgctacatgcaaatggcctctaagaagaacgaggaacgtatgtgtccaggttggcttgatttcaccagttcactcagctatggccacgatttactgacatcagctctgcaattgagaggtcctgtctccagggggaggctcgctgggcttgctcctgacgaggggacccccattgagggtcagttcccagaggagagtggggtgggtctggaaacccccgaggggcaaggtggaggagctctcctgtcgtagcggctggtcagggccagttctgctccctggctccactgagctcgcctgagcctgtgaggttgccaggggttccctgtggcacggcaggcacttctggatgcagaggtggaggttgaggccgtgactccaggggcatgtttggtggtgcttggggctgttcctcatctgcggggaggcggaccaggacatgtagagcaagatgaggaagagcagcaccacgaaggcagccaggctcacccagaatgcgatcacgatggaatgtttgtgggctttcagcttcttctcgtccacgggaatgaggtccagatagtccaggtagtattcatagctgtagtatggggcagaggcgttggtcccgttggccatgtctgtggcacttttccctcttccgtagtcaactctctcttcttccaaagctcctcttcttataaggacagttgtgattatactgggtccgtgcaggtaatcaaggataatttttccatctcacaatccttaatcacatctgcaaagtccctccagcccacaca

SEQ ID NO: 345006 - DNA, 1000 bp, Homo Sapiens
tttttttttttttttttccttacacgtccatttattaaacaagttccttcatgacaatttaatacaatagttattaacgattagtgttgagaaaattatttccctctacatacaaaaatacagatttgaacactatgaaaaagatcaagacaagtaccatgaaaaactggtccttcaaatgaaagggggaaaattgagggcaatgtgaggctttgcctgctgtcggggacaaatcaatagcagcaaagctttggggccccaacccactccatacatacagacttgaacccaaaagccaggccagccaggggacgcccacccagggcttccacgtcagctgaaaaaccaaacacataaacctaagtttgcccaacgggcatcgcctcagaaagcccacagttgtgtctttaaactgccgaaatgaaagagacttgatgagtaaaatgtgatagttgttaacattgccccccaaaagtgccaccaggtgaagtaccacggagaaatcatattggaaagttactacttagccatctgacttgacttccttggttatcaaataattacatattctgacccttcagaaggacaccaaaagctacaattttatgtttcaatccatctgtaccttcatttgcaatggctcagctagtttactcaagggttttgggaccagacataactcacgtcctgcaggaaggagaagcaaaaggagccggtgaagagtacgtgtctgtgtcttggtgtcatctagctcctcacagcaaacagcctgttttgttcaggcctgaagcctggaaaaggccgccgagcctagccagagcatccacaacgaaccaatctgagatccgagtggaagatgagagccccggagctggctgaggtcccccaggaagcttcccactctgcagtggcaggaaggccatgcctctgcaggacgctcgcactgattctggaaggggcccaggccagagaatacacttgggctcagttcaccagccca

SEQ ID NO: 345007 - DNA, 1000 bp, Homo Sapiens
ttttttttttttttttttggcaaaataagaaatttattacatatgattggcagatacatgctgctgatatattattcttactgtttgaaaaaaagtcaaaataaaaataatgttattttaattttaaataccacacaattacaggtccttgaggatcagggttgggctcagggaattacctcgttttttcagagaaatcagagtgggcagaaccatctccaaattcttttttttttttgagacagggtctcgctctgtcacccaggctggagtgcagtggtatgatcatggctcactatagcctcaacctgggcacaaatgatcctcccacttcagcctcccaagtagcttggactacaggtgtgtactactgtacctggctaacttttgtattttttgtagcgatgggggtcttactacattgcccaggctggtcttgaactctggggctcaactgatcctcccaccttggcctcccaaagtgcagggattacaggtgtgagccaccctgcctgatccaaactttttctttttgagacggagtctcgctgtgttgcccaggctggagtgcagtggcatgatcttggttcactgcagcctctgcctcccgggctcaagcaattctcctgcctcagcctcccgagtagctggaattacaggcgcacaccaccaagcccagctaattttttggatttttagtagagacggggtttcaccatgttggccaggctggtcttgaactcctgacctcaggtgatccgcctgcctcagcctcccaaagtgctgggattacaggcatgagccactgtgcctggcccaaactttttttttttaacgtagactttcagctgcatgacctggtcccagccctgtagctcggaagccccaggaggtgaggttcacacccttagggctgggactctctgagccctaaggatgagattctaagttcagagatgagttgagggcttccctgaagggaccaaggaagtccctgtgg

SEQ ID NO: 345008 - DNA, 1000 bp, Homo Sapiens
tcagattacttgaatatacgttgctgcataatcactaccaagtgggttctttgctgtgcatttgtatatcccagaatcggaggtttggggattctgaatgactagggtaccttgtaagtgaagctgctcacttccatgtgtcctctctttacttgccgttgagagaagggagtggtcaggcatctcccatgtgatttctggcttgggaactcccaaggccacacagtggagctgaaaggctgcccctgtcctggtgacaatactcctgggtggacgatttgtaattcggggagggtaggctacaatcattactggaacagtaatcagtgtatgaccaacactattttgagccttacagatatagtttcctctgtcataagctgttgcttctttaatgactaaggtgccattgtcatgcaatatgtatttcccattaatttgaggcctgtctactacataaccacttggcatagtccatttgatatttggcttagggattccatcagacacacaatgcagtgatagagattctccactgatgccttttactgtccctggtgcataggtaagaataactggcttctggccaatttctaatatgactaatttctcaatatagccaactttattcctagctgcacagcgatattttcctgcatcctcccgagttgttttagaaatgataaaagaaccattgcttgctatcagatactgataactttgtggtccattggaaaatcgtgtgccatttggtaaaatccagattatttcaggtggtgggttaccatcaacagagcaattcaatgctgtggactttcccagctgggcaactattttttcattaaatggatttctaaatgtcggtcttctcagcatttccagtacttctaactgtactaccaacacgctctctccaccttcatttcgggccacacagataaagtcggctgaatctgaaagcctcacattcctaatttccaaggttccatttttatggact

SEQ ID NO: 345009 - DNA, 1000 bp, Homo Sapiens
atttcaaaatgttttcattttagtgagtttaaaagagaggaattcaacaagagacaggagagaaagaaagaccacttaagagatgaacaacaggcttggcatggtggctcgtgcctataatcccaacactttgggatgccaaggcgggaggataacttgaagccacaagtttgagaccagcccgggcaacatggcgagaccccatctctacaaaaaagttttttaaaaaaattagccaggcatggtggcacctgcctgtagtcccagctacttgggagactgaggcaagacgatcccttgaacccaggagttggaaggtacagtaagctatgattgtgccagtgctctccatcctgggtgacagagtgagaccttgcctctaaaaagaacaaaaaaagagatgaacaacgaaaatgagagacaaagaggaagaacattagaatatacggcattcaaatgtgagttccaaaccggtagagatttttatctgttttgtttcatgaaatcccttatgccaagaataattactgacacacaataagtggcttactaaataagatgaatgaattaatcaataggcacagacatacaagaaacccaccttgagatccattctgtggcctttcagactactacaatttaaacctgttaaattgttttgcagctctgagtataagttactatctgtgttatctgtgttgagctcctccaatttcagatacagaaatatactgcagcttcaattatttataagtcaatgaagttgttctgattcagattttccccatttcctaattcatcaatttgactccatatcctgttttcattattctttgattcaattagttttcatcttcagatatgaatccctttcagacaacctgtaaagaccctcatctgactctctctgtgtggacctgggaagcattctacaacaaaatacaacttttaaattaactatatttttaaatgtcataaattcataaaatattgaccctgc

SEQ ID NO: 345010 - DNA, 1000 bp, Homo Sapiens
attccatgtgcagaaatttattttaaattttattgcatcacattatacaagcattaatcatggcttcatattgatgactatttaaatgtgaaaattcactcatgtcagtactttttggctatttacaagtaaggaatttctatgtactttatatatctctgtatttgtatgtacatatgcaggaatacatgactatacatatgtacacacagaaatacatctatggccatacacatagctatagatatgtcatatataataatcttctcagaaaggtctaaaattaaaaaaaaggaaagaaaaagttgtaaacagggtcttgtctgtgttgttggtgacatggaattaggaccatatgatgacattctaggaatgtgtgtccatgtgtctgaataccctttttagcccagtgtctgtaaaattcacatgggatagaatgcaaaaaaggtagcaaacaggctgaaaaacaggcccagtatacaagttccccttgattttaaaaacttgagaatgtaactgcccataatgtgcatgcttgcttggtcaagaatggtctatggatagatagcaattgtgcgctggactgcaacgtgatttcacagcagtgtgactccaacgccagtcctctactggatgctgcccctcctgcggccgccggtatctgcaacatgcactgtggttgcatttttagtcattcacttgagtgtgcttttgcacagccagaagaagtaaacagaattcaggtccttggcctggaaagggactattttatggtcacggccactcgttgtggtgtgcttttccattcttcttcctctcctttcgttccttctggagacgttccagttctgcttcatacatcatctcctgaatcaagtacttctctcttctcattcgatcccttaggtcttttgggaggtctgggatcagatatgaaatgaggtgctttatacaaaacacgaggtgctcaaagacaatgataaaagctaatcgagcagct

SEQ ID NO: 345011 - DNA, 1000 bp, Homo Sapiens
ccatttccatactctgtgacctctgtattaccctattagcagtgaacaaaatgccgatcatcaaacaaatactcctggatcacctaatgaggaggcctctgggattctataatcttaggtgttgtgtctgagtgatacttccatctgatctcatcaatttcaccatcatcaagtataaatgaagccagcactggaacctgagaaaaatagttcttagccaggatatgtttgtgtttgatcttgtgaataaatgagcgttcatatccctcttcaatacttgttagcttgagatgagcagctgcttcatctttggtaagaagaatgcagttccagggggaccactccagggatttattccatctgaccatgaccagatcactgagattgtcgcaagcactgaggactgactgggacgcccagatgttctctgtcaggtactgaatgtcttgtagctgcatcaagaaagcaattttagaatcatcttcataatcagcttctgtatagtagagctgttgaagtaaacatttgtacttcaaaaatgattctcgtttttgagcctcattctgaaggttaatgcagttacgacaccggtatatgcggcgtgaggtggatgatacagaaaattctgtagaaggcaaataaagctggcaactgtggcaaaagtaaatcttcttataaaatttcaatgggtcttgagggaccttaaggtattttgcaacttcaggattaaacagaggtgttttgatataatgaaaaaagagtgtcgcaattctttttctgagtccttcaaggttatgatgtttgactcctctcatcataaggtcaacctctctgtcaatcaattctagaatttcctgagttagtttacattcatgttcctttacagtgtgtttaagagttaacagcacatccagcctctcatcttgggagatatttttcagcataatgcacttatagatattttgcagctctctggctctgatggtgaactgcgtatcca

SEQ ID NO: 345012 - DNA, 1000 bp, Homo Sapiens
tttttttttttttttttgaaagtcacaaaaatatattaaaacagcagctgtcttcactctaggcactggcctcccttcccagtgccccttgcccaccacccgccatacactttcagagacagatgcccagggcaggaaaacggatgcgcctcagccgcagcccagggtctggagaggtccctccagcctgggagtagagggcggctaacagtctcaacaggctcgacgccaccgccgacgagggggccgctgggaggccggaggtacaggagggtcgggcaggacgcagcggacagtcgggccttgccacggggacagaaaacagaagagaaatgaacaaagtgaagacagggagagagagaagtcacagcagtggggggaggcgcagaggagtgagggaggtcagtggggagtgggggaagggaggcccaccaggtgacacccacttagttgagggggacagggaggctgatgagctggggtctgaggcagcagaccctgctcaggggaagaaggggaatgtaggagaggaagaagccccctggcacttgggagaggtagaaaagtgggttctgccaaggccacagccagagaagaaagcacagaggacatgagagaaggggagtcctggagcaggccaggccagctgcgacgaccatcccaggctaggagaaatggggtgatcccccgaatgctcgggcctagctctagagcccgagggagacaagctgtgtcatccaggagctggtgggaggcgtgatgaagccaggagcctggggcggccagggcagatgcccgcaggctctgctgcctgcaccccgcccacaggtgggctagaaggtcctgcggcccagtcttttgaacacgctcacagtgcccgcgtggtccatctgggcaccaaggccctcgctggagctgctcccccggggccccaccagagtcctcttaatggtgaccttgacctcggctgaggacttactcttggtgctggtgacctggc

SEQ ID NO: 345013 - DNA, 1000 bp, Homo Sapiens
acaattttaacaggtttatttgagcattcagcaattttatcaatcaggcagtggcagaccgccagcagttcagggcgccaccaccgaggaaaccagaggggacacttacaaggtgtctctgggagcaagacaaagaaactatttgattggttagagtggaaagttcatatttagaggttaactgaccataaatctcttgttagaggttagtcggtagtttctgactggttaagctgaagtttcctgctcctaggttacacacaacactttcactctgagttgagtttcagtttgctgacttaggaacccaaagtgcaggagccatttcagcctattggcctcccagcgaattttttataacaggtgagggagggtgcttagtgtgtatcagaatagcataccaaaggaagcagccagtcctgaggccacgaggggatggggggaatgttcctggaatgttcaaggaacagcagagaagaccattatggccagaatgcagattgtaggacatgagaccaaagagggtacaggatgtaagacaaaaagagcagttgaggatggctccaaggattttggcctgacagaaggatggagttgacagtatctgagatggggaaggcagagagtgaagatagctgtgggggaaggttggggcattggtgttggccacaggattacaggtggagatgttgaacaaaccatgggggctgttaagatggagttcaggggagagctgaaggcttgagatccctttgggatgtggcagagtataggtgatatttaaggacatgaacgtgagtggctggggaagccagtgaagatggagaagaggagagactcaagggcccagccctcgggcatcacaccattaatagctcagggagatcaggaggacacatctggggccccaaggtttcctctctgggaatccaagcccaggggtatgtctcttccctgttttctgtagccctctgcttaaacccataggctgagcgctcac

SEQ ID NO: 345014 - DNA, 1000 bp, Homo Sapiens; identical to SEQ ID NO: 161056

SEQ ID NO: 345015 - DNA, 1000 bp, Homo Sapiens
tttttttttttttttttttttggggatatagaatcattaccacccacatggaaagagcaagggctaaaaatgctgtttaaagaaacagctacacttttggttctattacattttaagcttaaacattacatatttcaatatgcatcttgaaaaaagtagcagctttctaaacattatgttcagcactctctcttttcacctctaaacttgcacagaagtctctccttgaacttcttcatctttattttgatgttcaactttctgcagaagcctggggcccagtaaaccaataagcagacttccaattggggctgtgatgaggatggacaaaaatgccactgtcaacacatccattccatagtcctctaattgtttctctccatgtgaccttgctgtgtccaaagccacagatcctattgcagcctgaactgtggcctttggaagccatgcaaaagaaataaatatcttttcttttaagttaaaaccagcaaaacacaccatcagaaatgtagtcaaaattcgtatcaatactgcaatgcctacggtggcaacacaaaggcctacagtttctggtctgagagatgcaatagatacctctgctccaattagtccaaaaagaaggggctgaaaaatgtcccaggcaactgcaattatcttttcaacctctgccttttcgctggtccatcccatgcctgcaaggaaagccatgaccaacgtgcacagtcctcctgatccagggaaaccaaaatgcacactgctgaacacagctagcacagacaaccccaacacaaggaatgttctcttacacacaagtttgtcctggtcacggcttggaaagtactgaatgaaaaatccaagaacagatccagttgccacaccaattaccacctccaaaactcctctgaggacattaaagacagtagagcctgtggaaaaggctatgcccaagcatgtgttgaagccagtgatggccagaatgtcatcgaagctgccagctgcc

SEQ ID NO: 345016 - DNA, 1000 bp, Homo Sapiens
gcaagtagttagatatttccaagtctggatgtcaggagaaacaaaaaaaggtcccctgtggccacatgcagaggaagggctgtagacacagactaacactctgtttcctgctctttatttgattttattattctttgaaaaaaacagatatgagaattgccgatgcacaggccagcctgtgctaccatatgtgggctttgaaaagattctggattttctgtctgtatgataatatgtgctgctgtatagagcaaggaaaacagaggtggttttccaagctccacagcccatctttatcactgccaggtaaagctctgtcccttaaaagttagatacaaccaaccaagtgacatttattgagactctactatgtgccagacctgggcaaggtaccttctcataaggtcgagctggatgactggctgggataaaggatacagccaaaacgtgggggtccaacaggaggtcgtggggaccacatgctcatccacaggacctgatctaagcttgttcatagaccttctgtgtattttccttatagaaaataagaggattttgcttatcatttcttttccattgttgtcagtttcagttttttatatgtcctaataaccatatatttcattttccacccatccagactccttactcctccccatttggtctggggagaactcataaatgtcattggtcacaaatccactctccacgctcaccagagtcacaaacccactttctgatgggttcacagccatgttgtcatagtcacaagacatgtcatcgggagtggcttctcccgaacacactcggaatgaaatattcttcaggtctggccgggtctcagctaagtcagcttcgctttgttttcttatgacattgtagacctctaggtccgggctgtttccctggtgaggagagggccagatggtgtgttgcttctttgtgctagggtctggctgctcccgttttctttttctacagatccaaacccaacatacaa

SEQ ID NO: 345017 - DNA, 1000 bp, Homo Sapiens
gtcttttgtctctctgtttttggtacagaacatggctgccctcagacagtctctgctctttctctcagtccgagataggccaggaaggagtgtttgggtgaggggatgctgggaggcgcagtctgaggtcggggagggtggaatgtgagatccaagtggttcttggggtataacattgtcaagggaatgagatgggcaaaatctgagttccggtacttgtcaaagcgcaaaggggagccgttgaaggccaaagccttgagtgccaggttgggctctgagctgctgccgtgggctgccgacagggccacggtctgcagagcctgggaggcagacataactgacaggggagacaggagattccgggagctcccgaccaccaggagcggggcccccgggccggccggttccttgggggctggacacaggcccttcttgtcctcctcggggcagtccccactctggtgcttcttgacgtggcggctgaagacgaaagggtgtgtggtcttgaacaggcactcttcgcagctgaaggtctggcgtggggcgtgcttcagcttcttgtgcaggttgagattgtccttgcgcttgcagctgtagctgcactggtcacagtggaagggccgctccccggtgtggacgcgcacgtgctcgatgagcttgttggcggtcttggacaggtagccgcactggtcgcacttgtagtggttgcccaggcggtgctcccgggtgtgcgtctccagctccagctggttggccttcaccgtctggcagatccggcacttgtactccatcttgtagtgggtcttgaggtggcactccatggcagcggggcggttggtggaataaatgcagaatgggcacctagaggagtctgaaactcaccactgtcctgagtttccttacttgagcccaccggtggggacagtgtggcatttcttatgctccagcagctgttcgggggtcttcatgaacttgtggcacacatcacactcaaacatcc

SEQ ID NO: 345018 - DNA, 1000 bp, Homo Sapiens
ttttttttttttttttccagaataagaacatgtttattcagatgtgccagaagtccagggtcacccggcttcgcatttaggagatgctttacaagctctcccattttcttttcagaacatacactgggggaattcacaaactaaaacaatttctggtgacttccaatctatatattatactttacagcttcaattgaatttttttaaaagttaacttccaagctggcttgcctaacactgtgagtcaaaagtaaccctaaaaaggaaaaacacacagcactgaagggtctctgggtggtaatgccagcgtgggctggggaggtgagactaagcacatggctagcagacctcaggatgggccctggggctcatcatacagaaatatgacaagatgatgaagtcacaacttcagatgtcatcggagctatctgtatatgacacacacattataaacaaataacctggaacatttcacagtgtacgacacctgttctacctgggaatgcaaaccctgagctgcaaataagaacacagacatgggagacaccacggcctgaagctgctctcctcttccccgctctcctctcctccggtcccgtgatgggttacgctgagccagcaatgtgcacgcactaactccacaggtgttaaaggtaaggtcacttctaaacacacaacaaaattaccttaacattatgacattaaaagttaaaagcccggcctggcatggcggctcacacctgtaatcccagcactttgggaggcggaagtggtggatcacttgaggtcaggagtttgagaccagcctaaccaacatggtgaaaccctgtctctactaaaaataccaaaaaaaaaatcagccaggtgttgtggcaggcacctgtaatcccagctactcgggaggctgaggcaggacaatcgtttgaacccaggaggcagaggatgcagtgagccgaggttgcgccactgcactccagcctgggccacagagtgagactcc

SEQ ID NO: 345019 - DNA, 1000 bp, Homo Sapiens
tgacattctaaacctatctcaaaatatatttcagaagcacatttaatggtcatattctagctaattcctttttatttgacattctgtcaatggcagacccaaatcagccaacatcgccactcatctagaggagataatttatgtttattttgactaccctgaaacattatgacactcttgctccaaaacagatataatttctggttctttgataattttctctgtgagaggggtatgtgatgatgttccttctaccatctcatgtgatccatcaatgccctgttctactgggccatgtcagatagactaggcatcaaacttgctgacaagtcgactaaaataagccggaaacacaagtggcccctaatcctaccagagatctgtgtgtacttgcttggaaaacttgggaggaataacaagtggcatttgcccctctgattacttacatatactcataaatgtgttgttgatgctaaatcataccaaatgtctgccttcttgaaggcagagagaaaaggttgggggctcttctactttgatgagttcagaagaatatttttaaatggttgagaaaactatttccttttactggaataacctttcctttgcgatggtaactttgtagtcttgggagtataggctgcattgtgggtaggtggtctcaactattaatatcaaggctaagatctgagcatcagggactgcctattttttctgagtgcagcagaggacaggtctcatttaacctgcttcctctggtccaacctaaaaaactactagggctaagactggtgtgagagtgtcatttgtcatgtgaaaagactttttttctatataaatattcgaaaaacctcaataccactgctgaactttaatcagctgggaaggtactgcaaatggagggtcaatccatcacaatgcccaggacgagacgtgaattgtggccttaagttcttttcagatagcacagcataatgagattagcaccctctgtgggaag

SEQ ID NO: 345020 - DNA, 1000 bp, Homo Sapiens
tcacatttcaacagtgcacgtgggagcatttgtcttgatggcctctgagatcatcctggccccggagtccccaatgtggtttccctggagattgatatgctggagcctgtggtttccagacagtgctgtggcaatgcatatcgccccgtccatccccagagaattctcttgaagattgagtctccggagacttgagtttaccttcagagcatttgccagggctttggctccagccaccccaatggcatttcctcttaagtcgagaatctccaaggttctgttcacagccaaggcttcccctagcacctgggcgcctgaagcaccaattgaggccacctggagatagagagcagtgagggctgtgttgaccttcagtgcacgggccaccgcacacgctccgtcatccccgatggcgttctcctgtaaatctaagctggtgaggctcctgttgagctgtagtgcttgtcccagggcctgggcagcgccggcctggatgaagttccactgcaggtgaagggaggtgagggtgcggttttctctcactgccactgcgatggcccgggcaccctggtcgtggaggaggttggctgtcaggtccaggttcttcagggtgctgttggcgcagagggcatgagcgatggcctgggctccctcgggactgatggagttttctcgaaggctgaggctgaggagggtctggttggtgcagagggcccccatcagtgctgccactcctgcgtcactgatggaattgctctgcaggtccaggctctccaggccctggttcaccttcagggcctcagccagggccttggcacctccatcaccaatactattactggagaacatgagctctttcagactcctgttctgcttcaaggcatctgccatccgctgggctcccatgggcccgatgctgttcttctgcaggtgcagcatggagagggtccggttggaggccaaggcctcagccatggacctggcaccatcatccctaacg

SEQ ID NO: 345021 - DNA, 1000 bp, Homo Sapiens
tgaattctccttaatatttatcagcaaacaggatgctcgaccctaagtgaattttagtgcagcctcaggccaatcttggtcctgggagtgggcagggttcccagaagaacgagtctggtttctgaggctgtagaagggagccggaagcccctcaacttgatcacggtgagaacacagggagcctttggagaagctattcagccactgtagttaagagctcctgttctgatccagggagacctgggttcaagtcctgactcagccacttcctagttgtgtgagtttcagaaaaaaaatcacttcacctcttagaacgcaatttcagcttctgtaacaatctctaggttaggagggagtggggcgggtgagggcggggagggaggaggagaataaaaaacaaaaacaatctctaggttaatagggaggaagggaggattaaatgagatgatgcatgtcagatgccttaagacagtgcctgggagtaaggaagagcttgagacaggccctgggagcttattcctcctggatgtcactctgatgtgagggtttacccatcttgtcctctccagccccaagcctcattactctcacccgcattatatcatccaccccacctgacctcccagcttccagcctcccgtcctctgcagaactgctgtgttcattttctggaagcccagctccctgcatactccttgaagctgatcaggacctcagcctggtgttccagaccctatgctctccagcaggccctctctctcttcatcatccctctcccacaccattcttcctcaattcttgctagattcttactaccactaggccttggctcaggctgttctttggaatgtcccatctcacctgctctaccagccagaattctaccctttctcaaaggcctggtggatggtctgcctctttctgatgcttttcctctccactccaagttcctgttgcagtcgccaacctgggtttgttttctcgggttgaaggccttcag

SEQ ID NO: 345022 - DNA, 1000 bp, Homo Sapiens
ttttttttttttttttttttttttttttttttttttttttttatgtgtgcctgtgtgctctttcaacaaatttattcaattcacagtgatatctgttggacagagtcagcaatcctaccagacaaaactcatacacacattgattccagatgagaaacaacagtcccccaaggagcttgagaaatcacctagggcagccaagctggggaagggaagtggctgtgcattgctgtgtgtcctttaaggctctttggtcctggttgatttcctcttagaaggttccaaataaaacttccctttcctattcagtacacaccagtctttctttggtgtttaacctaatgggctgaggaagggaggcagccaggaaattatacccattaaagtgtgtggttaatgcctatatatatcatttttactcacagttagtggacttatcttttaaaacagaggtatgtggcagtggggtaagagaacttcccttattatagagaagattccaagaataggttcagacatgatttgaagaaccatgtaactctgctgccttgcacggtcccctttttagcactaataactcctaagtgtctgataatttcaaggttagcagcactcccaaagaagctgtccgggctgggtgtggtggctcatgcctgtaatcccagcaatttcagaggctgaggcgggcggatcacctgaggtcaggagttcgagaccagtctggccagcatggtgaaaccccgtctccactaaaatacaaaaattagccaggcgtggtggcaggtgccctgtaatcccagctacttgagaggctgaggcaggagaatcgcttgaatccaggaggcagagtttgcagtgagccgagatcgcgccactgcattccagcctgggcgacagagcaagactccatcttgaaaaaaaaaaaaagaagctgcctgaccagggggcaacgaggaggaggatgtggaagggtgatgagccccaaggggacagagtcctt

SEQ ID NO: 345023 - DNA, 454 bp, Homo Sapiens
tgtgtctggcttaggatggggcttctctgaaccctcactagctctcagtttctggtacatccggaaggaaaactgacagcacatctctctcttttaactcaagttccacctgggccaagtttggcttttctgagagcaaagtttctcttaggttgtttaggctgttgtgatccttggcctcatccaaatgcaggacttctggagtttctttttctggtggctgcatcgtttcttttctgcttgcctggatgcttcttcccaggaggaccatgcttataatgaccaccacagctgccagggcaaggatggaatgattccagggagatgcatcttccacacgaaaaaaccaaagcatctcttccagcagctcctggggtaccacagtaccggctgggtctccgggagccccctcactgtgctccatgcccctgctcctggtagcgtgtgcaacgag

SEQ ID NO: 345024 - DNA, 1000 bp, Homo Sapiens
ttttttttttttttttcttttttttttttttttttttttctcaacttaactttatttcaataatttaatagaaaattaaaataataaataatatgaaacagactgataacgctgagctgggcaggcccaggccagtctagtacaaagttaaggaggtagggaggatggtggggaggagggggcggactaccctgcaggacgcgggaggctgctcagactgtggtgatgtcaggaagggccgcacactttggcatggacgatgcactaaaaaaagagaaagggaattctaaatccctcttaaccagctggagagggaaggacgcagggccagggtggggacaagtgttggcttcggaaggctctgagtggtggggccggaatgtaccatgttgttagcaatggggttgggatgggtggagaagggccaaagtgagctgtgccatgcaatgaagggacagaggaggacccacgacttggccagcagagccggggcaaaagtctgggaaggggagggaaagagagagggactgggtcccaaggcaagaggaaggcagggggagggtcagaggtcagtccttgaagacaatttgttggccatgaggacgctcgtcgtgggtgatatggcgccggacatggatcctgcggacacggtgctctcggttctcttcatcctccccgcggccagccccaccagctccagctgctccccctgtggcctccaggagggctgggtctgggccccggggagtctcgtagatgaggatgttcagggtctcctcgaagatccgggcctctggaaattccaccttggtctgcttcttctccgtagcatagacaatggaggtgcagcacacctcggcgattttgcggccctgcccgtagaaagaccagcaacagatctcgtcccccaggacatccttgaggaagagtagccgcccgtggaagcgcagggccagcttgtcgaacagctcgatgttcttaagtaggttgtcatctgaag

SEQ ID NO: 345025 - DNA, 1000 bp, Homo Sapiens; identical to SEQ ID NO: 161059

SEQ ID NO: 345026 - DNA, 1000 bp, Homo Sapiens
ttttttttttttttttttttttttttttttttttttttttttttcccatgatcatcagtaagttttattcaaccattagactcacgctgcgttgaaagacaatccccctccactcatttccactgtaacttcactttggggttctgctgttgggcctctacttgcctctttccttcttctccctccccttgatcctgtcatctctgaagtccctctctctctcccagtcattgtcgggccacaccctggtcggctctctttcttgccatctcttctcccggcccctgtcatggtctcgatcccttgtcctcgagtcccagtgtctttctcgggatcgagatcgctcccgcctttcccgttttccctctctatagaggtcgtttttaacaactggcaagttaataggttttcgaaaaggccggtcccgtcccccaaatctcagttgcccagactccttttttcccccaagaccgcctccaagtcgccgagggatccaccctttgagagtcctttccagctcgtagtccacaaatatctcatgctggtcaataaccaggccatcagcatctcggtaagctttgatcacggcacgctcctccttgtattcgatgaaggcgtagccctttgaaaaacctgtgaccaagtccctgaccagccgaagccgccggatgtcaccatagcgggaaaagacttcctttaatttgtcctccttggtctgcaagtttagtctggccacaaacagggtgaggaggggatctcctatgacacctttgttggggacatatcgtgccagcattgccctccagaccgcgcggtcgtgtgggtcttcatcggtgccatcaatgctgcccgctttgagtggatcatactccttggcgatgggcatccaatcgttcatgttagctggtttcattgtttctcattaatctttctaggtgcacttcctccccggcagcattaggttgagatttcctacaacaatctctttcgatttttacat

SEQ ID NO: 345027 - DNA, 1000 bp, Homo Sapiens
ttttttttttttttttttctcagagacccactttattcagttctgtacatatggggacatcggtccaagcccaacccaccttagcatgtatcactctgtggagaataaagcaccctatgtacacagccaaaagccgcactgcctgcgcccctggaacctgggtccggccttcctcagcccctggcccctccaaggtacctataagggacaagagaaggcctgcccagcatagcacaaacaaggaaataaataggtgttggcaggagccatgcttggggcaccgctccctgcttccttctttctagttttgggaaccaacagcacagaaaagcagtcagccccagggtggtcccttccatgtctgtgaccccagggctgctgctcaccaaagacagggcacggggtagggtgtttattcatccctccccggccccacttggtccatctgggccctatattcatcagttattgtccacagcctatacttttctccttttgacctcccttggtcaggcatggggtaagaagaaataatacaaccctatctgccagcacacggctgggactggggggcctatttgtgctgcaggggggttggcttcccttcagctactctgggaccaatggggcttgacataactttggtgagaataatctcctgctgttccctacatgcctctgcaggggagagagaggaggggagatacctggcgttcaaatgaggatgaagggaagaatagaggagcgtatgtattcctgtgtgtacttctcagagcagcctcaggtagctgtgggtgaggagcaggtaggggacaggcatccccaggttgtctgagcactaagcatcttagtgctcagcctgtactagccacagggaggcatgaacaccttttggggagaagagggaccattctgtgggtgtccctgcttcaagtgcccacatccccctcccttgagtagctagagaggcgctgccttcccccaagacagccagtaggga

SEQ ID NO: 345028 - DNA, 1000 bp, Homo Sapiens
ttttctgattttagcacaattccagttttaatgttcaaatcaacagcaaaaattatgatggatagcaattcattctcactaaaacacagctaatacatgttccttaaatcatgaaggtaaagtggaaaaactaaatagtttgatgaccttagagaaatcatttattctctcttatactcagttaaatgggagcctggttatcacaatagagatgagtaataatgaaggtaaaatgcctggtaaaatgcatcacagtaggcacccatcttattatacacatgtcaataaaaataagcatctattttttaagggaagaaaagaaatgcttcttaataaagctctggatgaaccatttatcttctttcaaaaaatgtaaaaacacataaaaaagcattatctgacaaagaaaagtagaaaagatttttatctttaattagagtttgtagtatacacttaactttctgtaatctgcagtgatgaatctctatgtaaacattcagaaaaagagcgaatactgtgtcatgacttatgaactataaattttgtccctgattactagtcaagaacagttttatacatttattaacaactactttcctccacttaacaacagctcttaaataacaaaataaattatcagcatttccaaccataaatttaagaattaaagtttaaaaaactggttagtttcataaatgcaagcagagtaataaatttcatatatgttaattgcagttacttatgttctttgagtgaagtaacacaaagatttttcccttccccttttggcaagttcacaaaattcatgaaaagtcttcatctttttcttttttgcttaatttcttttttgcatctcagctgaacacaacagacaatagctggggttattagcgagacatgataaaagaaaaggttatgaccactcagacgatcatgtatacctaaaacataactcagactttctagtcttaacctgtagctctaatgtactaagtgattt

SEQ ID NO: 345029 - DNA, 1000 bp, Homo Sapiens
ttttgtataaacattctgatttaataaatggtatgaatatatattttgcatactttacaataaagaaaattttgaaagaaaatggatctaaaactttgtttccctccaatttacatagtaaagtcaactgcatacagttctttccatgtgtaagttttacatttgtattttctacaattaagtaaatctaaatgttaaattttaacacatatatccaattatgtacacaattacaatgtcaatttataagtcaagcttacttaacaatcataaattacaaaaaacgcactatgaataattttgttctagaagtatcacatcaactcatatgatctaggtgaacccaaaagtaaaaaataatgattataaattatggtagtgtctgtaaaaccctgttataaaggaggtattcttttaaaatatgtaccttatatataaaagctcctgactccttttaaggaccaaaattattttcagtctaaccattttcattaaagcgcttatttaaaaagtatcaccttataaaactgagtatataaaatacaatgcagcccttgatagctaagaatctttataaacgccaatgatttagtgacctgtttatcaaactatttctatggatgggttgattttttttcttcctctaaattaagtggccctagactaatatatttgttcagttattctgttttcttccttactgccatttcacatctccatcagtgagttcctcaggatttgcctttatgttacaactatgaaagtcttcaatccaattccctgcttccacacaaaggacaaagaaagcctaaactttccttttccttttttctgggctccaataggaagcagcatttacaacgtgtctggcttggtgggaggaagattgtcaattgaggtatcatgtgtgttcacctgcctctcttgccctatttctttggttgctataaatttcctgcttctcaaatatctggatttttggctacctatttggcttccg

SEQ ID NO: 345030 - DNA, 1000 bp, Homo Sapiens
acccccagtaactaaaatggctactgatccacaactctttatgcttctatataaaagaaacgtaatgatgtgattaaacattttctaggttgtatgcttggcgaatgttgagggtgtcccggagcatcaaatctcgaaggcgccagagggcatctgccatggtggtgtgggcccctttgcttttcagccagtgagagggtaggcggctctcctgttctttcgacaaatggacgtcgcgtcttcgagctgccagtgtctgatcccacttgctaatgctgttggactccgcactgagtccttcaatgtatttcaggtaggcctctgagtgaagaagccgctgggtctttggtgggggagctacaaacatgggtgttgttggctgctgtatgacagggggtccagctggatgtgggccgggatatggaggtggtgcctgctgccctggaggccccaaaactcccacctgttgtccatatggacttccacctggtgctggagtccctaccataggggccactccttggttcatcacacccggtggtgggatgcccgggaggccaggcacacctggcggaagatggtggggtggaggccccccagggtgaagtggctgcatgctgcccatgctaacaaggccatcaactgggccctgcaaaggtggaaggcctggcggatagccacccatcatgccttcatattctgctttcttggctgtctcaagatttctccattctgtccccaccaggcggctgagctccccgaaagagtagtctgggtgttgggccttaatcacagccctcatctcactgctgaacaggatgtagccactcatgttgattttccgtttggagccttccttctttgcactgcctttggcagactttggggtagactgtgggggtgtgtagggcatgaggtccagctcactggccaggggggtctgaagctgaggtagagaaggaggttcaatgacctcactatcttcttctcccatctcttc

SEQ ID NO: 345031 - DNA, 1000 bp, Homo Sapiens
tttgcaacaatttaaaaatttattgcattacagtagcatcacatcagcagtcaataatgccactttaagcaaaagtctttcagtatttccgttacacattctgttaacaagaactcatacattggtaaaattcattctaagaaaacttggcaaataacgctttggcctggaattggcatttctttctctacttttccttcccaccatttcttccttttaaactacaggatttatattttaaaatgttttatttcagaacattaagatagcagttacattttttaatatttatattattttaaaatgactctttaagatacagttttaaacccatgggctagaaatcatacgactgttaattagccgcattatttggtctaacattttttatcattctgaaactggatttgtgtaatacattgataaattcatacaatttggaagagtcagttgaagttacaaggacccaatatctgccctctttcagtgaatgccggcaaatctgttattccattggcaaaatcgtattgctgctctcctgttaatctcacatttataaaaggatcatgaggctgccaagtgctaaaaatggagatggtctagtaactagaaaactccccaccccagggagcacacctacatatctccctacaacctaataatgtgatgtgttttggaacacagacattagaacttcatgaagttttaactgttgattctttcccaagcatcatcaagttatgatttaggcaatgtatgattgaaatgcattcattcatcatgcataggcacaatcacagaaatattgcacaaagtatgtccctgactgaaaatgagaggtacaaaaacgtatttcactcttcgtaaagaagtttgtgaggaaatacaactctgcgatcgtatagacatgtttcctgataatacagacattcacaaacagtagattgcaccacagtgtgtaaacattttaagttgcataaacttctccttgattttcaaa

SEQ ID NO: 345032 - DNA, 1000 bp, Homo Sapiens; identical to SEQ ID NO: 345031

SEQ ID NO: 345033 - DNA, 1000 bp, Homo Sapiens; identical to SEQ ID NO: 161061

SEQ ID NO: 345034 - DNA, 1000 bp, Homo Sapiens
gtccacaaagaaccatttactcagatagtctaactgtaaacaaataaataagctgcctaaggaaacctcagcaatttaaaatcatttatataatttatagctaaaattttttaaagttgtatttcataatagagcttactcttatgttaaagaatggcacaaaattaagctaaccagcttgaattacattttctttacttccagaattgtcctggaaaaagcagtaaattcgacctctcctcagctacttgctcttcatagaaactggcctcagtcaaatgcacaaaggctcttcctcctggaaaccagtactgtgagcctcaccacccagggcttttagccagcactcacagtcagtctcctacttcagttggcacagactggataatgagctcctgggatgggaaaagcaggccactttggggttttcttgtcccaaagcctgcttttgaggtattgattttttttaaaaaaagggaatcctttttcccaaagtttaactcacatccattgtcaccagttattatcttcccagttcagctccccttcttcttcccagccttcagcctctccctcagtaatttctgctgcagcaaattttgaggaaaactgcatcactggggagacatcatccttttttgggaccatttctgtcctcagttcaggtaatataagaaaagcagcagaaggcttaatttctgggatcatatcagcaaaccaatccatctcaggatcttttactggcttcttttttacttgaatggtgaattcctctcctaaaccaagttctgatggaaccttaaggggcctttcttgtgatgacacttttggcggctcgatttggtctgcgtcatcccccctttgtacaaggctaatctttcggggtaagcttgatttccaaggcgtagactcttcagtgagtgaaagcaaagcaggaataggcttctgctcccctgaggtaacaggttttgtagcagtgattccacctcctgggtttact

SEQ ID NO: 345035 - DNA, 1000 bp, Homo Sapiens
ttttttttttttttttttcaggatttaactgtaatatttattaaaatttcaaggacctgaaatacgtacatacatataaatctagataatgacatgccaaattatagcacagtcatgatatataattttagcatgaaagtacatatttcatttatgtacaaatatctcaaagatttggtacaataagcattaattaagagttgactataaagatgtcttctatattactgatatactaaatatgaactactaaattttacaaataatttgtgaggcttttattatattcagaataccttttgacttaaaactgaaataatataaatgttataaggacaacaaaatacagtcattgctctaatgcaatcatgttcctgaacacatctggacaatttcatagaaatatatatatatatatatatatatacacacacacacgcacatatatatatttcatacatacatgtatatatatacacatacatatatatttcatttgtcttgattgacataaaaatcatatattttcacaagatgtaactattttgatgttgtaattttgtgaaccacctagttactaacttttacaggcaaaatatttttccaatgctttaaaaatcattgtctaatgagactcttcctttacagaggcatatttaaacctgcaaagtaatttgtccacattattggtaatatgaacattttcaaatagtaaaataaattcatataatttgcttgggtttcatgcatatgaaatctaataaaaatacttttatgaattaaaaaatttgtttttcatattaaggtacaatatatacagattgacatagtcaaatgacatttataattctatgaaaaattaatagttataggtaataagatatagacattgtagaaatcaaagataatagaatgatggtcaaatccatccaatttagatttcagacagaaattgggtggctattctgttgtatttatgtgcttaaagacttgcaaaatt

SEQ ID NO: 345036 - DNA, 1000 bp, Homo Sapiens
tttttttttttttatattcaagatagttttaatattaacttttgtgaattagaaatatcactcttaaatgatgaaaattactagtgaagtaactattttccccaattgcagaattacaatatttatacatataatacagagttgattgcattggaaacaacagtttattttacgtaaaataaacgtcaacgggtaaaaagggcatcttcacgccgcacctcagagggccatgagtccttacacccatctgcaaagtaactttccaccagcattcaactatttttaagtgcaaacaattttttaaaatctgtgattgcagcgtctgtcttcctgaattacattacgtcagaaagtaacagttttctctatgagtgcattcaaggttgtcttctgaccacctaaggtatagaaaaatcagtgcaaaaacagtgaagcactataacagctgaatttcaggggatttcttgtccaagaaacattttattttacactatgtatatatgtatatattatatatatatgaaatttaattacattgaattttagagtaaaaagcaagaaaactccatttcttattttttactgcagccccaaaagaccggtttaaaatggaaacaacttctttgggtgagcagcgggagcacggcgccgcagagtgagccggtcaccgtccacacggctatcgccgacgtccaccgcctgaggtccgccggctggcacggctcaggcgcagctcggagctcctcctcgtcactccctcgagtccaagtcccgggagactgtgcgcgcagcagtgaggtcgctacactacagttccacctggagaactggcctggcttggggatgacaatgagcccactttaccaggccttccccatgtgcaaataaatccctcctgacaagcagtgactatacagtcttcaagaaatattagtacagtcagtctctcatgtgctatctttttacatatcagcggctctaacaagggaacatcttccat

SEQ ID NO: 345037 - DNA, 943 bp, Homo Sapiens
tttttttttttttttttttttctcgataaaagcagcagccctaattttatggtcacatttaggctggaatgggtgacagcatgcgagctcgggggtgggctcggaggcagcgattcgacagacacgtgcatctgctagggcgccgggctggcttcaggcgggcctctgcggggcgtcggggccggtttcggggtaggcgtccttggcgggggaaagcttcctttcaacttcgactcccaggaatcttttcaagttggtcctcatcttcgtggtgaccacaaacgcatcgatgcaacacacgattaccgctgtgagacacagggaccccccgacatagagtaaatgccttcttttcttttcttgcatggccaagatggcaactactgaaaggaacacagctgtaatgatactgttggtaagatcttgcctcttggaaaggcactaatgcctactgttttggtgcctggtagttaatgctggaacaggggtatgtagcagggctggtggaggttggaagtaagtcccagctgggttctgcaggctgagcgagaggtctgcccatagtgggcaggcctgactgaggcaggtacagtggtttgcagctttgcaggaagcttacaccttcccttcttgaaaatttccacggacagagatttgagtttcccctgagaaacctctccataactaaaagggtcttccacatgttcaattaaagttgctcatatttgctttgtctgcttccagggctgcggcagtctccggttgtttcaagttccctgaaggtgcctcggatgactcaggtttggcgtgttcaggatccatggtgggtccctagggcctggccgtctgaaccagtgccgcggcagcggctggctctcccctgggaaccagcgtcgcgtcccaacggctgttggctacctccccggcgcgtgcacccggctct

SEQ ID NO: 345038 - DNA, 1000 bp, Homo Sapiens
ttttttttttttttaaagcaaaaaaaggatttattgaaatcatgtgacaatatatccctaacaccatgaagaagatgacaattatgatttccatagagtattttgcacttgcctaagcacaaaagcaaaaacagagcaaggcaaacaatatacaaacaaaacttgatcctatctaataactttcatgaaacaaccataaatgaattttgttttattaagtcaggcttcaggactactgaattgcattcactaaaatgctatttgaaattttacttactcgccacccaccccactactcttaattcatcgccctctccacaaaaggacaaaaggcaaaaaaggtagtaagcaaaatataaataataagaattcaaaaacagagatcaaagtaaatttttttttcagtctctgcgtctatgctcaaatcaatgttttctgagcatacagggaagcaaggaaaccaattctctagctcttgctctgcctcttattctcctccaccccccaatacatttctgaatattttttaatccatttatcactgagtacttgcatataactagaagcaccgactatattgttatcaactttggagcaattttcatggggaattgtacaaatgttctctgatatgtatctcctcactagaaagacaaccttaaacatatatgaagacttagcctcaagtgaagaaggcagctttctgttgaccacactgagccttaggtcaccagatttctactcaggagaggcagtgagcaggaggggccagtttggagggctttgtctagctctatagtctctgtaggcacctaccaacaccggtccttctcctgctacccactgtgtgcttccagcttcaagctgagttctctgtatggggtcgaccccagcagttcccaataaaccatcattcatgggatcctcctatatagagatgaggaaggcgccacaagcaagacactcttggccagaaggattgagtaatgaggtttccttt

SEQ ID NO: 345039 - DNA, 1000 bp, Homo Sapiens
ttttttttttttttttttacaacaagccaacacatatgctttatggttctgtttcaaaaacatgaaaacccaggccctaggattcaagtgatgttgagaggcagaaaggatggagaagttgttggcgccagcatgggggcaagcagccagacctcaggccctcactctaggctccacgtggctgggcttgacttctggccaagggctgcttttcccgcctgcggcccacctgaggccagaccttgcctgaggaaagggcctgtggtgggggggaagctcaggcagaaggaagacgtggccaacggccatccctgaggaggtagtgagcagctcctggttcggcaagggcggtgggtaggagccaggccgaggagtcttagggtcccctctccacagctctggtgggccccctgctcccctagccaactggttgctcacctgccttctatgctccctcctgaagccagcccctgggagagaacatctgaaggcaagaaggaaagagagccctgcctaagcttcttcctccctgcttggccaagtgggagaagcagctgaggtcctttgtgtaactgaggaagcacggaggagctggaatgcctaccagctcggagagggcacttgagagggtctatgaacaaatctgtctaaaagccacgtttgagctaaaagcatcagtccatccctcagccccagctctgtgcgggccaagaatccagaaggcagcaagcaaggcctatctcccaggctggaggtggttgtggagctgctctgcctgagtcttcagatgctggaattcctcttgaatgaagtccgtcagggctttccgcatctccacagccgacttgttctccgcccggagccgctcgagtacaggcagggcactgaagggcttcccgatcagcacagtgattttctgtccaaagcgggggaagtagggcggactgttaggaaggacgtcattcattccgacatgccacaggggcaggatgatggggtt

SEQ ID NO: 345040 - DNA, 1000 bp, Homo Sapiens
ttttttttttttttttttagaaaatactgtgatattttattattaaaaatgctgctgaaaagtttatacatatgtgtccggccatatatatcttctatcattacttaaggcaaaataaaaaacaaaactgcaaaataataacccaaggaaccattaaaccctgcgtgcctttgaagatcaagagtaaaagcctaggacaggatttttttttttcttacttttttctcattttttttcttttttctcttttttatagatagcaagtatattttttctcatagaactctatgaagattctataacttctttccatgtagaaataagatatcatttaagatgtactaaaatcacttttgatcataatcccctgtaaaagctaaagttattcacttaacaggaactctgtttttccttattcaaatgtcacaagcctgacgcgttactgtacatattgctagcaggagacaactggaaatactaaacaaatactggaattcacattacagacagacgaaaccaacatggatgccacacataacttcctttgtagtttcacagagagcctatttgtggttgctcaggtggggtcatacattgcttgcagaaatggcctgatcatagctctatgaaacaatgaattcggaatgaaatcttaccatgacacctctctgtaggaaagaaatgttgcttcacgtgtgctaagttgagataataatatttcacatatttatatacagagaatcactctcaaatttaacccaagataagcaataggatttgggggtgacttgtacgcatttctaaaaacacttttcttttttctagaggtcactctcaaacactgatatatcactatagtttgagtgtagggattcagtaatcaaaggttgttattgcaaaagagccaggcagctggacaatttttatggggaatgtccactttagcggagagatttaagactggatttctagaataacccacaatggagccgaggaacat

SEQ ID NO: 345041 - DNA, 1000 bp, Homo Sapiens; identical to SEQ ID NO: 161063

SEQ ID NO: 345042 - DNA, 1000 bp, Homo Sapiens; identical to SEQ ID NO: 161064

SEQ ID NO: 345043 - DNA, 1000 bp, Homo Sapiens
ccaggaacttaattgctttaatttgggaggaagcaggagattgaggggtaaaggtgcaagaagagagaaaagaaaaattaggctgtttggaaagggtagcacagatatgatgtaagaaattgggtttcaccatatttgtgtgtgtgtgtgtgtgtgcgtcctcctctctcctgccctcactaggcgtgcctgtttgaaggccccgcgcgtttccggctcctgctcagaagctgtccaccttgattctgcccgtagcaggtgaacctggtgtggtgcgcgcactgcgggtcctgattggctgtgcacgccacggtgaaaaacttgagcgtctactccgagtcctgcaagctcctagtgtctcctctgggtggacgcctaggcgcacggccgttacttctctttcacctgtggattcgtcagtttctcgttcgtttcaggaggcgatcccgcgccctgggtgcggtgaggccgctgggacagcggaggtgcctcccgacgcgaagcagcgagctgaggcggcggccagcggggaagatgagcggcagcagcgccaggtccagccacctgtctcagcccgtcgtgaagagcgtgcttgtgtaccgcaacggggaccccttctacgcggggcgccgcgtcgtcatccatgagaagaaggtgtccagcttcgaagtcttcctgaaggaggtgaccggcggcgttcaggcaccctttggggccgtcaggaacatctacaccccgcggactggccaccgaatccggaagctagaccagatccagagcgggggcaattacgtggctggaggccaggaagccttcaagaaactcaagtgagtcggtctcccccaccgcccacccatttaggtgccctatagtgtggggttgatatgaagaaatgcagatccctacccccccacacctcagtggttgaggggctgtgacttctcggtgtgattgatgcccctcaaaactctcgttgcagttggggggtagaggttgacac

SEQ ID NO: 345044 - DNA, 1000 bp, Homo Sapiens
ttttatatcgtcttcataatgttataaaaatgtataaacaagtgaaatgctaattcctgggtccttaatggatattttcaaaatatgaggcactttaacttttaaactataaaaaaactggatattaacatgctggtaaggttaaagttgggaaaagcttgcagtttttgacatactatacatgtcctcctacatcctgaaaggggaaaaaatgcccactgggacccagaggtctgtttcatggtgctacaattcttgtttacagaataaagcagtaggaaacacagtcataccattcctgcaagttaagtttgcaaaacagcctcacatttattataccaaaatcaatgtattggggagatcaaaatatcttctcataggggaaaaatagcaaatacaacttggagaaaagtgactttgttttatacataaagtacagtaaatagctaaaaaaaaaaagtagaaatacaaatatgctatagttcatcgtgttggtatacattgtattccttgggagaaatgaagccatcaccatcatggtcattcttcttaaaaatatcttctaaaactgcatcctgatatgacttgtcacgtggcttctcatctttttcaaattccctttgcaagtagaggtttatctcggctttagagagctgcctgtcattgtccatgtctatttgtttaaatgtctcaatgctccgtggtcctttggtcacagcataaagttcaatctcaaaaatcaatgtagcatccggtggaatcttgccttctgcatagccttcctttccgtatgcaaatgaagggggtataactacttttcgcttttctccagggcacatatctgtcatagcaatgtctaggccttttatgacttgcccaacaccaagaacaaaccatttggggtggccttcattttgtgtccggctgcagtagaatttcgagccgtctttagccaggtagccgtcataatgggcatttagtaggtctcccttcttgcttg

SEQ ID NO: 345045 - DNA, 1000 bp, Homo Sapiens
ttttttttttttttttttttttttttttttttttttttttttttttttttttttttttttttttttttttttttttttttttttggtatgtatagattttatttggctttctacacaaaggggatgtgtggggtaataatgtgtgttcaccaagaccagccccaactatacaatcttctctgcttcattcaacaaagcctaaggagtccttcaaaagaagggtgagaacgcctgggagcagatcccttttcacagatgcaggcaggtggcggctaatcagaaagtggtctaacccccaaagaaacacaaaaataaccaaaaattcaaaagcaaaaccattccagaatgagatggattttcacctgagtgggacccaggcaaaaactgcagatcagaaaagaggggaagagcagctgtaaacaatcatgttttgtaaagttgtcctgtgctaaagcaagcgtgggatgatcctacctacctctaggtggtatttgttaccttaaaaaataaaaggcagctattttacacggacatttaaacacaaccaaagtcaaacatttgtcaccttgtaaacactggaaaacaaagttggcagaaagaaagaaagaaaaaagaatgtaaaagaaagaaaaagaagtctgaatactgcaaattgagatctacccccagaagctgcaatttggcattcgtcctataaaataagagtctacgtgggaattgaattcagctagaaagggtgacacactttgcatactgaacaaatacaaagtgaacagaaattataacttatttatgaggttttacagagttcaaacttgactgaaagtataaaaataaactgtggactttgttcattcgattagtcttagtgcctgaaagtatttctctgaaactggtctgtgccaatcgggtaacaccaagtgtggtcttcctgaacctagatttcgtttctgagcttcctagattcttaatttggggtccttttgtttgattttttaac

SEQ ID NO: 345046 - DNA, 1000 bp, Homo Sapiens
tttttttttttttttttcttgtatttctgtatttgattttatttggtatatgccactatgaccttattttagtagaaatccattacaggatttttaaattatcattagtcaactccacaaagacaataatactgctgtggaagaccgaaggggaaaaaaactgatatatttatttacaattccctatattgtaaacatttaatctatatattgttactaacttataatgagacaaggaaatgatgccctgtatttctattcatattcagcaatagcatattataatagaacatcagattttcttttccattagcattatgctttctttaaataattatctaaactttcaaaagaactaaatatgtaagtgctatacaactaaatctacttaagccaaatatttggcttataatttcatttttagaataacttaaagtgctataagcaacctggcaatcaacactttctgtaagaacaaaactacacctttaaacattaatttacaagatatacaatgtttatctggaatagctgaaatttcagcacaaagtcactgtcacatgtataacagcaggattcttttttgcataacatgaagctttaaaatcaactgatgaattattgccacaatggctattattggtttcctacaaaagaggataagaactactagtgtattctatcttttcattttttttttgaggtcacttgacagtaagtttgcatattcaacaagtctactgagttacaatattgtctactataatcattgccctttataagagcaaatgctaatggtaattaataacatataccactcaaagaaaatcacaattttttttttccttttgaacaagagtaacctatattttgggagttggtgtgcaataaggctaaaacaaccaaattataaaacagtatacctgacacagtatgttgaggaaatatgcatctgtttcatagtttttgtacttatgttaatgccttactaagctacaca

SEQ ID NO: 345047 - DNA, 1000 bp, Homo Sapiens
cccaggttggtctcaaactcctgagctcaagcaatcctcccaccttggcctcccaaagtgctaggattacaggcgtgagccaccgcgcccggccatcctgcctttttgccaacctaagatgagttgcctcaagcagcaatagggtctaaaatctacagacaagcccagcaatgaaaatcacggcttactgaagacagtaacagcttaaacctggaaaaccgtaaacaaaacatggtcactttcatcctttcgcacctgtctggtgatggtggtggtttttctaagagggtagagtattagaaaagttttgtggtctggtaaatattgggtccatggttacacggctgatttaaatcatatccccactctggaataccctgataacttgagagctaactgggtaaccactaacaccactgaattttcaaagctcggacagaaaagtcagctgaagtggttaatcatggtgttacaactagacatttagtcctgcttcaattcttgcagagctgaatcaactcaaggaactaaataaaaagaggaaggcaccgaggtaagggattttttttaaatgggatttttttaaaacctctttgatagcagaaagctcagggctttcagggtggggaatttctaggaccctgccgggcagtcgtgggaggcttccttctcggcactgggacagggaccggacaccctctccataaccacctgggggagtagtcacacgctggtttttccctagagtagagaagaggcaggctatttttccactttttaagacaaaaacaaaatacagaatgaaaccacaatctcttctctaatagggaaaatattttttctttttctttttctttttttgagacagggtctcacttgctctgtcacccaggctggagtgcagtggtgcaatctcggctcactgcagccttgacctcccaggctcaagagatcctcccacctcagccccccaagtatctgggacttcaggcacactcta

SEQ ID NO: 345048 - DNA, 1000 bp, Homo Sapiens
tagattttttttaaaaaaatttaattacacatttgaagtcctgattacatcctagggatttatttgcttatgaaaagtcaaactatgaattacaatattgcagaataattttccatttcatcagattagttttaccattcattccacaaatgatttgtaaaattttgcattacctaaaaaactttgatactacattacaaaaaggtacttaaatatagatgagaaagatagatgtttgtcttcttcttttgatattgatattaaatgaaagatggaatgttttttatttaaaatcaatccctcgtattttcccccaaacacaaaagtaaatagcaatgtgaacaaaggctttctttaagtctgttattcagttcaaatatgtgttagaaaaaagatctattctgtgtataaaatataacaacaaaaaagggaattataaatagaaaaataaaacatgtagaagagactaatattctgtgcacatagctttaaaatcccaatagggaatgcttgtcagaaggagatactacacattcattgacttaagcacaaattcacaaagagcaatattccaacacattaatttgccacaacacatttacccattgaaaccagtccaccaatttttaccaacaagtagcatcttaattttaccatctaatggttaaattgaagtgaaataaagatttccacacaaatatcagtaacacagactttcctggattgtaatggagcacctaccaacattcagtcagctcacaggtaatgacactccttgtaagtatcatctcttcacacagtagcagggtcttaaatggaaaaggggtgtgttcattttctacataaatcacaggaagatattatagaactggctaatgaaaacagcttatattttggaaattagttttacaaatctgaagttatgaataaaaagtgatgaaaaaaagtagctggctgggtttcccctcttctttacagtgatatggtaaaaaatacaaga

SEQ ID NO: 345049 - DNA, 1000 bp, Homo Sapiens; identical to SEQ ID NO: 161065

SEQ ID NO: 345050 - DNA, 1000 bp, Homo Sapiens; identical to SEQ ID NO: 161067

SEQ ID NO: 345051 - DNA, 1000 bp, Homo Sapiens
tctatgaactagttttatttgcatttaacatgattatacacattcatgtgtctaacaagatctgcactgttacattaaaaatacagtacaataacattcaacatgaggtacttcatatttatgtattttttccttcataaataatgctgtaagctactaaattcaagcacactgatgcacaagtgactacagtgtcttgaattagctgagcttatttaaacaccttaataaacaaaaaagttcagtgcaataattatgtagaaattagaccatttacttaaatactattttaagatatgcttaaagaatgtcacattagaactgctagcctagttcccctttatccccagaatgaacaacgacaaagactgccagccagatacgttggggaaaagcatctacagtgtattctgcttaataaagttgtgtttatagaataaagttgcctgctttgttagaacaatggtttctagttttaaaagctacaaaatccaagattacaaaagtaaataaagcaagcatattagccttcattccatttcattgaaaatgcataaaggacaatagggtttaaaatgtaaaatttcttattctaaatacaattttcaaattttacccacagctctcggtaccagccaatcagatggtagatatgttttaaagtaataacaattaacataaaattacattgttctatacacagtgtacaggatttcacacgactttcaccagcagctcactagtcacatggaggcagctagcaaacatgggcactgacagtgagcgttagtgaatgaacgcactgcacctgaagactatcacacccacctcaacaatctgataggatgcaattaaagtttcttctctggcttacaaacaagtgccttcttataaggtctaccaatttgcacagcagctatgagttactgaaatgtgtaaccataatttaaaaaccaaatcttttgtagaagtgtgctttttaattgaaaatgtacctttg

SEQ ID NO: 345052 - DNA, 873 bp, Homo Sapiens
ttttttttttttttttttccaggtggcagcttcaagaacgagtgatttaagaacagccctcccatcttagcaatgtcccggggtggctggagccacggtcacttcttggtcctggtccagaactgtcggtagcgctccacatgcaagtcatcactgagctcctgctcgtactccttcctcgactggagctgagcctcacgcttccgcagcctggcccggcgctcctcaggagacagggtgtccagatctatgggcatcgccagcatgcgccgtggctccctgtagcggatgtggatggtggagccatcctgcttcaccagcagcacggggtagagtcgtgcataagcctggcggtgcacacgagtgagtgaggccctgctgctgtcagctcgccaggaggatgtgtgcaggcggcggagtgcaggtccggtggccttcacggtgctctgcctcagccggcagagctggtgacccgtgccggggcaggatgagcctcggggcttcctcaggagccacaggctgtggtcagaggcgttctggccccctagccaggaagaggctgccaggccaagcaggctgcccacggccgccattcctccttacagccccagtggcacgtggaggtggtcagtacaggccctggcgtgcaaccagcacaggagcctggggctggtccaggagggtcttcggggaaagctccctctcctttcctgctagactgcggccgccacagtcgctgcggaggggtctgaggacaggcggtcctgactcccgctgcccggtggaactaagaccagggacgaggccacgcaggagatcaaggtactcactgcgttgggtgctgctgcgctgcagcccacgacgtcactggca

SEQ ID NO: 345053 - DNA, 1000 bp, Homo Sapiens; identical to SEQ ID NO: 158071

SEQ ID NO: 345054 - DNA, 1000 bp, Homo Sapiens; identical to SEQ ID NO: 157422

SEQ ID NO: 345055 - DNA, 1000 bp, Homo Sapiens
ccgctgattatttttaatgattttgtgctatggtttgaccacagcattaagaacaagcagaaaaatctgatttcataactaacaaacagcacttagagcaacatctttctttaaaagtattgcaattacagaccttaggtctaagaactacaccattgctcaggtaaaagaggcagatacgtgacaggtggaaatctttttctgtatataactgggaattatgttgaaaagtaagcacgaatgtttgttaaaaaagactttaatgacttttgattatcatagctcacaaacaactattgaaaagttcaaatacagttgtacttttttagtagattgctttataataaaaattaaacgaactaaatgctgtgaatagtattgtacatattttaaaatagccttaaactagacaagtatacaattagcatgatttttgaaagctatgaaatgaaaaatagcaacataccaacaagcacattaaaatgaaccagtatcattaacagtaaagtttaagcctcaattcgtcctgtagaaaggaagcaatgatgtggtaacaaattttagtacctctgagtctagaacattctcatgctcaacagttctcccacaaggttgaacctggggggtgggagctttgtttctgacaacagtgagcctcagttcttaatgatgaatcccaaggggtgcaccctacagtatacgatggaaacaacacgtgggtctagacacgcaggatccacaacaacaaaagtgtcaactttttacggccctttcaaacagatactaaaagggctgacttttttaatccattcagcattaagggttgcattgtagagtcaatttcagtttaaagataatctgtcatttgtttcctggatgttaggggtatgattatagaatctgacattttcaaagtcagaacatacaccatggagcaaataaaaactttggaatttattagactctactctggtggcagaataagctgataatatgggtc

SEQ ID NO: 345056 - DNA, 1000 bp, Homo Sapiens
tttttttttttttttgacactgtgatgaaatcactttaatgtccttgccaaggaaatgcccaagacactggcaggtgggcaagtaagtgtccagatgggaccccgcagctctgtctccactcagcagtgtccgcacgccccaggccagcaggccggcccctcctcgggcaacactggtcttcctgagggcagcccgtgctggggtcccacgcttcgtccatagtgcttgtggggtctctagaactcagtcatcttcttgtgggtgtctgccttcctctgctcctgctgcaggccggcttcctgagcccggagctgccccagctggcgctgggctcctgccagcttctcctgcagctgggctgacgccacgctatgccggccagcgttgcgggcgagagcctcctggatgctcctgatgtcccgctgggttcgctcgatcttctcctcagtctggaagagccgcaggctcagggcccgcttggcactcttgctggcatggtacatgtccttgctcctcctccccgctggggccgccccggcttctagggccccaggagcctgaccttgcagcttttcattgaggaagtcaaacacattccgaggagctgggcggcccccaggcctggcccctcttccccggcacctggggggcttgttggtgccagccttgccaaccctggtctgcttctgcagggtctccacacactggtccagcgacttccctcgaggcaacaccacagcatggatgggctccacccggccttccgcgtgtcggcccaaacccttgccaaactcatagcccatcttggtgaggagtctggagcctatacctcgcgtgtgcacctcccagccagcaaaggcagagctgcaggtcccagagtccacagcatctgaccccaccactctggcatagctggagtcacccgtaccgtcgctgtctgagtcggactctgtggcctctgtgcgcagtgggggcaggatgccgtccccctccaccacg

SEQ ID NO: 345057 - DNA, 1000 bp, Homo Sapiens; identical to SEQ ID NO: 161068

SEQ ID NO: 345058 - DNA, 1000 bp, Homo Sapiens; identical to SEQ ID NO: 161069

SEQ ID NO: 345059 - DNA, 1000 bp, Homo Sapiens
ttttttttttttttttgcaaaaaagtggcggtgttttaatcaagtctcattacaacggcagaattaggaatgagtcccacctagcttccacatgcgtgggcagcagctgtcacacgggcctgtcgtggcactcagcccatggcacagacatatgtggctcagggcaagaaccagtggatggggctctgcacaggaacgctggcctcgggatgggagacccggcctgcccaacactgctcagagcccctcccaactctgacaacaggctcgggtcaggactccccgaaatcaggcaccctcctgccccactgctgagatccccaacgggccagacctagcttggaaactttcttccacctggctggccaggaaggcagcaaacagagatgatgactcggaatgatgggctattcggaaatggctagggaaacaactgtttccctactgtcctggcgggacccaccctgggctaacgggcttcccaaggaagtcctagtggctctggggtcctgaagtccccaaatgggaacctaggctgagagaagcaaggctgtgagggcatccaaagggctgcctcaggttttgttcctgagaacgaagcgtggccccggaggctcaggcgtgctcagtggggccagggccaccagcatgggagtgggcaggggctgccacctgtagggggccagcactgggctccggggacgccagcagaggggccgagaggccatcagcagagtctgtgtcgaggtccagcctcccgtaagcttcgcacagaggcaggtcattagcttcgcaaaggcttgagcttttccaccaccagaaaccccagggagagacaggagcaggcagagaggaaagccaggggaggggagagcaagacagaagcagagttaagaaaacacgaccacaccccagacctgcctttccctttctccactcctgctccatctgtcccctgagttggcaggcctggcaaggagaggcggccagtggtgagagc

SEQ ID NO: 345060 - DNA, 1000 bp, Homo Sapiens; identical to SEQ ID NO: 246608

SEQ ID NO: 345061 - DNA, 1000 bp, Homo Sapiens
tttttttttttctcaaaagaagacatttatgcggccaacaaacatatgaaaaaaagctcaacaccagtgatcatcagagaaatgcaaatcaaaaccacaatgagataccatctcatgccagtcagaatggtgattattaaaaagtccagaaacaacagatgctggtaaagctgtggagaaacatgaatgcttttacactgttgggaatgtaaattggttcaaccattgtggaagagagtgtgccaattcctgaaagatctagaaccagaaataccatttgacccagcaatcccattactgggtatacactcaaaggaatataaatcattcttttataaagatacatgcatgtgtatgttcactgcagcactatttacaatagcaaaaacatggaatcaaaccaaatatccatcaacgataggctggataaagaaaatgtggtacatatatgccatggaatactatgcagccataaaaagaaatgagatcacgtcctttgcagggacatggatgaagctggaagccgttatcctcagcaaagtaacgcaggaacaaaagtaaataccacatgttctcacttgcaagtgggagatgaacaatgagaacacgtggactgttgagggggcagggggagggaaagcatcaggataaatagctaatgcatgcggggcttaatacccaggtaatgggttgataggtgcagcaaaccaccatggcacaggcttacctatgtaacaaacctgcaggtcctgcacatgtatcccggaacgtaaaataaaataaaatatttttaaaaagaaaatttgtaagcctgttttacatgattctttaaaaggtccccaataggattgagccacagtagtaaccagctcataatagactcttctctcttcccttctcttccctgaattactcatctcactccccatcttgtatgtcctgggaaatctctcaaacaaactacctgcacccatgcccttttcccagggttagtttctag

SEQ ID NO: 345062 - DNA, 986 bp, Homo Sapiens
ttttttttttttttttttttttttttttttcggaagaatgtagtttgatatttatttagtataaaacgtttgtgcacagtgttaacaaatacaatttttacaaatctgttttgaaaatgtggtggctgtttatttgggtttcatactcttaattacttcatccatcagttttttaacttctttgtgtcttgtaactgctcggctcatacagtcctgaagtttagctccagttagcccacttccacctggtttgtgaagacaacagagtttgccttcctcatccattactattgttaaggttcctgttgccagatgttcctcctctccagtagggtcaactataagcaaagtgtcatcaaacacagcaaaggaagttgcaactggatgagttctaatattcaaataacttttcttctttaaattaacttctgctaaagcagtttcttcatttatagtaacttcaggcaactgtacattttttaaagccgctagcaaagcaaatgtgcaggcatccaaaatgtttccatcgtagtcgaggcaaatgagatcacagtatagaacccagacaagctttcctggagaaatgcataagtcctctttctgaattatctgtgaattttcaatgacatctgcaatgaattggctagccacttgggcctcttctccaggaggtccagaccggaatctcgatgaacacaggggtggtagatccacattaggaacaacgtatcctttatcaggggcatctgttgatggtgctgcaaattctgctttaactccacagattactgtagtatttcccaacttcactaaagcagaaccatctgcggtactaattgaaccgatgttgacagttgtggttctgaattcaccaagttctcttccatcaggacggcagttctctttcagaaatctcctgtaatactccagaggttccacggttttgaacccagccgccatcttcccgcccgcgcgtctgcgcctgc

SEQ ID NO: 345063 - DNA, 1000 bp, Homo Sapiens
attaaaaacatattttaataatgctaacctcatataattcattatatttccaactaaagtatataattatataaggaggtttcagtttaaatcatgtccatggcactgaagtttcttatagacaatatttagttgagttataaagcagaatgttcaaaaagaatggcctgtgcctcattttcaggaacaatttgtttatgaagtcgaatctgctccaagccaggactttctagagaatttggggaagtgttacaaattgaggcagttacattataccttgctgactgataaaagctgtagtattcaagtctattttcccttgagttttctgatgcctttagtttttgtttaaactgaacaactttgtagatcaaaaaaatgattaaaacacaagctaagatgaaaaaagctagcaaaatgtcaaaagcctcattcaacttctcaacttcttgtgtacaaattagagatgttttccctgacattgaagcagcatcattcggtagagcactgtttttttccaagttcaaggtaacagaagtagtaagttgtatttgcacaggtaacactgctgtagtctctaatggattaccaaaggcattctcttgaaaaaatctaccagcaggtgaagtaggaattcgttcccagaaagtaatgttctcagtctcagtattttccagaggactgccatttgtggttactttatgccaggccatcattagcgcagtagtcttgtgatgaatatgaggagattttacaacagcccaagctctggatacatttattgaagatgtaacacaatttgtaatgttaatataacgtaatgctctgccacgcatggatgggggattctgacaatagatgtttagagtaatggctgaagatgctagccagtctcgaaggcccaaaagtttgcagttacattcccaaggattagaatttgcctgaagatgaatcaatgaagacaacggcttaaggacccttggatgcaaggctgtaagat

SEQ ID NO: 345064 - DNA, 1000 bp, Homo Sapiens
ttttttttttttttttttcagtttcaaaacaacctttattctgtttgaagatctaatacaatgcattaaagcaacttaaaacaagacatagctccattgaatctataacttgaacgaaatgtcaaggaggcacactacccccaccccccaccccagttgccttgtgaaggcaaagttacaactgaccgtgacatcctccctctcgtcaaaagaccaactttattttaacaatgtcatataaacagatttttaaaaacattgaacagattgtagctttaaaaaatacacaggtataaatgagtttttttttgttttgatttttttaaatacatatatatatgtgcatatatatacatatatgtatatacatatatatatacacatatatatatatatacacacacatatatatatatatatatatatatatatatatatatatatacacacacacacacacacacacacacatatatatatatatatatatatatagcagcatcctgggcagctaatgctatctcatggtgacaagtttcatgttaagttggatagtctttccaattgactcaattctatttcctccccacccataataccagtattttatagaactagctttttaaaaaataagaatttggcattttggaactttgtcccatgtgagacattgtgctttaaactgcccctttctaaaaatgaccctaaactcaaacagatctcagtgtctgcgtttcaactaacttggataccatacatagcaaaagcacagttgttaaaaccagcagattttttcttccaaaggaacatcagtaggacttcccaaacatgttactagttcataaccagctatatgacaaagcaattggttccccacagtgacagctcacataaacacattttgactcgacacactgaaaacaaggatttccaagctaagcaagtcatcagaccagctccctaaaaggagtaacttttaaaaacacaaaaaagccaaaga

SEQ ID NO: 345065 - DNA, 764 bp, Homo Sapiens
agaggtcagcaccagcctttatcgggaaagagaagcaccacacacccactacccaatccagggctatttcccatgctctggtcagcggcaggaggagaagcagagcagagagggccatgagtgcccctggaaatgtcacaagccccaggatgtcaccctctcttgactgccaggaaaagcttccagaattaccaaagaagctccagacaaatcagcacagctagggcaccgggatctctaattcggaatcagacctcacagtccagttggggttcatggtcagttttgggggcaggactggtgggacacagaagcggccacagcctgacttgcaacatttttctccagcttgacaattctcatccatcacacagccaacaatgcacaggcccaccagaacttttggacaatcaccgccccgccctccctcaatgtctccgaggcaggtgcggccacagccggtgctgcagcatttatgcccctggggacaggatgcatccccatcacacagctcctcacacggaagggggtcagcgggacattcaccaccaaactctgccttaggaatgtctcggcagatccgaccacagcctgtggtgcagcacttctgttcagccggacacaattcatcaccctggcacagctctttgcatgggttcttatggggagggcattctccctcttttgaaggcctctaagtgtaactgtcctgggcgaggcgcggcggttcggttcccatggtaaccccgcagctccagcgtcgc

SEQ ID NO: 345066 - DNA, 1000 bp, Homo Sapiens
ttaaggtagttcatctaaaacttcagtgtcactgcccactgctgtcgtggctgcttgctcagatgaggttttttggggccaactgattcctaacaaatttgagagcttctgtagcagtgtatctattagtgcagcttctttcttaagcgactttctttcttttccaaaggccatgagaatggccgaaacgaaaagattaattaccacaagtaccatcaagatgacactggtgaggatcagaaaggtgcccaggactgggtctaaagcgaaaacctcctcttggtgagaaattcccatcaggagaccaacaacagtcactgctgagctgaaaaatgtccggtagtcagagatgctgcatccaaacagcaggttaaaggcaatggcatagcctgtcagcaggattaggatgatcagcagaaagcccaccacctcgtcccaggctcggctcagtgtcctgctgatgacccgcagcctggggctatgacgcagcaggttccataactgaacagttgccaggagaaccgggaagcccacaaggtgagtcgcagcagagttcacttttactgcctcatagaagctgatgaatctgtcctggtcatcgcggtatcgtgccatgtttttcttatgtagagaaatactcttcatgtcaagccccaggaggatgaagctaatgaggattatacttgtgtccagaatgtttcttttcccagtgaagaacctccacttctgctgtttcagctgacaaccctgtatgaaggcatagtaacagaccagtagataatagatgacttgtgagatgatagaccagacacagcccttctttgacatctgaagggaagtgaagctttccagtctcaaagaggtgaagaaagcacctctcatgatgtaactgaatccattctcattcttgcttgtcagcctttcgtgaagctcatcagtgggaatcagcaccatgggcctgggtgaacagatgtaactgaacctccttagatgaagtcca

SEQ ID NO: 345067 - DNA, 1000 bp, Homo Sapiens
atgtggagtaaatgtgttttattttaattcaaagtttcaaacgagaagattcttttcttgaaaatatttaggaatccaaactagtgtgtttagagtcgttttgactgtgcaatctcttagtggcaactgaacagctacaaaaactttcttttttaatttttctgaaaaatcccacccccccttttattttttcctggtttaagaagataatagtgtattatcgctctgaagccattagatggcagataaaaagcccccttttaatatgtgggtttgattttttttcttttaaagcccacacggaacaagaggacacaaggcaaagctgtaagagttattccagaacctgtggaaatcacttagggcaataaaaaaaacacttcagggtacaaaaaagctcgaccacacatttccgttttcttccttgaaaacacgacatagattgggcttaatgctcctttgttttctatatgcaccttggcctatggcgattttgccctgtggcccgcagggcggtaagtgcgcaaagcggtccaggggtccaggccgcgggctgggtctgggccgcggggttggtggaggccgcagggtcggcccgggccgcagagtgggtctgggccgcggccttggatctgggcctcgggtcggtgcaggccgcggaccgtggagggggtctgggctgcgggctcaggtccggcccggggtcggtgcaggccgcgggccaagcccaggccacggtgtccgcagcgcctgccccgtccgaccccgtccaggcccttgcggcccagcctggctgcccgccccagggccgcggcccctcagaactcccattcgataggttcctcccggctggcggccttctccaggcggtggatgatgctgttcaagttcgcggccttcttcttgcgcagggggttgtcgcgcgagtcccgggcgcccgcggcctcggggaggccgaaaaggctctgcagcgagctgggcctgcggggggcgctgctgc

SEQ ID NO: 345068 - DNA, 1000 bp, Homo Sapiens
ttttttttttttttttttaaatggtagtcagatttcacgtgtatttttgctaaaactgaaagctgtcaggatccacattggtgttaccagtttgtactgaagcctgatacaatacccaacagtattgctctggttttttcaagcacacactccaagcaagtggtcagtctggcttaattcattatggctttttttcagggtaagagattcacacgcaagagaataaggctacaaatgctccaaacatgggtccagaactctggctcttttgtgaggcctagagtcacagaaaatgccatctgttaagaagctgcttttgcataaaaaaatataaaaagttacaaaattccatcaaagacagatacacagtataaatcgttaggtgaacacagaaggctggtctcatctcctgcagtggcccatagacctgccctgaggtctggaagttcactgtcctgagggtccaggaactcctgcctgctggctgggctctaggaagaaggagggtttggctgggcccgcccagctccccatgacactgtcactgtgatgccactgttgtaccctctgtcttctggaccagtcagtctatgagctcttctttgaaacagtcttagacccagaatggtcatctcacccccagaagacatggtttccaagggtgggaggtgttagttatgggtgccgagccccacttcctgggcgacaaggcaaaggtcaatttctccctgcttcaagaatgaagagggaactggtgctccttgaaccaaagattcttggaagggtcattgtcaccaaagtggctggtgtgggcaggagcaccaagtgcagacaaacccaccggggcctggcggggcagccctgtcatggtttctgtctttgttcctgttagtgaaacagaagacccccgacccccgccacctagcagcatggaacacctgctgcccagatacagacaaggctctgctttgtctccttgtgctggtttttggcagagacg

SEQ ID NO: 345069 - DNA, 1000 bp, Homo Sapiens
ttttttttttttttttttttttttttttttttttttttaaaggtgcttttggtcattttatttttattacaacttcattatttacaaaaccccccatccagatatattcacgttaacaattctgagataactgctgcatcacagttgcacaaaggctgatgagttgcaaatgttcatcagcaccatctgctaggcatttgtcaacttcggcaagtttttctgtgataatagacttctgtttatcagataagttattttctacaaccacatcatggagttgattgacgagctgagttgctgcatgaccctcatctattaaatccttgaccacagcttctagtttgtcaaaagagccactctgacaggcagcaaatactccatcaattttctcagctggtattaccccggcaatgtctgtaatcactttctctgtgatctcctttccacctgttaatcgagtagcgctttgaagaaatgtaatggcttttcttaagtctccttctgacactttaacaagataagctattccctcatcactaattttgacattttccttcttggcaatgtctagtaatcgctgctgttgaattttatctgacagaggcttgaagcggaattttgaacatctagaggtcaggggttcaattattcgactgacatagttacagataagacagaatcgggtggttttcgactccttctccatggtacgtcttaaagctgcctgagcagctgaggtcatagaatctgcttcatccagaatcacaatcttaaaaggcggacacggcttcccatctgagcgacttcctgacacagttaattgagcaaaatttttcactttctctcgaactacttgtattccacgttcatcagatgcatttaactcaagaactcttaatcggaaaagttcaggcccaaagagttctctagctgctgccaaaatagtggatgtttttccagttccaggtggtccgtaaaacaagagattaggaagatctgc

SEQ ID NO: 345070 - DNA, 1000 bp, Homo Sapiens
ttttttttttttttttttttttttttttttttttttttttttttttgccttgaatgaaaaccatgaatttaatgtgacattgggggagcctcatccttccctttttaccacccacccatccagcctgttgtgagttgggtgagggctgcccccagtctccgtcctgcggctctgggtgccatcctgttcctttgagctcagtcagcctcctgggctcgtctctctgtgaatctccttcttgcgtattcatatagtgcttgcttgcgctcctgcaggctctcctgccgggcccaggaagacttggcaaatgttagggctgttggctgaggggtcaccgggccagagctgggaaacttggaggcagaggctgtgggtagggactgagttcccttggtgatgtcttcaggcatgaaagctacggccccctcaagcagattagtgatagtcaagtctacacagccagtcttggccaggtctctctggatgacacccaatggcacatggggcaaaacttccttgactctctgagccagagttgccagttgcacatcaggagaaggaccaggggagggagggaaagaagactgggctgactgggggcgcaatctggggtgtctttgtcgcttcatgtgctctgctttgtcagctggagtgagccgtgtccctgtctggcccaattccttggccaccagctgttgtacacggagtgcaaactcctcattcgcttcccctagttggcgatgaacaggacgaagccaccttacttgatacaccgtgaaagggacgaaaagtgaccacagcagttctgagacccaggaggcatctgacaccgtcacagagaccaggggtctctgaacttgcagggtaagaggttgtaccacatcttggatagaaaatggccaggaactgaagcgcaggagcccctcccggccattggtggcctcttcctcagggaatagcagcagaggagtggggggaagcctcgtggaagcacagaatc

SEQ ID NO: 345071 - DNA, 1000 bp, Homo Sapiens; identical to SEQ ID NO: 161071

SEQ ID NO: 345072 - DNA, 1000 bp, Homo Sapiens
ttttatgttaaaatggattcattcaatattcccaaacgtgaattaaacagttttacataattgtttccttataacagttttcatgttggcaaaacaaaataatactttaattatgaacggttttatttcagtctgagatacttaattcttgcagtgcatgcccaccgataacaaaatctattaataacactccaaaaccatgggactttaaagttacaatcaacggctgagaggcacaaaagtaattaggttttaaagttaaaaacaaaacctggttactattctctaggaaatatttcaaatatataatcatctccaggttggacaccaaatttcctatacttaagatatggtagattgcaattaattttatctttttaggtaggagattattaagctttcaatctttggaggacctagaagttttgaaatgtaccaaatttaatgtcattaaccaaatggaatttttaatataagttctgagtgcaattctattcagaatttcctgttctttttcattttggatggatgttggtatttgttccaccacttttttgcacctgcatacttcttgttaatttatagatactataagccataatttcttagtattaaattttattttaaaatgttaaaaacatgattaggaaaaaattcccactctacccatccccccaatatctatagaacaggattcagagcagtatttgtcaatgtttgcctaggatgatcaggatgtttgaaccactgggagttttctttaaactgtgtatttctgggtctactccagatctacctaatcagaatctctgagggtggtgtctacaactgatttttaaaaaacgctcccaggaattgtttttatactaaaatttgagagctactggtttaaggtacaaaatatgaccttctgtggtttcactgtgggtctaaaagtatatattaaaattatttgggaagtctagtcaaatgccataatggtctgtaaggtaatctatga

SEQ ID NO: 345073 - DNA, 1000 bp, Homo Sapiens
ttttttttttttttttttttgcatggaatttttttaatgtatcaggaaattagtttcctggcactattgtcagatttcttgtttagtgacatgaaatctgactaccattagaattttaaagtctgaaaaatttccctagaaatagtacaaaaatttggtagaatgttcttgaagaaaccccaaatcaggctaacatcattgaaaatgctccaatgaaacttcaaaaggaagaacatctcccatgcggttaatccaagattctctgtctcttaatcgcgatctgattttctagattcttgtgtaaagtgtgctcaaagtccacacaacaggggattttggacaatgcttttaatggcaagtcatcacagcaggtctgcggaggtgcagggcagcgctcaggccttgctcagtttcttcttgatgaagtagctcaccagccgctgcggcctctgctggtactcgctgagcacattgcgagggctgctgatctggtccccttccaggcggttcaggagggtgacacacaccacggccgcttggaggccgcaggcgctgcacatggcggcaaacaccgaggactccatctcgatattgcggacgccggctgcataggctgcctccagatacgcctgcttgtccttctccgtgtaggagcagagagccccatccagacggccttgcccttcatagaagtccaaggtgcacatggtgttccccaccactgtggtgaactcgctcagctctgcagaacacagcaacagctcctgcaccagcttcttgttaaggtccgttttccggatgacccgcttccccaggacaatctgctcaaactctgccttgaagcaggtatccactgcctgctctgttatgaccacagtgccgggctccagacctatcccaccagaagtgccaatgcggatgatagtgacgttggagcaccgggcatagtacagcagctttatgagctcatgcaacatgattgagatagaaggaatgccca

SEQ ID NO: 345074 - DNA, 1000 bp, Homo Sapiens
tttttttttttttttttttttttttttggaatatcacatgatttaattataacccagtagtagaatttagtaaattcaagcagaacacgtgtactgttatcataaatagacaaatactttataacagcatttttgaagaaaaatcaggaaattgtacatgttaacaaaatagtataaccatgcatacatacatctgcttattaaacactgaagtaaaagaactaatccagtttgcagtcttcagaggtgtttagtattttactccgttctgatggaagcactttgaatgtttgcatggagacataaaactgaatatttaattgacaattggtcatgcacctgtatttcttaaaatttgcattacatttttttcttttctgattgttcagtagattccgactttggtgtagggaaagcttgatgatacagatgtctgtgggttgctgctgcactgtaaagcttgtacaaagcctggtcccacagagctgcagccacctggtctattacagctcccagctctcggtattctccagagtaccggatatatgcccaagtgcacagggtgataagggtcagtcccattatcatattgcataggctagctatgatgtccaaaccaatgaatccagtcacaccagcaatcacatatgtgataaagatgactacaaacagtgtggctggggtacgagctgcatggaagatatttttgctatcattgtgcttgatatattggatgtaaagttcatctatttcactctccaactgctgcaggtaacgccggctaaattcttccccacccatcttcttcacccctcggaatagcttcacagattcttccttaagttgcaggtgtttggtctgcaagtcatttggggccagaaatggtttgtcaccaccacaaatctcttccatttttttgttgtatgtgtccttggcagttgccacggctgctaaattgttagcttctgctgtggcctgtaacatggatttgggatgtggt

SEQ ID NO: 345075 - DNA, 1000 bp, Homo Sapiens
ttttttttttttttttctttcatgatcacttaatttttatatttatacatgtacatttgtatatacatagagaaagtgcaggcaaaaccattatacagttactctaatagccatttgctactgccagcagtctcaggactgatccctgtctaagctggcaagtttacattctccttgtatcactacaggatttgctctggacaggagctgtaactcctcaacaaatcctgctttcagtctactactgcacagcttgaattgttcagtaggcccagctttttgtgaaagaaaaggccttgccatggtataaagagtttttttccctctataaaagatgtaaaatttttggctgggtgcagtggctcacgcctgtaatcccagcactttgggaggccgagacgggcagatcatgaggtcaggagatcaagaccatcctggctaacacggtgaaatcccgtctctactaaaaatacaaaaaattagctgtgcgtgatggcatgcgcctgtagtcacagctacttgggaggctgaggcaggagaatcgcttgaaactgggaggcggaggttgcagtgagccgagatgacgccactgcattccagcctggcaacagagtgagactctgtctcaaaaacaaaaacaaaaacaaaaaaagatgtaaaattttcattaggtattttcagaaagtcttagtgctgtttctataccttttatatgctagtcaatgtcagtagaaaaaaatggaacatccatttcattctcctgggcgatttctggaccagttagccttgattactagcagtggtatgctggtaaatgtttaaccactggctctccgggatctgtagcttttgccagtgtccatggtaatactcccaccaggctgatttcaagctaccaacatgctatcacgaagagtggagttgagacaaggtgcacagtagcacaccatcatatatagtaattccaccacacaggtaccatggacgtaaattacctcaa

SEQ ID NO: 345076 - DNA, 1000 bp, Homo Sapiens
ttagttcaagtgtgtggacacatttaaggcctctttcacttcatttagctgttgcatctggctagagcaagaatgatggcaaaaatcttgaccttggaatactggttggattaaaggattcaagtggatgatagaagttgtggctggatttaagtgaggaccaaacaatgtaggaataaatgctgtagggggcagaggctgaagtgttatgtgagatgggtggaagggggtagcagctactaaatgcaggggatgacctgctaagaaagtggggtgtgcagggataatggttggagtcagagtcgaaaatgaaataggactgaaatgtgcctgtgaaagaggatgtagatgagcaatagggaggtgactgctatgagaacttaaggaagcagaaacagcaaaatgctgcaggaacgtgtggtggatggtggtgatagaagtgtgctggtgaactggaactgtctgtacggttgaggccggagagaaggcagtaggccctgcagcaggcaaaactcgaagatgctttgataggagttgcttctgcatatgctgctgggcttgtagctgtaggatcttatatttatctatttcgtcaggagaaaatgttatgggctgttgaattaaagggggagagatagatttatgacacatttctaatccgtcttcgactttgtcaggtttctgcatagttctgtcatagtaagagtttatatttccctctacatgatttatatgcatgcttacatcctgtaagtctagatttatttggtcttcttgggtctctgttgaatcagtcacaccagtatatttattagacggaaaagcaccagggaattcatttggtactgggtcacagctttgaataaaaggttggatttcactaattaaaggttttgattgttcttttgttgttgcatccctttttatgtttagtgactgagactctgttactaggtgaattatacctttagaaagatggttatcacaatcagtgtctgct

SEQ ID NO: 345077 - DNA, 1000 bp, Homo Sapiens
ttttttttttttttttttttttttttttttttttttttttttttttttttttttttttttttgatttcaagtcaagatttattgctttacaaacaaacattatacttggtcttaatagaaaaatgacaccagatacatccaaaatacatttcacattgggatagctgccagttcagcacaaaacatacattactaggagcagggaggcatgaaaataaactatatcttactttttggtacgtcaggaacacttttgcctgaagtaagccctttagtactattttttattttatttatttttttaatccacccatctgcacactggccctttagtactctttaagtataaaactttacttgtcctgggctttgacccttgtgtttgatctaaatgacatttcaaacataaatgtcttttgactagtgcgcttactgttatgtacagaatttaaaatgtgatcgtttgaatataaaatctggtttgatacatgatataaaagttgtatatttaaattcaagaaaatgtttttgtggactatttctactaaagaatattaaattaaaataatttaaaaacttatgaagcaatgatctgttaactggacaggtcaattatctgagctgtgtaaatcattgtctggcactacagttgaatcaccttgacactgagctcaggagcagcccatttaagaagcatcttgtaaataacaaagtgacaccttcgagattacagttgcagctatgcaagtcattcacagagtagctgagggctctcttctgaaggaggacccattacatgaaggtagacctttcatgtcttgttgccgacgtccaagtctcttgcggtccagaaatgccaggatggttgtttcaaatgcattgggtatgaactgcaccttgaatctgcccttccctttttcgattaaaccttttcacatagctgctgctgctccttagcagtccatcccctggacggaggcggcctctcaggacctggagc

SEQ ID NO: 345078 - DNA, 1000 bp, Homo Sapiens
tttttttttttttttttttttttttttttttttttttttttttttttttttttttttttttttttttttttttttttttttttttttttttttttttttgatttcaagtcaagatttattgctttacaaacaaacattatacttggtcttaatagaaaaatgacaccagatacatccaaaatacatttcacattgggatagctgccagttcagcacaaaacatacattactaggagcagggaggcatgaaaataaactatatcttactttttggtacgtcaggaacacttttgcctgaagtaagccctttagtactattttttattttatttatttttttaatccacccatctgcacactggccctttagtactctttaagtataaaactttaatacttgtcctgggctttgacccttgtgtttgatctaaatgacatttcaaacataaatgtcttttgactagtgcgcttactgttatgtacagaatttaaaatgtgatcgtttgaatataaaatctggtttgatacatgatataaaagttgtatatttaaattcaagaaaatgtttttgtggactatttctactaaagaatattaaattaaaataatttaaaaacttatgaagcaatgatctgttaactggacaggtcaattatctgagctgtgtaaatcattgtctggcactacagttgaatcaccttgacactgagctcaggagcagcccatttaagaagcatcttgtaaataacaaagtgacaccttcgagattacagttgcagctatgcaagtcattcacagagtagctgagggctctcttctgaaggaggacccattacatgaaggtagacctttcatgtcttgttgccgacgtccaagtctcttgcggtccagaaatgccaggatggttgtttcaaatgcattgggtatgaattgcaccttgaatctgcccttccctttttcgattaaaccttttcacatagctgctgctgctccttagcag

SEQ ID NO: 345079 - DNA, 1000 bp, Homo Sapiens
tttttttttttttgaccaaatttcagacttcagttttaatggttaaagctgcctgtgggagccaggctggagcacgctctcactcggccctcactttgctccacctctccctcttcttccactccactcccgcctcccacgctcccacgccctccacgccctccacgcccctgctcctcctccaggtactgaactggctcagagctagcattctgccaggaggaaagtgcgcctccttccaccaggcctagttcagttcgtttaacttgagagggctggaggcagtgaggctctcggaagggccgggctccagagcggcggggccgctcctagcggtctggcccaggctgcccccgcggcgcgtgctggacgcctcggagcccgtgccctccagcagcttggcgacgaagcccacgcccgccgagcgcagcaggccgccgccggcgcacgcgtacagcacggggttcacgctgctgctcaggaaggcgagtgcgatgagcacgttgcgggccaggctcagccgcttccccacgagccctaacccggcggcctggccggccagcgcgcggcccgcctcagccaggttcaccacgtggtagggcagccagaaggcggcgaaggtcaggatgatgagcaccaccaggcggccggtgcggcggctgcggcggaagcgccgggcctgtagccgacgccctatgtccgagtagctggccaccacagccaggaagggcagcaggaagcccgtgacagcctcgaagattagatggaaggcccggtgcccttcgctggggtaccgcgggaagcacaggctcatgttcgttttccagggcactactgtgcggtacgcgaggacgggtgtggccagcagaaaggacaacacccagatgcctgccagcacccgccgggccatcgccttggtgcgtagcttctgggacacaaaggggcgggccaccgccagtgagcggtctagactcatggccgtgataagcaggacgctggc

SEQ ID NO: 345080 - DNA, 1000 bp, Homo Sapiens
ttttttttttttttttttaaaagacagaaacaagtagaatctttattaaattctgtggaaggtataaatgagttattattaattgcacttggagcctctatagcttgatgattaaaattttcaaaagtttagagttaattaggctccaaatcctgagtcagactaaccacaaaataggaatctcagtaactattggtattcaagtattagtaattagcagttcaaaatttaacagctaagtatgttatgcctgagagtattttggagaattttagatttgatgagaggaaactgacttcactattttctaccgtaccttgtaacaaaagtggtgcaaagttttcattcatttatccttgaagtccatgccaaacctcatcaaatgcccaataacaaggcttcctctctggcatacagctatgtggttacagaagattccttctgtcctttgcaagtcttacatcttacatctaatatgatgctgtgtagcatacttagggaatcatattctatgtgaagttactgagtcacatgcacactgaaaggtcgaaggaacatgtttgagtgacaaagcagtctttttctctatcagaagattcttaaaaaaaaacaacaacaacaaatgaaaatataaaaccccatgagatatttatataaagttactcagatttgggccgacatggcttatctgaagagtgcatgccgggtaaattcagggtggcttttttctcagggtctggaagtgtgagagtttctggggcagactttttccggggccgatctttgggaacggacagaaattcgggtgcgtctgtggagagaggggtggatggagcactagaaggcgcactgcggacggaagaaggcagcagggggatgctggagatagaaattgcaggtgggaaaatgccgattttcttgttggtggcttcctgagtggctcgttcaaattctcggacttcatccattgtcatgtacttgtttgggcatgactctctat

SEQ ID NO: 345081 - DNA, 1000 bp, Homo Sapiens
gtagcctggagtttgaaatgcaccttgagctttaatggccttttccttgtgagaattcgagttaacgtgcctgctggtgcttttgatgggtgaggacggtgaggcaggccacacatctcgcttctttccagaacacttctgggtagtcgttcaattccacatttaatccaaagccaacagttccatgggtgactgtgctgctggctgtaggaagccgatttttattattttttccagttacccagcatgccacaatctgattgctgacatttttcaggtggtgttattgtaatagtctgagctgtaaattcttcatcaaaatatctagtatctgtctcagatgttacttgaggtttaaaaggaggtacaagctttttatcatatacatcttgccagtttactccagagaagaaactgtgtctcataatttcttttgcatcatctggtcctccaccaaggcgtttatttggatcctttatcaagagccctgaaagcaatgattttgcatctgaagagagtgttcgaggaaatttaatgtcttccattaatattaattcaaaaagtttctcatggtcctggttgtagaaaggtaacctcccacacatcatttcatacatgacaacccctaggccccaccagtctactgctcggccatagtcattatcttctaacacctctggtgccagatattctggagtgccacagaatgtcttcatggtggctgcatctgtgatcccttctttgcaaagtccaaaatctgtaatttttatgtggccatctttgtccagcattagattctccaacttgagatcacggtacacaatctttccggaatgtagatagtccaaggcagagacaatttctgcaccatagaaacgtgtgcggtcctcagagaacacccgctctctcgacaaatggaaaaacagctcgcccccattaacatattccatcacaaaacacaaacggtcttttgtctggaaggaatatttcaaggatgtta

SEQ ID NO: 345082 - DNA, 1000 bp, Homo Sapiens
ttttttttttttttttgtgcaatatgtgtggtactttattttttatgttctttttttaaatctggggtattagtctgtgctttgggagaaatgcactagctctgcaattcccagctgggcaagtgtgtctctagtatctccacgcaactgatacactggtcccttccccatgtcctctccaggcactgtgggtcttgggaagtggttcttgtcagcccgagggacactgggttctccactgtccttcacaggaaattctagcttcctcagcctttgtgccaccacacttatagcttcctgtgcaaagtatttgacatccatgtcttcatcttgacctaacttctgtagtactggcttcacttctccctgtaaagcattggtatctagaattggtccaatcttttgtagagatttggccacattgaagcgaacatttgctacttggtctcctgccatttttaatacgatgggcagcatttgcttagtagttatttcctgaccacaggcctcagacagtgcattaatgcagaataaagtggtcattctatgcaagtaattaggatcatttgccattactaacactttgggaacaatagtattttgggcccactctgtaccaaacttctgaactagtttcatgaggttgttggtggcagcttctcggatggcgtatacatggtccacgagccaagccatacataaagaattcagcttttcatcaaagaattccacacccagctggcctgccagcagcggcatatactcaatgatggccaggcggaccctccatttggcatcttctgccagctccactatggcaggaaggagagactgagagagctgacggattccaatcacttcatttacacaatccaaattggagatgatattcaaacgaacgtcaggacactcatcctttaactgagctaagaaaagaggtagaagatgttcaatggtattttctttgcccaaaatagtagacaatcccataattacagaa

SEQ ID NO: 345083 - DNA, 1000 bp, Homo Sapiens
ttttttttttttttttttttttttttttttcaaatgtcagatttctttattaaaatgtgcacattatagtttacttaaatacaaaatgttcactttccttgcaggtaagaaatttcactgacatttccatgtcaattagcttctttttaataaaaatccttccactgaaaataaataagcatttaaattactgaactattatattcattagtctcaatacctcttaaaatacttaaaactttagaaaatagactctaaacattgcctaaaggtggcatccagctctgagcaggccacacaaggtgtgtctgagtatggccatatgactcctggggccacctccacgacggcccagccccaccgacgctctgctgaaaatcctgcccctcagcaggacgcaagcttgttccccaaatagtggtgacctcaaactgcaatatgatgaaacctgcagccaacactgccctccacaagggtttctggaaaggctgaagctggagacggtaaaccacaacaccgtcccaggtcactccaggtcaccccagctaaagacattcaacaccagccaaaaggctaaagtttagtttgaagggttcaaaggcaaatacactgaaacccacgtgtaaacctgcctggttttcaaactggaagagaaacactttggtgtcttcaataacccaggcctgcactggatgaagcaatgaaggcaaggtcacggctgctaaagcacagaggggttaaaaagtgtgaaaccagaagcaactctcgagtgagacacgaagcagcaggctgacgcaccagacaccgctcccaccagacacctctcccgccagctgcagggccctgggcagcgttctcagcccagccattctgtgacagttgttgaaagaatcagctgttgcctttttttctcaagcgacaacaatcacatcaatattacatggtcttatgaatacatccatgtcatcaacttgttagtaaacacatgattatacaacat

SEQ ID NO: 345084 - DNA, 1000 bp, Homo Sapiens
ccaattccaagcatcgtttaccttcatccaaaacaacagcaacccattatggatccagtgaatacagagaccaggccaatccctggggaaggcaaggcttttctacagcccccacttggcagtctcattaggggcactagggagacataggaatctctgcgctctttaaataaaggccctgccaagagagctggagattcccctactatttccttgcccctgctaaagcctccaggagagagagatctgggggcctccatagctgtcatcacacctcctcttggcactaagttggcagtcagcaaaggaagtaaataggaggggaaaatagttttccagtgttttctctccatttttattttcatcttcacagcagaatttttttttccacaaggggaatctgagaggtacaatgctttctttgttttaacaaggcctggggaaattccactggcctcagtggctgatgatctggtcagggttcgagaggggacaacagcttcttggatattcctgttggtaaggccttcagggaatggctgggtgaacagccaagggagaaagggaagggatggtttctatcattggattgaactgtaaaggagctgcagggtgacagatgttggcaggaattccagtagagtttgtgtgtacagtgactccctagcagggctgacacctgcacaggctaggtgtacaccctagcagaaggaaaggttgcaacatcaccaaggtggggcatttgccagaggtacataccaaggcatttgtaaagctgaggctgctggtaaagttccaagaagccctttttaaggctgagtagagggaggagaagccaagggcaacccaaggccatctcaccactactccgaggaatggtccatggagacaacagattcaagagcacatataatgcaagttccttgattcatgctgtctattggctgggaactttgagctcttccttggaggagggagggtgatcaggtcaaggaggtag

SEQ ID NO: 345085 - DNA, 1000 bp, Homo Sapiens
tttttttttttttttttttttttatattcatacatatttattcacacaccacacacatataatttcatgtacattgtttgaatgtcccaaactttggagtttaaacatatatacacataagtttattttctcaagtcttactttgatgtagaaaattttattcttgattgatgagtaaggagaaagtgtttatctggcatagagaaaagggacagatagcaaaagggaatatgatgatactataacattactttcactaattgtcttcaacctcattttgattttacagatttggcctctgagtgattttggatttttacgtgccagccctaatggccacagattttctgatgattagtaagcatttattcttttgacttgattattgtctccttttcatgtgaatttattactcccgttgaaaccgtgtacttaccaataaactatttgctattcagttttagttgtttttaattgttaaatgtaaagaatattcaacacacattctgccaagttctgttagttcaaaatatatggataaaaatgtaacccaaaaaagtcatctaaattttatgatacaaaaatattgtgggagggggaacctggatgactacctcacttttgaattcttgttcttataggtataatgaaactaatctattcttcttaaatatacctcatactttagcagctacatttacaaatcagagtagtaactattcgtatttataagttcaacctgacaatgccaggtttgataaaaagctgctagtctacatgctcagcccactcatttgaaattaagtaaaaatgtttctaaaggatcccttaaagttctttaaatgagttctgacttttactgtacacaaaatattaaatacatagaaaaatgcatctttaaggcatatgccatctgtagttggctatagtcaataatactttataaaagttcatttcagcatagcagcagtgcaatggccctgtcttcataaatacaggc

SEQ ID NO: 345086 - DNA, 1000 bp, Homo Sapiens
tttttttttttttttttaaaaaaattatcaatttatcttttaattttttaatccaatttttgatgggatttccacgttctgaaaaactgtacttaaaaacggttaaaatggtaaattttatgtatatattacaatagaagaatgcaaaaacaaacaaacaaaaaaacagaaaatagattcctaagccccattccagacctgaattactaaggttttgcccaaaggcaggcctagcaagtccagaagcctgaagaaaccaggtaggattcagagagcccaggaactgacatattttaagactagcctagtctgatctttataaataatccccaaaagcagccctctccataacccataaccaggaccacttttcctaggccatctcaatccagatatcctagctcatcactccacagattcattctcctcaagatttgttccaaacaatggggaacagatactgattctttcaattatgtgccttggacattttaccaaaagctcctgccaggttttgcggctgcctgattgttaaggaattaaggagaatgaacataattctcaatataaaaccctttcaatatctttcttggtcttcttgccctcccatctcactgcttctggaaacttaatctgttcttttctttccctttttctatcagtgattcagggattggatgagtctctatggtttgttttgccctgaagagcagaaggcttctgtcccaactggtgttgccaaagcaacatattaattccatgccatgatcctgggtcaagatctgcacaatctgattgggcatgtcacctcggatggcaagggagtggaagtggtcaaaatcatggagtcccagctttcggagacgccttgcagctgcccggtaacacttccagggttggggctccacaaggaggtagtggcagagggaggaaagatgggccaggaactcccataggccatggtctccatgattcagatgaatccacatggttattgaca

SEQ ID NO: 345087 - DNA, 1000 bp, Homo Sapiens
ttttttttttttttttttgtcaaaaaaccatccatttatacagtttgtggttcagaagcaacaatatgcacaacggtggaacagtctgtgctgtccccaccccacctgaactcgccagttcctgtctcccaaggggcacagaacacaggccccctgcctggcaggacccgacttagttacaggcccctgggaggggcgaagcccttaggggtcgaggccaggagggaggaggaccagcacctgatgcccctgggggcccgctgggtcatggaactgtgtgtgtggagggtggggggtcagcccaccacgggccatttctccccaaggctaagggcgggggagcaagtaaagctgaggagagggcttcatgggacagggttcccatcccctgctgggagggtgttcctggataccccacaaggcactacagatgcagactgtaggcgagcacccccatctttggcccccgattgcctggctctccccctgccccagctcccactgtggtttggcgggggagaagagaaggggctgggccccccactccctcagcagacaccagccaggaaccgacccggcgggccgaggctaggaaggaccctctcccgctgctctgggctcctggggtcctcttggctcggcctccccctcttttagcgctggctgttgcgaataaataaataaatacctccctgcccgcccccgcccctacagctggctctcctcctcctccagggagcggttgagtccggggatgaacttgagcagccgccggcggaagctgcggtacttggttttgcgcaggccggggccgcatagggcctgctcgcgagcctcagtccagagcgcgcccggcgcgcccccgcctccgcccccgccagggcccgcgcaccgcacactggcgctgcggctcagcgcggcccgcggcccagggcccggccccacggcaggggtctcggcggggcccgggccgaaggcgcgggccgggggcggcgggggc

SEQ ID NO: 345088 - DNA, 1000 bp, Homo Sapiens
ttttttttttttttttggcataagagattttaagagagcagatttaagaaagattcagatgacttcacgtgagctactgaccatataaaccttgcatgtgctggccccagggaatatggaagcttcggaaggtattgctctgccctgcctgggtcccttgctcctattgcagccagaagtcccaaaaaacctcagaacagatatttgcttctaggggatatgaggggaaagcaccgggaattaccatgaggtaatggatacggctatgcaggtggcttcttgatgacaataacccatcctcaggaggaagcttttttttgtttcttccacagactcaaaatagctgagagaatctgactctgcccaaatacatgtggtgtgtgtcattggattgaatttcttttttttctttattacatagcaacttactagataataaatttcttaattaattccaatttccctggagcaaattggagccactagatgactcagaaatagtcaagactgtacatatggcattgatgccaaagtgcttcttctaccctgtcagattttaagatttctctgtcaaccccatcgaaacaaagctcccaaatggtgcttgttcagtttcaccagtctgcacggtgattcttctagggtcccctacagaatgcttgccagggggttggcttaaatcccctcccatctatagacatgcatatcaatgggacatatttgtatacacttgcttaaaaaacagaaagatagtgcactgtaaaattccatgtaaaaagtattgcttttctaatgtgctaatgtgctcctgcctgcctgcttgctacacaatgttacagagggtagagtcatgaggaattcaaggctgaagatgttttggatgtttggatgacaccgacgtacccctcaccttgcaccttgaaccctgctctgaagcccgtgtagttttcaggcttggcctaaggcaaaaactacaaagcatcctaatgagcagaattat

SEQ ID NO: 345089 - DNA, 1000 bp, Homo Sapiens
ttttttttttttttttttagaaagataattttcttttattacatttttataaagtgtagaaatgtgagtaggcagattaatcttgatactatactgagctacacaattttattcttttattttttaaattaaaaaaatatatagacaggggtctcactctgttgatcattctggttttaaactcctggcttcaagtgatcctcccatctcagcctcccaaagtgctgggattacaggcatgagccattgcacccggccacaattatttatatttattttactttattttatttatttttgagagggggtcttgctctgtcgccaagctggagtacagttgctcaatctcagctcactgcaacctacacttgccaggttcaagagattctcctgcctcagcctcccgagtagctgggactacagttgcgcaccgccacgcccagctaatttttgtatttttactagagatggggtttcaccatgtttgccaggatggtctcaatctgttgacctcgtgatctgcctgtctcggcctcccgaagttctgggattacaggcatgaaccactgtacccggtcgtattagctatttaaaaactcagacagctaacatttaaataaatccctgctgtctgggaatgatgtctgaatgaatattgtgaatacatatgctaatttataccatattaagattctaaacaatacagctatttaatatatcttgataactggtatttgaaaataagtctatttttctgggtagtcttttggagaaagtgcactgaatatagtttccagtcatatgctactttcttaacttgtacttatctaaacatcttctcatcaggagagagttcaatagtactcgaaccaaaagtctagtgagtctgacttctccaatccccaattttggtttgcatgtccacttacaaccatcatttctctgcaaattttccacttagtctatcaaaaatcagtgctctgaaagttctctaaaagat

SEQ ID NO: 345090 - DNA, 1000 bp, Homo Sapiens
tttttttttttttttgcatttttaatttttattagtaacagttctgagtacaaataaatttaatgacatttagaaaaaaaaacaatttaccctgtaaggtttgttcataaggaaaaccctgttttgtacattttaatctccaattttaatgcttaatatcataatgcctttaaatctgtaacttaactttaggtttaattttaataattctgtcttgttgcatcttgttaaagagattatcaggtagaaaaaaagcaaaaaactaatttaaatgacgtgaataaaaaacttaactaaaaagttttaaaagcctttaaaacaacctgaaaattagaatacttttggcagaaaaattagcagctaggaacaaaattaacattacataatattttaccaataactgcattacaaataatattgttttacatatattagaatgatttgcaacatattatagtaaatggttatacatatcagacatacaaatctattaagaaaactttttaatatagtttagcacttttgagagattctgttcccaataaatgaaaggaacacaatttagaagatgacaggtggtacatcttttaattggagacctaaccaggtaagtcttgacaaatagtcatgcaatgaaattcaataatatgcatttataagaactcagaataacacagtaactccttcccctcatcagtatatatgactggcgtcagaaatcatactacgagcaaatgctagtaaattcttgaaaaaaacagctcactttagaataagtgccaatctaaattttttattcttcccaacacactatttccaccactcttcattttaacaatgttttctccttgggctggtggtatattattgctttttaaagaccaatcatacccagcatgatccaaggtcatcaacttctctataagctgaagtgaattacaaacagccaaaagaccaatgcatttaaacagaaaactatccactctagtcaacaaggcag

SEQ ID NO: 345091 - DNA, 1000 bp, Homo Sapiens
tttttttttttttttgatatgatttttttattaacatataataatatatttaataaaaaatagtatccactctggctctctcctccactgcaaggggaagagtggtgaggaggggctggcactgcccacccctaggcatccggaaaagccctgcttccagggctcccctctacccctgctttccaacaggctctgacctccagacagacggttcaaagttacaagtgctttaggccctcccttgagttcccccaggcccatcccttgcgcagaattcaggggccacctggacaaaccccttgctttttctcattcttggcatccttcattcatgctagaaagaggatctggggacagagagtagagtctctacctgccagggggaagggaggaaaggaatggtggtgggggatggggccaagaagagggatggtgatgaggtgccctcattggagccggtcactgcggaatgactcctccacagcaggatcaggcagcagggcacaggggtcactcagcatgtttagcccttccaggcccagtggctccatgcgcagctcatcttctagcccaagccctagctccaatccagctgctgacacctcaaagccaggcactccggccagggctgctgcaatctccttagagaaacctggagaggagtcccctgtgaggatgatgttaggccctgagccatggcgggaacagtgggtcaagttctggtggttgaaggtgtggggatcctgggggccacccattggcccctcaccccctaaaaatccaggcccttcagaaaagccagggggatccagcaccaggctggctgatgggctctccatgctgaactgctccagattccccaggttgaagtcactcattggccggtggtaagactgttgcccatgcccactgggcccaggtgggtacggtgtcccataatgagactgcctgcctgggggctgcccacctgaggactgcactgaacaagactgagagggca

SEQ ID NO: 345092 - DNA, 1000 bp, Homo Sapiens; identical to SEQ ID NO: 161076

SEQ ID NO: 345093 - DNA, 1000 bp, Homo Sapiens
tttttttttttttttttggttcaagggcagaaatatttattttaagataatgtaagaatgtaagacaggttgctttgcaatttataataagaacagtaagttggaacttaagctaaataaattgcttattatgaaatgattctgagaagtaccataaactgtttatcatgtatgctttctgtaaaaagtttaatatgaattttatgtataacttaatttttccaaagaacagtttatagaaggaaacactgacaataacagcatacatgtagtcagtacattattattttcaaaccactagcaaattttaaattgatataagtaacaattcagtgagatatttttatctctcattttatagatgataaaattcaagagtgataatatgatggaaatcactgtaatttactttcttttctattttatcagaacatttatttattcacattttaatattatgttgcagccttacaaatgttttcatccactcactctgataagcaataaagaataaaataaagattgcatatgtacaatgctattcttccttgggaaaatgacagaattataaaggatttcaatgggctaatttaatttttaatctatatttgcaggatttgccatgtacgcaacatagtataacttatagtcaaggattaaaggaaactgcatttttttcaattactttaggtaccaaatcatattaagaacattcagtgtaaggtaaaatagacctgaggtatgttatatgagtgggtaggcattttcatttagtcagtcaattaaatcaactttcaaagcaagtgaaattatattcttatactatatgggatccttgaacttatgaataatatattttaaaattactgtcataaataatattagataaacaatgtaaaaagtctaacatacaaaatcaatgctaagagtaacattttcttggaaataacattacttttataaataagctgatgcagatcaatttcacatttaataactt

SEQ ID NO: 345094 - DNA, 1000 bp, Homo Sapiens
gccggaataaaggtttattgtgctggtgcattatatctcagcacctggagagctgtgcagaggttgggggagccccagatggagggatgggggagaggacctcctgccagagcctccctaaagcaggacggagcccaggctccctgtcgaggactgacgaatattgtggacacaggctgccagacaatgtgtgagcaacagggggtggccagggcccccctgctccaggctgggcgtcagaaacccttccccagcccctcggacttccccagggtggaggtcccctcaaacacagcccctcagcttctaggctgctttggaggccagacaggaagagttccattcattcaacctgatcccagcagcagtagcgggatgagaaactcacccccaggccgggggtgcttggagagcgcttgagaggatttaaatgccctataccccacatccctaatcctggaccaactagaaacagggggccaccttcaggaaaattaagagcagtattttccagagtgggtgctgcaggattttaccctgtagctgttttaaaaagtagtttgggccgggcacggtggctcacgcctgtaatcccagcaccttgggaggcagaggcaggtggatcacctgaaggtcaggagttccagaccagcctggccaacatggtgaagccccatctctactaaaaatacaaaatttagctgggcgcagtggtgggcacctgtaatcccagctactgaggcgggagaatcgcttgaacctgggaggcggattgcactgagccaagattgcaccaagattgcaccactgcactccagcctgggtgacagaccgagactccgtctcaaaaaaaaaaatcttgtttccgtagagtgcctcggggaacctagtttggggaatgctcatttagggacctgtcgtaatgtgtgcaggggtcctctcacagaagtgtcctaattaaccacacacacttctgctgctggagctctgagcacaggca

SEQ ID NO: 345095 - DNA, 1000 bp, Homo Sapiens
tttttttttttttttttgctcatttatttcatttattcaaaaacatttagggagagagggctactctgtgcgaggcattgccctggtactgaccacacagcagtcaaagaaactgacagcattcctcccttgtggagtttacatcccagtggtggagatggacagtagacaactagatcagtaataagatgtgagggagagtggccagtgtaatggagatgaagctggggaaggagatccagagtgatgggatggaggcagagctggcttcagtcagagaaggtctttctgaggagatagcattggagcagaaacccagacaaatgagggagcagcctcatggacaattgcatgcaacctcattccatgcatatggagcccaatgttgtggtcaaactccccagtgtggccagtcaactcctgagcactggacatggtctatctcactgcagaaggggagggaaaatgagacaatgtaggcagaactctcctcctgccctccaggtcctggcaggtggctggagtaagatcttggcgttgtgtgttctgatggtcaactagaaggctggtacctacatttacagggtgagacctgagcaatgtgttctgaaactgccacctggggaatgagcatgagcctaggggtcattgctggagttataatcctgcacattgtaagacttgctccactgcacctaccctggcagtggactccttcctcttctatgtcatttgattacctcacctcatcacctagtggcacttacccagagggaaagtaattacttagcaggctttgatagaaacaataaagagatgaaaatgtataggatcggggatcaggagatgcatgcctcccactctttcattgattgatcgattgattgatcaattgatgtcatttaatacagtgaaggttccccgggggctaagagtatgagatctggattgtgtgaccttgtgccagtaacttaacctttctgaatcttgatttcttcat

SEQ ID NO: 345096 - DNA, 1000 bp, Homo Sapiens
gattgattgattaatcttggctgaattttatttatgagttctcagaataacaggttcaggagatgagatggaaaacataaggcaaattcctaacactgctaattaggaggctgctgataggattttaaaaattaaaaacaatgttaatagtggaacaagagccatcagaaaataaggacttagattatctactatttatagagaattgctatacaataaaaatttttatttttcacgtggcatttttgttacacggttaaacagcccaaaggtctgcttttaataacatgacaaagtgtaacaaaagccttgctttatttaaagatccagtatgacatacttaaaaaggccatttaaccttgtatcttagcttgggatgtgccagtggttcctcaactttgttgtctattggaatcattttggggattttttttttttttaatagtggtgtctgtcaggctcccactcctagacatgttaattaatgtggagtgcaagttgggcatcaggattttaaaaaaatcccctggtgattggtatgaatgtgcagccaaatttggaaaccactgagctacatgcttatttagtgaagaaggcagggttgggggaagcagggtacatgttataacttgatcatatccctttaaaagaagtggggactttgggtttatgtacccataggaggacttggttatggatgggaaagacattttagccttgtacaaaaatctgaaagaggaaaacatctttctggaaaaatcaggtccatggaattgaaaggtggtgataactcaacattttttatgctaaagtataagtgctaaagaggtaaataaacgtcgataggaaataccgaacaatcaattacattcttaaaatagtagatagtagcagtcttttggagtatgtgtttaactgccaactatgaatgggttagcacaaagtggagatgaacaaagatttcatgtcattactgaagagcagacatagccttttgaag

SEQ ID NO: 345097 - DNA, 886 bp, Homo Sapiens
ttttttttttttttttttttttttttttttttcacacctttccctaatactttattggttacctctaggcctgtgtgcggctgggtgggcttgggggagggcgtcactattcagcttctaggtggaggcatgagaaggccttggcctagccctccagggtcccatactgtggagtttggaggggcaggtctggcctttcctgggtcagcatagggcacccaggtgggggcacaggtggacacccagcacaggcacctaggcaggggcacaagctcactatccgttagccagcctaattgtgtttggagaaatattccttgctgtcatccacgttgggcttaatcgtgtcactgccaggcttccagccagcgggacaaacttccccatgctcgtctgtgtactggaaggcctggaccagccgcagagcctcatccacggagcgtcccacaggcaaatcattaacagtgatctggcgaaggacacccttgccatcgatgataaagaggcccctgtaggcaatgccctcatctgttttcagcacgccgtaatcctcagacaagcgtctggtcacgtcagcaagcagggggatgttcagggggcccaagcctccctctttccggggggtgttgatccctttgtagtccgacagcttcacctctttgaaggcgccatcaaccaccgctgtggccttgaagtcaggggctggctttccgatgcgcgcgttaccggaggccatgactgaaagctgcgtgggcaaaggctagacgcacggacgatcacacgcgtggacccgcgttctcagcgccaagtgagccctgggccgcgaagccttttatgcccggcccgaaccaagacgtgcacggcgcgggggagggagcggacgagc

SEQ ID NO: 345098 - DNA, 1000 bp, Homo Sapiens
ttagccagaaataatcgacaagtcatttcttttgacagatgtgtctgttaaaatggctcccttttctgggaaccagaagcagcaaaaaattttcttccactcattcctgcacagtgtcatgttgtagaggatggggtttagggctgaattagcaaatgtgaaggccaccacccagaagaagagggacggccagatgaccaggtcttgcttgaagttctggatcaggatgaggaggatggtgatgatgatggggctccacatgatgaagaaggagaccatgaggaggaagagggtgcggaagagccggaagtcctgctgggacacgcggatctggtggctctccgagtaggccaggcttaccgtgagcctcttccttgatgcctttgtgatctcactgtgagtcacgacagctcttgcatccaggaggtgttccgaggtctgtaaaattttggagtaactgatcacaatgaccagtcctggcaccaagaagttcaaagtaacaaaagagacatcccacgagatctctccaggaatggtgggccaaatcagtgtgcaaatcgaaatttcctggtcggcgccggggagccgttgcgggacgactcggaagaagacgcagagaggcagagcggcgaccgccgaatagccccagatgagcgccagcagcactgcccgcgcccgccgcccaggaccccgcacgccgcgctgcaggtgcacgatgcacaccatgcgctccaggctgaccgcggccagcgtgaggatggtgacgctgccgctcagggtcatcacgtagaagagcaggtggcaggcaacggggcccagcagccaggcctcagtccagcgcacggccagcaccagagggatagcgctgatgaagagcaggtccgcgcagaagaggttgagtaccaggcaggcagtcgcgccgcggcgtcgtcggcgcgccaccagcaccagggcgcacacgttgcccagcagcgacactgcaaagatgagcaccagcacg

SEQ ID NO: 345099 - DNA, 1000 bp, Homo Sapiens
tttttttttttttttttttattaaaattacaaacatctttattatttatcacagttctgtggattatctgtacaattcttatggtctgtgtcagcctgactggggttggatatagtctaggatggctttactcgtgtctggaagttggtaggctggttgatctgcggacagggctcaactgggatgattcatttatgttccacatggtctctgatcctccggtaggctagcccaggatgctttacttggtggtctcaactccatagagcagcaagtgatgtaagtcctgatgcataggttattaccaaacctctgactgcatcacatttactaatgtcccattggccaaagcaagttacaaggccaagatcaaatttaaaggggagaggctgggcgtggtggctcacacttgtaatctcagcactttgggaggccgaggcaagtggatcacctgaggtcaggagtttgagaccagcctggccaacatggtaaaaccccatctctacgaaaaacaaaaattagccaggcatagtggcaggcacttgtaatcctagctacttgggaggctgaggcagaagaatcgcttgaacccaggaggtggaggttgcagtgagccgagattgtgccattgcactccagcctgggcaacagagcgagacttcatctcaaaaaaacaaaacccaaaacaaaaccgacaaacaagcaaaaaaatttaagggatacagatacagacttcatcttttcataggagcaggtgcaaagtcacattatcacgaggaatttatggtcatttttgcaatattctacaaaatcttgtttggcacacagtaggtaatcaagaatgcatgttgcaagaattaagaggtaaagtctattcaaataatattcatgttcactcctcatccctccccattggcacatctacttccatgcctcctattcattgttgggatctttgagttgggagaaaatgttatctaatcgtttgaaatgtttgttg

SEQ ID NO: 345100 - DNA, 1000 bp, Homo Sapiens; identical to SEQ ID NO: 161078

SEQ ID NO: 345101 - DNA, 1000 bp, Homo Sapiens
tttttttttttttttttttttttttttttttcactgaatgcataaagtcctttattgaaaatattgggatagcactgcattacatatagtcaatatccataaatgaagggtcacacatttctgaatggacaatactgttttacatagagaacacagcatctggatatgctctcacaattatagtatcatggactaaactaggtcagagtgaagtatatgcaaaatgaccattttgtttttttccattttattaatagcatatggttgcagatggtgtaaatggtaaacgtgatatcatgagacattcctgatatctcacaccaacacattatttaacgagcaggttaaggtgaaactgccagtatgctgttagtcaagagtcctcagtaggagaacttgagtgaaacgtacacccaggctacagatttaaaattttatagcattcatttaaatttgcatggaattaaggagtataataattgttgatctgacaggaggccactggacaatttgttctctttcacaaaatgtctaaaataggagaataatgtaaaggaagtattctaagaattgcttttttaaatgcagatatgtaaatagtacttgttatacatttttcctttcaaaaattaccggggaaataatttatgacagaccatttttcagctttggttattatttgaaattttttcctactagcaagcagtctttggctttcataaaagtctggtaatcaataatattggttaagtaagtctttattattattattattgttattatttttaagacagagtctcgctgttacccaggatagagtgcagtggcacgatcttggctcactacaacctctgcttcccggattcaagcaattctcctgcctcagcctcccgagtaggtgggattacaggtgcccgccacatagtcggctaatatttgtacttttagtagagatggggtttcaccatgttggccagactggtctcaaacttgtgacctt

SEQ ID NO: 345102 - DNA, 1000 bp, Homo Sapiens
tttttttttttttttttttttttttttaataataaggtaattttttaataaaaatcattggataacattgatacatttttatcatttgaattatataaatttattaaaatattactcaaacttctattatagtctgctgtcacaaaagatttcctattaacttttctgaactaccctccacttgatactatggcaaaagagagatcacactcagaaacttttccttaagaaagatacatggagagagcctaagaattttaagaattcattttcaagtcacagtacatgaggtattctccatcttttatctggagtcacaagccataacctaagaactgaaattaggcattgtttttggatgcttaacagaatctcctagatcaagaccaactcccactggtatcagtgcttgctttaaactacctaaaaaaaaaaaaaaaaaaaaaaaaatctatggcagatccttagggaacctagtaagagtgggtcttctaatgcagaccttgtatcttatgacctatttataaaacaattcttaaaaaaaatacaggatatggtttttgaaacatatataattagaaattagttatctcaaaggaactaaaaaatatatagttttgaaatactatataattagaaattactatcccagggtgatagccagagctttcatattttaaattagaaccaactttttaaggtattataaagctcatttaaaatgtactttaattcaagaaaaaaaatcaggtataaattagtaagtttaatttgtaactactttttaacctatttttcaggtttaaatttgcccaaaccaactgaaaaatttattaatactatagtaggctaattatcttttatatccagacattaggccaaaaatgatacaattctggttaatccataatatatgcatatataggaaaatgcaatagtaatttgttttccatacttgatgattaaaatagcttcaaatattttatgaaagcttagtcaa

SEQ ID NO: 345103 - DNA, 1000 bp, Homo Sapiens; identical to SEQ ID NO: 161079

SEQ ID NO: 345104 - DNA, 1000 bp, Homo Sapiens; identical to SEQ ID NO: 161080

SEQ ID NO: 345105 - DNA, 1000 bp, Homo Sapiens
ttttttttttttcttttttttttaatttttccagatcaattttatttaaaaaataagttgacagaaagaagcaaaagcaacttactaatatgtcaaacaaaacacaagtaccaaacctaattcagcacaggtaacataatataaatcaacaaaaattcgattaaatatttcacactagataaaaagtagggtgttctatttcccctacaaaatatggaagctgacttttcaattacattgttttacatgctctaatcacaagtactaccatgtgactattcactgtgtgcttaggtaactatggttatattttcagaaggcttgaagcaaaatactagtgactcactattcagatgtacagagtcaacctgaggtacactgcctgcaactatcttaatatagttaagaaattacgtataaaagtgaaatgagaaccactgaaactaatctatcagatatatgacatcaccatcaaacaattcttcagctccaaaagagcaaagcatctgagagttagtctaagaatgcatgtactttaacaacacatgtataacagaaaataaagacaacggaaaagctcccttctaatgtagtgtacttttacaacacatatataacagaaaataaagacaatggagaaatgctctcttctaatgtagtaatttagagtactgaaaatgcaatttttgcagcactttaacaagtgagaattatgaaaatctgttcactgaacaggaatataaggaaaaactaaacacgtatcccaacttattaaaatgacacatctataggctacatctatcctgaatctctctataaggccaaattaacttttcacaattttctcttaataaatgattaaaaatatgaaaatacttaaaggaacatagcatttagactgtgaaactgtgttgtaaattttattatagttgtcattttttcttgatgttgaagactgcatcacagtttcataaataacattgcttgtgttttataatat

SEQ ID NO: 345106 - DNA, 1000 bp, Homo Sapiens
tgtttttttttttttttttcttttttttttttttttttttttttttttttttttttttttttttttttttttggtgattgtgctcagcaatgattatttatttgacttgttaaattacaaccaaaaagacattcatcgttattcatttgttgttcaggatctgtgcaggttggaaattatggctcttaatgctgtgaaacacagggccacagcatctggatgaaaacgcaaagccctatcactcatttctccttcacttgccatcagatgatcatagccaaaacgtcctctgtgtggttggaagatgacacctcactcatcaagaattgtactgtttcatttgacttttcaccttgtgactgttaagatgcctaagatcagaactcctcatcttaaaacttccaccccagaactttttctgtcatagcacctgtgcttaacgatacttggagaccagaaccacctacttggcttcaggaggacaccttatcagctgaaagaaaatgccttgaaatagagtgtggcctagctttgaggttgggagggatggttttgtttactttccagtgggaagctatctactttagattaaagaagaattagagaattatctggtttgattctgacatcagaagtgcagatatttggaaagtgttttagagcaactttggttataaatgagagggtaaactcctaaaacagtatcttgacttaaaaacattcagttgtatactctattttagcagtgagcccaaaacttctttaaaaaatcaagtaatgtttacaagaaagaataaaatcttaatccttttcacttttaaagacaatcagataagattacccactgcgattaaacactgatcaaactcagttgtccttacgttagcattactctgtcatagcaaaaaaaaaagaaaaaagaaaaaaagtcccggtgtaagcttctccagtggtgagcatgatcccttactcacaagtaagggagcccagatagctcaga

SEQ ID NO: 345107 - DNA, 1000 bp, Homo Sapiens
tttttttttttttttttagcgttcctattccacagccacctgggcactgcttccaggggaactgcaggggtcctgtctgtgagagaccccatggatgccccaggaaccaaggtgagagcagtgcccagcccagcctgtgattctccacgtttattaggaaaagcttgcacaattaataatcaaaatcacactgtgaaactcattaaaacacagatccaaatcaccacaaattattgatttctatgcgatgtaatgcccagaaggaacccctgtcctgtgtaggaaccgtcacttctctgcggctcagcagctggcaaggggaggtggcagtccccttctgtgtgtttggctggctgctgggactgggcgaggggttggaggcgggagccccacgcacagtgggctcaggggcggagaggcagggctcctctccagctaggaagagctggcagtctaacccagggaagtgggcgttccccccactcaaccacgtgccctggggaaatggtgagactgtccctcctgctggaagctgggggctcaggagcagtctccacagtctcctgcccatgggtcagcatttcctgagagtgagggagccaggcccaggccctccaaatgggctcctgggcttttattgccggcggccctgtagtcagcgtgggctggtcctgccctgcctgtgcctggcagggtcctggatttgaggctggggtccaggggttgctctgtctcccctcaggaagccccctgggccaagcagggtgggcctgcactcagcctgtgctacttcctggccatacatgggccaggccctgtgccctgccactgggtcccaaccaccatgccagtgatgtcaacatcaccatgtgggggccagggcgcttggggtaacaactcagacctgagacggggcccccacaccggccaggaagaggtggccttgctgagcccccaagtgcaggctgtgccagacagcatggtccatggggtattgggg

SEQ ID NO: 345108 - DNA, 1000 bp, Homo Sapiens
ttttttttttttttcttagccaaaatataatcttctttaatataaaataagtccacatgatgtataatggtaaaatattttcaaatatctcacatttgttatacaaataaggactgtatttgattatttttgattgccacccaataaatccagacaataaacataattatctctacacccaataatgagcattgattccaggaccacaggagaagagaagacttctccaggaagttcataaacactttgcaattgtccactctgagattccaagatccacactttcccatcagtagatgctgctgccagcaacatttcattgctgccattgtagttatggaaagcaaacggtgttgcatagacccttgaagtagtttcaaatttccactgcaggtgacctttcatgttacaacagtagataaagcaatcatgggaaccaaaaaatattttttgctctgatggtgaggtacacggggatgaaaagattggtccactggtagagaactgccaaacctgttctccaaagtgagtaaagcagagtaaattcccatctacacagccaatacaaatatactgtgagcaacattgtggggaagagaagagtggttttccacaggaatgtttccaaataacgttcccagtagcaggatttacagccagtaaaagtcctcccaatgtagcaaaatacaaatgatgtggaatcaggttcaaacacggagaggaaaagacagttcctccacattttgacttccaaacacacttctttctataaatatctaaagcatatgcgtgctggtcatgagatccaatgtaaatgagtcctgtggttggatccatggttgccgagcttttgacagcatcttcagtagtaaacatccagtatttttctccactattacttttcagaacataaactaatccattataacagcccaccacaataaagtttccacacttagatacacatgctgaggattcaattcgatctcccaaaatctgt

SEQ ID NO: 345109 - DNA, 1000 bp, Homo Sapiens
ttttttttttttttcgaatcaaaagagtatcagcatttatttgtttaaattaaaagataactttcacataaaacttgacctttcccaagttgaagttcagaaaaccatccaacacaaaagtttagggatctcaatcatttgatgcacaacatcatagaaacaaagaaaaaagaagttcaaaaacctaatgttaagtgactagggtgctacagactggaagttcctccaacaggattagcttctttaaatattttaagtccagtgaacttgtaatgcttccacatgttagtggttgcacaggctaatctcagctggcataagcttttataaggatgcaaaaacagagggcaaggcatgcattaaaatgtgataatagcacacttctgggatacgtgaagcacgagtcatgaatccgaatgcctctggcatccatgaagtatcacgtctcagagtcagtgctttccttttgaaatatcttcaatttttctgccatacaaatcataaaaatatctggctggtaaatttagattcattcttattgtacaagtatctaaaacctttttcattgtttcttttcccactgtaatctcatgcccatcctgccccatgccattcttaaagaacagaattcggactgaggtcctctcagtaagtttcttcattctaatagaaagaacaggcttggttttccgtcttttgatatcagtaggaagcatcaacccattcattgtccaagttactttcttaattaacaacagatggtctttaatttttttgaatggatttaaaaagggctctcccgttgaaacataaacatcggcttcatggggtatatcttcaggttcgagggcttccttgccgtctgccaagaacactcgtcttgcggccatgttcagattcagcttttctgtgcactcttccagcagcaaggtgatggttggtgcagtaactctggcaaagactgttctagatccatttttgtaagctgttactttaatca

SEQ ID NO: 345110 - DNA, 1000 bp, Homo Sapiens
cctgacaggaagtaggcaccgagagtgagggcccctgacactcctgcttgagctgtgacagcatttaagggttttctgcctctgcagggcccgatccagatgagaagggtggctgcagtagggctgggcgggctgactcagtggcagccgcaggccttgaccaccatgttgcggtgcttgcgcaggatgacgttgttgctgctgtcatagtagagcacagaggtggcgctcagcttggtgggtgcacagcacgccttggggactgcgtttggcttcatcaggtgcaccagggactgcaggatggcgtggttggtggcgttcatgcaggagtccagcgggaaggagcactccccctcacagtaataggctgagtagccttggggggcgatgacccagtccagccagccaaggtcctggaagctgacgtagagctcgtgccgacggcagacctgccggccgtgggagccgtggacgtcatcaaagatccctgggagtcggttggcctgcggcagctcgttgcttttcttcggctgcctcctcctcagtggcctcactgcccgaggggtgcggatgggactcggactggccctgaagaaagtgaccacgaaaggctgttgggagcgtggggcccgttgacccagcaggccggccaggccaggatccacgctgtgcccatcctcagtctccacatagaggcggagtcccaggtccttgtgacgcttcagcaaccagcagtcactggctgctgtgacatccagcaccagccagccctcgtctccagctcggagcgtctgaagatccaaaaagaacaagtcagactccctgttggactgctcctggaccacctggaacatgctgacgtggagggtcctgttgagcaggtggatgctgggcaccttgtaaatccggaactccgcagctgtgaccgcctccccagccgggatctgggtcaggtcaaagcggaactccttccaatggggctcctggtggcccagggcac

SEQ ID NO: 345111 - DNA, 1000 bp, Homo Sapiens
tagcttataaacaacagaaatttatttctcacagttctgggggctgggaagtccaagagcaaggcactggctgattcagtgtctgatgagggctactttgtggttcatagatgaaggcttctcactgtatcctcaaatggtaggaggagtgaagagctcttttggtcataatttataagggcactaatctcattcatcagagctcagtcccacctcctattaccatcacactggtgattaggtttcagcataatttgggggggcaggcccagatattcggaccatagcaactaccttattcacaaatatccacagaatgtttaataactacatatttttagataggatctagattttaccaaattctggttctccacagtgaggtttcagcatgttttacaaagtagattatgataagctaaataagaacattccatactgcctaacattcgtactttctgttgttaaaatggcaagtgatttgtagagaagtcaatggcctcagctcatccgaccagcccagtacaattttacattagaacaatatacatcacaggtggtgtttgggccaagtcttcattgaagatttccactcctcccagactcatgaccactgcttgctcaggaaatctctcacggttattaacagtgtggggcttttacaaagcaggttgtgttggaagccaggaggaaagataaccatcttgaccctctctttgttcctgtatgcattgcgtgcaatttcatagagctttttcccatactccaaaggcactgtcctgtcatcctctccatgtaagatgagaagaggagaagaaaggaatttaacattttcatcattaggaaagattattttgtcttttctcagggcatccataagtgtacgtaaaaatcctggaatgttccggtaaatctttaacaagggataattgatacttgcaacccacatgttggtaaatggagcttccaagacaatagcatcaactgggcatcctttttc

SEQ ID NO: 345112 - DNA, 1000 bp, Homo Sapiens
tttttttttttttttttttttttttttttttttttttttttttttttttttagaggcaggatgtcattttattattgggcaaaatacattctctccactgcctaggcatgctggaggaataatgaactgttgcaggagaaaagcagcaaacattcggttaattcactcagcaaccagtgaccgctcctctccagggtgccgtgagtgtactgttccaatgtgagttcactctgaccacatctctgctcagcctatggagaggaagctgaagcagaggtggctgagcacagatgaacagacagtccactccccgtggactcacatatcagaccctgtgctctgggtttgctttatttgaaaagaaaagggatgtgtgcagaaagggaaagctctaaaggaaaatgagccagcacaagcaacccttttgccccactaccagaagctgccaggtgtgaccatgggtcttgagaggctgtcaacgcataaaaggtcttgatcttgagttaaacacaccagtctccaaagtgcccagattgaccccatttccatgctaggagtatgccaccaagacaaaggacttttagacacacctgactggacaagaagccataaccttccccagcccaacaatgacccgagatgggaagaatggctggtcctacagccccatgacatgctcttcggaacgaggcagtcttctggggccctggaggctggtctggcttcacagggtgggtgcctacttttagactcaaagcatgctgcggccagtacccaggcaccacctgccctcgtaagggctcagtgtggcccgaggacagagacaggcaagctcatgcacgggttagtatcacagagggcagcaccatcaccacatagagagtacctgggaacaacctactttgagggctcaaatgcagataggtcttctgccttgggcttgaggctttttaatggtattgtgcttgctgctgccacccctgtcggagttctcattgtg

SEQ ID NO: 345113 - DNA, 1000 bp, Homo Sapiens; identical to SEQ ID NO: 161082

SEQ ID NO: 345114 - DNA, 1000 bp, Homo Sapiens; identical to SEQ ID NO: 161082

SEQ ID NO: 345115 - DNA, 1000 bp, Homo Sapiens
gttgaaagatttttttttattctacaagaaattgataggtgcaatcctgttaaagaaatttcttttcaaaagtaaatgaaaaacccctctgaattatttatatattaattttttgaaaacaatagtcatagggcctgctttgtcctatttaactataaatgttacacatttacaaactgaaacaaaaatgcatagtacagagatttaaatgaaatcttcgaaagaataaatttgcttttcagtccactgtattttcaaaattgattatcaccaagcttggatgaaagctgtgaaccacaaaccatttgtttatttaatagaaaaaagaatgtgtagattattagcaaagtaatgccttaaaatgtatcttcacacagttgaaattttagtataaacttgtatatcaagttgctttccattatttattctactttaaaaatatatacaactatgatgttcaaatatgtattctgagccattatgttcaaacataaatatctgggaaattcaaactgctgcaacaagttaggaaaggattaaggaaaaatgatgagctacaaattatgtagttggaggaagaaaaaaatgttacttagcatttatgtctggataggtatgtattttctaatttacatacacatatccagttgagtatagacaaccatcaaaatgtaaccagttacacagagactagactaagccaacactattttctataacaggtaacagtagtgatttcaaaaattttaatatctcaatagtttcaccaaaaattatttgtggtaatatgctaatattctgaagttttgagaggcacagattaaatgagtgcactatctatgccaaactcagcaagtctataacttactgtttaattatggtgtaagtatctgaacacaatagcatagagaggcaaccagaaaaggacattttacatatgcccatgctgaccaatcacattaacatcagtgcttacaactttcaaatttaaatataaagg

SEQ ID NO: 345116 - DNA, 1000 bp, Homo Sapiens; identical to SEQ ID NO: 161083

SEQ ID NO: 345117 - DNA, 1000 bp, Homo Sapiens
ttttttttttttttttgcacagagaggcttctttattccaaggatctgatgttgcaagatctaacatttctacccccaggcattctccacctgcccatccaatctgctaaatagaaatcatgattccttcttatagactcctccgccttcccttcttccttctttaattctgcagtggggccatggggagaaagagggaagagggagaagagtagctttctcactagtccccaggcgacagccactagaactgacttattgttgaagttctaccccacaaattcaaaagtgcttcttactttctaccctcgtcccataatcagataagccccagggcaacaaggggcagaactatcaatcaaggcttcagcgcttcttctaacatttcagagactccacccagccaagaggcaaccctgttcctcactttctacctacctggcctacaccagaaactgcacccctcaaccaacctcttaatcctacttgaaacttggtcaactagaacaggcctttggcctatgggctagtcaatcttttacatctgtaatgccaacaataatcccaaccaaactacagcaaacccagaatggaactcagccccttttcttttcctatggaaggttctaatgcattcactggttccagacaggaatgcagggatgggaagaccaggtcacagacccagcttttaaaaggtaaggttaccaagcaccatcccttctagaggaaaagaaggttctggcatctggacacttgccagaagatgtccaaaacccactaaaggaagaaggggctcaactcaatagagagaaccccaggtaacattcaaacccatatgcctctgtagtaaaggatgggttaacactgtttaccatctaatcaagctaaagagtttcatgattcttccctaggccataacattcatagagactgggcagagtcagaaaaggtcacatcatctctgataaggaatgtctgatctctcccccatggagcg

SEQ ID NO: 345118 - DNA, 1000 bp, Homo Sapiens
ttttttttttttttttttgttgagtacagtcatgtttattgaaattgctgacatatttggatatgctgtcaaatcctagtgcttccagttcctggcagtgtgactttggtcagttacattctctaagccacttcctcctctataaaacagggatggttgtgtgaggactgagatgtatataaattatttggtagactgggcagcacacacaggctctgagtagattcccttttttctccctcatctcctccccttttagacagacatggacagatatgtctcaacgaccaaatgggtgaagatgctcagagcatcaaggggatggagatccagttcttgtgacagagactgagcaagtaggaggcaaagagaggtgctgatgattgctgtgagtcagagacagtgtgcagggccaggctttgggtcaggcactacacaaggtgggtcctgtccctggtttacatatgaggaggtcatggaggttcaggaaagtcacttatcttaggtcccaaaagtagccacagggaggagtcaggctctgcagcctgaattcaggcccatgccttttctgttccctccagcatgctggaagcctgtgcaatttcactaggaatgtgcatctctcctctctgagttttcccctaagcctgtcatccctctcagtctctcagcctctggcacacgatatgtggccctctctgcctgtgtctgggactccctcagagatacttccacaaagtctctgtctccctgagtcttaccttcatgttatgaacgtttctcatcagtctctgtgcctctatttactcttgacatagagggaatgggcccgaaatacagggagatacatatggagagatggtgacggtgactagtacacaatacgccaggtcaaatggttcacatatgatgagaccatcacagaaacagaggcatgaagaatgatacactaacagtaatgaacagaagctgcagcatccagtgatagacagggacccta

SEQ ID NO: 345119 - DNA, 1000 bp, Homo Sapiens
tactaccagtcagtggttgatcttctatccttatctacttatctgcaatatttttcactgttgcccactcccattctttaaaaattatcttctttcttagccccaggacaatcaatctttgattctcctttgcaatgttttgatcacttttttatgcccatcccttaaaaaggagtcatttctttggacctccaatcttcaccagggagaatgctaaaccccagctctccttctttccctgccactgtttgaccttacacaggtcgtattctctctgggcctcatttgtccctgagaaaagagaaggagctggagtgatgatgtggaacatctcttcaagctgtacactgctatgctagtcatcttaatcccattcctgtattccttcagtatgtggtagagtttcagaaagcaagtataggtctgtgatgatgctaataccaccaagaaatcattcattccagtatggggagaaaccttaaacaccatctggtctgaaacctttgttttacagatgagggaacctaggttcagagagggtacttgattgcctcaaagcagagacaggataataaggaggtctcctgggctctcacttgttgcaaaataaatttgagtgttttctggatctggctaaagtgcacaatgatatcagagtaaaacgtcatacggaaggtataaattgatctagaacacattaaagccttcccctccccctttaaaaaaatcaactttactataagaattttggagagagatttgctatcagtggtgctttatacaaaatagcataatctgataacataagacattttagatttatgtttttaaatagccaaataaaacaaaatatcaagtcacagattacatatatttacattaattcaaatgtccaaagcacagtacagtagggtctatttaatagttcacataatttaagatttacatatacacaagcacatgaaccaatattagtttgctagaacagggatttaagaag

SEQ ID NO: 345120 - DNA, 1000 bp, Homo Sapiens
gacacactcatttttggctcttggtttgtgtgtgggaacaacatgagtgggaaggaatttctgggtgcagaaggaagcagccggggatttgaccaagcagggtatcaggcaggcatgagagcagccaggacagtggtctacaagcccagcacggaggttgtgaagacagtgacaaaatcagctgcccagccctcacttctccccagcatccatcccacccagttttcccaaaagcgtggactttcatgtaactgttagtcaccatgaaggggtagcctgccctggcacgagatgcccagattatcatgagggctacatatgagaatgggagactgtggacaagattgccctgtctcccctctcccccaccccaagggatgggatgcctggggttatggaattaaccagccaaactgggattaaagactcaaggcatcttagggcctgctgagcagattggatgcagggaatgtacaattggtgctgttgggtggccagtgcataattggacacagactttcaggacctgtgtgaaatggagatggggaaggggcaacctcgaaggggctagatgacagttatagtctcagataggcctcaggtagggagggtcaggaatagagaagagaggacttaaaggtggggctttggaggggtgtgggctggagaacgtagactggggaggaagggatggggtacaagggtaggctgggccagaggagggaggggcgtctcaggatatgcttagcacccgcatgatgttggtgtagccggagccaggtcgccagcctgtcaccacaatcaccaggtctccaacacggaggaagccacggagctttccactttcaatgccaaattgcacccggcgatctacatcatctgcccagatggcttctggaggttcacggtaaagcaaggggaagactcctcggcataagtggacctggcgggcagcctgggcagagcgggtgacagcaatgactgctgcccgaggtcggta

SEQ ID NO: 345121 - DNA, 1000 bp, Homo Sapiens
ttttttttttttttttttaagaatggaactctactttattaaggaatactgagcatccatcctataagaactaagcccattctgagcacaggccccatgtgtaggaggaggcagtttcccatttcctggaaatgccttatctcctcttccttcacagcaaaccccttcacctgccgtcatgcccgtcttcactctccaggtgcgaggatcccgagaacaaagccctggtagcatcctgagatcaagggcgacacctgtaggacaaactcctgattcaagcccaaatatctccagggaacagatatgtcctcaaagttaacacttctttaaaaataatgttcttggccgggtgcgctggctcacgcctgtaatcccagcacttcgggaggccaaggcgggcagatcacgaggacaggagatcgaaaccatcctggctaacgcggtgaaaccccgtctctactaaaaatacaaaaaaagaaattagctgggtgtggtggtgggcacctgtagtcccagctactcgggaggctgaggcaggagaatggcgtgaacccgggaggcggagcttgcagtgagctgagatggcaccactgcactccagcctgggtgacagagtgagactccgtctcaaaaataataataataataatgttcttagtatacaaaagctacccgacaggattctagctcggcatatatcaaataaaaaataaaagaagagggaaacaagtgcatagaataattcagaaattatggggctatgtacctgttgggccaaaggcacaaacccaccctgctgtgtgcaggactgttttactcttgatgagacagaagttaccatccaccatgggttggcagctagggctctcggacttcactacactctccaggacaaaaccccacgagaacaaatgtgttcccctggtagctgatctaccacaggacagtaggcagagacaaaagcaagcactgaaatgtcctcggtttacccctttcctga

SEQ ID NO: 345122 - DNA, 573 bp, Homo Sapiens
tttttttttttttttttttttttttttttcggtttgcaacacattcattttattgtcatcaacatgggaagcaccctgctggtgagatctctgaggtctggcagctgggcctaaacttagttgctgctcagggagataggggagtagatgggcgccccttactcagtggttcctccagctcgctctcctgactcagggggtcgtgctgggtcccctcgctcactggctcctccggcggcagctcgtgctgagggagctcctggctgggctggtcgctggggccgggtgccgctggcccgctctccgcctcaggtgccgtcacggccgccatctttgtcgcagcccctttcttcccgcgtctccctccacgaactgcttctcccttctcggccaccttggtagtcttcttcttcgggccactggggctcggctgagaggaggacttcctctttcctgtctccttggccttggccggaggtcccgaggctctcggctttggactcatctgccgcagctcaacgtctcgcaacggtcgactaactccaggctgcctggcctccctgtgtatacccc

SEQ ID NO: 345123 - DNA, 1000 bp, Homo Sapiens; identical to SEQ ID NO: 161087

SEQ ID NO: 345124 - DNA, 1000 bp, Homo Sapiens
aggctggtcttgaactcctgacatcaggtgatccacctgcctcggcctcccaaagtgctgagattacacgtgtgagccactgtgcccagcccttgctttgttttcctcaccctgaatttgtgtccctaggatttctgtgttctccttcccctttttgtctttcttagcaggggctgccctgcctgtaaagctctccacaacctgtctggcttccctgaattgtactagagaagactgtggcttcctcacctgagaccggaatctccaggaggtcactgggttctgaccatacctgcaggatatgcctgcgagagccatagcatctgagcatccacctgtggctgggggtcacagggcccacagggaacagggcctggaactgcccactgggggtcagctgtgagtccaaggtccaggagagcttgtggtctccttcctcagtcagaatgaacctgtcgaatctcagccgtgagccacactggagggtcacgttctctcctgaggtcaccacaggactgggcagggctgagagggtgggtttgttgtagaatcctgtcaccaccagctccagggggtcgctgggctctgaccagcctgcagggctgtagtagtaacagcggtatctccctgcatggtgctctgtcatggatgggatggagaatctggccttgttcttgggctccagtgggttctgtgtgtcccagggttctgggcttccctctttaaccagacggtattcctgggcctccagggtcccctgacaccggatggtcacagagttcccccggctgatcacagagcctggctcagcccagagggtggctttggagaggttcccgaggcagagcagaaccatgagggcagggctcacggcgtctcctcccactggctgcagctgtgcagatggatgagaccatggtgccatggtcagtgatttttcagccctggagatgcttcagggaagatgcaggtccatgccacaggcagactcagatcagca

SEQ ID NO: 345125 - DNA, 1000 bp, Homo Sapiens
ttttaagtaagttccggggtacatgtgcaggatgtgcaggtttgttacataggtgaacgtgtgccatggtggttttgctgcacctcaacccatcacctaggtattaaaccccgcatgcattagctctttttcctactgctctcccctaaaaattaatttagtttatttaaacaagaaataactgtaaatggaaagtttcccttgatttcatagatattattaaaattaggtattccaagagcccgagactgatgaatcaaagccttccgtagcattgatgagagatgcatcagtgagcaagctagtgtaaaattaacctgagcttcctgctggtgccacagcagggtgcttcagggggaagccagttttcagcacgaatgggctgctgtggaaccctgtttccagttgtcaagacagacttggcatctttttccaacattctagtaacccaaaggaaggaactgagataactactaatggattacttagagcgtaagtcattaaaaacaggacacaaaactgaggtataaaaaggaatatttatcttttaaaaatacaactttgaacactactggcatctcatttacaaagtatttttgtgaaatactctccattggctttgcttgctcagtacattcttttatcttcaattgagactcaagggagggtatgcttgcattattataaataccacaaccaccaccacacacaataaagaccatctctgcctcaggacattcgccccaaacctccatcctctctgtttactttccaccaagcagaagtttctgaatggtccactcacatgctgccattgcgatttgccgatgggcactaccaaggtgtctctggcaattcgcactccaggtggagctgacctatttgtagaaagcctcacaaaccctagctcattatttattcattgattcattactattaatacttatatcaagtctttgcaaacattcagcatgaagtaaacatagtatttacagcagta

SEQ ID NO: 345126 - DNA, 1000 bp, Homo Sapiens; identical to SEQ ID NO: 161089

SEQ ID NO: 345127 - DNA, 1000 bp, Homo Sapiens
gccaataacttaatagtttattagtcagtcaacaatattacaaatatttaaaaattacttaatataaatagttggcagcaaactattccattacagagttaaattaccagtacaacagacagactggagatttagacacctggaagataacaataaaataaactaaaatatttaacgaaaaatttaagctgaaggtgtttacctagtgtccataaaagcatgggttctctttttatttagaaaaaaataaaaaacggctttaacaccccattaggaatataaaataaaatcaactgaaaatattaatttgcatatcaaagaaccatttataattacaatccaaacactccataaaccacttgtgcgattctatacagaaactgggaattagaaactagttgctttaatattacaaagatttcagctccaaaaataattcaacataaaataaactttagcaattagtgtcataaaattatatatttccacataaaaatacaaaataatattaatgacaagaatatgaaaaattattccaagtattttactactattaaaataaaataaaacccaaaaaaacaaaatagaaatatgcatgaaaaaagtctctccttttgttagcaaaacactatccaaaataactacaatcatttacatcagtacaaagatttctggatttaaaaaatagttgcaatgacaaaaggggtatcttttctgacagtaaaaaatgacactgtggataaaatctgcaaaatatgcaatgaaaaaaataaatttgcattaaaaaggtttacactgtttttttttatacaaacattagaaacagtattgcacatcacaacacagaatcgaggttagtcagccttccaaaatgtgttatattcaagttttgtagcatctttgaggagaggctctgtgcagccagatgcaacagggataaaatatcaagtgttttccatacacaaatatataaatgctaaatgtttccttcttaacaaaa

SEQ ID NO: 345128 - DNA, 1000 bp, Homo Sapiens
ttttttttttttttttttgccaagaggagacagcattctttaatcatgctggacggcagggcgtggcggggtcaggcaggggcaggatcaggcagggtggtttatagcacaggtcttcctggcacttggtcagaccctgtttccgtcatctggccatggagccacggctcctcggctgtgagcaccagagatcaccccccggggcacctcagccccagagtctgcatgagcaccaatgggcggaggccgcctccctctggggagaagggcaggccacctgggtttggaaggctaggggaacaccaggccaccccaccctggaagaagaaacggaaggcctgaggtccctcctttgctctagctccccagacctgctgagggctctaaagcctggggcttccgtggcccttctcctgcaggtgtttgtaaaggcagcaccaggccggaggagggctctgagacgaggagctgcccacccgggccttagcaccttgataaagcctggagagtcggggcactgggccggtgagaggggcatgaggggcagagagcacctggggacagacatcagtgtctgagggcagctggaggccctggggaaacggaagttcagatgactttggtggaagggactgagcaaggccctggcagagccctgggaggaggcaggaaggggatcccagtgaggagggcaggtcttctcgcaggatgccgtatcagctgagctctccagccgggagggtggcccagaggccctcagtcgtcctcggccttgatgaggtggccgctgaaggtgatgtaggtgtcgaagtcgttgctgtagatggcgttctcgcgctggcgcttgaagagccgcacccagacgcggtccccgtaggccaggtccagcatcacactctggctctgcatgatgctgcgctcgctgggctgcgcgtacaggatgacagcctctttctggttatgcataatgtgcacgtacgtctccttgtaattccagctg

SEQ ID NO: 345129 - DNA, 1000 bp, Homo Sapiens
tttttttttttttttgacttttaaatcaaacctttgatcatgtctttatttagatatagcccatcttgttgcaaaacagatatctcagcaacttacaaaaataaagtacaatagcataaaaataaaaagattagggtaaaggtaaaagcagaaagctagaatgaagcgagtctagtaggagactcagcacaattggaaaaaaaagggtctcgaatttgactttgagcttcccagcggccaaaacaaggaagaaaacatgactggttacaagattcctaccaacagttagtctgggactctggtacaaaaacagacctggtttataccttgactctactgcctgttggagacgtgaccctgagcaggttgcttaagctctctgaatttgaggctcatcacctgtaatggggaggaataatgccggcctcggggctcctgggggggattaggggtaaagctctagaagggtcttgtcctcactaagctgcatgttcttagctgtaagagggagttcacagccctaccctgagcgggagagaacttgaccaaacctgtggcataaaagaggtggggctggattccaacccagggctccctaactcccagccagggctctctgccagccatccagtgccatgtcctgtcatgacagcggcttccaatgctatcccagagttaaagacgctttggaacacatgggctttcaagagccctcaaatcattcccaggaaaatcccccagctccacctttagcactgcccgcaaggcgggagctccattctctaccccaccgcagagaaagccgattaaatgtaaggcctggacatctctagggggaatgcaagaggtagccaaagcccctcatgagtcacgttgttcagaaacacccgagacagcttcctttgccttcctttgcctttgtagacgaggtcagcaagaagacctggtccccctcagtccaggccctcccttgtttgaagtaccttttgccaaaagcaac

SEQ ID NO: 345130 - DNA, 1000 bp, Homo Sapiens
tttttttttttttttttttttttttttttttttttttttaaaatagttttttaattttatgaaattaaagctgaagaaaataactgatttagaaaccataataaaaggacaaatatttagccagagatatcagttcctcctgaaaaaggatatttatctcctctcactgcagtttttctcaaggtatcttaactgatttcagatagaaattaaaattcaccttaaaaatagaaacaaacaaaaggacaacttaaactgacattaactaataaaaatatgttcaaatttactgacagaatcatgggcacttcatataatacttagactctaccagttttaagtaaaataaataaggaaaaaattataattacaaagccagtctttccccttggggaaacaaaaagccacttttgaccaattgctccctacatatacatatactgtatattattataagcttcttcagagaagcaaaacatctttgtcttcccgacactggattatctagcatgttagtttttacatcaggaaggcaactgcaagtgttgggcccaaaagtatttctggtttactcttgaaaagaccactgaatatgcttctatacatactgaaccaggcaaatttatgcagtgtgttcaacatcatctccttatcaatacggcacagattccgattctttctactgcacccccaaggaattcaaagcattattggtgcaattaataaagagaaaatgcgtgccaatgactggaaggctgttttaaaagaggagctggtatctctgatttcacctccttgttgtatggaactgtacagacagcatgatacctgagcaaataaatcaactaccatgatcggaagggcttgtcaatccatcgtctttgctttatcgtgtgcaaagtgtgctactgccccctgagcttcctgcatttctcttttcttgaaaaatcagtgcttgatcctttccaaaataaccagagaagaaatgaggcagaaagtg

SEQ ID NO: 345131 - DNA, 1000 bp, Homo Sapiens
ttttttttttttttttcttttttttttttttttacagaaaatttttagtaattttattcatttttcatagctttacagcttttatgaaaataatgatcactgtaagtataaaatgaaaattaaagaaaagggataataacccaaaactctccctggccaaaaaaccagttagcatatggcaaatatccttccacacattatcttcaggcatatattcacaatgaaaggtgatcatttatattaactagatcttaccaagagagccaccagccctatttctcccctaaatacgagttctattcctgttcatggttctgtgttatcatcttgatggatttgttagaaagattccaagtgtgaacaaacccccttccactctcagtagttttacagggtttaccaccagcatggactagccaaaaacttgaagatgtgcattcagacaaaagttggtaacacatttctcatttctaaagctttttaccagtatggactttctgatgatatgtaagacgtgaacggtgacggaagtccttatcacatatgtcacatttgtatggtttttctccagtgtggactctctgatgggcttcaagacgtgcactctgactgaagcctttaccacactcttcacatttaaagagtttttccctggtgtgaacacccaggtggactcgaagatttgaggggagactgaaggccttaccacactcctcacatatatggggtttctctcccgtgtggaccctctgatgatggcgaagattcaagctcctaccaaagcctttcccacactcttcacatttgtaaggtttttctccagtgtggcctctctgatggtatataaactgcgaactgtatctaaagccctttccacacacatcacatttgtatggcttttcccccgtgtggactctctgatgggattgaagaccagaggactgactgaagcccttaccacagacaccacatttgtatggcttctctccagtatggactc

SEQ ID NO: 345132 - DNA, 1000 bp, Homo Sapiens
ttttttttttttttttgtttttttttttttttttttttgaaataggcttgctcatatttaattagcttgaattgtgttacaataaatattatagtgctttaagaaaaatgtctgaaacctttgaggcaggtacagagggaaggttttcccatataggctgcacgtgtgcatgttcgggcccacgctaccttcaggctgatgtctgtccagtagatgtggttgctggacacatcaaagtccagggccgaggcctccttgacgccgagagcaggatggccacatcgttgttgttggtctcgagggagatcctgtggatggcggctctactggtgaagaccaagaaggccttgggcatgatgcaggtcttcatgtcactcagcagttccaggccctagatggggcagccaaaccgggttgtgtggggcgtgaagaagcacaggtggctgcacccccattcctgtccgcatgagggttggttccgacgaccttgtccacgttcacagctttgagccccatcaggtcgggcagctggtcaatgatgacgtcccggttggccttgaccttgtgtacccgcttgatgctgtggtgctgccaggcggtccagtagatgaagtcccccagcagggtgaacctgaaaatgtgtgggagcttgtccttcaggagggtctgcctcttcgtctcatcgacactgatcgcctcgatcttatctgtcttggcatctccccagtagagcttcccttcctgcaggtccagggccaggccgttgggccacccgagggaagcattgaccagcacgcgcagctcctgcctgtccaggttggcacgcttgatttcagggttctctccccagtctatccagtacgtgaggcccatctcgggatgcagtgcaatggcacggggctcgtccatgtcctctgacaccaggatcttgtgggaggtgctgttgaggcacgtcacctcgatgtgttcagtgcctgtgtgggtccaatagaggcttcgg

SEQ ID NO: 345133 - DNA, 1000 bp, Homo Sapiens
cttttttgttttttgagacagagtctcgctctgtcacccaggctggagtgtggtggtgcaatcctggctcaccgcaacctccacctcctgacgacccaaactttgtactgatgttatagcattataacttcacttcctctaactaagaaacacagtcccaagaggggaagtatccttaataacaatattcctactcttgagacctagagtatattaatagaaagggtgtatatctttctaatgagaggaagatttagagacaaaatttgtcatttgaggccctctggaggggatcccaaatcatattttaggatatccaagaatcaaggttttggggtctgtacgttaacataatactaagttgttttctctcaatgagcctgtgggttttgaagtgtgatccatgattcttactggaatctagagaacaactggttactaagttccaaataattttcctaagcaagaagactgctattatgatcccactaagttttcctgtatacatcacattttctctaaacttgaatcatttaatctatgcatttctgggctgcacatgtcttcaaattatgggtgatgatgatttgctattcaatcatcatgctcagcactggagacatgcctttaaatttggttttctcttcctagaagcactatttacagtagccaaaaggggaaacaacccaaatgtcgatcaacaaatgaatggatgaacaaaatgtagtacatacttacaacggaatattattcagtcttaaaaatgaaggaaaattctgacaaatgctacaatatggatgaaccttaaagacatatgctaagtgaaatacgccagacagaaaaggacaaatgctgcatgttcccacttatatgagctacctaaaatagtcaaattcagaaggacagaaaatacaatggcggttgccatgggccaaggacaggagcgaatggggagttattgtttaataggtaccaagtttctttttggaatgttaaaaat

SEQ ID NO: 345134 - DNA, 1000 bp, Homo Sapiens
acattttatcatattttattcctaatatttttcctcagaaagatacacacaactattttctaagatatatgacatttctcatgggttcattaatttatttgtatttgaggagttaaaaaatattttcagcttgggtttatgtacatttaaactatggttatgggtttagatgatttccttgccataaaatgaatattctatcaacagtaatcagccatagagctatatttaccatgctaaaggaataaaacacgttttatttggagatgagcaagaatgctttatgggcttccagtataccacaaataagccggaaggagaggaaatagtaaagcagaaagactgaggatacctggagggcaattccaggatatgagagcctcctggatttgtgcttccggtttggatgtccctggttgaagccccatctcctttctaggatgctgctggctttgattcctctacctgctgtccttaacattcacaaacagcagttttcaacagtgcagatgacataggctgagcatggctcacaagtgttgctcgaggtgcatgtggttgaacatgggctacaggaaagcctgctgtcctcgctgtccagcaggccccggtacatgttgatctcaccctccagccgggccttcacgtccaggagcacctggtactcctggttctgtcgctccagatcgcagcggatctcggccagctggttctccaggttatcgatcaggcactgaatctgggccagctgggagctgtactgggcctcggtttctgccacggtgcattccagagattctgtcaggctttgctgtgcttggagctcaatttccagagcactggctgtgcgtttcagttccaagatctccgtctggcagccctgcagctgctccgcgctggacagttgctgctgattcaggtcttctgtctgaacagccaaccattcttcagcttctctgcgattgttggcaagcaccgtttcatactgacagcgcatctc

SEQ ID NO: 345135 - DNA, 1000 bp, Homo Sapiens
gaggagttcagttatatgtttgggattttatttcacctctctgaatctcaggttttgcctgtattaaatgaatacgaaatccctgcctgttgattctcttgggttgttgagaaaataaatttaaaatgctttaccctagaagtgtgggctattgtttttgttttggccagtttttgtttattttgtttgtgtgtcagtgtgggtgtcgggagattctgctccacgagctcactcagggctccaggcttggtcctgacatgctccctccatcttgtgcccctctcttccctgcatcctccaagtcctctcccttcttcagctgatggggaaaggagaacaagccaatacctggagtgtctcatggaccaggcctggaagggagacctagggtttttgctcccattccactggccatggctctgtcacatgctccacccaaaccaagggaaaccacagcctggcagagcacccaggaagaagaggagaatgcggatgtttgaaagaatgaatccatttgtgttttaaccaacaaagaggaactaagccttttctgcatttttttgcttaaatataaaggttgtgatataatcacaagggtccttaaaaggtggaggaagtgaaaccagatgcctgtaatcccagtgctttgggaggccaaggtgggaggatcatttgagcccaaaagttcaagaccagcctggtcaacatagtgagaccctatctctacataaaattttaaaaattagccaggcatggccgggcgcagtggctcacacctgtaatcccagcactttgggaggctgaggcaggcggatcacctgaagttgggagtttcagaccagcctgaccaacatggagaaaccccatctctactaaaaatacaaaaaactagccaggcatggcggcacatgcctgtaattccagctactcaggaggcagaagcaggagaattgcctggacctaggaggcggaggttgcggtgagccaagatcacactgtt

SEQ ID NO: 345136 - DNA, 1000 bp, Homo Sapiens
tttctttgacatttcacattttatttttagtaccatatcctttgtcagtgctcatcagaatgcacattaaaatgggtttattttatgcatattactgtaccacaataaatttattacaaatcacatgacctttatgttagacattttaatacatcaataggaggtcacgtttcattcagaaaatagcagtttttccctcaaacaccttcaggtttactgtgggttcacatagcctaggttaagcagttggcaacattttgcttcactgtctggttttacaaagctttcttgtgacaacaggtataaaagagtctaccgagttcaccaagacatctgcttcaaagagagctgtgaaagcacaagcctcaagaagaccccaaacaggtgcctctggggagcaggcccatgccgtgtcctgcatgtagcccacagggtgatggggcaagggcggggtgctatgggatgctgcaggcctgtgggctgagccaggcggtctactcgcccagataggcagcccctgggcagccacgttctgctacgaaactgtatgtccatatatgtgcatgtgagcatacccagaggggcacagccgggcatgctgggtgctggggggggtcactctggttatgcatattcacacagaacatggtgctacaattgggaagcacagggtgttacggacagccccgagtatttaatggccgatatagcgcgtcgctctttactttttattcactcacacccaggttctttccacaaagggttcaaggtagttacaagaattactactgtttggcgtttgctgaaagaagtacgtgagaatattatatgctttagaaaccacagagtcgaagcctgtcatcgtcctcatagaccaatgagtagccacacgtacttgtttggcattaccaagtgtccgggcaaggccgcagcctgcagctcaccagccgtgctgctcggcctgtgcacgtcaccggctcttccctagggtagcttttgc

SEQ ID NO: 345137 - DNA, 1000 bp, Homo Sapiens
tttttttttttttttttttgaagaaatgagtacttttttagtttattttaatgcctttaagtttttggtgacttttacatttggaaaattacataaggtaaattatttgtagagattacaaagttagccatccatatgattgcacttttactataaggagatgccacacagttctctgcccttgatgacctcatattatttttgctgcaagagaaagcaaacaaatgacaaaaggtgaatatgaagacaatggaaaatgttatataaataattgccactcaaaagtcattctttaattcctgacaaattttggatgtcaactcaatgaggacaaatttgtgtaaggataaatttgtcaacttatcacagatgatggagagtgactttaaccgaatcatttctcttctctggtcttcagtttcttgatctgtaaattgaaagactcagtgtagctggagctctgatactccttcttcactgcaagattgcatgattttgtgaggtacatgaatcatttcacatataagttaaaaagtaatgtacactttcgcacttattccagttaataaaatgaaattataattgatataataaaaagtaactcatttgataaatcccctatatatgttctcatagtttcaaaatttatattttattttcttttgattctggaaaacaaattaaggtcaattctgaatataatggtaaaatgaatcacaactcagctattaagaaaaattatatattagccttctttattttcttctctcctttttttttttttttttttttgagacagggtctcactctgttgcccaggctggagtgcagtggtggcgcaatcacaaatcaccacagcctcaacctgctgggctcaagcaatcctcccacctcagcctcctgaatagctgggactataggtgcacgccaccatgcctagctaatttttgtattttttgaacacggatttagccatgtttcccaggctgccctcaaactc

SEQ ID NO: 345138 - DNA, 1000 bp, Homo Sapiens; identical to SEQ ID NO: 161091

SEQ ID NO: 345139 - DNA, 1000 bp, Homo Sapiens
ttttttttttttttttttttttttctccatagacaaatctcaacactttattcatcctgtggcagcaagaaggggacatggccccaagatagccaatcaggtgaggtggctggagtatgtgttatctttccagatagtacatacagactgatcatgcagaaacaggaagggaagcaataagttaaaagccacataagttatgaaaaaataatatatactttatatgtcttgtatccccactgaggatttgctcccttggaaaccaatgaagagcctgaggaaaagcaccaatcagcaccctcttttgggactttggggatgagaatctctgagttcccatggccagagagtcagtaaccctccagtgctccccacaggcctggagggccttgaggcctgggatgggcccagacctctggccaacatgtcctggaaaatgagatgaatgaatctaatgcagtctagaagaggaggtgaggcaaggggcagggaggggagaggagagtgaaggagggaaggaagctgtgcagtgggaggctggtgccgctgggatgcctctgcaagcctcagcattgagagccaagaggaggagataggagtatgcctgccaacacccctgtcttctggtgggatgtggaattttcctctctggtagaacccttgtaaggctgtcatttgggccccacagctggacctcaagggcttggaagctcccagacttgcctggactgtgccttcttcctggcctgctggaggcagggggagtgggcatggagggaggaaggggaaggagtgagaagaaaggaggagctctaaccccataggtgtggggggttcctgggctcccccatgaatgccaaggaggggagggccaggctatttggcccagtggagaggagaacagaggccctgagaagtgagattcttgggaagtgggcctggggcttcacggcaggggtgggaccaggggtctccaaggcctggtgcaccaaagcccggt

SEQ ID NO: 345140 - DNA, 1000 bp, Homo Sapiens
gaactttgagggcatttattgcatataaattatacataaaaattgttttaaaaaactctaaactgccacatagaatcaaaaattgaagtatttcaggttctgtttcttgtctttacaatcatggtataatcattgtttatttcaaatccatcatttaaatgcaataatatatagtactacaggggctggagacacatgagctgacaccatatgtactgagagccaactatatagcaggatattccctgaattagtttccatgtggagtaaaatgattattgaagaaaaacagtacaaatgtgctactttgaagcttacatatatgtattatttaaaactcaacagtaacctcagaaattgtttagaacctagttcaataaaatattttgggggatgaatactttatcactgatattatttagaattgctggctcatggtggtaataaaaaatagaccaacttgtagtcagctttattattgttttcaaattctttccagtgtaccctctattccctgccctttgcgggatagacttgttgtctcatcacctgtccttgatattctactgctactcctcatcaacaattgtgggttactgggactctagaataatatcacaaagccagaggccagtctgacttgcagaatctttgaaaacctcattattattcaaagagtattattgattgcctaccgcaaccggggcccattctaggtgctagcaatttcaggtgaaacagtctctgatctccaggacttaagttctgataatgtatattgacattgtgagtgcaagcaatagcattttctccaacagttaaaagtagtagccttttctaaaagttacaggttgtcctctcttccttcccctttgtttatctttctcagtgtcctcccaggtgcacccctttctcccagcaccataaccaatcacatttctttaagtttcaagtaaggtctcaagtgcaggggcatattatcatcttagaagggagaacc

SEQ ID NO: 345141 - DNA, 1000 bp, Homo Sapiens
gagcaaaatgcacttttttattgattgaaaagttgatgaggcaaacaaatcagggaaaatggctcccttttcatttccctctgagcagcaaattaagcgacttaaaagagctttgaatgagtcaacaacaaaatgcccctaaatgtggaaatgtgaagtgcaaacatttcagcctcactgtcagtgcccaccgaggacacagcctgcctcccgccctgggaagctgggggctgtggaggaccccggccacttggacatccagccacatcccaaagtctccaaggggagatggggtccccagcaagcctgtccggattagccaagatgaggggcttcaggagtcaacacagatggagctgccaggcatggtggctcaagcctgccatcctaacactttgggaggccaaggcaagaggatcacttgagcccaagagttcaaggccagcctgggccacatagggagacctcccccatctctaaaaagatttttaaaaattagccaggtctgatggcacctgtagtcccagctactcgggaggctgaggtgggaggatcgcttgagcccaggcattagaggctccagtgagctatgatcacaccactgcactccagcgacaggtgagaccccgtctaaaaaatatctcacaacaagagagagggagggagggaggagcctgcaccggctgaactatttcagcgtcctggggctgctgtagtgcaggcttacaacatcagaaatttattctctcccagttctggatgccacgagtccaaaatcacggtgtgggcagcacgcagcacactccttccggaggccctggggaggatccctccctcttccagctctgggggctccacgcccctgctgcggccgacgctccagtccctgcctctgtcctcacagggcctgctctgtgcatctgtctctattctgctctgctcttcatggaggaacaccagtgactgacttgggactcagcctcaatccagggtgacctcg

SEQ ID NO: 345142 - DNA, 1000 bp, Homo Sapiens
ttttttttttttttttgccagacatcaaacccatttattctgaatcttaaattatgacttttatcatcaatattttggttacattgttacacaaagaacaaattaacatctggtttgaggtctcctttttgattgctttgggattagtgacatttccttggcatatgcattacacacccatcaactctcagctgtgtcttaataatgttgtacgagatgccaaaacaagaaggatttgtaacagtgctcctggggtacctccaccaatatctttaaccacagtgactttcaggtggcttctcgccaggtgcatgcaggagagtgtcaatgcatccctttcctgggcagatcaaaagaggatccggaggaagaggagctggtctgttggctttgaagcacctgatcactgtgcgctcactcagaggtggatccaaataaattaaatcacccacagagaagtcacagcacacgtggcaaagacatagtatgtttaggggacttggtcattacagcttccattaccaacttatatgattcaggaccactcaggaacaccaggttcttaaaggattctgaagtataaattaaaaaaaaatgcaggttgctattaatagttctaaaggtgcatcttagaatctctttgagagaataagcagaattgtccattgtgttacttttactttgataaacagatactttttgtttagtttggtctcgtctaaaacaaaacatacaggtattttaatgttttgttttgtttggtcttatccaggaattctatattttctctcctcaaccccagcaagaaaaataaaagtggggttgaggagggagagctgagtgtggaaagaaaagtaaagcttttcaagaaaaaacacaaacaatacaaaacaaaaattgcagtccaatcgtgcaaaatttgcttctctggataaagcacttcttgacaggttcccaatgtccccatccccctcccaagtcctcccagccacatggtggg

SEQ ID NO: 345143 - DNA, 1000 bp, Homo Sapiens; identical to SEQ ID NO: 161092

SEQ ID NO: 345144 - DNA, 1000 bp, Homo Sapiens; identical to SEQ ID NO: 161093

SEQ ID NO: 345145 - DNA, 1000 bp, Homo Sapiens
ggtttataaacaacagaaatttatttctcacagttctggagactgagaaggacaagattgaggtatcggcaggttcagtgtctggccagggctcacttcctggttcaaagatagcaccttctgctgtgtccttacatggtgagatgaggggatctctctcaggcctaattcacaagggcactaatctcattctcaaatattccaccctcatgacctaatcacctccccaagccccacttcctaataccatcagcttggaggttaaagtttaaacataaatttggggggaacacaaacattcacactatagcaggaagatttgaatttaaagcaattcaagtgaaaaagataaagaaaaaaagaagatgaaagattattatttagcttgcattaatagcattatgatagtaagacaaagactgtgttagataggtaggtctcttttagatgtaggtgatgaaaagtaatagaaaactagctcagcacaggagggatatattgggagggtgaccaggagaaggcagatgagcctcaggaccacttctcctatagccacttctcgcttggtacagaccggcttctgtgagtggcaaaaaaatggctatggcaaggttctcgtcactagtttgctccttttcaccaatcttggtcttttctattttttctcagcacatggaaagatgatatgtcctagcctgccctacagttaagtgaggctatggattgaaatctggcgaatgtgggtggaagtgagctgcatcactttcagacagtggccattagagctggggaggcttcttcatgccctcgcccaccccttcattccttccactctctaccttgcatctgtaatctcagccacccgggaggccgaggcaggagaatcgcttgaacccgggaggcagaggttgcagtgagccgagatcgtgccattgcactccagcaggttgtgtcccctggggggcagggtaggggggtacttaacctctctgctcttcag

SEQ ID NO: 345146 - DNA, 1000 bp, Homo Sapiens
gtcaatcaccacgtttactaaagggtgaggaaagatgtaatgtaaaaaatgacttcccaacaattctcaccctcctaaggtttttcttcattgtgagatcacaagggatcatcaaagtactgagcagaacagcaacaatgctgctgcatatcacacatcaatagagttctctctactggataccatccatattcagcaagaccttagagaacactgagggctttctctgtgtctgctgcatagggctccagggtgagttcctgcctgccgggttgtgatgagatgctgattgcctagccacattcctcaagtcatggacatctggagaacgagaggtctttcatgtcttcaacgtgaatgagtgtagctgacagcttccccacattctttacattagaaaggtttctcatcagtgtgaatttgagtgtgatggttaaggcatgaggaattcttaaaagattttccacagtccttacatacaaaaacctgctcttcagtgtaagtttttaaatgttcttttagtagataaaacctattgtatgctttcccacattccttacatttatagggtttctgcccagtgtgaattcttccatgtttatgcaggtgagaggaggcacggaaggctttcccacactcgttacatatgtaaggtttctctcctgtatgagtccttctgtgttcgataaggtgtgaggaggaagcaaaggctttcccacactccttacatatgtagggtttctcaccggtgtgggttcttatgtgcacgataaggtgtgaggatgtggtgaaggcctttccgcatactttacattcataaggtttctctccagtgtgagttcgtatgtgctcagttaggctcgaagaaacagtgaatgttttcccacagtccttacattcataaggttttattccagtgtgaatatgaatgtgcttattcaggcacgaggaatttctgaaggatttcctgcataccgtacatgtaaagggcttctcctct

SEQ ID NO: 345147 - DNA, 1000 bp, Homo Sapiens
ttttttttttttttttttttttttttgagacataataaaatgggatttattttaagccactaaattctggggtggtttgttatacagcaatagataaatagaacagccttcaacaacgaacgtttgctgagtgcctactgtgtcccaggcactgcataagactctggagaaggcacagcatttttgtctctggattcaggacctgctaggagcctttaacttcctccccgtgcagtctgaaccaggcctgagcaggagcgtgtggcactcggtgtcgtctctgcagaaacggcatcaagagcaaggctgatgctctcatagctgggtggaggccaggcgggctgggtgctgagcagggcatccctcgatccacttggctccagggcttcctccgtagggtatgcaggtggtgttgggggcccctcggccactgggaagctcacggcttcctcgtaagtggggatgtcaaccactttgggggtcctgcagctctccttctctgaggactccacagtgaggtagtacaggtctctggagaggtgataggggtcccatcgaggtggccctgggatgctggccttgacggaccacagcaggccaatgagcagcagcaggccacctgcaccgcagcagacgaagctgacggacctgagcagggggctggggccctcaggcaccggatactccgtgggtggggccagctggccaggctgggcggttgcatccccttcgctccaccaagcgaagcagagcgtcccggccaccagaaccactgtgccgctgactgtcatgcaatagcggagggtggaggccaagtggctcccgtcacacatctggggcagggccatcgggaggcgggcagcaggcgctgtccaggcgcgcagggagctgggcgcaggtgaaggtgtggtggtgaaggacggcagggctgagcgaccctaccagcggcgaccctcgggtctgcaggaggcgcgggtgttaggggcggaggggcctggcc

SEQ ID NO: 345148 - DNA, 1000 bp, Homo Sapiens; identical to SEQ ID NO: 161096

SEQ ID NO: 345149 - DNA, 1000 bp, Homo Sapiens
tttttttttttttttttttttttttttttttttttttcaaatattgctaatttattccttttgttagattcactaatttttaacattaaaaatgacttgtacactttacaaattaaaacattagatcacaaatgaaaatatgctccagacatctataggcatctgcttttctttatactctactaaatacataaaaaaaaaaaatcttttaaaaacagaaaatataatctcataccaccccctacttcctctatgtctctggatccctggtaaaacagctggcagccttttctgtttccatagcaaccacatcatcattcagttggcctgacaacactttggttaaaaaaaaaaaaaaaaaaaaaccacagacagcaaatgtttggaattttcatttctgagcatccatccctctcctatgtgcttttgcattttacaaattttgcaataaaaaaacctatagagtccttattagccagacgcaacatgtcttctcttctggcctctctaagagagtccatgtcagtgtccggtaatggcacagccgatggatcaaatcgctgcagctgtttcaactgttcacatgagagcccagctcccctcattccttctcctccaatctgcggttcctggggctgaagctgaaggcaaggaaattttgtcagggcccaggcaacctgttcttcattttcggccagtgttatagtgcacgtgctataaaccagcacaccctctggcttcagcagctgaaccgctgcagtgaagagttttcgctgtaatggctgatatgatgccacttccttcacagaccaagtacaggccatgtttggtctctgtcccattccactacagggtgcatccagaagaattcggtcaaaggattctggtagaaatggaggttctccttctgtgtcctccaccatatcaagtttaaccgcctttgttccatcaaaacaaaatgccctgatggaattcagccctaacaataaggcattctgtt

SEQ ID NO: 345150 - DNA, 1000 bp, Homo Sapiens
tttttttttttttttttttttttttttaatggagagagttttcatttgcttatttagtgaaaaacagaggaaaatcactcgaggcaaaagaagcaggactgagtcctgggttagttctgattcctcacaagccctaagacaagattttgaaagattggactaatgtcatgtgtccttaagaaccagggtcagcaagtggctgatctgaatggtttgtggccatggaaccaatgtgacttattctttttcatttttttccctaaaaatccaggcggataaaggactgtgtggggaaagtaccaaataaatgaggtaaaaaggaagggtcatacaaagagggcactacaccagcttcttggcctcaaagaagctcttgaggtgacgcatctgccagatgccagtgaggatgaggatgacagtctgagcaatggaccaccataggaccctctggttggtgctctcgctcgtcagtcggaagcgctcttcacgatacctttggtaatcctgctccttctgaatctgttccacctgatcaagcaactggcgggcgcggagctgtagctccgtcagcttatcttttgcagcaatctcagggtagttgttggcatgctccccaacctggatgtcgagatgcacacgcagtttgccaccagcgaagagagccatcctggtagaattggagtgcagacagatttgatggtcaccgggcgtgtgggaggtgaacgtgaagcggccctccgagccgtactgccgggacagcaccaccttgccgtcggggtccttcacttccacgtgcatgcccaggccaggggtcgagggcaggaagacctccttctgcttatcccacatctgggtacgatagttgccgatgaccatggtctcgtcggggatttcctcgatgaaacagcgcttctcggtctcgccgatgtggaagtagagcccctgggcgcctgtggcgcacagcgcgagaagcagcagggcctgccgccccatcgcccgc

SEQ ID NO: 345151 - DNA, 1000 bp, Homo Sapiens
tttttttttttttttttgagtatttacatagcatttacattgtattaggtattataagtaatctagagatgatttaaagtatacaggaggatgtgcataggttatatgcaaatactacgctatttttagctgaggacttgggcatccatgtattttggcatctgcaggggatcctggaaccaatccccctatagatgactatatgccaaatccaaagtttttgaaaaaaaaaaatgtcatctattcctataacaaattacttgaacataagtaacacatttctgaagctggtagccagttctggttgagtcagtgtgggcaccataaggaaatgtgatatttggctcccgggaggaaaaaagtctgcagagattttagatcctatcacccactcttcataaaacttcctggtggatgttaaaggattcaagttctgatggcccctccattccttacccccctctgagcagcaataagaaaacaaaatatgagaagggagaagcaaaagaccccctacacctcaccctaaaaatgacccagcacatgtccagccacctcttcagtgccctcttagagctggttgggcatttgtgtgtgtttgagagagagagagagagtgtgtgtgtgtgtgtgtgtgtgtgtgtatatatatgtgtgtgtgtatgtatgtgtgtgtgtgtgtgtgtgtgtgtgtgtgtgtgtatatatatgtgtgtgtgtatgctatcagacacagacctgggagggaaggcccctagagatggacccatttagccctctcgctttacagaggagaggcttcaagaaggtgaagcgatttgctgctgtgtggaactaagaaatggacttggatcccatccccagcaactgagcactccctgcaccgctcagcctctgaatatctttgaagtgggtcactgcagttctgcttccccagaaagagtacagtaggaggtcttgtctcaggagactgtccagttttagtgttataataaaaggc

SEQ ID NO: 345152 - DNA, 1000 bp, Homo Sapiens
ttttttttttttttttttttttttttttttttttaactcagaatcaggtttaattatgggaaaaagcactaaagttaggtaaatgattttgtttgtcatgcttctcttgacaggtctgtggggggagaatggaaacagagatgccccttggggcctgagtagacacagcttgcagtgcacaggcagaggctctgggtcagtacaggaagcagagtcaccgccagtgccttgggatggggatcacagaaggtgacctgtggctgcatgagccactgtaggactctgacctcagtgggacaggatgacacaggcagctaggaattctgggcaggggcaggtgggcattacagaagagtgatgaccaatcccagacaaaagtcctcaggagtcagtgcaggagtcctgcaggtggaggccctcgaggtcgccactccacggtgatggggctctggaggctggggtgctccacttggcaggtgtagatgtctccacgctggggagttatttccagcatcaccagaatctggaaggtccagtcaccattcctaatgagggaggtggacacaacaccggctgtctcctcctggtcattccgaaaccactggactttgatctgggctggatagaaatctgtcactgagcagaccagcaggttgtggtggttgagggcctctgtcctggatggggagatggtcactgtgggctccacttgccgctgcaaggtcgtgcgtagctccgcctcgtagttgtgtctgcacaccttgtccaccgcggcccgctcctgctccaagaagtccttatagttgttccagtcctcgatgctccgccccagctcggtcaccgcctggaactccccaacgtcgctgtcgaagcgcccgtactcctcgcggttatagatgtatctggccacaccccgcacgcgctctgtcccgttggtgaagtagcacatgcccttaaactggaccaagaaatccttgggaaagtctctggcctcagccac

SEQ ID NO: 345153 - DNA, 1000 bp, Homo Sapiens; identical to SEQ ID NO: 161097

SEQ ID NO: 345154 - DNA, 1000 bp, Homo Sapiens
tttttttttttttttgactgttaactgctttattttcactgcccaaaagaaattctctcttttttcttccaactctaattatcaaacaaatactatattatgttttattgaaagatattttgttttaactttaccaaattctgtgcagaagtactggacgccatttccattttcccaatgaaggggatcccttttgaggagcagaaagacataaaactctgacatggcacacacagaggggaggagcttgcaaacgggggaaatctgaggcaagtctcaaaatatgaaaaacagttgctgcttctggccccctgatggatgaaccactacttcttacttttaagttgttcctcacagcattcctggacccagctcacaggtcagtggttactcagctagaaagagctggagtttaccatccaaggtagctgtggcaagctgtaatcccagctactcgggaggctgaggcagaagaattgcttgaacctggaaggcggaggttgcagtgaaccgagatcgtgccactgcactccagcgtgggcgacagagcaagactgtacctggggcgctgatgggttgaaggccactccagtgacagtgtctgtgtgcccagccagccggtgagaaaacgtgcttgagcccatttcatacacgtaagcgtgtctgtcctcggccccacaagccgcgaatcgtccacaaggactgaaagcgattccacatggatagccgcgggttggatgcccttcaaagtggcgctcacacctcagggttctcaggtcccacagtctcatcccatcgccaatggccgtggtcaggaaaaggttataagcctgaggctgttgggttgtaaatgatgaacctttattttggcagatttgatggacaggccgtgagtgggcttccgctatcaccgctgcactgcagccggcgttgaggtcaaacacttccacggtcctgttccggccagctgcgagtacgatgtgggaataaaagtcgttga

SEQ ID NO: 345155 - DNA, 1000 bp, Homo Sapiens
tttttttttttttttttttttttttttttttttttttttttttttttttttttttttttttttttttttcccacatatttgcagtagtttattcatattttgtcacaaatggccggggagggggtgccggactcctccaggcgacatagaaaataggtccaagagacaaggtgggctgaggttggggcagatggagacagggctggagaaagagcctgggggagaggggagggcagactaggggtggggctgcccccctgctgagcctgctcattcccggtgcgggtacccccccacctgcagggggagcctcagggtgggggtggagggggatggcccagaatttccagggtcaagctctgccccttggcagggcccaagtttcccccgaaatggacaaggccggaggtcctgccccttccaggaatgactgccatgcccacaggctggcagaggagcccctgcccctgtttagagctctgcccagccgctctagtccaagggggagggctctgaaggcggggtggggggggttccccgcagcagcagtttgggggttggagaggctgggggcaccagtgccccctccctccccagggctgaggcctctgcggccaaggggcagggctgggggtgcacaggcgtccggtccgttctgggctcgctccctggccggcttcccccttagaaactcaccaacgtataaaccatactgtacaggtaatagaagaaggagagcaggtagaaggcaagtttgcaccaggactccttctggcagtagttgagaatgtcagcattcatgatggagaccgcatcatacatgacctcagagccatctgcaggacggtggaagtacctccagaggtggtagaagaggagggggatgttgaggcccagggtcacccactctgctgcacacagaaacatcagacagaagaggccgtggatggagtattctgggaccaccagcttcctcaggaggcagcagatgcgttcgatg

SEQ ID NO: 345156 - DNA, 1000 bp, Homo Sapiens
ttttttttttttttttttttttttttttttttttcattttccaacatgttttattaagtaagaatgccacactggcccttgagcaactgttgggtgttgtgtccagggctggcaggatggagcattgattgccatcctttgttaactgtgtgtttgttgagggctcactatgggacaagtgctatgctgggctctagggtaggaggcacaaagacgtggggcgtgggggaggtgacatgctgctgctttgaggagctctatgaccctcccaagacacacagacacacacacacacacacacacacacacagatatagggtgccaggcattcatcagagcctatgcagagcaaggctgcagggaaccagagaggggagcccaccgttctgctgggagagaagggagaaggggaaagattatggtaggagttgctgcttgagttgggcagcatttaccaggtggagaaggggatgccaggagggcagaggcctgtaaatgtgaaaggcctgctttgctaatcacttagggctgtggggtgggcagtgggccagggaacaggtgagtgaggctcagatcataaagggtctcttatgcctggctgaagagtttaaattttctcctgaaaccacacaggagtgtctcagtcaaggtttatagctgtgagcaacagagctggttctggctgagatgggctcaaaaggaattgtttgagaggaaaccaggatctcaaggactggcctagaaggctggagaagcaggctggataaaatacagggacacaaggagaggctctgaagccagaggttcaggccgtgtcataccacaaaaccaggcctggaaggagcccatggtcatgctgccgaggccagaaacggcagcttaccccattaaccttgctagatgctggatgttgtagctggcatgattgccctggctgaccccagaagctggatgtagctgccgctgccagagccacagaacacatcattccttctcttac

SEQ ID NO: 345157 - DNA, 1000 bp, Homo Sapiens
tttttttttttttttttttttttttttttttttttttttttttttttttttttttttttttttttttttttttttttttttttttttttttttttttttttttttttcatcatttaacgagcatttattgcacacgtctgttcaagcaccaggctcaggctggaaaccatccaaagcgcaatccctgacctcaggcagctcacagtccagtggggaagccgagaagcaaattaatgactctgaagaagcgcaggcaagtgctatgatcaaggcatgtgtgtgggtagggtgtctgggaaccccaaagtcagcctcaggtggggaggtaagtcaaggaagggtgaggggactgggctcagcctgggtctcggaggagagcggggccagccccggggatggtagagtcaacctgccaggcactgtgcactgctggccaggcccggccaatgagagcacaacttgttcagggtccaggaagcaaccccaggagaacaaagcctcgtggggagggaggaacctggagggtggaaggagtttgggcttttcctgaaggtgatgagagccactgaaggattctgggggaggagacatagggttatcctgggtcatgggggagagagctttgaaaggcagggaggtgggaggccgcagggactctcagaagtggagtctcagagctccttaagaggtgaaggcagccgggcgcggtggctcacgcctgtaatcccagcaccttgagaggccgacgcgggcggatcacaaagtcaggagatcaagaccaccctggctgacacggtgaaaccctgtctctactaaaaatacaaaaatttagccgggcgtggtggcgggcgcctatagtcccagccacttgggaggctgaggcaggagagttgcccgaacccggaaggtggaaaggcggaggttgcagtgagccgagatcacgccactgcactccagcctgggtgacagagaaagactccatcccaaaaaaaaaaaaaaa

SEQ ID NO: 345158 - DNA, 1000 bp, Homo Sapiens
ggaagagtaggctggcctgtggcgtgggtgggaggagaggggacggagagggcactcggcccgctgcaatctgacccctctctcctcagggcaggaaacacagagtcagacagtttgggggggtcttgggccaggggtggagggctcaagggcacagggcccaggctgaggcagggcgggcaaaagcgcctggcaggatgaagggcaagtggccccccaaacacagaggccctggccatggaccctgggaggtgaccggggtgagtcaggggcctgttgtcagccccagaggaagcgctggacctggccgatggtgggccgagaggacagcaccaggcttgggagaagtggggcgagttccctttgtattacagctgccagtgcaagaccaggccctccaggccaggaaggctagggacgggtcctggtagaagacaccctgtctagaatggcccttggtcctggaggtggggcgcaaaaggcctcagccagggaactgccctgccacctcccgaggcaggaaaggaagtgagaaaaggagaagtttttttactcctggggccaaagtagggggacaaacacccagtcgtatatggcttcagctctgaccaaaggcggatagggagctctcctgggtaggagcagggagccaagggggaggcagtggctgtgcctgggtgggcacagacagatctggtacatggccctgagccctgggcagagggacaaccttgccggtgagtgggcaggcagagaggaggcggcaggatgctgtttccccgattccatcctcagggagtggagactggaggggaggtgcactgactcagatgaactgttctcccccttctttgataagaagtaggtggcagcagcctctggaaaagtcagggccctggaggttacctggcccagggctactacagccacaggccccagtggcaccatgccaccccttccatggctccactcaagggggccacacagccaccgcctcttc

SEQ ID NO: 345159 - DNA, 1000 bp, Homo Sapiens
atggctgtatagtattgtgttgcgtctatataccacattttctttatccattcatctgctaatgaacatttaggttgattccagattataatgtttatactgtgaatcatacatactttacgtacaatgtgtagcatagacaattcctcataatagaagctcaacaaatgttggtactataccattccctttcctgctctccttttctcactcctccccaggtacagagataacagaggtaactaaaatacaatccttgttcttgaggggccaatctagtggggaaatacacttgtaaggagagatactccaatgaaatttggtgtctccagagaagaatgcacaacctgccatgagaaaccagaggaggaagcagctgatattctaataaaattaaagctggagacattttaaaagtagtatagctcagcttcctcttttacagatgagagaatccaggtccagataagtcatgtgacttattcaaggtcatggcacatttgtggcagagctgggtataaagctcagaactcgatttccagcttcttgctttgtcacacagaatatgcaacagggattgaaacaggaaggaataaagattttgcatcaaacaggacacaaagctggaatgagagtagctgcatctagatgctggaagagagtcctggagctgcagaaatccagggatggcctggtgcaggcagagccttgtgtctgctctgtaattgggagcttgagtccagttcatgctctgacagtccccataccctttcagaaagtaggttttctgtcccagaagccaagcttaagagggagttctgcaggacaattcattgtaaggaaggacttggctgagggagagagctaggaggaggaacaagtatgtccttaatgttggaaaccaccaggaaaggcatcgaggactttgcccatgccagggagcttgcagtgtgagataaaactgtgtttgaatctgaggcgggagcatcattttcctgtg

SEQ ID NO: 345160 - DNA, 1000 bp, Homo Sapiens; identical to SEQ ID NO: 161098

SEQ ID NO: 345161 - DNA, 1000 bp, Homo Sapiens
tttttttttttttttttttcatttagttttgttctgattttgttatttcttttcttctgctgggtttggatttggactgttctagtttctccaattctgtgaggtgtgaccttagattgtttatttgtgctctttcagactttttgatataggcatttaatgctatgaattttcttcttacctccacttttgctgtatcccagagtttttgataggctgtgtcactattatcgttcagttcaaagaatttttaaatttccctcttgatatcattgttgacccaacaatcattcaggagtaggttatttaattaccatgtatttgcatgcttttgagtgttcctttcggaattaatttccaattttattccactgtggtctgagagagtacttgatataattctgattttcttaaatttactgagacttgttttgtgccctatcatatggtctattttggagaatgtcccgtgttctgatgtatacaatgtatattctatgcttgttgggtagaatgttctgtaagtatctgttaagtccatttgttctagggtatagtttaagtccattgtttctttgttgactttctgtcttggtgatctgcctagtgctgccagcggagtattaacatcccccactattattgtgttgccaactacctcatttcttatgtctagtagtaattgttttataaatttgggatctccagtattaggtgcatatatatttaggactgtgatattttcctgttgaactagtccttttatcattatataatgtccctctttgtctttttaaaactgctgttgtcttaaagtccgttttgtctgatataagaacagctactcctgctcgcttttgatgtgtccatttagacgaagtgtctttttccaaccctttgccttaagtttatgtgagtccgtatgtgttaggtgagtctcctgaagacagcagcaacttggttggtgaattcttacccattctgccattctatatctttt

SEQ ID NO: 345162 - DNA, 1000 bp, Homo Sapiens
gagacggagtctcaccctgtctcccaggctggagtgcagtggtgctatcttggctaactacagcctctgcctcccgggttcaagcaattcttgtgcctcagccttaagagctgctgggatgacagacgtgtaccaccacgcatggttaatttttgtatttttggtagagatggggttttgccatgttggccaggctggtcttcaactcctgacttcagatgatccgcccgtctcagcctcccaaagtgctgggattacaggcatgagccaccacactcagcccaatgccaaatgtatccaatagtctttgattccagaattacttatgatagaacactgcatcatctacagaaatcttgatcaataacccagataacctagtttctaggttattgatcaagatctctgcagacgatgcagtatgtacatttctgtgtatgttattaatcaagatttctgtataagatctagaaacaaaaatgcacattaagaaattaaaacttacatctcataaccaattatctttctaaacaatttacaaacataaaatatacaatattatttaaaataaatatacatataatatatagtttctacattctcatacaggcttaaaaatgaggtaataaaaactgattaaaccttttaccattctggaaatggcttagggaaatgatcatgaaatatttttttcttaggtcttcattttttccttcaatacttctaagtacctctttttctatgctgaaaagttatgtaaaaaatccctaagctttgttggatagtctgtcatcaccccagttgctcccaaatcaaaagctcttttgtattcttgttcttcatttaatacccaaatatacacttgaatgcctcgagcagttaggtggtcaaacaaagctttcctcattagtaagagatcagaaagccagatgagaaacttttgacttctggacatggtgtgtggttcttttagcttcagtataatagaaggcattgggat

SEQ ID NO: 345163 - DNA, 1000 bp, Homo Sapiens
ctgaaggaagcagcaagcagcttgtttgccgtggccagcagcaaaagaagccccccaaccataccacgccggagggggatcataaggaggccaggtaggcaaagttaaggcagttgcatgtcagcagcacttcaggaggcaggtggggttggaggttgtctccgatcctgtgtctgcggtaggaggggctctgctggtagttccctctcctcccacaaggagcttctctccacccccatcagttctctgtctctgtaaatcctaaaatccatcaccatggatcctccagcaggtcccacagccggctgctgctggagtcagataagtcagcggaaaaaatgctggggggtgggggaccagaacccagaggaggacccccgctcagggcctccagccagtccagggagtccgtggggtccctgggagaaggggaggaggagttcgtgggagacgggagtgaagaggagaaaacagatgagaggccttcagagtccggggagggggacagcacgtcgaaggagccagggaagtccaggggaatagggggcagggggtcatcaggctccacctgatcctccaggatgtcatcgatgccccggttaggaagcaactgcgccctccggatcgcttcctgcagctcctcctccagagtcagagccgctgagcccggccctgaggaaggggtcagggctggagctgcagcaggagccggagtgggagttggagccggagccgtccccggggtatccgcggcgcgtggaagaggtggcctgtgagatgctgcgctgggcttgaccgagccctgacgccgggcggctgccagggccttgggcttgaggcgcggccagggagcacccgcgggactgtcctcgcgccgcggcttcggccgctcgcggggcggcgcgccgccgcgcatgcgctccaggagcatagacttggtccccgacactgggaggccccgcaggcgcagctgctgccggagctctgagaccgtcagctc

SEQ ID NO: 345164 - DNA, 1000 bp, Homo Sapiens
gggacggagttttgctcttgttgcccaggctggagtgcaatggtgtgatctcggctcactgcaacctccgcctctcgggttcaagtggaggatccaaatgctgggattacaggcatgcgccaccacacccggctaattttttgtgtttttagtagagatagggtttctccatgttggtcaggctggtctcgaactcccgaccagcctctcgactctcgaatcgctcaagtgatcagcccgcatcggcctcccaaagtgctgggattacaggcatgagccaccgtgtccggcctcatgtcacattttatattggctcacgatttgagtcagtagcttatctctccaagctccatatcacaatatccacgttcctgctggcacttgccacatggtacaagttccatgggcacttcaagctcgatgcatgtaaaactgagctcattgtttacccccacctctttctgtatttccagtgataaccacctggaaactcataagccagaaacttggagctcgtcttcacagatccacattgtataactagtggcacagtcctgcacttcctgtatttgtaacattttctcatatctctcagcttcgcagctctgacccctgcaggcccttactgtctctagtgtaaagcctgtggggatctcctaactagtactcctgccttcagtcttgctgacgccttactgccactgagtcatctttctaaataacaaagctctgtcactccccagcccaagccctttggaggctccctgttgcctgcaagacaaagttccagctctccagcagggattatgaagccttcctgtggtttgctcctgcccaccttctctttccctaaacgcctgccctcctcaacaccttgctcttctccaaagtccctgtacactttcacacctctgcacctttgtcttacttcttacttcccttctgcctgggatatcctcctctcccctgcctgcctaatgaacaccacttaacttttgag

SEQ ID NO: 345165 - DNA, 1000 bp, Homo Sapiens
aatttataaagaaaagaggtttaattgactcacagttctgcgtggctggggaggcctcaggaaacttacaatcatggtggaaggcagctcttcacagggcggcaggagggagagtgatactgagcaaagggggaagctgcttataaaaccatcagatctcgtgagaactcactcactatcatgagaacagcatgggggaaactgccaccattattcaattatctctacttggtcctgctcttgacacctagggattattaaaattcaaggtgagatttggtggggacacagagtcaaactatatcagtgactcaccatcccagtttgcctgggactgtgccaggaaaaccctcagttttggacaaaccaggatggttggtcaccctaaaggtaaactgaggcttggagggtaaggacattctccaagatcttgtggttgatccgtggaggcctgggatggccactgaagtccacctgatggtgatgatactctaggaggacaatgatcatatagtaagtgtctcctctgtgcctgccccttcttcagccctcataacagccccaggaggcagacaacgaggcacaaatagaacttgcgacaggcgaactggggtcagatctcagcagcagggcttggctgtgtgaccactgtggtcagctccttctcagcctcctgtcctgggcccacagcagacatacaacaaatgtttgttgaggggaaaaaaaggcatgaatgaagtattattatcctcattttatgggaaaaactgaggcacaaagaagctgtccctggcacagggtcacaatttgaacctggacaggggctccagagcccatgacacgtttccctcttgtagaaggtccttgtctgtaacctggtggtgcctcctgcctctgactcctccggtcagtcgccctgacagccccctcaccgcgttgcactacctggtcccctggtcccagcctcctttcatggaaggaggtcttgccgtctgcctcc

SEQ ID NO: 345166 - DNA, 1000 bp, Homo Sapiens
tttttttttttttttttctgtggcattatgattataattaaatcacatttattaactgaagcaaattcagttgagctttttataggattctaggaaatagattccttacatataatgaggacgtgcatctttaggtcttttcatatttttcttccctgtaacagtcctatgtttggtcttttctcgtcaggttcattcccttgacactaacagagaacactgtaattctaaagtaaaatgatagctggggaaccatggattccaaggccagtacctccccattgtgtggatcccacagatatgaagtcagaaatctaaaaagaaagaaaagaaaaaaaccttgaacctggcttggtttaaactctctttaagcagccctctttcactcaaacgtgagaaagttcagctttcaacatgtattaacaaaagatgtttacaacagaatacctggttgtgccgaataatggctttgctctttgaattaattttttcctggagacaaaggctgagcttttgaacttctgggtaaggctaggctgggcatttttgcttggcttggttctcttaaatggttcgaaaagggttggtctggcacctggtattttgtggccagtaattacactacagttgttactatgcattaccgaaacttcattttttgaccaaaagccaactgtgttatttaaacaaacatcttttgaaagccgaatgtgctttgaaatgattttaaaatccagttaatgaatagggttactattgaatttcacaaatacaaatcagaattttttttgatgcttcatattttttccccctgccctcccatcccacccttggtgatggttgtacccatttgagcatttctgagcacatgataagtcagaatttttttaaacgatgttttgctttagcatggtgtctctctagtacaagccgtatgtgacctttccacttaagccatcttaatgtttcctttcctttcatcagtgtggatgtacaatga

SEQ ID NO: 345167 - DNA, 1000 bp, Homo Sapiens
gagactgagtcttgctctgtcgcccaggctggagcgcagtggcacgatctcggctcactgcaacctccgcctcccgggttcatgccattctcctgcctcagcctcccgagcagccgggaccacaggcgcccaccaccatgcccgggtaattttctacatttctagtagcgatggggcttcaccctgttagccaggatggtcccgatcccctgacctcgcgatccgcccacctcggcctcccaaagtgctcccaaagattacagacgtgagccaccgtgcccagccgagtgtttgccattcttaaatgcccaaaccccatgacactgtgaaacctgaccctcagtaaataaagtgactatcttgatgcaagctttcatagttattctctagaacggattatctcacattcaataattcatctactcagtctcaaaggtcttccatacaaactgcattcatatcacttctctccaatatgatgtctctgatgctgaatgaggtttgcagtctggttaaaagctttcccacatttattacatttatagggtttctctcctgtgtgaatcctctgatgttgagtcaggtgagtgcttcggataaaggctttctcacagattttacatttgtaaggtttttccctagtatgaattctcttatgttgggtaagggctgaatggtcactgaaggctttttcacatatgttacatgtataaggtttttccccagtatgaattctctgatgttgggctagtgctgattggtcccgaaaggctttctcacacaagccacatctgtaaggtttctctccagtgtgaattttccgatgtcgtgcaaaggatgaattatccctgaaagctttcccacattcattacatttataaggtttctctccagtatgaattctctgatgttcagtaagggaagagttcaccctgaaggccttcccacattcattacattcaaagggtttctctccagtgtgaattctctgatgctgaag

SEQ ID NO: 345168 - DNA, 1000 bp, Homo Sapiens
gctttttaaactcatttatttcacactgtgtcttatgtcatatgctgtgtgtcttactttcattgctggaactaatgcaggttccaaatattctaactacataatttcctagtgcaatttaggaaaggccacaaatctatcagatttcttccaaatcaatcagcagggtgccaaaggggttttttcatgagaaacaaaatacacaaagtttatataattacatataactgtccatctcctttctttatcctgcactcttatgtgagctcctcttgagtagagtgatttgcacagagtaggagcttaataaacattagttgaattaattaggctttcccttttgactctcagccccacataactactgctcatgttttcaccagcaaacaccagacagcaactagctctggggcccacccatcactgtccctggggaaatagagtcaaagtctaatcacctgagcagaatccctcttattgaaaagagtaatcacctggttcccttcaatacataaaactcaatgaatttctcaggctttcccagatatctgtaaaggtgcatgaggtgtcatgaacttcattgacacagtgaacttgttctggtagcaaagctccttctgtaagaagttggacgtacatagtcaagttctcttgctttgttgattctcctccctgctagccgcccaccccattaaagttgaagtgccctaccataaaagggggctgagacaagttcacccctttttagttgctattcccatacccacttgccttggaattgctcccatcttgctgcagaaagtgggccccaggggtgggttgcctgaccagatcatctgttgcctgaggaagtgcactttctcagttcctaaccctgtacactcccaggaaagtaaaaagctcaaggtgttagcaggtgctttcagaaaatcagtcctttagttttgttcagagtccagttggttgagttggttgagtcgctttacgatcatgttattga

SEQ ID NO: 345169 - DNA, 1000 bp, Homo Sapiens; identical to SEQ ID NO: 161099

SEQ ID NO: 345170 - DNA, 1000 bp, Homo Sapiens
aattattatagttaattatatttcttggaaaatcaaccactggtgagacaccaaaacccagagaaactgaggaagtggttatatttgcatatgcatagaaatacacatacatgtttgcagataaatagaattttgtctaatatggtatgtactaaattgttaacaatagcttcctctggagagtggaacttagtgtcagaaggaacatctatcttgtttttaacactatacaacaaacatgttttattattttaatatttttaaagtggttattaaagagaccaatgactagtttgtgcaaaataaaaagaagccaggaagattctataatattaatagatcagatttgaggtgacacaagcctcaaacagaattaattcatccatgatgattgatgaagaaacttccctatggaaagaaaatatggattccattcaaagcactttattttggttatttagaatattaaaatatacatatcctctagctgtcttagaattctgattgattacttatgaaaacattttctccttctatggtacaatgttaacaataatacttatgaactaggctgctgtttgaagatagatagacagatgtgtgtatgtatctagaaagttatagttacatatagagtgtgtgtgtgtgtgtgtgtgtgtgtgtgtattcctttaatcctgtcatcagctctagaaagtataagttatcatctccagtttatagttgaggcacaaaaaggttaaatgagtagcccaaatcaaaaaaagactatagccaggattcaagtccaaagagccccagcccaaagcttgtactcttggccactcttgtatatacttcttgagaaaaataaatgtattaaaaaggacaccaaccatagccacaaagtttgggacttgaattttttccagtgtttccctgagttgatcaacttctgctcgatattcatcaagctgacattctaatttttctctacgtagtcgttcatactccagctggc

SEQ ID NO: 345171 - DNA, 1000 bp, Homo Sapiens
gagacggagtcttgttctgttgcccaggctggagtgcagtggcgcgatctcaactcactgcaacctccgcctcctgggtttaagtgaaagtgattctcctgcctcagcctcctgagtagctgagattacaggtgcccatcaccacgcctggctaatttttgtattttcagtagaaacagggtttcaccatgttggccaggctggtctcaaactcctgacctgaggtgatccacccacctcggcctcccaaaggtgtgaaccaccacgccaggccccctgcaccttcttctgggtgggcaagagccatgctgagcccctcccctgccatggataggggtggcaagaatagtccattccccatgggctccctccggcaggcagcggatgggttggggcccacacagtggttcaggaacaaaggctgaagggcggttgccggccagagctgggcgggtccctggcctgagcctcctctcactccctttcccaggatggaaaggccactgtgagctgggtgtgtcctgccaggagggagttggagtcgggggcaggagacccactgggtctcctgggctcctggaagaggcagcagtgggtccctgcggaggtggcctgatccccggctcagcctggttttcccagctttgcatttgggggtgggaccttctccaatgccacgtgctctccctgagtgcccagtgccacagagggccccgctggcgaggttacttcaacgtcaggctagagggtgcagcgggcaggactcacagcccaggttcccaggcaggtgtggcaggagcccattccctgggtcggtgttctcatgtcaccccacggtgaccctgctgtacagaggcgggggcgcggggcccctggctggtgccctcctgctgccagacttgtgctctgctgaagaggggctggcgcggcaggtatgagcccggcacggaggtcgtgagcagtgagaagcctggcacctatgggttcggggcagggaggc

SEQ ID NO: 345172 - DNA, 1000 bp, Homo Sapiens
ctaaaactagggttttatgattgcaatagttgggacattgccataagccttataagctatttggctgtagcaatgcgagggcataaaatttttcttgctacagaggaacataatgttctttggtttttcaaggtattagtaaatgcttatttttttcaggcatttaaccctacaataataatgcacaaaatttcccccttgtggtcaaaatatgtaagtgcatctgtgaaatgtcaaatttcttatgccggtgttttgggactaatgaaattaccatcaccttctcccaaatttttaacaaatatatagttttgattaactaatcactctatctatctatatataattcattaatcgggatttttctgattatatctgtaggataagaatatctatgtgactgtatgtgtgtgtgtgtgtagaaaagtcaccaaaaaattagaggttttataactaaaaaaagttagaagatctctggcttgttttactatcagactttgtttcctacatatgactttcttttattggtgtctctcaaatgggtgtagaagtagaaaattcatttcttatggtggaaaggtactttggaaaatctgattgaataaggaaaaagaaaaaaaagtatttgtgagctcgagagaaatgtagggaattatacaagggtttcttgaacactttgtgagttcaaaaagtttctcagttaaaaggagacccttgacaacgacattctaaaaatcccatggactatcttcaaaaatatgtattgagtctcactggtacttcaacattcgtgatttaaagagctaagtatctctaccgtatttttcaagccagatccattactttacaaataaaagtcccttataaattggctaaggattattggttgattaaagtgattctaaataacttacgttgtgtgtttcatgttactagatccagtaatttaatatcactttgttgtactacacccactaaatagttgaattctcatgcatat

SEQ ID NO: 345173 - DNA, 1000 bp, Homo Sapiens
ttttttttttttttttcgggttactaaaaatgattatattttactaattaagacataagaagtataatatattctaaataaaatggtatcaaatgcaatctcaggggccaaatgtgaatcccctataagaacactactctggttcttttgatggaactgtcctctatggtaaccattctctcttcagtttccaaaaataagacctatctatgttcaataatctgtgatatgcaacagtaactacctttcaagagagggtgactatcattccccctccatttctttctaccacatatgcagtctctagtaaccgaccatttcacttccatgaaaatctctcaatgtcccaccctactcttcttgtttcatggtcatcttgtactgtaaccaatctctcctataatcgacaaaggtccccagtcacatcaacaattctaaggggtcctgaccacataaagcatatatgttagacaatagttttacctctcttctggcacaaacccccatgctcttatagtatattgtatattagtgttcttggctgggcacggtggctcatgcctgtaatcccagcactttgggaggccaaggcaggtggatcacctgaggtcaggagttcaagatcagcctggccaacatggcgaaactctgtctctactaaaaatataaaaacaaaaaaacaaaaaactagccaggcatgatggcgcatgcctgtaatcccagctactcgtgaggctgaggcaggagaattgcttgaacccgggagacagaggttgcagtgagctgagatggtgccactgcactccagcctgggtgacagagcaagactctgtctccaaaaaaagaaaaaattagtgttcttgctttttccaggtttcagtaatataaagaagccacacctaaggaagtagtcccttccatcttacatccattccttgagacaatcatgataaatgaaaagcatgccatgaagatttaacagcaacagatttcatacttt

SEQ ID NO: 345174 - DNA, 1000 bp, Homo Sapiens
tcaggccggggccttcagagggtgacggggggtgctgggcttagggggcagaaagagggggaggacagagaaaggcaggctgtgctccttggcagcgcccccccacacccccagtgccctgagcacctcggccaccttcttctcagccatcctctgcagggcgctccgcacctcctcattgcaggcagcataaaccaggaagatgtacagcccctggatggagttgaggcccacggcagcgtaggcccaggcggggctcaggtgcaccaggatgcctgccagccaggtcaggcctaggacgggcagcaggaccagcacgggcttcaccgtggcccatatctgggtccagatctgctgctgcaggcagggctgtgggctcaacatgcgggcacggcggcgggcactggacacggtgatcattaccacacgggccaggatgcaggtgttggcagtcagcacgaagagcacaggccccacgaaggcccagatggcatttgtgtgcacattgagccagcaatgtccgggggccacgtagtcatgggggagcatggccagggtgaccgccacgatgcccacaggcacgccccagcctgtggcgtggtagagccgcatgcctgggcccgggtgcatgctcacagctaccaccttcctccacagcagcagcccctccaccagcatccaggagaatgccaccagaaagaggaagtgcattgcgactgtgacagccacacatgccacctcattggccttggcccactcgctggtcatgaggaagccctcggcagaggccagggagaaggtgaggttcttgtggactgtggttcgctctgacttggggaccccggccaccaggaagagcaagaaggtggtggtgagggcgcagaaggacacgccacagcccacaaatgacagagtcctcagcagcgactcctcctcagggcctctctgtacttcatagatttgcagcaggatggcaaagctggtgctgtggttgcagaag

SEQ ID NO: 345175 - DNA, 1000 bp, Homo Sapiens; identical to SEQ ID NO: 161100

SEQ ID NO: 345176 - DNA, 1000 bp, Homo Sapiens
ggcatgaaaaaaatcaaatgtttgatttattataaatgaacgttgtccctgagcttagctaaatggtgcgacttagtttctccctgctttcatattatcgaatttcctgtcttatagactttttaaattacatttgaaatataaaccaaataaaagattttactgataagaaaaaaaagttaacacatggcagaacaactcagcaacttctagaatgagaaatttagaaaggtttgatgcaactcactcaagtgagttgtttcgagtttggtgaggcgaaggtggctgcctacctgccgctttttgcagctgccttatcacaacactgatcccgttgcgttgatggaagcactgtgaccctggctgacagcaccacaactgccaggacagacaccacagggggcgtggccacagcaacctgggccatctggtacgtcagcgctgacgtcagtcttgggccttgcaggtgggaggtggaaactcgagtaagccgggctacctggaggttggccatggtggtgcccatcaacagggctctgggtctcggggccgtgactgtggtgagctgggggctctgctgtggtaggcgggtgacggctgcacttgcacttgtgtggttggctgtgccccgggcagggcctgtggtggtgggggtggtgggagcagctgcagtttctgtttctggagtctaatcaagtgctccacgtggcttttattttccagtggagcacttgcttccaagatgctggaatctttacctgcgcagtactagaccagggacgctcgatttctctggtagtacaggtgacgtctgcctcagcctgctcggctcctccctcctggccccggcctccctgcgcgtcctgtcctgcagctgccgggccacagctctgaccatcttcttcacagaggccaccttccacctctcctgggcaaagtctgtggccatccactgcatctcctccagcagatagtcccagtgggacttgggtcgtgggcc

SEQ ID NO: 345177 - DNA, 1000 bp, Homo Sapiens
tttttttttttttttttttttttttttttttttttttttttttttttttttttttttttttttttttttttttttttttttttttttttttttttttaatcatctagcattgtgttcgacacattagggggactccataattattagttcaccaccaccctctcttttcccaagtcaagcaagatccacatgccaccaagtcctgacgacatggagacttcaattccaggtctcttcacagatctgggtgtgggtatactacccaaaaggcagtgttcatgagccaagagaaatggcttccttctcataggaacattgctcagctgaaaggccgtttacacctgacaataacccagtaagggtggaggaattcctttctgaagatttactcattcataaaaagttctccaggtacaaaacaacaacaaaaaaggtattctcaaaactgtagcctggcagagtgagtctgagagatgcggaccagccagccacgcctgggaacgctgttggcctctctgggaatggcatctaccaggaaagcagccagggatgtcagataacagaaaccccagaggtggcatgggaacatttgagggagtaaagaactggcaactcaaggtagggggaaggtacaagggacacggaggcttgaagcaggatagtacaggctacaacacagagtgctgaggaaggggtgggtggggaaggaaagcaggaaacaatgagaacggaggaagagccccgctaacttctctcagctgctctgcatttagacaagggatattccccactccgcaccaataccaggtccagttactctcaggctgtcctagggtctctcccaccacctgcctctacaaacaaagctgctatccagggccagggtcaacatgaggctgggtgcggtggctcacgcctgtaatcccaacaccttgggaggtggaggtgggtggatcgcttgagtccaggagttcgagatcagcctgggcaacacagtgag

SEQ ID NO: 345178 - DNA, 1000 bp, Homo Sapiens
ttttttttttttttttttgagacagagtctcgctctgtcacccaggctggggtgcagtggcgtgatcacagctcactgcaacctccacctcccaggttcaagtgattctcgtgtctcagcctctcaagtagctaggtttacaggcatgtgccaccaaccccagctaatttttgtatttttaacagagatggggtttcaccatgttggccagggtattctcgaactcctggcctcacatgatccacccgcctcggcctcccaaagtgctgggattacaggtgtgagccactgcgcccggtagtatcctcttgcctgtagctcagttgtatctcagggttgggctgctatctgattcagcctctgaatctccaacattccctagctcagtgccctgtaggggtccagtaaagatccaattggtggttcacgcctgtaatcccagcactttggtaggccaaggtgggaggatcgcttgagctcagaagttcaagaccagcctgggcaataagagaagccccatctcaaaaaaaaaaaaaaaaaaaaagatccaattggctgctggtacatgggcttgtgtcagttttattttacactgagccactttttcctttctgactgtgcccactctccttcaagatctgtctcaactaccttgcaggctcaggactcgggtagattaccttgtccattcctgtgttttcagagcccggttcaggggctgcccagagggcatgccaaccctgtggcttagtcagggtagcctgactaagctcttggccagaggcctgtctgcagctggggctcttagggctggagttcagcttctggagctgttaggctgaaggagactcaggatccttgaggttagtcaggagcagggtaggccagatcagagttagttgggggaaaggtgaggcttcattaccagaagaacctgatccaaaggccaaatccaagagctggggtagggcatagattggagtccagagtaggagcggat

SEQ ID NO: 345179 - DNA, 1000 bp, Homo Sapiens
gatacggagtctcactctgtcccgcaggccggagtgcagtggcacgatcccagctcactgcaaagcctgcctcccgggttcaagaaattctcccacctccgcctcccatgtagctgggactacaagtgcacaccaccaagcccagcaaatttttgtatttttagtagagatggcacttcgacatgttggccaggctgatcctggactcctgatcccaggcgatccaccggcctcagcctcccaaagtgctgggattacaggcacgagccactgcacctggcctggatatctcttctgtaaagtgtctgttgaggtcgtttgcccgtcctcctctcggcttgcctgtcttcttgctgacttgaaggagttcttcatattctaatttcccatctcaggtcagatttctcctcccactctgcactctggcttctcacgctcttcgtggggtcttttgttaaacagatgttcttaattttaatgcagtccaatttatcattgtttattttgtagttagtgctttttgtgtcctctctaggaaatatttgaccacctcatgcagatattttcctgtttctttctagaaactgtactgttttgctttgccaatctgtatctacagtcaatctggaattggcttttatgtacggcatgaagtagagatcaaaattcactttccatatgaatatctgctcagtcagcttgggctactgtaacaaaatattgagtgccttaaacaacagaaatttatttctcacagctctgggggctggaaatctcacagcaaggtgccggcaggtttggtgtctggtgaggcctctcttcttggcttgtagatggttgccctctgtgtcctcacatgggagaaccataagggcaccaaccccagcatgggtctccaccctcacggcctaaccacctcccaaaggctccacctcctgacaccatcacattgggagttaggggttcaacatatgaacccaggggacacaggcattcagtc

SEQ ID NO: 345180 - DNA, 1000 bp, Homo Sapiens; identical to SEQ ID NO: 161101

SEQ ID NO: 345181 - DNA, 1000 bp, Homo Sapiens
ttttttttttttttttgcttagaaaaaactgttttttatatgtatgcttttcttttgatttcctaatttttaatttacataaggtaatattcactgattttagtgtatagttgtatgattttggatcccaatcaagtttttttttttttttttttggagacggggtcttgatttgtcgcccaggctggagtgcagtggcacaatctcggctcaaggaggacgctacataagggagggttagctgcattggaagggtcttccacatcccagatttcaagcatgctgcaaccaggcctcaagtctgcatcttcgtaatgtggatgattcacaatgggatgaagtgtagacagcttgacacttgccattgtaggcatggcacctgcaaagacagcatcttagataaacgtttgtagctaaaacacgcgaaatatcaccaacagtctttttaaagataaaacatgtaatcaccataacaactggaagcaataatgtctttgtgtatatcagcagagtcgctttttccatgaagtcaaattcgggagaacaggtgtattttaaagtatcaaaatctgtataccttaagattccggctgctataagatcactcaggcaaatatggtctgaaacgcctaagattttagatgtcagaaatttcaaaatgattgttccacaccaccaggcactaccttgaattagccagcagttgagtttagatactcccagtttttgaatttcatttctctttagaattattgcccatgtcattaacaaagatgaagaataataagaagataagtacattgaatttccaaacatcaaaatgaaactaagggtaactgaaatcatgttcatataaatgatcttctgaaatttgcttggttcaatgtatcccacaacatacatgggaaataatgatgctatctgtgtaaaaagtataaactgagcaaattgccagggaagcataaaagcaacattggaaagacagagtgcaatgaagggc

SEQ ID NO: 345182 - DNA, 1000 bp, Homo Sapiens
ccattgtcaagaaatttaatatggcaccaggagatttgcataattgacctatttggctttctgcatcaagtttggtgtcctgttgcagaagctgagcattgacgggacagaggcataaactgcagcgcttgataaaatagagcccagtattctgaggttagtgaagaaaacacaaagacttgacagatgcactcccagatcgcatctcacagtcattcaaggtttagggcaaggcatttccatgtggagtctcaccttttcttgtcccagtcatgcatcttggagttccttggctaagtctgcagggaggagaagcagcaggcttgatttgcatcaataaaagcagcgatctgtgctggccatgctaaccctgttggctattagggggtgggggcactctgtcaaggggagtcactgggacggtgtaggatcagccttcagagcctgctgcctgaccgtagaggaggaacctgcacacaccctgctgttttagttcacgagcagctatcaaagcctgttagccatcctggttacctgcttgtgccagacagaacttactgtcccaggtaagcacctaattttttaagtcttagttcctgtcacaggcccacttgggttccaggcttctccactgtcccgcctctgcccatcaggtggtggcccaatggctgtgttcagagcaggcttgggcaagacagttcacagttgtgggggaccaggccttctccgggggtggctgtggtcagtggcagcagggtcttgttggggttgaggtcggtgtcagggactccttcctggtggctacagggtgtccttgctacagctttcccacgccttcctccagctctgcatcatccggtcgtgctccccagccacagccctccaggcagagagctctctggtccacctctcctggtgggtcacttcaggtctcatcacagcaacctgcaccttcgaagtcttgttccctgctgaggagaggacagagcagcgatactca

SEQ ID NO: 345183 - DNA, 1000 bp, Homo Sapiens
ttttttttgaatatttatagtttttttttattgtttacccacatactttggagaaacaaagtataaactacagatgctgaatatattttagaatgtatagaaattagatgattattactaaatttaacttaatttttaattttaattacaaaaaagatgagtctgagaatgcatgtacagaagttttaaatgaatcaacttgtcatcaacagctttagggatcagtggagtggtcttaacaatccttgagttcaggctggagctggcagggaagatggggagccgcagacagcgtcctgtgctctaggaacacgggtacctgcactcaagccttaggaggcacgggggtccactggagcctaagacagatgtcctgggctgcctgtcgctcgcagctagctattgtttcctcctgctttcctccggtcctcacctgagctctgatcgccaggggaaggagctggtgtgaagtactcctcagggagggagaagctgtctgtctccgtctctgcagagctccccccagttgggcccgtggagtgagggctccaggcctgctgcacggggatgttctggctgctccgggccctccgcggggaaggctgaatgtcgtcctctgctgtgctctcgctggggtagaggtcctgaaccaggaggatgagggcaagcaggtcggccgggcgcagggagctggcactgtggctagagtagaatgccagcagcttggagtgcacgagcaggaaggcatgcagggcctcctcgcctccccgctcggggctggtgttgacagcctggatgacgtgccgctccagcgcctctatgcacagctcacagagctgggggtgaatcagtcgctccagggcctccacggcgaagcactgctcctgctcccgcaggcggctgtaggtccacagcaggctctggaagtgctcccacagctggacacgctgcgccaggtctgggggccgcagctcctttcggataagatgaccgtccacag

SEQ ID NO: 345184 - DNA, 1000 bp, Homo Sapiens; identical to SEQ ID NO: 161104

SEQ ID NO: 345185 - DNA, 1000 bp, Homo Sapiens; identical to SEQ ID NO: 161105

SEQ ID NO: 345186 - DNA, 1000 bp, Homo Sapiens
tatgtttagtttaagaattttattttaaaggaatttctgtggcataacataaggtttatggtacttttactaaaagtcacttataatgaccaaattataacaatttttgcaataagctctcattaaattttcctaaaagtagaaaaagtacacattatataccattttgcacttaattacttctttaaaatctcaaaataattcagtgtaaaatgttagtttcaaagacaatttatgggaaattacaaagcaactacaaagttcttcataataaatccaagataaaagtaactttttacaggttgaaagtttttcaaaatgcctaagtggattataaatacagtttggccatctgatgaatttagaggcactttaaaaggtgtctagttgaactactacagataggacatgtttgaggaaatttaatctttaagtctaataccagtgttcatttcttcctgccaaaacaagaaatttattggaaaaatccatgagcagcatgattagtttgatttctttctctttttttagagacagggtcttgttctgccatgcaggccagagtgcatgcaggccagagtgcagtggtgtgatcgtagcttactgcagccttgaattcctgggttcaagtgatcctccctcctctgcctcccaaagtgctgggattataggtgtgagccaccatgcccaacctagtttaatttcttcataaagattcttttataagttgtgctaatacctggaaggccacatccatctgttctggagaagctgaagagaaggatgctctcaagtaagggctaggagctgagctatcgacgtagaaagcatttccagggagcattaatacccccatcttaacggccttttcttcaatcagttcttttacatcattaatgcctttaactttaatccataaaaacattccagcagcaggaacatgccattctgccaaaccagttaaccacttgtctgcagctgccagtattgcatccttctg

SEQ ID NO: 345187 - DNA, 1000 bp, Homo Sapiens; identical to SEQ ID NO: 158166

SEQ ID NO: 345188 - DNA, 1000 bp, Homo Sapiens
ttttttttttttttttttatgaagaaaagaggtttaattgactcacagttttgcaggctgtacaggaagcatggctggggagccctcaagaaactgacaatcacggcagaaggcgaaggggaagcaggcacgtctggccatggtggagcaggagagacagagagagtgaagcaggagggctgcatgcttctaaacaaccagatcccatgagcactcactcactatcacgagaccagcctgcccatggccctcccctaaaccctcctgagtgcaacttacagatgcttggagagggagagaaaccagaaaggcagaggagaggcaggggggctggtgctgggattccaggcagggtacggggtgtgctggtgggggggaaaggcaaggagccctgagggggcctgtgggtgcaggagctgggacaaagcaccatgcactcactcccggcgccccatctcccccagccccatgcaaagaggccaggctaggggctgaggctggggagggggtccaggccaggcttgcagcccaccggcagtgtggcggcctcgctgggtgggatgtggtgggtcatgtagcgcttgcccatgaaggagccgatccgcagctgctccggggcctcctccggccaccacaggctggagaagcgcatggtagaggctgccaagaaggccaagagtaggaggccggccagagaagagaggatggaggtaatgacgatcatgctgccacttcgccgccctggccaggtgtcgatggatccgggggtcttcccttggtggagagtgatggggtctgaccacttggtctcagccctgggtgagcccctggtgtccatcaggaggaacttcacccgatagggtccagggccagggaggggcgcgttgcagaagggctgctggtggcagccgtggtcatggcccacccgcagcacgggggcgcctccgctgcccgccatggggtcgccacagggcagctggtccggagacaggggcagcgt

SEQ ID NO: 345189 - DNA, 1000 bp, Homo Sapiens; identical to SEQ ID NO: 246609

SEQ ID NO: 345190 - DNA, 1000 bp, Homo Sapiens
ttttttttttttttttttgccacatgagcaagcttgggtgctcccaaggttcaaatactttttattagacacggccaggcagagaagaccatgggagttcccgaggggccccagctttcaagggcgacgggagagacacaggataaaaggttaaaagtgcagaggcagagtctggggctcaggttgggtctagggtgtcctcaaacaggctgaggaggttccgaggctcaaaggaggggaaggagccccgaggaggctctgagttgatgtcacttaggtccagggcatccctgggtgtgcacctgctccggggggtggaggtgctccccacagtccgggccaggacagcctcaggggagagtgaaggcctgcaggagggcaggcgagacaaggagggtgtccagggcctaggctgtcgtcatcccagttgctggagaggctgctgtccaggagcaaactgcagggtggtgagccaggcggggtggctggcgggcccaggggctgtagccagctggcagggtgagccagcccatgccagagccagcagagcagggcaagcagggcctgccacagggcccaccctcggctcagggcctccgctgccatgcaccacagcacaccccaggcccgcggctgcctcaacacaggcagtgccagcagggcctcggccgtggcccgcagcttggggtctggctccagcatcatgacaaggacagaacgcagctcggaagacagaccggcagtgaactcagggggcaggtagccctggcgcagctgctgccagccctccccaccgtggggcagctccatgttgcatgccacttccaggatggtgaggcccagactgaacacatccgctgctgtcccataggagccctgcagcagctcgggggccatgtagcgggggtctccctcctggacctcaccagctcctgctgtacccagctccaccagcagtccgaagtcacccagcttgcagcggccccggggccccaggaag

SEQ ID NO: 345191 - DNA, 1000 bp, Homo Sapiens; identical to SEQ ID NO: 161109

SEQ ID NO: 345192 - DNA, 1000 bp, Homo Sapiens
tttttttttttttttttttttggggagggcaacaaaaagatgagtggtttattgaaggtttggtctagatacttataaaaatacaaactggcatgaaattcaacctcatgaagagtccgtcttcatagaagacaagtgagtgatcccctggggagggcaaggtgctgccccagggaaaaggcccacagggcacagatggcagggcttcttctttgccctggtccagcaatcgacctgtccccaggtcttcagcctgggcccccagctggcttgaggatttgatcataccaaatcccagtcctcctgggggatgggctgagaccctcagagcagcctgcaaagcgcctgtgtttgtcttgcctctgcttcagagtgtccagggctgtctactgctcttctttagcctgtgatgaggggacaggctcctgcaagagtcacctcagaccctctgatctcccccatcaatgctccatcttgtcggtctgaattggcacccccagtgcaggcagcagggatccctcctcctccaggggatcttgggaggactctggctccttgggatgagagggaaggtctcctctccttgcagcagacagacacctggagcctcaagcactggccagaactctctggagtgggcaccgagatgtagtagtaagtctctccaggtaagaactcaaagccgagggagaagggtgtgaagcgctgaatcttctctgagaattgaacatggccaaagggcagggagcacacccagcgcttgtaggcccgggggccctctgcctggcaggactcatagcctggccagtccaccatgtacaaagcaaacgtctcggggccctcagggggccctgggccttcgtagtgggggcagacaatgtctaggtaatcgttgaggcccagctccaccacggcgtctcctcgaagcaacctggggttactggagttccagtagactacgtggcggaggctggagcccccgcgcagaggggagccgagg

SEQ ID NO: 345193 - DNA, 1000 bp, Homo Sapiens
ttttttttttttttttttttttggaaaaaaaaaaaccaaaacactttaatttttaagacaactgcaagcacctcaaacaatggattattgttacaacacttgttagcttttcacaatctagttattgcaaaggcatatggataaatgttaatggacaaagtcaaaaacgaggcaccttaatgaatgtaaaatttaaaataaaaagacattcaatccactgacttctaaaagaggctaaatatacctctatatattacattctaaaattgtattgcctactatggtttgtatcctggagtctacaattaattttaaggaaatgcataaacaaaactgtgtgcaacctgcaaagggaaaatcattttctcaacttcgtttcatggaaagacaatgaaaaagctagtaaaatttgttgtagccacacgtaaagctacctatggaatgaatgtgatcactgttatctttgagctgtgagaagtattctgcccactgcactgcaaattgtatataccataccttgtgttctagacaagcatgatcatgcttttccaaaaatatatgtattttttcattccacacaattaacacgtttctccaatttaatctatgtagagcttaacttacagcgcccagaggaggcaacatgacatggtactgagccatcacatttttaaagggaaattgctcttctttaaaagtacttttaaaaatatgcaaaatcacaaatgggactgctaaattataatgcatattttagaatgagaaacatatcttttcttcctttaaagtgccatatagagaatgacatcttataacccagagccactttgtttaaaatccaatgtgaaaagactgttatggaatgaaaagtttgcacaactccttggagcagttaaagtccgctacatgcaacataggctacaaagcactcaagacttggtagcttttctgaaatttgagtccccctcccatatttaatggaaagtaacatttacagggt

SEQ ID NO: 345194 - DNA, 1000 bp, Homo Sapiens; identical to SEQ ID NO: 161110

SEQ ID NO: 345195 - DNA, 1000 bp, Homo Sapiens
ttttttttttttttttttttttttttttttttttttttttttttttttttttttatatttcaacatttcaattttattgtatttaagaacttttttttctcagaaaaaaattacaaaattcattttataaaattcatccagagaaatgatttcagtcccatatggtacaaaatacctttcccaaggaatagatgatttaatttaaagcctctgttttcttttccttttataactttacttttgttttttttcacagactttctattttagaacagttttaggtttagagaaaaattgagcagatagcacagagagctcccacgtactcttcagcacacacagtttccccgattattaacatctggcatcagtgtggtacatttgatacaactgatgaaccaatattgacacgttactattaactaaagtccatagctcacattagagcaaacgctttgtgctgtacatgctatgggttttgaccaatgcccaatgtcatgtacccaccatcacagtgtcatacagaacctttcactgccctaacatcccctgcactccacctcctcatccctcccttcctctcactgcccttgcagctcctggaaatcactgatctttttactgtctttgtagttttgcctgttccagcatgtcatatcctttcagttttcagtaagtaacactctcacacatttcaaaagttaaaactgtatagaaaggaaccactgagaactctttctcccacccggtcccagccccactgttccccattatcctactaccccagggaaaccacctgattagtttcttagcctttgtctagcttttatttatgcaaatatgttttctaatttcctttctttcttacacaattaacagcatactattagtaatatactatatgcactgatctgtatcgtgtttttttaattataattattcttttaataaaatgcttcactgagagcagggaagccaccttactttcccaaaagttaca

SEQ ID NO: 345196 - DNA, 875 bp, Homo Sapiens
ttttttttttttttttttctcttcccccggccgcgcttggaggtatctctaggttagactcctctggggctggaatgacgtgaagggtaaggtcgcccagcttggccagggcagtcgggggcaggacagcgggagagccggtccgaccccagcccagcctgctgggtcagcattcatcagagaggtcgtcgctgcccgggagctccgcggcttcgagctccacgctggacagaaacctcctcagcgtcttgcggcagttgtaatccagggtggtggtgtagacggccttggggtacttggggtacacgatggtggtactgaggaagcgggtgggcctgtggcgtggctcgaagcgcacctcggccttgtagttgcgccacgtgccattggggacacaggtgaccgtctggctgcaggaggccaccgccaggcccaggggcagctgcacgtcgtcgatgaagtgcctctcggagtcgtacttgaccaaggaggtgtaccttacttcctttggtggtaaggggtcaaactccactccttcgccaaaggacaggggacaaagcctcagcgcacagccgggagccagggggagagacgctggactcggagccgcgggggtcgccgccgccgcgtcgggctccagcgtccccggtgccgccgcgcgctctccgccgcctccgcccgccgcgagcccccagtggctggggctggggctggggggcagccccgagtccgggctgtccaggacgccgtcgcccttcttcttcgcgtccacgagctcgggcacatcctgtaggctcagccggcccaccatggcggcgcgcgaggggggcccgaggcacccgcgccggggtcgcgggacagcgaggggcgcagac

SEQ ID NO: 345197 - DNA, 1000 bp, Homo Sapiens
tttttttttttttttttttcatacaagtttgcttttatttccatgttcaacctgcggagaaaaccggccacaacctgcacggtgggggtacaaggcatggcggcgccctcccggtgggtctccgggacacgtccagcactgcccgcaatggggatgcaagtccttcaacggaaatgctgctcggctgtgtacaggcaccgtggaaacatcactgggcgcaggagaaggtgccgccagtggcgtcgctaagtcttcggagccaacgccggcggttccaacagaaaactccaaacaagaaagaagtggaagcgggtgccttaaatcccccactgcagacaccaggggctgaaaggcacaaaaatgtgtcgcaatggcagaatccaggcgcagtcacagtccagagccagagagcacagggaggaggcgggagtcacgcggcttcctgcaggacggcctcggctccacagcacacacggctgcgcacagtgctccaggtcactcctgattcccgaggggaatgatttcttcagtgacgaagaactcaatggtctcctcttcccagtcgtccacgttgctgtccagctcgtcagtgtccacccctcctcgcaactccaggcgctcgtttttctgctccatatagagctcctgggccattttccggtacttccggaaatcttccatcatggtgcgccttctctccaccaattcctttgaggctttggactgactcaaacgatccttctgttcaaagatcttagagtatttcttcagatcctttttaatttgcttgatctgttcctggctcaggagtgtgggaggccggggccgccacagcagctggcagaagcggtccttgttgttcttctgcaggaggcgtccctggaaagtccacagccagtacgcgttgtccaccttatggctccaccaggacacagaggtgacgacgtagcgcccagtaggatcccattcgacgtcggaagccatgtagtgctctgcgatg

SEQ ID NO: 345198 - DNA, 817 bp, Homo Sapiens; identical to SEQ ID NO: 161112

SEQ ID NO: 345199 - DNA, 1000 bp, Homo Sapiens
ttttccatgtaatatttgttttatttataataagaggaaatacatttgaacaaagaagctctcatagtattggcaattttacatatatctctgttattgtaattttttttacttgctgggcttggtaattcttcaatggacatgaaagctatgacctagagagactatagagtcgctggtaagcgtacgcccgaggccctgggcgtccccactggtagatggtggcgtgtggacgaacagcttagtccttgggcaaagcttgtgctggtcgagagtggcgagtctgggacagagacccaggctgctccctgctgcttccaggctcctctctcttagacttaatgcccaggaaactgagtattttcatcagcagcaaatctacgatctccccttcctccgacagctgatagtatttttgctcctcactgaaggccaccaggatgacagagataaacaggttcagcaccacaaatgtcataaaaacaatgcaggatccaatgaggaaggagccaagcactgggctatagtccaggacctcctcgtagttgaagattcccagctgaaggctgaccatcgtctccgccgcatcaaagagggttttgtaggaacggagtttccaaccaaatatcaagtttgacgcgatggagtaagccaggagcatggtaaggatgacaatcataaagcctgaaatgtcgccccaggcacggcgtagggctgccgtgatcatgttcattttgggattcaacctgagcagatgccaaagcttcactgtggacaggagtaccaggaaggcaatgatgtagccaagggcggcatcggctgctgctgtctcactgaagctgatgccttcctccctgtggttccggcagcgctggaggtccctttcggccaggacagccctcttcacaaacaccgccagggcgctccagctggccaggatgatggccagctccagaaggttccacttgctgcagaaatagccccacgtctctttactcat

SEQ ID NO: 345200 - DNA, 1000 bp, Homo Sapiens
tttttttttttttttttattattaatgccttttaattttaatgtttcacattgttttgttttttttcagaagatttgtaacaaaaatacatggaacttagtatatgtttcaataaaatgggtaaatacagaatctgaacaagacaagtctataagatataatccttcttgtggggatagaacattccactccactaagaaaagagaatcacaacatgattaggcctgattatctcataccgcctactgttctaatttcagagactggtggacttggagaaaaaaacaaattaaaaataaataaataaaactgaatatggtcaactgcctcaattgctctctccttttcccttttcccatttctttacacagccaaatgagatgaggacgtgaggcagagccctgtgggggacggtcaggggctctgctgcctaaatgccaggcagatgcatgggttccctgaggtggcccagaaatgtattttgaccactcagtgctgcaactgagaaatacaggtagagtagcaggaatgaaaaagaagcttcaagaactgctggcaggaggcctgatgtccacaagcacgtgttcaaaactcaacctacacagttagaaaagacagctgagatagaatcctcagccagtacattgacaaacacataactgaggcattaatacctctttataataatgcaagttgaaatgctaacaaagcataaacacttctgcaaaaattccacaaggcacagttgttcattcaacagaaaaagtcaaaaccacttggtttttaaatgaaaatccttcacatccacctgtgttcaaaatattaataataacttatgatattaataacttcctttaaaaagcaattaccacaaaacagctaaatcataagcatgaaaagacttattttcctactaatgtagtcttagaaagaaatagatacccaatgtcattattttttttagcataaagctaaagctaccagaaaaacttttaaacaa

SEQ ID NO: 345201 - DNA, 840 bp, Homo Sapiens
ttttttttttttttttttttttatttcatacataatttttatatttaaaatgcaaactataaatataatacacatatttacttgtacttgtgcaaataattctataggcctgactgaaagggaatgttccacctttctacctttttttaatgacaaatttctgataaaattccttgttacctaatgaatgacttcagtttcaaaatatgctaaatgcattcagtttccagtagttctgggcacacactgtatgctaagacttggtgaacttgaggactgaaagagtttcttggcctgcttgtctggaaagtgcagtggttccttgcagaccttttgtcttcattattttcaaaatttcttctgggttgttttctttaatggtaactaaatagaataatcctcttggtgaaaggagatctggaaccaggggaaaaaacctgtccatgacttcccgaccatttctgccaccagcccaagctgcctctattccgtgacttcctaccaaatctgtaataactggttgaatgtgaactttgttacagcgtgctgtctctagggtacaagctgctgcctcagggttgatatcagtgcacatgtacaaagcctgagggcctatcatagaggctaggaatgcagatactacaccagaccctgaccctacttccaggcatatttccactcctgccagttcggcagccgctgcctcgagcgcgtccaaaagcagaaacgtgtcctccgcgggctcgtacacgtcgctgaaggcgccgcggcccacgtgcccgtggaacggcgtagcgaagttctcccctgccatagtccttcgctgcgttccatgcgcgt

SEQ ID NO: 345202 - DNA, 1000 bp, Homo Sapiens
tttttttttttttttcttggttgttgcacctactttaatgacaacttcaaaaaaggaacaacatccatccacttcttaatgtctttatgaacacagaggctagagtccccagccagcttctgaggcagccctgcacatcctgcaggtggccacactcaacccatgccacaccgtttgcttaaagctacaagtcctagagctgaagaactggcaagccagtgcgtgaagcttatcgacagcgcttccagccacacgagcaagctgcgcagatacagggaggtgcgtgggtccctgtggggaaatcctccaggcacatcgaagcccgggcatgtttagtgtgagacttggacaaagtcctctgtctacaccagagtggtaggaaccaaggcaggcatcagctgcgtcataaggatctggtagatggagtctcgctctgtcgcccgggctggagtgcaataagtggtgccatctcagctcactgcaacctccgcctcctgggctcaagcgatcctcctggctcagcctctcaagtagctgggaccacagatgtgccaccacgcctggctgctttttgtctgtttggtagagacgggtttcaccatgttgcccaggctgctctgcaacttctgagctagagcgatttgtctgcctgagcctcccaaaatgctgggattacaggcatgagccaccatgctggcctgatacggttccttgttttaaagtgcattattcaacaagcaaagtacccgattccctttaactatgaatacaatacaaacttcgaatccagagaggtgtaaaacttgtgtgcaaagaactgtcaaggtgactttctcaaattaataaattgtcttacaatgattttctgtaaagctttctgggtctgggaaacagacctgaagtattaacacaacttgggttaattgtggaaaaagtgtcacttcaggtcacccatttccaaaagagcagcgggtcaccaaggggcccacagccacagacc

SEQ ID NO: 345203 - DNA, 1000 bp, Homo Sapiens
tttttttttttttcactgagagctgtatttgaagaacagcctatattctgctaaatttcaatcttcaaatttgatctttttattattctgaaagtctaagatattaagaatcagtacgtattttaaaataagactgcatatagttagaaaaatatgcttcgagagcttatattttatttcgttaagaaaataaaaccatgtacaaaaatcatttctgttcactcacaccaatcctgttgtttgatctttgtgactaagcaccaccataaagcacgaagctctgaaggaaggtggcggcagagctctctccttaaccccaggctgccttggggtctcatttctcagcttcactggaaagttcgatcactccctggttggagaccgtatttaaaatagcccacagtttggaagggtcctcacagttatgctggtgcttccagtggtggaggaggtcctctttccgtcccagcatctctgcacaaagcaggcagttaaagcctgaatgggaccacaagagaaacgtgtggaggccaggacactcagggccctggcaggtttcccttggcttgttggttcctgactggggtccttcattttccatgagcatttccacgccattctgatgaaggtggagctgccttttcagtcttggacatgcatgtgattcctcggaggaggaatgaaccttctccggcttccctctctcaggatgccttttccagtcggggctagcgtgctgcaccaactcttcctgagtccccttgcttcctgggaaggtcccttcttgtagcctgccctcaatttcctctccatgaacatcaagtaaatgaaattttatttccgcaaaagactgagcagtaatctgacaacgaccacatttgatttgtaatttgacttcgtctgcctggtttagaaggaagtcttcttccaggttggacttgttttccctctccaatgatccctccatgcctcgcacactcatgtctctgttctttggtat

SEQ ID NO: 345204 - DNA, 1000 bp, Homo Sapiens; identical to SEQ ID NO: 161113

SEQ ID NO: 345205 - DNA, 1000 bp, Homo Sapiens; identical to SEQ ID NO: 161114

SEQ ID NO: 345206 - DNA, 1000 bp, Homo Sapiens; identical to SEQ ID NO: 161115

SEQ ID NO: 345207 - DNA, 1000 bp, Homo Sapiens
ttttttttttttttttctgactgactgtataattttaatatttgaaaaattgcatccagaaattaatacaatacagatttgtacaaaaaaggaaggacgtaaaaacttctaatcatacagacaaaaatatgactgactaagcaaagattttaaaaaaggacaggatgtttaaaaaatactgataaatactgtgtaatgctttaatttactgtggcagatacaaaaatcaataattcattaacagattatatatgtaaaaaaagtaactacatgaattttctagctttttaaattaataaaatgtaacagtagtggtttttattttttaaatgaggtattattacactgtaaaccaaaaacagagcacaaataaataaaggcaatgtgcaatttagtgataaatgattatacatttcaacttaacaacagataacaaaaattctctagttatttatggacttcgtcatctaaaaatttggcttgcttgtgtggacttcttatttaaaagtgacacagctaatcgatatacaagcacatcattaaacatgcagaccaagccaacacaatttttccatgagtcatctctaccaaataaaaactgtttacattttatttaaaacacttaaatctggtttcttatacatgtttcttttgtgcttataagtggtaacctacattaaaaagctgattttctagttcaagcagtgtaagagagaagcagttttatttgcatatggatttaaaacagagcaaaatgaaacaaaaccaggatgcctttaactctcttaggctttccaagatttttaagaagaaatacccttgaaataatatacccaaatggaagagcagaatcacttccatctccaagagaatagtaaacaaagtgaccccttttcctcaaagatttgtgggttggcttcagaactgttggagaacaagctgattagttcctccaccctggaagaattctgctggttgggtgcaggaagcatagcaagaa

SEQ ID NO: 345208 - DNA, 1000 bp, Homo Sapiens
ttttttttttttttttttcccagctaattattttattttgtatttgtagagacagggtctcactatgttgcccaggctggtcttgaactctcagtttccagcagccttcctgcctcagcctcccaaagtgagccactgtgcccagccagaggctccagttccactggtgttgggtgaggcctagtgagagggtgggcagagggccttgttgaatctgaactgcagcaagggctcgcagatctcaaaggaggcagggaagtgtgctggggtcccgtcagcatcgcatgaactcagggatggctgcatttgaggccagggtcaggctgtcctcacttatcaggggacaagagctggctgatgccgattggaaaggatagaatcctagtgagctgccccagtcccggtaagcatgagtgcctgcatatcctcgctcttcctcagttccacccccttcctgggggtgtcacaggctcctggcagaaccagagcccatgccctgcatttgggctggcacatttagtggaaccagccagagaaatgctgtccctccttcctggggaagtggtggcaaacagaggcgccaaggctctctctgcccactgcccacatcatctctgggactctgcgggtgccctctgccccaaggctactgccagggactcaggtgtggctgggctttccagagcctccctcaaccctcccctcacaggctgaagtcagtacttcgtttgggggagccacacccagagccaggagcctgacttgctcagggcctagggaatgggaccaagagtgatccagcttcttctccagagctgcaccctgcacaaatccaccctctccctacgctttgccctggacactttcagaacacatcacactgcctgtcatcatgcatctccggctagggcagagggagaccgtgcacgtcacccggcacaatgtgacggaagataaactgtgtggggaagagaaactgaggcccaacaggaataaagct

SEQ ID NO: 345209 - DNA, 1000 bp, Homo Sapiens
gacaatctacaaacacttttattagcaaaaggagtaagtgcagcatgggagaaagaggggctcctccttcccctcaaaggcatcactgccccttcccaaggggcaggccagcagggaacaagaggaccccagggttgcaagcaggctggaatcagacaaaagtgatccgtgtccgggaagcattgacctgccagacattgagctcctcatattcatccagagccgcctggaactgggcgggtgtgaagccacgagatacacagcgctgctctgcctcagagaaccggacacttcggccccctgagaccagttcacggacggtggcaaatatcacatctgctggtctctgagtcctagctgtctgccccttgtctcctagaagagagtcctttgacatctccattagcctgatggcttcattcacatcttctttctccaccacatccaccattctcagacgtgccagagcagtggaaaggcgcaggatagccagcagggtccgggcagaagtataggtggcatccttactagcccaagcctctcgcctcatctccacgtatgctgctgtgatgtagtcagccagagactctggcaccatgggctgcttctcgcggcacatggctatgtaacgcctcatgagcttcatgtccagaggttcaaactgggaggggggctgccggctgtgctggtgcacataggtgatgtgctgggccaaccgtaggtcattgtctcggtcgggccggtcctgaatcagccagaggaggtcaaaccgggagagcagtgcagcaggtagctgtatgttctgctccaggctgcggcgagggttgtagcgcccgtaggcagggttggcggcagccaggatggagcagcgggcattgagtgtggtgagaatgccggccttggcaatggagatggtctgctgctccatgacctcgtggatggctgtgcggtcggcctcagccatcttgtcgaactcatcaatgcagcacacaccctggtc

SEQ ID NO: 345210 - DNA, 1000 bp, Homo Sapiens; identical to SEQ ID NO: 161116

SEQ ID NO: 345211 - DNA, 1000 bp, Homo Sapiens
tttttttttttttttttttttgaaaattggcaatccaaatgtggtgatattttattaaccataatttttcatgagatgttagtgccaaaagatatgtagtctaactccactgttttacagataaggaaactaagaacaagagatattttacagaatccacttcaaatcataaataggagaaaaacaagtctattacaactgaagtcaactagaatctgcatgttttgcatcatttgggtgaaaaacatgctgagggtattaataagccccctttgaaaataacgatgatatcatgtatatgaaaaaggcaaaacatttgctagaatgtgtcttgggagcaaatactcttgacgagtgttatgcgtgttttaattttttattagagaagttggaagtttaatttcaatattgatggtatcatcattttctccgctttgttcagaggaacacacagaatcaatttttacaagcatatacaacaattcatctggtgctgtgccctaaaatcagtaatctgattagttctagactaccgggtttccatgcgctcctcttggctttggtggcatggctcaattcccagcggaatactttttcatgcactgtctgcaactcaactacagcaggcttaaagaccatgcagattaacactgtagcaaattgttttgatatttaacagacataaaaaggtcatttcctgatatgaaattctgaaaatctgcataaatatttttgtgtaaaattaaattagttatgtatttttttcaaactagaacttgaagtatcaagaatgcccacataattcatatacacatatatatatagagagagggtttttcattatgctaaaagtcttgatagtcaaattatattctgtgccatacatttatttaaccagtatttatttggcattaggttaactgtgtatggattagtctttattggtgcttgtgtatcatgcaaacatagttctagtattcctgtttactaatcttgtcat

SEQ ID NO: 345212 - DNA, 1000 bp, Homo Sapiens
tcttttagaattacattatgtgcttaaaactgtgccttgcacaaaccccaaaagtctttgctgaatgaatgctgcacaaacaaatgtagagtcgagactgggactaattataggctcttgcataagttagatcatatttcaccccctccttgggggcagtgttcatctcacctttcccttagtaagtccatcatggggatctgccagtgaaccagctgtctctggggtcatgtgcttgcatagtaaagggacacagctcatggtacagaaggaagaagtcctgtttctctggttctcacccagatgctcagaccatcctgacagcatgtccccccacccctgcacagccttgggaacactgattgtattagtgtccattggtatgaacctgacctccgcaaaatcagtaacaactccataagtgaatgaatgaatgaataagttctagctttgtcccctttattcaagtttactatagatactccccccaactcttaaaacaaaaatgacagtgacctacctcggtaacacatgttccttttaatctgcttatcttggaaagcttcatattcatcctcttgagccgtcaacatttaccaaaagagaatggtcagctccccaagttgcccacccaagttacctatccattccactgacaccacaaaaggcccaaacaagtctctcttgggagaaatttttaggaaaggtgtgcaagaattcagagtcatccacccaaacttccaaaagtatactgtgtggacaatctgcagctataaaaatatacacatacaaaagtacagctacaaaatcatgggggctcagctccttaactctgcattataagaagtagggatttcacattcgaggtaagctctgggggagggggccgcattatgattatgattctgtgtttgatctccttccatctttatttttatggactagtcagaacacagtgaaccagccagtgaggagtggaaggggttaatccgaacaatcc

SEQ ID NO: 345213 - DNA, 1000 bp, Homo Sapiens
gaacctctctagtttattcatcttttagaattacattatgtgcttaaaactgtgccttgcacaaaccccaaaagtctttgctgaatgaatgctgcacaaacaaatgtagagtcgagactgggactaattataggctcttgcataagttagatcatatttcaccccctccttgggggcagtgttcatctcacctttcccttagtaagtccatcatggggatctgccagtgaaccagctgtctctggggtcatgtgcttgcatagtaaagggacacagctcatggtacagaaggaagaagtcctgtttctctggttctcacccagatgctcagaccatcctgacagcatgtccccccacccctgcacagccttgggaacactgattgtattagtgtccattggtatgaacctgacctccgcaaaatcagtaacaactccataagtgaatgaatgaatgaataagttctagctttgtcccctttattcaagtttactatagatactccccccaactcttaaaacaaaaatgacagtgacctacctcggtaacacatgttccttttaatctgcttatcttggaaagcttcatattcatcctcttgagccgtcaacatttaccaaaagagaatggtcagctccccaagttgcccacccaagttacctatccattccactgacaccacaaaaggcccaaacaagtctctcttgggagaaatttttaggaaaggtgtgcaagaattcagagtcatccacccaaacttccaaaagtatactgtgtggacaatctgcagctataaaaatatacacatacaaaagtacagctacaaaatcatgggggctcagctccttaactctgcattataagaagtagggatttcacattcgaggtaagctctggggaagggggccgcattatgattatgattctgtgtttgatctccttccatctttatttttatggactagtcagaacacagtgaaccagccagtgaggagtggaa

SEQ ID NO: 345214 - DNA, 1000 bp, Homo Sapiens
ttttttttttttgtattcttgacatgggaaaattttatgaaattcaaattttagtgtccataaataaagttttattggaacacagaatatgtaatatattcattggtttatgtatttgtctgtatgcctacatctgatatgcaaaactatgaaatattcatacatataaaaggcaggtcaaaaatacaactataaaaaatttataagtaatttacttttagccctttggagaatttatttaacaattaacacatggctaccactacaattttttttatttttttgagtcaagagttactttattgcccaggctggagtgcagtgattggtgtgattgtggctcactgtaacctcaaactcctgggctcaaagaatcctcctgcctcagcctcacaagtagctgagactataggcatgtgccaccatacccagctaagtttaaattttttttttttttttttaagaaatggggtcttgctatgttgcccaaggttggtctcgaaccctggcctcaaggaatcctctcacctcagcctcctgagtcactgtgattacagtgtgagctactgcatctggagactttatcacttcttaaattagtttattatatttaatgcttttttcctattataatacttttgggacatcatttttcagagaacagtatttgactgtgtgtgtgtgtgtgtgtgtgtgtgtgtgtgtgtgtgtgtgtgtctgtctgtctgtgcgtgcacgcatatcttcactgagatggctttaatctgcaataaacccaggaggccctaacttggtgaagtccttttacatagtttgaagctggtaaacttttgggccttttttcaagaggtaaccctggtcatttagtgatccaataaaattttcaaaatcagcaacctgaatgtttagttctttggcaatctgccgaagttgatgaaattgaaatatattattataagttctttcagcaacgttgttgagagcagaaataaatcttttc

SEQ ID NO: 345215 - DNA, 1000 bp, Homo Sapiens
tactttccctacaaaataatttattggaacacacagctacagcactctatgtacaagcacattgacgctcctgactatcctcaactaggggacccttttcttcccccttgccttgcggacctcttctatcaaatctttcaggtactggatctccttggccagggaatccgccctctcttttagagcctcgttcttcttttccagctctttgcactcaccagtaagagcctcctgctccgccctcttcttctggcggtacctagtggctgctgtcttgttttgctccatttttttcagcttcttatccagtttctcaccctttacttttgctgctaccatcttctctccaggaggatcgtaaggtttgggacgggcagacccacagagaacacctggagatgggaggctcctatttggagagcccctggtagaggggctgtgctgaggagaccccagataggactctgggctcatacagatgccactatcattatctgaaggggtgtcttcctcctttatgcactgagggatcatggcaacgtaagcagtgtagtctggcttcctatctccttcagtgatatccacttcactgcccagctctaaactaaaggaatgatctggagtggaggacaggacccctggggaaaggggaagaggttgtaagaaggtgaagggggcaacctggtcgggttttgttaaactttctgggagatggccaattgggttcaccgtctgggggggctgcttattagtctcctggactaggggggcaaagagatcacaagtgtcatccaacgtggtcagaaggtcatctggcatggtttccaggtcatctatacccaacagggcatccaagtcgaactccttcaaatccattttctccaacatccaatctgtcccggagaaggcatcctccttgctgttgttggagggactgaccaacccatccacagccagccattcggaggagcccgccttagccttgtcgctggagaaccca

SEQ ID NO: 345216 - DNA, 1000 bp, Homo Sapiens; identical to SEQ ID NO: 158007

SEQ ID NO: 345217 - DNA, 1000 bp, Homo Sapiens; identical to SEQ ID NO: 161120

SEQ ID NO: 345218 - DNA, 1000 bp, Homo Sapiens
acaagtgtcattctttttattcttagtttggacagatactccattcttctacactggtcccacggtttctgaagcttcctgtaatgatcagtggttaccttgttgcccaagtaactgcaaatccctcctctacaaagtgtgcttgctccaaggcagtgcaaactagaagttgttacaaatggttccagtaacaaatttgtttggcggccttttcccatgaatgagacagtggttatttttgctaaagcagaaaggaaatgtgatactattgggctgtgttttgccctctggagtaatcctgcttggggaaaatggaggctagttccagaatgcagaaatccctgttaaattaggcagtcttgggctggaggacgtgtgcctgcctccccagtgcctcacaactcacatctctaaaggccactcaggtgggacaccatcaagacattgaaaatcgacagaaggaaggcaggaaggggagaggatcgaacctgtcaaaatagatattcagaaaatctgtgctctaaaataaggcagcccttccctcacagcacacttattcctaatttcaacaggactcctagtcttgccccacagcgtcacagcctacagcaaattagaaactggggtggggggcggatattattccaccagtaatacccttgggacggggcacacaagatgtttgccctcctacctctctgtcaccttcccaagaaagggtcaagatgaaacagtgtgcgtttatggtattgcgagagttaagtgagctgcggtgtattagaaccttagcctcgcgcagcgtcagccgtgtggtaagtgttccataaatcttcgtttagaaaaagtggcaaattccaggctgctagtaaacaaaggagggaagacagacaaaacggaacagcaacaacagaaaacccaagaactagatgcccaacaatctgggtctgtatcttgaaggaatgtgcatcctgtcctctgactgcaaacccaggccttctgt

SEQ ID NO: 345219 - DNA, 1000 bp, Homo Sapiens
ttttttttttttttcctgagaggttgcctttacttatatgcacagtcactcctttagcagaaaatattatggaggtgttaggatgagataaacctgacagcaaccagttccaagaccacacacagcagttttccccttgcctagccccttgagatgcattcttgatagcgagagcacaatggttcccctgagagcctccgtggcccttctgtgtgcctttatcaaccactccccaccatcaccacccttaggcagagagaggaagaagcaggggagatgtggctaattcttctttggaaacacagaaggctatgtcagatgcaatggaatatattgtgacataggattatttggagtattcagccatggggatctcttagaggtctcttatttaaggataggggacctctatggagggcatggttggcttatccaccttcagggtgggcaatgtagtttgaaaggtagcctcacttgtagcctgcctggtgggtgcttgggtgagttcaaagaccacggtgggcatcggtggttgaatctcatgcttgccaggcttcaaaggtgtgacagcattcttgataggtagtagtttcttggatggtgctgcaaaattgaaatggccttggtgttcctttccactcttgggtagagccgggtagagggctgctagagtccaaggaccttccacaactcggacaggaggtttcatggctatgtgcaaatctatctatctatctatcttcctcattcttacttccactctgagtatctgtgcgagtgctggaggtttcaaacaatttttctttttcagtctctctccgccagtgaaaacaaaatatggcaacaataaaaagcacagaaatgatatctgcaaggagccacatgaacacatagaactttggtgtcatgaagaagtgagggtgatcaagctgactcaggagcccaatgttgtctgtggtcactgagttaatcctggagcaccaggccagtgagaaaagcc

SEQ ID NO: 345220 - DNA, 1000 bp, Homo Sapiens
tttttttttttttttttttaaagttagctaaattatctttatttttttttagaaacagggtctcactctgttgcccaggctggagtgcagtggcatgatcttagatcactaaagcctcagactcctgggctcaagtgatcctcccagcctcaacctcctaagtagctgggatcacaggtgcgtgacactatgcgtggctcaaattctttttactttgaaggccctgctagaaacttgctgctgctctaattcacgacttggagagacaaaactaaaaaagctgttgctgggttcaggtgctgtgggagaacccgcaaaaaatggtctgaactgaaaatctccatctccatcgccccgatttcgaacaggtgtattatccaaaggaaacttggagttgttacctaatgggaagccaagaacaccagactgtgcaatcatggatggttcaagggtgccttcatggttagcaatagtgatgtttcgtagcctaaggctatcatagaggccttggagcttttgatactgacgattgcgctccataagtttctcagagatgtcactgaactttttcttgtattcttctagtactttcttcatggaggtaacctcccctttcatagaggtcaattctacatccttgctttgtatttgctgagtatatatcttctccatctgtttcagatggccctcagccttgctgaaattgtattcttgatagagacgttcctgatgtacctgatatgtccagaaggccagcgctcgggagctaatgtccaacacgatctctggtcgcagtcctgccaataccatagctttatattcctctgatggactgagttctgtgcggacaatatctagctttccagaaagggtactgttgcaggcaggacagatagctggtgagcgactaaactcaccactgccatgctgatcacagaagatgtgagagcaggcagtgacccatgcatagccagagagtttgatgcgacactttcgataa

SEQ ID NO: 345221 - DNA, 1000 bp, Homo Sapiens
ttttttgtggtgagggctttgggcttgttccctgaagctttttattataaaaacaagatgaaacatagatcacattgcagtctcgattgtaatgaacctcagctgaatgtgccgacagcggagtatctgatctaatgtggactttgaagcattttgaaatgaaaaaatcttgggatgtttttgtttttaaaattcctgtggttgttcgctaaatggcaaaatagggggccaccagccggacagctccagaccacctacagaaagaaagtctcaggccattatgaaggccgaaacgctaacagccatcttcttctgggtgcacagccctgcggccatccccaccgtgagatggtagaaagggcgcgtgcaaggatcagcacccagtgtagaaactgacttgtaccccgaaggtatgcaatgcgatcccaacaggctcattccagatataaaaaatatgtcatcactttcattaggtaatattaaaccaacactaagaacttctgcaagatcttttatattacacagtagagttaaaaactgtagtaaatgttcagatatttaaatgagcaccaaacactacaaagtgcaaccaacatggttctattaaaaactctctttgactatggcattcaaggacagcaatacaatctttttttttttaacaaagcaactaatataaaaatctgcaaatgccatatattcatatctaggctattcttctcatataggcatgtcattagatagactttctttctattctttcctgaggtatttttttgtggtttacttttattgtactgctggatgcattatttttgatcatcctttcctaaaatgatttaaagacctgcaaataattttattgcataggacactattgatgacacatagaatgggagctgcaagtatgtggcattggaacaagccttacaaatattgcattttaagaatacacacattttttacagtttgtctcttttaaaaaatttgaagttatagc

SEQ ID NO: 345222 - DNA, 1000 bp, Homo Sapiens
gcgagttagagcccccagtggcttttcccattaaaaatgaaccccaggccaggggtggtggctcacacttgtaaccccagtgttttgggaagctgaggcaggaagatcatttaaggtcagaagttagagaccagcctgggcaacagagagaccctgtctctactaaaaaattaaaaattagcctggtgtggtggtgtgcacctgtaatcccagctacttgggaggctgaggtgggaggattgcttgtgcccaggagtttgaggctgcagtgagacataattgagccactgcacttcagtctgggtgacagagcaagactgtctcaaataacaaaaaagaaaaggaaaaataaaaaaaaagaaccccaaacagcccactgtgagccatggtgaccccaaatctccagcgtccctgcggggtcccaggccggctcagtgcaggtattctcgcacagtgagctccttcagggtgatgcctcggggcgtgggcctccggagctggctctcctccagcctctcctgcagagtcacgaagtccttgcccagcgcgtaggccaggcggaccatggcgtccagcagaggcgcatagtagcgatggccctcccgggcctgcaggcgctgcagggccctctctccggccgcgaaggcctcggcggggcggtcgaggtcgcggtggcacagcagcacggcgcacagggccgggacggcggccgcagggcagtgggcggtgagcttctcctgcagcggcagcacgcgcagcagcagctccagggcgcgcgggtactggccggcccgcaggcagccgaaagcctcgcgcagctccggccgcgtgaggaagtccaggaactcccgggagcggcgcacgcagcggatggcgtagagcaggcccaggtactcctgcagggcgcgccgacgctcacagatcatctcctcagcgaagttcccagtcaggtgcttcctgggaaactccacgtcttcgatctcctccctgaacgtcttca

SEQ ID NO: 345223 - DNA, 1000 bp, Homo Sapiens; identical to SEQ ID NO: 343908

SEQ ID NO: 345224 - DNA, 1000 bp, Homo Sapiens
ccaatcacctttctggttttaatggtactttttggccacggaggtccattaggtagagaccattaggtaaagagactcaagagtgtggagtggagtgtggggggttgtgggaggaggtggaaatagttgcaaaaatatctctctgtacacaaaacttagatgtcatagtggattttcccagaacatagcattcacattattgaaaacagcaagattcacttttcctaaaacacaaagccaagaacataaaaataaatatggacattctagagtcctgaaggcctagagaacacatccatagtctggactttagagcagcttagaggcagaagttctgagtcactgaggtccaaggtggagtccagaggaggctgggccccttgagatgaagtccacacagcaggcggaggcttttcaagtctttcagattcacagcagcaacttcaggaggctcaggccaggtttggaggatggaaaagggaagagaaccattgaagaaacagagattgtgttctcttactcctaggctaaataaggaagggttaggtggggcgcggtggctcacgcctgtaatcccaacactttgggaggccaaggtgggtggatcacgaggtcaagagatcgagaccatcctggccaacatggtgaaaccccgtctctactaaaaatacaaaaaaaatagccgggcatggtggcgggtgcctgtagtgccagctactcgggaggctgaggcaggagaatggtgtgaacccgggaggcggaacttgcggtgagccgagatcacgccactgcactccagcccgggcaacagagcgagactgtctcaaaaaacaaccaaccaaacaaacaaaaaagcactgaaagagacagactccagttcccggaaggctgacccagtcagcactaaaaacaggattaatgtatagctattaagagaatcatacagtggctttattcttactacttaaaaaaaggtgatgtgatggcagtgatggtcaac

SEQ ID NO: 345225 - DNA, 1000 bp, Homo Sapiens
gccctctgagaaataattgtttaattgttattatattttttttccaagacagtcttcatctgtcacccagactggagtgcagtggcgcaatcttgcctcactacaacctctgcctcctgggctcaagcgattttcatgcctcagcctcccaagatgctaggattacaagtgtgtgccaccacgccctgctcctctgagaaataaatgagtaaaatgcaccccctgtgagtgagatgatgcatctgacttgcaggaataaaccaagtgacatctggagatcactcatggaagctggcctggaacagggttgtgatttagcgagggaaagcccagtaacctgtggtgtttcctgtcttgcttctcccatagtgacttctggaaattcagggcctccttggtcacatcaatctcccgcttgatggcattgatgtgctgtgtggtctcgctggcccttttcctccgttcattcaagatggatttgttttctttgaaaattcggttgatctcactaccttgctcattcttaaactcctcaaaggccactggtttggagggtggggtgtcgggcctaattgggcgtaattcctccttcggggagtctgagggaaggggctcaatgctggaagtttcccggtcccgcgaaagcatgtctttgacatccccatctttggaggatgggaccagctgggtcttggaggtggaaacgtaatccaagtccttcccattcacagggctgctggcaccttcctttcttgccaaggagctgagtggctctttgaatgtcttcttggacttggctttcttcccaggtttggtagagaaaggggcgactccgagtccaaagttttgtccttcaggctcacccactaggtggccatcaacatccacaagccccgccttctggatagcagaaatggctgcaaagtcattcctgtcaatgagggtgtacttcctgcgcaaagtggactccacttcctgttcctgttggctcagaaccacc

SEQ ID NO: 345226 - DNA, 1000 bp, Homo Sapiens; identical to SEQ ID NO: 161121

SEQ ID NO: 345227 - DNA, 1000 bp, Homo Sapiens
tttttttttttttttttttttttttgtagaagaaaacgattttttaataaatgcttaacccagttcaacatgaagactgggatttggaatgccttaaaagtctgaaggatgttgagttcaatgaggcagaagaagtggttccactgtaatttgtgattgtcgaggaagaggtgtggctgttggtgtgatagtaatactgctggtgactttattggttgttttgtttagtgccccgttaattaagccttgagttcggttatcctgcagtggtgctgaagggctggcaggtctcacagggctggctacagcttgcatgtaaggacttcctaagtgaatgtggattttattatcctcagtagttatcacacttgagctattgctgtttgaacgctgaaactgccatgatgactgccggtctggggagactctgaatatcgcatgcttggcactgatttctgttggttctggggagcgtccctgctcaggagagctagctgaaccagtcacagccaaaacctgaataggggacattgtcctttctggagttagagaaccacaagactctggggtctgtgctctggcaaaggttgccatggtaattggggacatgccttgttctaaattcatgaggtcttcggtagaggttttggactttactggtgttatggaggcgttttggaggatggttatcctttgctttggcgtgccacagttcggtatcactgcagtactcgtgtaagagtgaggactctctgtggttggacttgtgatttcaagagtggctgtgttttgtacatggtctggagtaacctttatatgaagtggctgcccaggtgtgtggcttaggactagatctccaggttgcacaaagttggcattgggtttagtttgcatttttccattctgaagatggccctccttggatttcatccagggaatccatagctttctgttaacaggacatggagtagactggctgcatttgaaggacagcacagat

SEQ ID NO: 345228 - DNA, 1000 bp, Homo Sapiens
tttttttttttttttttctggctaattttgttttttaatgagaaacatctgagttgtacatatcacaaacagcttcaagtttctgtaccaaccccccgcccccacccccgccgtggccaaacagttaaaacccaaagcaaagcatcactttggatgtgaaaaagtcttagaaaattaacttacaaaaacatccctatcaagtcggtagtttggcatttactttacattagtcaaaagctccagctaaaatctaatttttttaaaaaaaaatcgaagtttacattattcatacagattgggcattgttaaaaaatatgcacaaataaccacatccatgcaatacaatttctttaaaaatttaaagcaatataaaagagcagagctaggtactgaacagaacattttggtgtataaccggcagctcaaaattgccagctgattggagtaaaactgattctaagcgtattaaatatgattgattgtttccatcagctaagggtgcctatgagtttctgaaccatttctagggtggaatgtcctcgcttgcttctataatatatgtgatggacaccactgctcattgaccatacctacattataataatgctgttttacaaacaaaccagaattcacaaagtgcttggctcttcaggaaactgacatttccagagatccctaaactaatcaactagttctgccaaaatacccggggcacctgccacacaggttccctgctcctggggaggaacacaatctgaaagctgccctgggctccagggagcccgtgctgggtaagcccagaagaagtctgcacaggtcccgggaccttgccaacactaagtcactcagattggtctggggccacgtgctgggcacccttggcaatcaggcaggtggtgtagcactgtggccagctatgccctctatgtggggggtggcccattggtgtacctcagcatggggtaaaaggaccgggcaaagttgttggcctgagtgcagc

SEQ ID NO: 345229 - DNA, 1000 bp, Homo Sapiens
ttttttttttttttttctgttttaataagcttctttatttactccagatagtgaacataatagtgttcaatagtgaagtaagcagattttacactcactatcactgcatggatagaaagagccatatacatttttgtttttataagtcatctcagatcactgcaacatggcacattagaacagagattcagagacacaaagttaataaatacatttaacattgccaagcatttaaaagataaatgcactcatgtagcaaaaaaaaaaaaatcagtttgtaactttgacctttctcagggatgtgaagaatcatttcaggtgtcagaaatctctgtagcaaagattctcttctaatgatcgatctaggcctcggtcaggagatcgatggtgagcacgttctggtgaatgacattttgtatttggcttcattgtagaactcatatgataagcattacttgaataattttggcggcgaagttcttgtacggccctctccctttcaaagcgctctgttcctagttgtcttttggtaatgtctaaatcagcttccaattgtgtgacaacatttctgaactgggccacatctctactctggatggccattttattttctgccaaacaaaggtgttctttaagaagctgaatttcagattctttttcttgaagtgctatctgagactgatattctttgtctcgattggccaccagcaaagcttctagattctgcatggagattctctcatttgccatctgactcctcaggagttcaatttcagaatgagcagaatctaactcattctccctcatttctatttcttgatctttagcaaccagctgtcgattaagaagttctttgcttgagtcaagtttaatacagagttccctagtagaagacaaatctgcaagagcggacactttttcaaactgaaccttctgaagctcctcttccatttttacaacagatttatgtaaggtagaaatctgggacttgtaagacctt

SEQ ID NO: 345230 - DNA, 1000 bp, Homo Sapiens; identical to SEQ ID NO: 345228

SEQ ID NO: 345231 - DNA, 1000 bp, Homo Sapiens; identical to SEQ ID NO: 161122

SEQ ID NO: 345232 - DNA, 1000 bp, Homo Sapiens
tttgcagaaggttaggtgtttatttgcactgcttttatactgtctaccaggttaaaaaaaaaaaacagagactcttttgaaggcatagattttagatatcaacctcagactgtggcatttgggatttccagagcatgtcgttgaggcacttttgtacccagaggcacatggaatttaccaggctgtggagatgatgtgctctcgggatgctgctgccagtagcctggtgaggtagggaagacagcagtggacgcacagtcagggcccagtacacagcccgcctgcctttcgtgtgattgtccagcaggtggcacctgttccctcctgccacccaccttataattgcttccctcttgagcaccttcagccagaggtgggtgggaaggggaggacgtgcactgggttctgctatgtgccagcatctttggtataaggagccattccctggcccagggcaggcagccagtacccaccggggttggggatcattggtgggtctccattgcccatgctctccctgcctctcattagtagggaatcgatgggcccttgttatgccaaggcaatgctaaaatctctgctttacctgcccccttctcagcaaggctctctgtgggccacagctgatgctccatcagtgccaatttatgagacaagtttctgccgctcagccttggcacagcagatggaaaatacctgcaggaagagcttccccggcatggccttccctgcatcggtcatgtgcctaatgagctatccttgcagtgggctcttctcctgcttttcactgaagaacccttatgtgctgcatagacatgagctcatgaaacctccctggcggggggggggcaggggcagcctcatctgtgacattctctctgggcagccttcactggccctactctcttccttccatcagaagatggctttgggcccaggagactcatgaagacctcaccctctttgtcttcaaagatgctttttctgtggcagatcaacc

SEQ ID NO: 345233 - DNA, 1000 bp, Homo Sapiens
ttttttttttttttttttttttttttttttttttttttttttttttttttttttttttttttttttttgtattatacattttatttacctgatgaaagcatttaggactcaaatctttagagaataaatctttagagaatatataataatagccatatccttttaattaataaaataacactttaaagacaggcatattaccattgtatatgacacctaatacacattgtcagataccacataaacatatttatcttccaataccaatgtttgttttattaaaacaataattaattaattaataggctcaatagtgaccctcaagttaatcccatgactttcccaggctctgcatgcataaagaaatcattgtgacagaaaaatatcaaccacatactgaagcatagcttgctagaacaaatcctgtacatatgaatgccagcaactggggacacatttagtattcacattttatgcaaacttacttggtcaattatttcttttttaagcacaggtttattttggaattcagataagaactgacacatcatagacagtcattgttaaggtaaccctgttatttcaattgcaaacaaacaataaacgttttttcttcaagacagttaccactttttaagatcttagtactaccctatgcaaaaacagttttttttaaaagcctgaacaggttaagatagataatagccaactatgttttctcaggtgaaactattccaaaagaactgtacatttcagtgatataaatcagatccagaaaggtggatctctgtttagttcttgaaatatataattcacaaaataagacccttgttgttctacagaggtcccctaaactgtcttttattctggtgtagtctctaaaacctcattaagagggaggggagaaaatttagtcttaccagaaatgctctgctttttagtagccatcagttttaggtcttctttatgtaactcagaagttcatctttttccatttggt

SEQ ID NO: 345234 - DNA, 1000 bp, Homo Sapiens
gggtgccaaacatcctatttccttggctctcccttgcacaagttcctggacaaagtaaattataacacaaaatccacaacattcagcacatgttttcattaagcaactttagtcactaaaaaaagtgcaaatgcagactcctgtataaatctgatttgccatgctaggccaagcttattttattacatacattctgcattctaagaactaataacttcatattgtaaacattaagcatacagagttaaaattcaaggccacattatatcgattgtctcttttgtcgtgtgtctttggctggccgagatcaactcgtagtgtataaatgcataagttatataattattatataaaaagggggaaaaacattgacttgtatacttcattctgacaaacgcacagcgttcgcgactcaaaggaaaactggaggccgcctacccaaaatgcctgcgtgatttctgattgtggcagccaagaaggccatctcttacctgaccctgtggagaacaaagcccccacataatgatgaggtcctgaatgtttctcttaaatatcagacaattccagttaaaattttcatttgacaaacaaagaaagagatgcgcatttttgtttctgaattctactacttccctttctccattacgctgtgtcctttctcctaacactgggtttggtataacactgactgcatgaaccctcgagtctccataactcattgtacacagtccccaaatgtcctgagtccagtcttcattgcttgagaagtttctttcccagcctggtctcctccttctctgcctcttcctcctccttcttcacccctctgtctacaatcacacgctcactctatacacatcctcagtcccaccttttagttcatagtcccggtaatactgtaaaggagttggaaactttgggtcatcttcacagtttgagaaagctgacagctgtccatcaaacggaatgtatttgatttcaaccaaaacagcacatgcca

SEQ ID NO: 345235 - DNA, 1000 bp, Homo Sapiens
caccaccaagacccttcacccagaaatagagagattggaattgtaaacaccgtatccagttctgaccaccctgaaagccagggcatcatcgcgcccgttttgtcctaaatgaagggctcccggacaatgtcctgaaagtggcagatgacctcatcttccactgtccacagggcacagggcagaccggggtgctctatggggtcctggccgatgcctgggtccaggggtgttccccaggtggtcaggcaaggacacgcggtcattctgcctcctgcgtcttgtcctcgggcgcctgggaccctctctggttccacatgtggttgttcagccccagctgtaccatctgtgcgtggtggataatgaggggttgcagccctgggctctgagggggtgcgggtgaggccgtagggaaggctggggactgcgggaagggcagtgactgtggaaaggctgctggctgtggggagggcggtgggggggtgccagcctgccatgcgtgcaggggtggcggctgcgggcaccccggccaagtgggaaagggtggcggggctcccaggggcacctggcccccaaagggcattcgagccccatagggcgccccagtcccaaatgacatgtggctcccaaaagccacctggagctgctccatctgtgcctggtaggacaagtagctctggaggtaggctgagtaggctgcgttcagtgccgccgcctgcatccgctcaccgtccaggtgttggctctgttcccgcagggctcgggtgtcctgttccttcctccacatggcctttcgggcctgaagcctgtggggcttgaaggtgttggccaccttcctggcgaagatctgggagtgttcgtccagccgcaccagcccggagagcaggctggccgtgtcggagctgagctgggccggggagctctccaggggcaggaaggggatgacacagtctggcgacccctgtcgcgtgaggttgctcatcatggcttggttcacctggtg

SEQ ID NO: 345236 - DNA, 1000 bp, Homo Sapiens
tttttttttttttttttttttttttgggtgtggtgatgtatttattcataatatattttcagaacacattaataatggagaataacacttattcatatactgaatataacttttcctggagcactctagagcttgtttggagttggagaatactgccaggcttttcctaatctctttggtctttggaagtgggcagggtttctcaaaccaagtgtcttccatgggccattggcaaaggcttcccttcatcagcttggaggggcagaaagaccatggcttcagcacttccattttggaaagaagtaacaaaaaagtgaattaatgagcaatcggaaagactcaaagcattttgtactccacagttcatttcttcacacaaacgtccattactgcagcgggcatgaaaaccggcagggtgttaggctcatggcctgaagagaagtcacatcaccagccgatgttttcatgcaaaaggcaatcgtgatgattcagaacctggttctgaatttctccaggtgtgctcgtgagctgaaggtcatgcccattctgtgcatcctgtgtctttctactggtaaacttggatgtcattttagagtatcttggcaaaatggtgagaggatctcactttcccaatatcactctgtaatgaagctgcttgggggatcctccatttgattgtggagagaccaaggcaccgtgggctgaagcaacgaatattaacaacactaacaacaataaggataaagtctaagtctcttccaaaaaaggcatatccaaaaataagggtaaagagctggtcttatttcatccaagtgattctgtgcactggaaattgtccttccgttcctccctttcattaaaagtgtttatatttctgagtcggatgatcatttaaatacatacaatattagcaccaaggcagcatatttttttcccagagatcacatgaaactgaatacttatttaacatagttaatagttggtacaatctgtgatatca

SEQ ID NO: 345237 - DNA, 1000 bp, Homo Sapiens
ttttttttttttttttttttttttttgaataataagcatccttttatttgctgacgccattacaaaaaccgattacattagcaacaaaaaagtgttttcttgagttgaagtcagaggcagttacttcccaaaatgttaagtaaaacagtgtacaacatcagtattaaaatgttaaattttacattgtctttaccactttgatcttctgaacaattttattgagcaaaataagataaaagattacatgtttatcttcaggaatgtaaaggtctaattattcaaacagtttttattataaaactaaactctgaaggtgtctacagagttggcttttttttttccttctttaaatcagtagtctaacaaggattagaaaagacaaaactctgttcagtgtttctgacaaagtagaaagggtgaaaacataaataaggctttaatttggcaaaatataatacaatgccttttttatcctcaaatgaacagtttcccaattacttcactctgaattagcattttgaaggagagcatgtgtcaaggtaggccagaggatgatcactctaacacctggtagtgctctttctcctttgtgagctgttggtttaccgcctgaagcaactgctgtaactgtgttacagtctgatttagacttacagacattgtctccttctcagaagactccgtttctggggaaacatcactattttcaataacagtagtgtctccagcagcttttactatttttgactggataagctccagtgactgttgagccttatgcaaatcaccagctaccttctgtctttcattttgttcagttctaagttttgtgagtgtttcatttaactgtgccttcaacaaatttagctcttcattctgtcttactgcttcagaatatgaatcatcaagttttttctgcaattcagtcaacagatctttcagctctctgacttctgtaacataggtagatcgttccatctctgccttttctagttccatt

SEQ ID NO: 345238 - DNA, 1000 bp, Homo Sapiens
tgtattcaagaactactgtaatgcattagtggtctggcttcattttgtatgatgccagatccttaatttacccagcacaatcatttcagtagtttcctatggctcctgcaaaaatgcaaacagaaaccaccacaggaacagccccttgctgcctcctgttgctgaggtagtagtcgctaaagaaaattgaaggctccttacaatctatatttgaaaactagaacttctgtagaaacacacagatcccgatcttagaagttgtacaggacaatctggtaaaactgacataattgtgatttattaacatgaattaaaatgcccaaccagtgcttcagtgtgacagtatatttaaaataaaaaagaaattaaaggtcatatactgtactactttcacaaagatcacacagttttgcaaaagacttgtcatatgtacaatgctatatatcaaatgagaaaagctgtaagcaattatatacgcaaaagaaatgcagtatttacagtttgtcaggagacattagaaatcatctatacattaaattacattttgcttgcaaataactggtaaaacaaaatgagccatgtccacaccaaaatataaaaatctgtattgcatttttatacctaagatgcattcacagaactgctgctgacaggaaagaaaaaaaaaatcctcatagtgccattacttagctgagtacttaatgtgtatgtataaaataatagaacattcactaaatgaatttaactaaaaaaaaaaaaaagatcatacagcatcaaatcagcatcagatctgccagaaaaaaacagctggaatgttcacttacaaaataaagatacctaatactggcttaacagcacattttttaaaggaattttaaaaagcaaaaatgagaaaaatacaacgaaagagcactggtgttttttatacaaaggttcatgtacaagctttaaaaagtaccttaacaggtacatatgaaatatacagtttatcttacagaac

SEQ ID NO: 345239 - DNA, 1000 bp, Homo Sapiens
tttttttttttttttttttttatacttaaaatttattttattgtttcatcaaaaatttcctgtcaaaaagatttgtacatcttatacaaaacagtataaatacccctggttttcttcaaattccatatataaaagtagtacctttggttaaaaatagttacaacatatggaatgagaaaatatatagactacatcctttcaagaatcttaaatccacactctttaaagggtataaataaaatgatttgtaacaagctgatgtttgtgaatttgattcacaagatctgtcatttctacataaataaataagagacataatactgcaaaggtttaacagtaaaaataataaaataatttaaaagagcacttaattccaacatatcttagcttatgtctctgtgtgtggtgtgtgtgcatgggtgggtgtgtgcatctgtctgccatggtaagaaatgccatcaatagcagcccagttttcacaggtgcccaatccttctgtaggaatctgcgtgcactgctcgctgctccggtagcaaggcctgtggtgtgttggtttcggaggtcctgttttcaagttcctcctgcaggtgctggtttatcctttctgcctgcagcagctggcgttgaagctgcagaaactgctccctgggcaccatcggacaggcttgctgctggagcagctgcaaatcccaagcatgaggggacgggctaggcgtcgcagtggacctcaggtgctgcatctccatgagctgctcatccagttttacttgtttctttttcaggccttcattttccaaatgaattgtttctaattcttgttcaagggaattcatctgactgaccttcctgttagcaggagattgttctttctgaaactgatcacactctctctttaagctcaatttttcttgctctgtgggattcatggtacctgatgggtttagatgtttttggtgcttgggaagaagattggattccaactgacggaccttctcccggg

SEQ ID NO: 345240 - DNA, 1000 bp, Homo Sapiens
tttttttttttttttttataatagaatttgcctttattagacaacataagttaacgagttaatggcaataaagggatgtaaaactggagttaaagctggaatgtgaggtgggtgaacagagatgaccgggtaggctcacttgttctttgagctgattcactttctcttgaagaagccttttcactagtttcagtttctgttcaacttctatcattcgttcctccatgacagttaccagttgttcctggtttccctgtggtgtgttggtttcggaggtcctgttttcaagttcctcctgcaggtgctggtttatcctttctgcctgcagcagctggcgttgaagctgcagaaactgctccctgggcaccatcggacaggcttgctgctggagcagctgcaaatcccaagcatgaggggacgggctaggcgtcgcagtggacctcaggtgctgcatctccatgagctgctcatccagttttacttgtttctttttcaggccttcattttccaaatgaattgtttctaattcttgttcaagggaattcatctgactgaccttcctgttagcaggagattgttctttctgaaactgatcacactctctctttaagctcaatttttcttgctctgtgggattcatggtacctgatgggtttagatgtttttggtgcttgggaagaagattggattccaactgacggaccttctcccgggagtgcgtgagttcggctttggtgttctgtaccatggtctggagcctctcattctcttgccaaagcagctgctgttcctcattcatcagatgatccaacttgtcccaggacagccttttctgctggttatggagccctgatggatgagtagctatctctggggcccagctcttgccaccagcattctgaagttgcttatgtaaagacatcacttcttgttttaaagcctccttttcctgctgagtcactcgtaggtcagatttcatccgggacatttgcaggtttac

SEQ ID NO: 345241 - DNA, 1000 bp, Homo Sapiens
ttttttttttttttttttgtcttatccattgaaggtactttaattttgcagttattgattaattaaaaaacacagttgttttcagcatttcctagctacagtagtgcataggaaattccattctaaacaaagaagtaattaatgaaataacaacacaccttaacattttacattgataggttacagtttacaaggtgctttcacatacattatttcatttgattcttacaacaagcagaaaaaacagtgggaaagattttttttttcaggcttacaatgagtattttcaggccaatgggcagttaacacaagaatataccaagaatgagacagcaatacccataagccacaatatcgtttttggtaggttgacagtttgattcaactgggtattcagcatcggtgagtgagaaaggaattaggacagacaccaaggctcttatgatattcaaataattttaagaacactgtcagagataagaagaaagatgccctaaaatatattgccttattgagacttacttcaaagcaatatacccttcaaaatatcagataaaaagacaatcttgtcatcgactgtgaaagttaggaggaatcttacaaactgcctaatccagttcttccattttacagacaagagaactgaggctgagatcatactgatagttttccagcctgaaattcagatgtcttgactttcagtctagggctccttcttacacaatgccatctcttaattatttactgagcataacataatatcttctgtttcaaatatgtaattttaggttaaatactgatttatgctacttacttcttattcaagtttttatcttattcttggctaaattgtggctgaaactgggaatgttacatactttaaaaatattctaatttagtgtacttgattggtcagaaattgactcccttgacatatttgctcatgacaagcttgctcacggcctttaaatagagagtaaaatggaatggctgaatagcc

SEQ ID NO: 345242 - DNA, 1000 bp, Homo Sapiens; identical to SEQ ID NO: 340113

SEQ ID NO: 345243 - DNA, 1000 bp, Homo Sapiens; identical to SEQ ID NO: 336361

SEQ ID NO: 345244 - DNA, 1000 bp, Homo Sapiens
ttagaaaagccaaaaactttaatttcaacatgagctacatggtcatgaacacaatgcaacgcgaccccactccaacccaagggccccagaaaccctccctccctaaaggcctgggcggctgctgctccaagagagggaatgagggaaaggtgggtggatggagagaggcccccagcctaaggacccaggctcctgccttcccaccacccgtccaggaagcagtcataaagtgaaagggctccagaggtgatgctcacagccctgggttcggctccattctgacctccctgaagcgctgggttagacgggcaccatcagcccacctcacaggctcggcgtcgggtgagctcgtggacgctaatgctttctgtccactctgaggtgctgctccagatgtggggccctcccagagggcctcggagacaccataggggaacagggagaggggctcggtccctgggcctgacacagcactgctgctcaataaataaatgcaggtgaccttgcctgacgcaacagctgtgcctccagagggggtgggactcggtactgtttctgacacggaaatgcacccaggagctcctggctgaagggaattggcttgtgaagtacataaccaccccctaagccacctgctccacctctgggtgtaaaagagtgagctctgggctgttggagaaccgagttccagtcctgcccacccactaacacagtgggacctcaggcaagcactttcccctcccaggacctcagctccctgctttgaaatggggatgacggcacaggccaccacctactccccaggggctcttgtgagggccgaagggcacactcgagataaaagcattctgaaaacaaagtctgaaaagcacaacaggaaggccaggtctcactgcatctgaaggtttggggaggacttgcctgaaatgaggcgcccacagctgctcccattccctcactgccccaggcaggagctggtgtttcctaactctccctccag

SEQ ID NO: 345245 - DNA, 1000 bp, Homo Sapiens
ttttttttttttttttatcttacaacacaattttataaaggcccacaattacacatgagataaaacaataacatctacggatatagcttatgcacattacattcacaatataaaagggcaataactgacatattaaaacattaagtgttacattacttcaattatttacagatcactaaatagatttacttctgaatcctagtaaccatataaaaattattcctatttccaactacatttttcaaaacatctatcacataagcaaaatagttgcaactgttcactttcttaatttttctttactataaaccatagtggtacactggaagcagaaagaaggaaagtaagcatcattcagtccatcattaaggaatccggatccttcaatttatgcagaaggatgactgtttcacatgtctactaactagttttacttatattcagcaggaacctttgtgcctcaaaaagtagacaccccttctcctgaaatatggtcaaccttaaagcttgtagttgtttaagtaggtttaagctttatacagtagtaacaggaaaatataaatacaatctcgactagtcaaaggtatagtattcatggctttaatacaatgcttctagcctagagcacaagtgctttggtgtaagtagtacctgtcaataaataacctgaacataattttaaaaatatttttattattgcaatatgctcttcctttaaaattagaattaaaggaatatgtcctgaatgtttcttggaaagtaaatgttagactggttcagtaaaatccattctagttagactgctttgctaatttacatagcaccccacattagaaaagattttttttaattattaagaaaaagcttcataaataatattttcaataacatttttatatcatttttcaggatactttgattgacaagaagttaaaagtaaaagaattttttaaaagttcactgctaaaaagtgtatcttactctattatattgacatgat

SEQ ID NO: 345246 - DNA, 1000 bp, Homo Sapiens
tttttttttttttttttttttttcgtaaaaaacattttattgctacaaagggaaacatggtcacaaagagcctttaagcgtatcttaacgcaaattactattcaatgtctaatgcagtaaaaaaatacacagagcacaaaatacttgcccagtttatatcttccagggtaagtattcaaaaaattgatgcacacttgaatattcactcccaagagcagcatttaagataaaatgattagaatagatatactaacaatacacatttgttatccttaacaccaataaagtaataaaaattaagcttaaaaattatacaaacaatttatcggatctaagtctggtagctataaaaactaaactaaaatagttttgccttcattttattaaacaaatgttaaacatttagaaattatataaaacaaattttaatatgtggaatgcatgcaacatgggtgttaattcatattttaagctattaaatttcttacccttttttacattagaaccgaaatgtaaagctccttttaaatctaataccttatatttaattttcttcaggttgctcaacagggaagtcagcaggttcttcctttgctgtctcttcctctaattcctctacttcctctacttcccccactccctctacttctcccactacccctacttcccctccttcccctactccctgtatatttccctcgccctctattcctccttctctcacttcctctacttcttccacttcctctacttcccccacttcctctgcttcttcttcctcatcttcatcctcctcttcttcaataggttcatcaatcttctcttcatcctcctcatctccttctatttgctgatcctgagaatggtcttgaatttcaaaaggattctcacccttaacaaaacgttcatatcgcgccttcactattggattatttaaaatgcttgtagcagtcaagacactctctctttttatttgttccttataagcctgcttcccttt

SEQ ID NO: 345247 - DNA, 1000 bp, Homo Sapiens
tttttttttttttttttttttgattgacaactttcacactttattaaaatctacttttttctgagattcaaagagctacatttttggttagtgtatgtctactataccttttttcatcctttcaacatcttttgtcacattttaggtgatgctcttgtaaacagtgtattgctagacctaaaaatccaagcttacaacttgtcctttacctgatacatttattccatttactttcatttggatttttaaaaatgttaacttaatacgtctctttcagatgtccctgctttttagttaattgtgttttctactctcctaaagacttgatttttattttttagttaactgaccgtttttaaagaggttttaggctcatagcaaaattgggtggaatttcccctactgccccagccaggcattgcttctgactgcagcattaggcttccagtgggattgagtgctgcacataagggtctccacccccagcagatatggaaaggcaatcccctagttttacagtaaggcctgggacagaatccaaatttgatcccaacacccaagtgaatcctcctcctcttaaaaagaaataattgactgcataaccgaactgcagggtcaactcagatcctaccattcacctggaggtcctgacattgcacctcccagtctaggtcccaagaaaagaactctgtagcttctattctcatatcccagcacacacaagtccttaaaatttctggccataaaaaccacagaaatttgattcccagaaaaaaactgtttggctagaccagacaggtggacataaacaccctgagctcccaacctattaacaaaggctcacagggtcactctggtgcacaaacctacaatgagactacctgcaagtcatttgctgtcaccccacttatggaatgtcactatgaatcaagatctgtactggggacagagatgaccaaagtgactccctgtccccttggggtcacacagcacatgcaac

SEQ ID NO: 345248 - DNA, 1000 bp, Homo Sapiens
tttttttttttttttctgggtataactcattttattagtttcaaggcttctttacaaggtgtcctttcacaaactgtatgacatgacaagtttatgcaagattactttggagtagcttttttacttttgggtggtttccttatcttattagggtttggaatcagtttctttattttaaggggttgtaatgttacagaagcctgccgaccgtcagcaagctttctcttaggttttgacagatcttcaaatgaagtgtccaaaagctctctgtcttggctttccagaggttcagtctctaaattttccccagaatcttcaattctgtcttgaagccatggtacacttaaactggggactctggggatgatggctcttacttcgtccacaaagtcagtggtgttctttttgaacgccaaggctagaacacattttaagccaatgacgggggcgattctctcactgagccgggggacctgacaggcagggacacttctgcttaggcttaactgaatcaagtgtgaggtgatcatggcaggcttgactgatttacacaccagaactaacagcagttccctcctttccagggctctggtaacttcgttaacgccaatggcaagctgcttcctgacgtgtgcaggcgtccaccctgacacttgctgcttagcatctgttttcttctccttcagattctcactaatatcaacagcaatgctgcatttctctctgctttcttttttcagaaaaggtgttttgttctttttcttcttatcttcaatcttctgaagtccaatagctttaagcctgtcctcaagcgtctgtaggatgaagtgcatatcctcgctctccagagcgctccagcggatgatgtatgggttgttcaacgacgtcttcacaaccagaggtctcgtcttacggagagatccccgccccggtgcttgaggagctgcagccattttgaaaatcctgtagtcccagctacttgggaggctgaggtgggaag

SEQ ID NO: 345249 - DNA, 1000 bp, Homo Sapiens
tacacgttacctcatttattctcacaacatgcctgtgaggtagggaggggcagggactgtccccgttttacagaggaggaagttgaggcacacagaggtcaagtgacttgcccaaggtcacagacggcggccaagctggaaatgggccccggagcagacccttggttcacctggggacggggggggggtcccccctgcagcaagcgccagccaagaggatgtctcggatgccagagaggcgcatacacagcatagagcagcccctcaggtactgagctggcttcggggctgagcccctgccctcccctaccccgccctgcaggcccgggccattgcagctcagggctcgtgacaccctgggagtgggatgcgggggcaggagagagagaaggataattggggttaaaaaaaaaatagaacagaaaactcagaggctgggcagatgggcccttaggagtgcggggcggggggaggggggtggagaccaaaaaaaaaaagggctgcttacacacaaggtatatatttttacacacacttgtacacacacctagatatagtacatgtaaaaatatatgctattcacacacccgcctcctgccaggtgccccgagagccagcggcggcggcgctgggtgggcatgggtgagcagatgggcgtttgttaactatacactctaaggtctatgtgcatatgtacacatacatacagacaccgccgcccgcccctcgggcaccggacacaggcgcggctgaggactgacggccccctggaagccactcgggagtcctagattttgctgaaggaagaaggggctggagaaaataaaagggcaggagtctggagtgtgataactgtggcttcgtctcatttccacccgccaagactaaaacttctctcatctgctcagcggtgagtgagtcctgcctgacactgcccagggctggcggggcacctcccagtgaggcgcctccatctgcgtgtgtgtgtgtgcgcgtgagg

SEQ ID NO: 345250 - DNA, 1000 bp, Homo Sapiens
gagggggcgggtgctttattgggggctgggactgggtccgggacagggactggagccgggaccgggaccgggactggggccgggaccgggaccgggacagggaccaggactgaatttcaggctggacttcggggctcggcgtgcccgcagcagcagtgctgctttgggcacaaggcctgcagcctgcagcgtgagtgtatcgtcctggtagagggtgggcgggaatgtgctgaagatctcaaaggcagaggcatccatgaccctggcctgcgctagcagagctcgcacgtccccaatggtgttgtcaggctgcatcatcagtaggaaggcctgttccccattctcagacttgatgcgcagcatggagagcgggggtgccggtgtgttgggtgactcctggctcctctctcgctcagcggccaaggtgggcgtctccaccacaatctcctggatccgggcaggcaatgggcagcagttctgcaaggtgtccctgatggggccccggatgtcaatcacctcgccttgccggatcacaaacttggggagcctgttcagaaatttctcagcagtcatcctggagcctgggtgctcctccaccctgtccaaggccttgtgcatccgctgcctgcccaccacacggccctcgcctgggaaggggtccagtccatcctccaggtagacctgattgcgcaagtcactcaccttaaaggggaccccattggggtacagtcgctggagctctgagggaaagaagccatccaatatgtctcggaggcagcgctgtgtggagggatcgtagaagggctggaagggcccgtcgaacatcatgatgccattccggtagagcttcagcgggatgggctcgagggtacgcagccgtgccccgccgggcactggtgtcacttgggtgtcaccctctaccaccagctcactaagatcctgcaggctggccagcagcctgtcaaagtccacctcagggggcgccaatgagtcccctggc

SEQ ID NO: 345251 - DNA, 1000 bp, Homo Sapiens
tttcttttttttttttttaccctttgcagtaattcagagacaccactgctgagaaagtcggaattactgaccttcagcagttctccaattttatggaactaaataggctcttcaaggaatcaaaattctatatgcaggtgtcactgtttctaaatcttcccctgactctgggtgagggttcacgctggtctccagtattctggccttctcaggatgagggcaaatgcacccaagctccttctcttccccaggatgacaccgttctgacagattgccaggagaagcgggtgagaagtttagaggaagctgaaaccgtggtaatggtagaaccttctacagatggctgaggtgctgctgggacgactgagctttgccttgacccagcccaaagaactggtctgaaatttgaaacgcaccaagcccaggtacaggtctggcacctcagcccatatttgctgcatgaatgtgaaacaaaattttgtgaagggatgaaaggaactgaagtgcaactaagtttacaacacaggccaagagctgaacacacaccatggctttgcccatggcaggcacgcccctaaatgcctgtcgcacgaagagggaagagtttcccgtgagccccgcaggagagtccgcacctccctgcaaacgccagtccttaaccacaaggagcagactcaaatggatttctgggtggtaaaggagggaaaacaaacaagaaagctctcaactcaccaaagttaccggagtggagcatgtcaaatctttgagaagaattcatgacggaaccacaccactgttgcagctgccacacagccgtgtggaaccgtggggttagggagccaggagctggctgtgagcttgggggtttatgcgtaagtgactggcagatggttctcacgtctcacctttggaggggagtggcatcgatactgccctggttcagctaatgcaagtttgtcaaccctacctaaggcgggggacagcacagtgttctcttctc

SEQ ID NO: 345252 - DNA, 1000 bp, Homo Sapiens
tttttttttttttttacagtctttgttttaatgtttattggtagaaacagatcttcaatgcatactttgtgtttatataaactctacattctcttaaaggttttcgttttgttttcactggagatttttagcctccaagtgaacttaacatattgcctatgcatctgattctttatagacttttagattttaaaactaaatttgagaaaccatgcatactgtataccttatttaataatccaaagaattgtttgcactttcaaaaaagttacaaaaaggctgaacacaagttaaataacctatatgatgtaaattttccatttctgaatactttttcagtattatatattgcttgctgtctaataagttagattgtcagagacgcttcagtaaattatctctactttaaaattatatctgaatcccctttctctgagatgaacttgccaatattaaacattgtgccatatgcagtattagcccaaaagcttaaataagaaccaaacttgtagactgaatattttaaccttaaaattatatacctatatatacacctatggtatgctgcatattaaatttaacatttcaagtaacatatatatagcaaacattcagccaaatactctttcatgaaaagatactgtccttaaaataaaaagttaatgaaaagcttatttagacacaaatgtctagatataagtactaagcctatgaaacttgaagctaaagtctgctgtactattaagaaaaagaagattgattcttaacctactgaattgtgcagatacaaaagtgcttagcatgacaaaattaccaaaataaaaacattttagaggttatttggttctagcaatattaactattctgtatttctggataatttaacatttgtattttaaattttatataaatttctttttaacaagtttaaaaaagcacacgaaaaatagttcaaactatatataatctgttatttttcatcctggttagctaatcacaa

SEQ ID NO: 345253 - DNA, 1000 bp, Homo Sapiens; identical to SEQ ID NO: 161124

SEQ ID NO: 345254 - DNA, 1000 bp, Homo Sapiens
ttttttttttttttttatattttaatacattttatttttcataaagtgaaccaaaccattattgctgtaagagcaatatgcaaaatatctagatggctataaacttattttctggctttaagactaaaatttactctaagattttctaaaatgttttgtatatttaaaataacaaatattttaaatcaaggaaattttgcaaaaagtatatatgttgaactgctggtttcaaggtccaaatttcttttctgcttagcaccaagatcatccacacaggatccaacctgaagttactccttcttgatgtagggaagtgtgtttctgcagcaggaggcctctcatagccacagcattaatacatgcttcggtcttcttaacagtcttactctttcctgactttccttaggtttattctaggggactccttacagttgaactttgtccccagcagggagcaaggctggggactcctggcagtggcggcactgtgtgctccatcctccttaacatttctttcttcttgaatgccttcttccaatgttccaactgaacctattaatcctggtgtaagataacttttatgtttaggaacaaactttctaatattccttctgaatgttttcatgttaatcggagtttgaataatcactacttttgtgaaatcttcaatactttgtatctgatggcatgttataggaattaagaaaggtgctctataagtttttcgtaacagacaatcttctacagctccatgtatgaggataacatagattagattttcatcataaatatcagttttggtactcattggtatatctactacataaatattagagagctttagttgcatattgtagttccaatcctcataagataagtgttctctgatttttctggctgtaatagcgagtccaagttttagccacattttttgtttaatgagaggagagcattgctcaaaagcatcatacaagtgagttttgggaataaaacatgtctc

SEQ ID NO: 345255 - DNA, 1000 bp, Homo Sapiens; identical to SEQ ID NO: 342917

SEQ ID NO: 345256 - DNA, 1000 bp, Homo Sapiens
ttttttttttaaaatagtttaataaaagcaacaaaactgtgctaacgatgagaatcaaaaatgagatattaggtagacttataaaacaaagtatagttattttttgatttcaaataaaccatgtgcaaaattgtaaaatgccaatgtgtctgagaaaagcattaacagtccttttagcaatttatatataaagatgtttttaaagtgccacagcttaaggcattatattttaaagtttaataaacatctaatttcaacatctctccaagaacagacttcttctcaataagctataaactatttggttaggaatattgaaaatgcatgtataatttaaggagtaatatacttgttaatgctgagttattagtgcaattcaaaagcatatgaattccatatcaagaacaaactctcccgcccaaggtacagtgtaatccacactgtatcatctcatctaaaaatctatacagcagctaccccatccactcagttcctctgcagttaggctattagcttttctttttcaaaaagcaaaaattcctaagacacctaaagattagcctgtatttcatttatctatacggaaagtgcttagtaatatttctaaaaaggaaaagagcagtatggtagataaagaatgtagagtcaaaaatcaatcattttaaaatttttcttcttcctatgattatgttttggttaagcagatattattttcattttttgagcttgcaaaagtctgcctaggaatgtgctaaatcaaaggaaaaatctagcctcatgttcacaattgccctggaatgccattcccagactgagatctaactacacagagtatggctaacggcagaagtcagaggttagggagatctggtgtctccatttatctggaaaacagagcaaagaagggtgatcagttatagaaggccaaacagaagtgttttaagttcagaatttcatctttcgtttaattttcaaagtaacagccactctggatcttttc

SEQ ID NO: 345257 - DNA, 1000 bp, Homo Sapiens
tttttttttttttaactattgctgaattgaatttattgaatacatgcagagtacaaacggccccaaatcacagcaggttgaagtattcacagagcctgaaggaaagtggacagcagagatagtggctctggaaattggatgaggtgggcatctggaatgtagtaaagcagcagcaagcaggagatactgcttggcgactagatgagctcaggtagcccatcactggtacattgtttggggatgctgtagacaaaggaatgacagcattggagtatttattgaatgcctatcacaggctgagccctttcctaggattcatatgcttttctcaatggaagaatcaagaagatagttcattatttctccttaatacaaggccccatcgtcttcccaagaaccccacactcctactgcctcaactcccatttgttggagaagctgaaaaagctgaccaggtaggaagtttctttctctgaatgaagctaactagggttcagaacaagcccttgacctattgtgaccaatggcagatcctgttccaatcaggccccacacctatgaacaagtctgtatctcagagcaagagacagataacaattccaggattctcctgatcttagattaggaccacaatacaaagtagacattccttcttactttctatgtcaaatttagctaatcactggattcatcagaagcctagggggttcagtgtcgagataaacatacctaggacaccccatgtttctgggttatccttagatacgatgaggtggagagattccagtcacagagagaggctgtaaagagcaagcaggcagttggagagagctaccaatcccagacactccagcagttatggtgactgcctggatggtcactcacagaggaggaaaaagtagtgagagaactggagacaagggggaaatgcaggtctttctgtacaacagcagcttccaatcagagaaacagatgatgggtatccagctatgcaatccac

SEQ ID NO: 345258 - DNA, 1000 bp, Homo Sapiens
ttttttttttttttttttttttttttttactttttaattttttttatttttccatctaaaatggcaaagagaacatttacttttgatcacttaacaaggacacacccaggaaatttgattttctcaacattaggaggatgaggggagtacagatggaaaaacaaaagataaaacacaaaaggagtacataaaacattgtttagtacaaataatgaaaaatgacttcatgacattttccaataaaagttatttttacagattttgcaatgctgtaaaaaccaggtatattgaaaggggttatttataggttaaaaataaagccattgatgagtgataatcagttttaacagagttcacgcaattatcttagctggaaagctactgtcccaagtgacaaaatttatgtcctgacacatgattacatattaaatcattttgtaaaagaaatgattctgtatgtgggactgacagctcttgagaaagtgctatacaaacaaggttatagaaatgttgaagtgattgataatcttaaaataccatacaaaaatgtgtaaacaaaaggatggtttagagttgcagggcattataaaatatgtaattttagttaagactaataataatatttttgtgcactttaaaaatggttagtgtaatcttgtaagttcaaagctgggttctcagtgagcagcaaaaggtgttagatgcatcaccacacttcacaggacctcctgaatgactgcagatgtgctgtgtaccttcttaaggggctttggctgaccttatgagagcaggagctcaccatgcttatgggtgactatatcaaaaagatctgcaataaggctcacctgggagatgctctagcattcaaattcctatactcctcttttatctacgctgtcagatgaaaactgcttactgcttttaaaagatataataaacaatataaattctgatagtaaagcactataaaaattaggtatgatatttttggcacaaagca

SEQ ID NO: 345259 - DNA, 1000 bp, Homo Sapiens
ttttttttttagtagagatggggtttcactgtgttagccaggatggtctcgatctcctgacctcgtgatccgccctcctcggcctcccaaagtgctgggattacaggtgtgagccaccgcgcctggccaaccctgctcttgaaatgtctaaatcttttcctcactagcatatacaattcaaatgcacaggcctccatgacttctttggaatttaaaagaagccttcatttcaaggatagaaatatgtaaaattttaccaaccatggataagtttgttatgggagtagtggaaggacagtggaaaaaaaaataggttttttcatgatacttttatttttccttttttaaaaataaatttagggggtacaagtacagtttagatacatgaatatattgtgtagtcgtaaagtctgggcttctagtgtaaccatcacgcaaatatacttgtatttttctaattacagttctaccaaacatttgccaccacaaaatacaagtatttttattctttatttaaattatggtgagtgatatttcttcctatatagccattaagatctctggaagttttgatctactttattcaaaccactttaataaataagacttttcacctaaatgaaatacctttgaattttataaacaacttccatgaaacatatattaaaaccacctttaatttggtatgaagacactttggcaatgcagcggaataaatgatcttggcaagacccagcaagtacagtaaatgctcatgagctctatgaaaaatataggctacagaatacttcatttttcttttattgaactacagtacaaatgtgactgcttcaatatgaacatctatcttccaccaaatagcaaacaggcatcttatgtaattaaaaactaattatttcaattccaccaatggaaaagcaaaacaagttgcaaatatcaacaatacagagcctgctggtaaagatagagatgagtaagttataagctaataaagctgcag

SEQ ID NO: 345260 - DNA, 1000 bp, Homo Sapiens
ttttttttttttttttttttttttttttttttttttttttttttttttttttttttttttttttttttttttttttggtggaaatcattttattctcatacacaggttattacagcacaattaggaagagacaatcacaactcacacaatgctatattcaaattatgccaaagtcccaacatattcatttcatttgcaagttaattcctaaaagatcagagcagagtgatacacaagtttattaacacagactacaacgtcaatgaagcctcctggcattgtcggaaatagaaaacatgtataaaaatcttcgaaatgcaggttaaaatgcaaatccaagtgaaaggaaaaagcactactgtgaagcctaacggcaattatttcccgtcaaaggaggtttgtgtccagctggagagaaggcctggtggacagaagacaaaggaaggcaaaattcctaagggagaaattcaaaaaaatgatgggggtgctgccctctgctgggcctctttggcagtcgacttcaacttaatgcattagcgccgtaaggttgtaagagaagcaactctggcttgatcttagaaaagctgattttctttttggcagcatatttccggtgagaactgatgggaaaggtggtgtggattcgtggacgaagtctctaacgtaatcttgactactgaagggtaaagacttgcccacaggttagagattacatgaattatccacaacgaatggtagcagatgatgggtcaggggtattttaattgtacagcataacactttagagagctgggaagtatgggacatcattcccgtctttcttcactcagtaactgattatcttgtttcttgtccacagatatttaacctaaataacaatgctttttgaaggttgtttggctaacccagaggtagtaaaagacttcataagtctttctattactgaagaggagcttagtaataactgcaagtctatttatatatgtagcagatggtaaca

SEQ ID NO: 345261 - DNA, 579 bp, Homo Sapiens
tcattcccagggatgggtgatgctgttgatgtgaaggccgctgatggcgttcaggaagaggaggaaggaggcagtgaattcgcaccaaaacattagggtgaagccgatgagtgtgacttggttcctgaggaggatcacaaaacccaggagcccgccggaggagaggacgaaagacaccaggaggaggatggaacccatgacccacttgcactgtgagtgtttgtcctcgcacaactgggacaccatgaggaactccaggccaaaaatggcggccaccacggccaaggcgcccacgctgcgtaccaggcccatgcccacggccagcccgggcacatgggcctggcccaggtctctgaagcagatcggcacactctggttggtggtggtgcagaagtgccagagcccgaagagtcggtcctcagccaggagccagtgcccatcacaaatggagaccgaggacaggaccacagccagggccacacacgtgatgatgagggtccggatgaaggattcaaagaaggaccggcggggctgcctttggcccaaaggcctctgggcatgcacgccgacggcagtcat

SEQ ID NO: 345262 - DNA, 1000 bp, Homo Sapiens
ttttttttttttttttttttttttgcataaactttttaatggcaaacacacaaaagagtattcaggttatatttactaaggactgaatcaacatattaagacaacttttctgaatctcaggaggtatatttgcaaagcttctctcagaccaaaaccttgcaaaatgctttacaatccacttcatgcagtcagcaaaaagactttccactccaactgaatgagcaataatcaggcattctagtatagacgtcaatgttctgggaacaggcttctgaaagaaattacagtaatctcttcttaaaatatagattgctacttcttttaatccttctagtccatacatatcagccatattgagtatctgaccaacattagttttgtctggaatgtccagagttcctccatatataaaatgcatcataacattcagttctacatggcttataccttgaagagtaacgtactcttgggagctttcagcccaacagccactcagcattgcagcaaaataactagatctggcactcaaaatggccctgtgagctttaaaacgttttccatcaacaaaaatatcaatatctgggcaaccaggtttcacataaagcttcaataaatcttctcctaattcagatgcaggctccaagtcataattatcattggaaatgaaatcatcatctctgtcactgatatcctctggaatttcatgcttctgaagagaacaatcagatgagttttcacactttggaaaactgatgtcaagttgcttttgtgatatcccaatctccattatctttttcctaagaatttcctcttcatagttttttatgtttctgtttgatgaatatataatctgtaaaaacgttctaaattctaaagcttcaacattctccacagcaataggctcctgatttgttaaactatttgatgtctgtccaatagtatgaaaatagaagtcaggaactcttgctaaaaggactgctttgtgtgctttgaacaaagt

SEQ ID NO: 345263 - DNA, 1000 bp, Homo Sapiens
ttttttttctcagagccagggcccaagggtcttttatttgtgtgctggacgctgttgggagtgactggatgtgagccagccctatgggtggggatggcaccgccctaccgccgagagagttgaagctgcacccccgaaaggagccagctgtaccttcacccagtctgggggactggtgaggcacttgggggatggggagcaaggccagctcacgaaggaagacttgggcagggaggatcagggacgcctggcaaggatccaccctatggaatcgggcctcgtcagtggggtgacaatgtcagagttgtctataaatcgggggggaggccgcggcctcgaggtgggaaagcaggtgccggcgcacctgtggacaaattctggaacgcgtttggcgagggaggaataggcgcagctccggaaggcagtgacctcgaggcagcctcagcacggcactctcttgggtcctcttccaggctcacactgggcgacagcggagaggctcttggacggggcagagctcgcgccgagacctgcatgtccgcgtcttgtgacgggtgtgtgggaagccgcccgcctgtgcatcttgcttccgggtattcgctggctgatttactggttttagagatggggatgggcacccagtgctggactgaagaccagagaaggtggagctccctgtggccttggtctcacctctcttcaggtaacaggctctgccctgacccaagctgagccaatgaaccccctccctgggaatccacacctggacccattccttctgggcagggagggcttgctggagggagggaggctgtgcaccccacagaagactgggccccctgggcacaaggggacactggtgctgggttcagcagcccccaggacctgggccaagacgggggtggctgctgcattcacgcaggacgttgagctgcagggactagagtggcagatgggccaggtccactaggccaccccatctccacccccagggccacaa

SEQ ID NO: 345264 - DNA, 1000 bp, Homo Sapiens
tttttttttttttttttttagttttttttttcagtttattgtatacacacacatttcactggtggttgttttttttaaaaagtctgtacaattgacaagacaatacaaactagctacgatctgctagctacacattaggacattaacatagcccatggtttctgccctaaaacaggcaattgtgctactccaactctctaagagagattttccagctcatgtcgtgtggcccaggtacctcctcttctgtaacttccacctctggaactgggcccgcaagcccaagctctatcttgtttacttttattttaggttcggctcaaagagggtaactctgaggcttcactttttcatcttcatatctgcttcaatggcacagcggcgtcccctggttcctccatccttctctgaagcatcctgtttgcgggtagaatctctccctcgaagacttttagcactgatcccagactcggatgtttgcataatcaactgcgtggccaagaattgctggatctgttccaagacatctcgctgcatctccactgccatgtgatagacatcatggtctgagctattgtacattacagcattctgaaacatcagcataatgtcacgctgaaattcagctgtgcttcggatcagtccattttctatgtttttcttaatagttgacaaatccataggcctctgcacaatgctgtggtagccaggtgctatgtcatctgtaacaggctgcaggaagacattggcatacctatgattagctgcagctctccatacaagcatgatggctttcttccaaattttctgtgcctgaatagcttcctgatcctcactacagacagagaactgtgaagaagcagggctgctggggatggagtctgccagtgtgtgtgactgcagtgtagcattgtgtatgctgaagccatcatcactctcgctcacaggaggttcattatccatttctgacaagtagccttctccttgatcctcttcctta

SEQ ID NO: 345265 - DNA, 1000 bp, Homo Sapiens
tttttttttttttttttttttgataggcaaaaggttttaattgtatagattaaaattaactttggacaaaaattaaaactcaggcaaagaatgttttcttctttttgcaacagcagacactagtaaaaacaaaggcacagtaaaaattgagacccaaaatttgcagcgtagagatatgaatataataatagacacaggcagggaggattaataaatgataaaatgtttagaggatgatcattagaatacaggatatttatactcttgaaaaccactttcccaagtacttcattataagtaaggtgtctctaaaagggacagatctcctagacccctccttaaccaagtaaccagtcctgatatcataatggtgttggacaaactagaccttctctgcccgcagatgggctgaggttggaaactcacagcattgtctctgcagtgttcccgtcaaaaagtttaggctgaatttaatcatgaagacattttcagacaacttcagaatgtagatcattgagccagacagctgacctgtcctctataaacaagtccatgtcaccaccatccatgacaacaacaaaaagatgaggaaatatttggggttcaaaataactaaagaaatgcagctacattatctttttactttttttcaacccaaaatatctcttctcctttttgttgtgtgatttgtggtgatatggactatgtgaaggagacaggtcagttgtcctgctcagtgttctacattctgcagttgtctggtgattacctcctatgaaactcaggctaagcgttttctgcaagaacatggcattgctcatattctgcaccggcagagtcctgggtgacatgctgtctcctgccagcggctcctgactcctgttctctacaggatggaattgagaggagcagggctaaggcctcccaatgctgtttgtccatctagctgtggtcttcctaagtactgacaccaattggaggctgaaggactgtggcttct

SEQ ID NO: 345266 - DNA, 1000 bp, Homo Sapiens
tttttttttttttttagagtcatagattttatttaattaaaatagattaaaaacagactgtgtaaaagaattagaattctcaataatttactattatttacattagcaaatgtcggtcgttagtagacactgagcagagaagcttgaagaacggggatcctctcctgtgggcaggggagccccagcttccctcgtgattcccgtcctttcaagttcattatggcagctctgtcaatgagcaccccagggtggtgtggccgcagcaccaggacccgcgctgaaggcccagagacctggcaggccgggagaaattcctttcctttgggaagaaccaccaacgctcagtccaagctcacacggttatctagtcggcaatgccttccctgccctgcagccaataccccccactgtgctgggccttctgcaaatactcctggggttgacccaaacccagtttccagataaaagataaaaagaaaaaaaaaaaggccacatatcccagttctcagagaaatcctggattactaaacatcccctgcctgtggcacctggaatgggtgacttgtcaaaatctccctcaagacgttttgtgcgtttgccgtgggagggaatggtggggagtcagggtggctggggggcactaggccacttcaccaagagggatgcacctcccaggaagcagtagcagtgagagcgagccccacaggaactgtccctgccctggcagtgcgcagccctgtgggcaccaagcagggagtgaagaccctcagaacacaggccctgtggcctccggctgtgacctcagcttgctggagactctgcggtcagcctggcccactaggagcccctgctgctccacttgcaggacacccaggcctcctggcgtcagtggggcctgggacgtctgggagttccagagctgggtcagcagctgtgaccatgggggccagcacagtggacagcatcagagctggcagtgaacagctgaggcgggggaggc

SEQ ID NO: 345267 - DNA, 1000 bp, Homo Sapiens
tttttttttttttttttgtgtaataattttattaataaaacgaacccatagggttcaaacaagcatacaaagtaattttttttcctgtgggttaaattgttacatttttaataataaaaataagaaagctttcatagttaacttaccaaaaacataacgcttgcctattgtttcttactgtgcaaaacaaaaacaaagttttgcccacagaaggattttgtgcaccaaaacatgcacattttcaatttcaaaatttctgcatcaaaatgaaaattccaaggccacgtttttgttttttcaaactaaagaagagcaagaggggaatcaccaagcaaataacagcagctacatttttaatcttcattcccaggtattttctgtttcaatgtagaattctccacattcataaaatgatatcttcaacctactgcttacagtcagatatgccagtatcagttcaataaggcaagtcacaccttttagctattctcttaagtcctacagagatagtttcacttcaatttcacagggacactacatgatttatctaataaaggtgataagacaatcctagtgaaggattcctttaagttgttgcttttctagatggaaccaaataattaaactttctcttctccatactggagtttgtttctttcattatgttttagtatcatggagtcgaacaatgccttggcagggcatgaactatataactcagaagtcaataaacagttgaagatgatcttttctaaagtaaaaatcaactgtttagacaacacttaaatacacattacctgtttaaagacacacacacaaaagcaaaatttaaaaaccaaatcaaggaataacgttttgtgacaatttcagtagcacaattactggtctaacagttttgcattgtgggaatttaaatagcggcttacaatgaaagaactatgcacaatgcttccaggattgcagaggagagaggtaagcccagaggatgaaaagcatacat

SEQ ID NO: 345268 - DNA, 1000 bp, Homo Sapiens
gagaatgggctgtgcctaagaaccagaaagtgagcccttagcaggcaccaaatctgctggcacctggatcctggacttctcagcctccatactataacttaaatttgatgcaaatttcttctgttttctttttccaacacttcttacattatcatacactgaattttcccatatatgcatgatatatgtgttaataaaattcagtttttctctttttaatatgtcttttgtcagtatcattgccagagttccagcgaatgaagctattaatttttttcctggtccaaatccttcgtaaacacgcagatgaccatgacagacaaaagttgttggcttcatcgggaagttaataatattaagctgaatgatgtgatttaaaggggctactaatctccattggcaccccatagtagttctgtgagaatttcttgggatctgcatgatcccttctggcttggtcagaagaacatcctcacaagggaccaagtgctctctgtttgaactttgggaaagtctggttattttactgtcctttggacctaggactttcaagtcaatatagcttataccaaatgcacctcgtacaagggcatggaatgtcaccctcaccagcggtccaggactcatgaaagtcattgagtaaagtcttcttccatgtaatccacctgccgtctttctcttactgtgtctttcttcataaataattagaactgagtcttgacacacaggagaccccaggagtgacagatactcaatggtaaattttgccatactgcttgctgaaactctgagcacccaagaacattccagtcttcctctataatccagtagataccgtggtgtgggaaaaaagcctctaggcttttctagctctgcttcagagcaacaacctggccaagatgcactgtctggtgaaggtgtgggtggtggcaattgttgttttaaggttttgcatttattatttgtctgaagtgaagcaggaccattgatttttgattgg

SEQ ID NO: 345269 - DNA, 1000 bp, Homo Sapiens; identical to SEQ ID NO: 161126

SEQ ID NO: 345270 - DNA, 1000 bp, Homo Sapiens
ttttttttttttttcccaatagaaaaaaggctataaaaattttattccaagagtgattaaattgtataatgttgtatatgtgaatttaacacttttgtttacatgttaaacaaatgtgtatatattagactacattaaatatgcaattctttcttccagttaaatactgttgctccctaaaacccttacattgtacaccattgggaatgattgttcatcatactacttttccattagtgaggctacagttatgttttaaatgtgcgattacagagatggcatctgaacataaactgatggctcgaaaatgaaaatggaaatgtagcagccatatactgctaactttggatctgttcctgaattcaaaactactaggagaaaagtgtcctttataaaaaaggaccttattaatgcctaaaaaacatcatattctctaggaaagcttgtgtctgtttccttagggaaaatgtttgccttttaaaaactgtgatcctttaggatgatcatgactttccctttccttatggaaatgcaagaataaaatatttcattaaacaatgaaccttgaaaataaaatataaacattaagaaaccattttgctaaaaagataatgaaaattatccaaattgggtttttgagttcttctgtaaagagtgctctaccctaaattttcccagcaggtctgccgaaatcacacacttcccaatacagggggacttggcctttaccatcaagtattcgatccttccttgaaatggcattatctggcagtgtatggattacggattatacccagtgcatatagcaaatattttgaacagatcagtctttcactattttgatgattctgggcatttctccctgttacagtcttgggttagcaccacttgaccatgcagggttgggttttggtttttcttctctgtaattctggtctcaaagttaatttctgtagtcatctcagcatctctcagtgaggtgtatgtacacatttccaga

SEQ ID NO: 345271 - DNA, 1000 bp, Homo Sapiens
tttttttttttttttttttttttttttttaaaattaagaaaaggaatcaatttaattaaataccaaaaagttttacatattcctgaattttcaaccagctacaaaaagcatggatttttcttattagaaaacaaaactgttacaaaaaatttaaataaataaatagctgccataaaatttcaacataatatatagtcaactagttctgtgttatggtcagttaatagaaagatagcgggaatgatgatatgagcaaaagtaaacagaacaaagaagaaaaaagataggaaaaagaaagttagacagagaagagaaaaataaagaaagtgctttattgaatgagctaattacatgaggtcaccaagaggaacatcctctaactgaggcgctgtgatgacaacaacacccgatgctgtcattgtcctggtgtcttcctcaccctggcgtaaaggagatgcccaagctctgcacaggaaggcatcgtcggcaagctctcttctccgacactccaccggaaggatcacagagctgtggtcttggcctggatggatcgcagctctctccacctgagggcccccagctggagggaccggagaacactggcgtctggcagccccgtttccactcctaccaagaaggctcaaagacgacggtcagctcaggcttttcttcttgaagtgtttctaacgcactttttgtctcataattgaaatacatttcagacaaccccaggttctgcaggaggcagctctgctgtttcagcacttcacagaacatcatgacccccaggtcgcccaggtcattgttgcccaggctcagctttcgcaggctctggctggaggtcagaagtgtggaaagatcccagcagcagtgtgacgtgaggttgcagttgtctaattccaacacctgaagcttgcagtcggggtgcaagagtccctcacagagtagtttgatccccttgtctccgagagtgttgcctcgcaggtaaaggtgcgtgaga

SEQ ID NO: 345272 - DNA, 1000 bp, Homo Sapiens
ttttttttttttttttttttttttttttttttttttttttttttttttttttttttttttttttttttttttttttttttttttttttttttttttttttttttttttttttttttttttttttttttcatagttaacatttcatattttattagtatagtagtaacttggccaaaaaagaaaaaaaaaaaaagaggcaggattaacagttactgactgttaatctgaaatccaacttttagcctattcaccttaccttagaagggctgccattgaacttgtacagcagagcgcttcttggtgtaaggcctgacccattcttgtgcggggaaatataaatggagtgctgctgggaaatgcggcgtggtgagcctggctgttgtttaatatgtggaaaaggagagagtggtggagcatccatcatatggtcctgattcgccaagtcgtatttcagtgcaaatgacttcactcttcctacatatattgtattgtaaaattttataagatcacctctttcctctttcactggtccactggaacagtcaggtgtttttgtagcatcttctaagtcacaatctatcatttcaaagtcatcatttatatttttattatatgccacaacttctcttggaatacttttcagcagaacacttctatatacgtgactattagcttggggctgattcctataacttttcataatttcttgaaaagttctttcttcttttgttacctttgccatgatataaaaggcacaaaggaggagctgatccaaatgcctgtctttcattagatcaggacagtgaactaaagtgaattcaaaacacgtccatatcttccttcgtaactcatttgaaacatccagttttagacatagatcacgtaagcgtacacttgccaaatgatagacctttctgtaaaatagtgctaaggacccagttctctttggcctgtttattccagttgaatgtacctcttgtgctttagtcagattggtctg

SEQ ID NO: 345273 - DNA, 1000 bp, Homo Sapiens; identical to SEQ ID NO: 160526

SEQ ID NO: 345274 - DNA, 1000 bp, Homo Sapiens
tttttttttttttttttttttttaaagacaggttctcactctgttgtcctggctgcagtgcactggctattcataggcaagatcccattactgatcagcctgggagttttggcctgctccatttccaacctgggctgggttcacccgtcctgatgcaagtttgtggtttcctgcttcagggacatcaccatattgatgccaaacttacacccaactggcatagtgtaccacagcccagaactcctgggctctagggatcctcctgcttcagcctcctaagtagctggggctgtacgcatgtgccaccaaacctagcaattattatttttaatcttagaaaataaattgtgtatagaaaggaatagttagcacatttatgtctaaagaggaataaaaaaggacaactgggtttacacaaaatgcattgaagtgactgatttgaagcagcctatcaagtacattcaaaccaaatggcacaggagattgtcatctcagtaactcaacccattacagacatcatttacccatgtctaatctgctataaaacctcagttgaagacttcaactgttctagctatgaaagcaaaaatatctctcaaagcttctctttttaaggggaaaaaaacattaattggaagcaactttctgagcattaagaaagtattttcttagaggcaaagaaaaaatactatgattaaaaataatgtgttctaataaagcatagtgcccacacgcaaaggaaaaaaaaacataatcacaatctttaaggcttccttgaatgctaactgctatcttggctgtagtttttcacaccgtttggaagacaagtgtttgatagatgatttcatgtgacttaggaatcttccaaaacatgaagtcaggcaatttcggacatctctggctcttcacactgcctcttagaaaactttttgacaaactcaagagatgaggaacgatgtagaaaataattcttttcttcccattaaaatccatctttctt

SEQ ID NO: 345275 - DNA, 1000 bp, Homo Sapiens; identical to SEQ ID NO: 340182

SEQ ID NO: 345276 - DNA, 1000 bp, Homo Sapiens
ttttttttttttttttttttttttttttttttttttttttttttttttttttttttttttttttttttttttttttttttttttttttttataacgccataaaagtatacttttattattatgcttaaaggaaaaagtagaaatgatttgcttgggctccttgaccctattcaaaaatggaaatatacaacaatacgtttctatcctatgcctgctgaggggatttttcatactcttttcagcatgcacaataatctttgggtggtgggactgattttctaattttctaaaatggacatgcgttattttaaaaacgaagcaatcttttaaggatttaagtatcaaaatcactaacatttctcagtaggatgcaaaactgatgaagtttaaatcaatagataaacatgatttattactttgtctattaaagtagtttcaacacaattgaagtttagactgcactgggctgttcccatcacagtccaggattatgcacagaccagcccccaaccccagcaggggtgccctgccagaacctgtgctggatgcctaggagcacagagaccactgcccgttgttgggctgcgtgtgcacacttcataccccgatccataatccctaagacaagaatggctgtcattgccctgggttcactttctattcaaagaggactcatttgggcacagccaatgtagtagttaaaatgcattttgagaaaaaataaatattctgtacaatgtatttacaaggatcaaatgttttgtaacccacccccaattagtttcccaattgggaaactataatttgataattaagaagcatattattggccgttagtgtcacgtcaacaaagaatgtggagctgaccacctaaagtatttttgaactatatatatagagagagagagtacgcaaaatttcacattttaatatgcttagaaggagtttttaaagaagtagaaatgatttccttggcctctgactttcagtgatgaaaatg

SEQ ID NO: 345277 - DNA, 1000 bp, Homo Sapiens; identical to SEQ ID NO: 161128

SEQ ID NO: 345278 - DNA, 1000 bp, Homo Sapiens
ttttttttttttttttttttttttctttaaagaaaacaagttttatttttatcatcagaacattctaataaaaatattatgatgagattagctacctttattctctgagccttgactctgtcccaggcctgccctggagcgcctgcacgctcagctccctgaggtaggtccggagggagaccccccgctgccccccgccctcggccaggatacctctcacctcatgtcccctcctccagacccccacagccctggatgccccatagcagccctgccacggctggcagaactgcctccaccctccaccaacccccaagacaggcaggaaccgtctcaggctggcacacagcaggtggtgcgggggtagagggaagaggcgcacccttctgcactcaaccgctccagcgggcagagctgagggccactgccccccccaggctggcaccaccatggtctagaccccaagtggcctgaatgctgtggatcacttccttctccccttccacagtgtttggggagttggggaggaagggaagggagaggagtgtcaacgtcgcagtgacggggtcctgagacaactcactctgccaccccggcaggcggcagcagacagtggcccgcacgggcctgaggggcctcctgtctgtggtgcccatcccaccgagaggatcctggcccgcgagccggcagacactttattatacagaaacactatcgtcgtctccacgggcggaaccaacaaaagcaagtctctccaagtcaaaaataggttttggattcttggtggcggcagtatccgctgaaaaaatagactgaacttctgaaattatcttagtagcaaaacaattacaagaaaaaagttgcaacttcagtgctatgactggaaaggggcctttggccggcggcccctgttaccggcggcccctgtgcgcctgggagctcctccgggcttgaggaagccgcccacgtgccctgatggagaaaatgggactccaacagg

SEQ ID NO: 345279 - DNA, 1000 bp, Homo Sapiens
tttttttttttttttttttttttttttttccagatgcctgtgatttatttccaaaggagagctacagcacataggaaaatacacatggcttttcagtctacatttttacagagaaaagagattcggtcattggctttctcagtgccatcatcctgttccatgaggctccaggatggatggcctgtctccaagatcccgctttcaaagcagcagcttggccaaggcctctgggggtaggagtgaagggcagcgacccccatgtgcgggtggaggggaggacatgagcagcactcactgcaaagctaaggcaaagaatagagctggtgggagatgcctcccctcaccccaggggcatggcttgctgaggcccaggatacagaccaggaggggtggggatgggggtctggtccagcctggagcggcagcaggactctgagtgtacacatgggtgtggggtgaagaggggggcatgctgaagaggaagcctaccagggtatagaggggctttagcttgcatattccccctgccccagaacagctcccagaccatggtccccaatcctacacttggcccctctcttaagttctacttcaggtgggggtcctgctcaggttccttctgccaccttatcccctcccactgtcagtgcaaaacattcttagggccaagcccctgagtcccctgcacactgactggagctgcagggaagggaggacagcaaggtgctagctgggagcctcccccagcaccaggaattccttgcacatctctcggacaatcatgcggtccatctggcactggggtgaggtctcctcctcattcaggatgcgtcgcagtatggcctgcaggtcgggtagccggtggcggtgctgcaggtagggtgtggtgcggactatagcatgcatcagggagaggtactccatgcgcagcttgtctcctggtgacaggtctgcgatgtgccgcacagtgatgtcaatgagagccatcatgtctgtgtgg

SEQ ID NO: 345280 - DNA, 1000 bp, Homo Sapiens
ttttttttttttttgtctgcgtgactattttttaataaaagtactgaagacccgttggcttttgtcgtagaggcagggcagtcacagcagcgtgggaacccgtgggaaggtggggcccccgggccagcgggaggggaacaaaatgctgtggggggctccgagacagcggctttcagccaggtcagccaggtgcatgtggaccccaagggtccccaaatccccaggacctcagaggtcccggcaccaccgccccgccctcggccctcttcccagggcgctgggctcaccagttcgctcctggcatcacagaggtgcccaataggggttcatttggcttccgccccccagacggtctcaggttctgggaagggcaggatggtgggcgggtcgccttcgaagcccaggctgcggggttgggcagcgaaaggagatacgggtctgggacgctcgagttctttattgagatcctcccggggccggcgccgatttgggtgatgctgcggtctctgcgcagatcctccccgactctagcgcgggctctcgagcagggtcgggtcggcgcaggccttaaggcccatccggccgctcttcctccggccccgcgctgccctcctctccgtctggggccacctcctcttcctccccggaagcgcctggctggaagtcgatggtccgcagcatttcggccacgtgctccacccttacggtgaattgctccatgctctcatagcctggctccggccgccctgccagctccaccttcgacatggccccgaccttattgatcagctccttggcctgctggagatacagcgccatttgtggctcttccatggactggatggcagactccaccagcttagaggaggcctccaggtggtcgccatactgacggatgaggccgcggacgcgctgcagcttctcctcttgctcccgggccagcgcctgcagcagctcacccttgcgctcctccagcactgcgcacaggctctcaaacctc

SEQ ID NO: 345281 - DNA, 1000 bp, Homo Sapiens
ttactatttaagaaaaaatatttatttgcaagaaatggaaatacaaaagcataacaatttcaatttatttttttttcccaaactaagtacaagtgtcctacaaagcttttttttttttttggtatttacttagctatgataaagaataaaaagtcatttaaaaaacgcgataggacagataacagactcacaacgtatttagatttaaacactgctggtctacgtaacctgttacaaaagagagcaaaacctaactgtcagcatagacattaaagctcaccgttgattatagctcagggcctgctcagcattgtttaaaaagggtcactcacagttttgtcaaagagtgctggtgttctctatgaactcataaactgttttatctgaaaaggtgattttctaagtagtgtaagccatgggtacatggtgcaaaaagttcatgttctcactcagctggtgagcgaaggatgggagcagagaacagagctaaaacccctggttttcctttccccagatgtaaagcctgctagctggaactcacagaagattggaacaaaaagataggagatggacacctgggggactgctccagcacgaagggaagcgatgagcatcacacagcagggccattgcaggggacaggtgctgtaattcctgcccagagaacttgaaagcttacagtgtgctcacaggaaggaatcggctcagctagtccagaaattgctgcatttcccatattacttagttctttattcatcctgtggtaaagagtcacccttgttttccgtatctataaaactgaaagacttaaaatttacttagcacagcacgcaacaccctagtaaatgctcaagaaatattatttcccttccttctagaaaccaaggctaaataaaacattcctgaattttatgttgtccaaaataacaaaacaaaacaacacctagttttttcctgtgttaagtgctgaccctttgaccacaaaggcatggaacattaa

SEQ ID NO: 345282 - DNA, 1000 bp, Homo Sapiens
tttttttttttttttttttttttttttttttttttttttttttttttttttttttttttttttttttttttttttttttatactaaccaggggtttaatataaatacaaccagcatagaaagacccaaaactatacagaaaccaaaaccagaatgccatgtggtggaggcaaagggcagaatttctgacccctttggctcagctgcccttccccacaaataaaaaccaacaaagaggacaaatcaggacaataaagaagattcatgctaagctgtggcagaggggggaaggtatgatcgggtgggggtgggacaaggaacggccatggaagatcactgggtcaggttggaccctgggctgggagcgggagggcaaggcccctcaccacaacttaacccaaacccaagctgcccccaggtgccataggtccctgtcccagcagggaggctgatgggcctgggcccatgcccctccccacctttgggggtcagaaagtggccacccaggcctgctgggatggggcctgacacaggctctgcatgcccattcagggtgcctgtggagaaagaatggagtcactgtttaaccatggtacctgcctcagccccagcagaccacaggaggttggccccagactcactgagtgcctgcagcagccgtacagacacagcatccttggccacctcatgcccatcccggccatctagggtcagcacaacccagatgaggccgctgaagggcaccggatgcccaggaatcaccacctggtaccagaagcggtgccagccagcaggtcctatgcccaaacacttggtgaggaacacagggctgcccagcttcattcgttggcacagcaactgcagggtagcccgagccccttggaaccctaacttgtcccttgccaaagccaactggctgccctctggctgtggggaccgcaagaagggacccacaagctgctggcgaagtcgctgcttcaggtctggcttgagccactcca

SEQ ID NO: 345283 - DNA, 1000 bp, Homo Sapiens
ctatttaacaccttcccctgtctcttgatcttcatgttcccaggggatagggtcattgtcctgtacagaagggactgtgtccctctcatgccaaaactgctctacgtcaggaaggatgggaatctctgccttctcagttttccctttgccagaggagggagagctgggtttctctttttctggtatggatgctggggattctggagatggaaccttgtcaggaagaccctctgagttgccagctggtgtttcctgagactctgagacagttggaggttttttggttatcatccatttccatacacctttcaagccttccctgaactcttccgacatcacaagaaaaatgagaggatttgctgaagagatggaaaacatcaagacttgagacagggctatgaaaccttgtggtggggccgggcctgcagccttcagatgccatacccacagccaagctacccattcggggagccacaagagagcagagatgatggcaatgctcagcagcatcactgtgacttgctttgagcgtatctggtttctaagattttgagtcttagttcctcgttttttacattggtcataagctctccagaaataaaagctggcaaaaaataatggaaggccaaatgccaggagtgggtagagcttaccaaacatcgacataaactcttcagccacagctggtacatccacgaggcacatttccacaccttcatgatgcctgatggtgctaaagaaccattccggcaggggtaacaggctagccacagtccagatggccaccagcactgaccagatggtgtagttgtggatactcacttgcttggctgggtcacttgcatacatgaagcatactttggccaccacaacgattgtcaggctcttggctgccatgcatgtgtggataaaccagtcagaggacttgcagacaaaccagcctagatcccaaacacttttggagtacgccgtagctcggataggtgcagaaaacagcagg

SEQ ID NO: 345284 - DNA, 1000 bp, Homo Sapiens
gcagcaacaggcaagctaatgaactaaatgaggttaatctgttcactacacccatgtagcacatgactgggatgggagattcgcagatgcctacttgatatttccacttccttctctcggaacgggcggcaggaaataaacacgatgttctcaggcttttcccggtgggcgcgtggaggccccggcagcagatcctaacactcggcttcctctccacagctccgggccttgggatcgattgtgtcctgtgccccaaatacaacagatttgccccagttggtgcttcctgtgagcccagaatagaaggtgccatctgtcacgttttagatgtcatatgtccgatgactgatgactcagaaacagggtgtatcaccaggaggtgtgaggaggaaggcaggtgagaaccagccagcctggtgaagcacagctcagccgcacacagagacagttcgtggggacctcagctgggcccctcggcagcctgcctgccattcctctgcaggcagaatgcctggggcgctccagccctgaaagctgctctcgtcttccgttttccaggaggacagagtggccctcaggacagggtatgtctgggatgggagagcttatcggcacagctggtgcggggtggggggttgtcccctgctggctgggccgagggggagggctcctggggagggccacggtgtgggggccggccccccgacgggacgccccggccacacaccaggcgtttttcatccagcagggacaggtggtactcgcaaaggtcaatcagtgaggccacctgctcatgaagtggcagcatcttgaacttcctctgagccaggaaaaagaaagcttctacgaaggcctgcagacacatccctgagtcccgctggtccagggtcatggagttccacctccgtgtgatgtcaatgtagaggatgtccacggcagccatggacaggctgctgctgctgagtttgcagctccttatgaaggtacgaaagcctgttgg

SEQ ID NO: 345285 - DNA, 1000 bp, Homo Sapiens
cctcctctcactttcaatgataataatgcaaccaaaacctttatataaacagtttatttactctaaacagcaacacagacaaaacgccatataaacacaaaggaagtggcgcagaaccgagatgctgacctggggtctgaggctcaaaagcagcacagcccaggttctagaaggttctagagaggagcggcaggagggagggtgcatttccatacagccagctgaggccaagtgcagctctgcacggtgagaagcatgcctgcatcccagagcgaggaactcgcccctgggggacttacccaagtataaaagtttataattttacagcagttgaaatactgacatcaatattaaaataaaagcgagttttacataacaatcaaaaatacaaaagaccgaaggaagagaccctgtatggaaacgggcaattcagcgaatcgagaccgcacacccgcggcggcaatggaagatggcgcccgcccaacccccccaggtgactagtcattgtatggagcaactttagatttgcaaaaatgttgtaaacaagttcttgccaaaccaatcccttccttttgacgatgccacaaggtcgctgcttatgagggcgcaaacttcttggcttgtgctcggacccttttctcgtactccactctgttttggcagtaaatcgtgtaggcctctgcttgagctgggtcttggatatttggttcatttagaagttcctgtattcctaataggatctgtttgattgtgatggctggcctccagtccttgtcctcctctaagatggacaggcacactgtccccgaagggtacacattcgggtgaaataatggtggttcgaatttacattttggtggcgaagatggataatcatctttgaaaagcatccgtagtttaaacaagcctccttcccacggagtccctttctttcctggaatggcgcactcccagttcatgaggttcatcgtgccatcgggattttttgttgggacagcca

SEQ ID NO: 345286 - DNA, 694 bp, Homo Sapiens
ttttttttttttttgtaagcaggtgatggttttattggcaaacttataggggtagtgtatgaagtcatttcaaataacagattaagttgctttccttacaactaaaagcttcaattactacatttcaactttaatttaacatcacatctacatgtgaagctttaatttcaggtctggagcagctgtaaaatgaaagttaccactccattctagtccttggatatcagtatattccccttcaccttccaccctattttcattgaaatttccagtatactttgccccatttgggaatgtgtaagtccccagtccatgaaacatattatccttaaattgtccttcatatactgctcctgaaaaatgctcaagtcttccaaaaccattcatcttgtcatctttccagcttcctgtgtagacaatcccattaggagtggtatgaatacctattccatttctctcgtagattccagaagatgttcttgtacagtcaccatcatacttgtctccatttggaaagataaagctgatcttatacacttctgaagttggccgagaggtgttagagagatcttccaaactctgcgactccccctgggcggccagctctgcggccgggagagaactaggcgctaggacagctccaggtgcgacttggttgctggggcgaccgggcacctctcacccggaagcgaat

SEQ ID NO: 345287 - DNA, 1000 bp, Homo Sapiens
ttttttttttttttttttttttttttttttaaaagcttttaaaactaattttattcctaaagttaaaatcagctagcgggtagcactgaaaatacaccttcactatacaaaacaatgtaaactgattacacattaataaggaatttagcacacacacttctaataaaagaagctagatgcagcccttgctataaaaagctatacctgaacaaaaatggacatgtggagtctaaggccctggcagtcgactagagaatgtcagttgttcccaattatgtttaaatgcagaaacagcaacaatgtggaaacttacattcatcaaatgttagcatttaaaatatacatgactaataaagtgaacattcagaggagccactgctcagcatgttccatgtcggccacttgtggacactgatctcatccaaagaggacagaagtttcaaacatctgagcagtttaagttaaaaataggatgaaggggaaataagagaacaggataagtgtcctcccaagacagcagtggctgatgcccacatggcgcaaacaggctgacttcaatgagtgttcacgggatgtgtgataaagcccagctgagcccgggaagctcacgtgtccacaggcagacaggctcacggcatggaccaatgtttccacaactcaggatggatctttctgtccccacttagtagtcaaaataatgttttaaaatagcttcagcctttgaacataactttccagtcccttctgtgcattgaaatgttgggggtcaagtttgggggtgactgtcctggtgaggggagcctgtttcaggacttgaacacgtgcacggctcgcaccacatactgccggcagatgggacactcactcatgcgcttgccgcacttggtgcaggtaaccatgtgcccacactccagtaggacacagtcgatgacggcatccatgcagatgcgacacaggctgtcgtcttcctcatcctgcagctgcagccgctcgccatagg

SEQ ID NO: 345288 - DNA, 1000 bp, Homo Sapiens
ttttttttttttttttgaatttttaaaaccttatttaataaaaggtttaaagatacagaagaacattcaaaagtaaataagttacataggtacattacaatcacatcagcaagattctttagtgtattaatttttttcttataaaaagcacacaaaaaataaaatcttcagtctctatcacaactgtacagcaaaagaggtaatatttatatatgtacactattttaatatgtaacagtctttttaaaaaaggatgccacaggcagcaaacacacaaaaggcagtgtctgatcatttttgtttcaaaataaaaggaatatacttatttatatgctattaaaatatctgtacaataattacagactgtcaaggctgttcctgtgctctgtcccctccaacaaagccttcaacttagagacaaatgaggaaaaagtgaaacagctgcaaattgttagaagcaaatattaacatagcaaaatgtggggaggacacaattgttttataaaaatatccctacttcctgtaaacctatggagttaggcttgccagtctgataataaataccgtcccagaaaagcgagccccagtgaaaacaactaaacaggctgaggcttgagtatgtgttgtattcctccttcatcttaacatctggcacatgagaagaaagaggttaggtcactgaggcagttaaatataggtgatccctttagacataagcagcagaagaccttggtgccaggggtggaggcgcggcagaaggggtggtatgtaccttagctgtgaggggggctgctgaaggcatggaggacagtaatgacggctgtgcctccttggatggtggagacctcagaaatggtctgcaacacaggcactaggtcagtttcccgcccttagctgaatgcagatggatgctgggagatggatatggtgagatggtgtggggaggatgttagaaagctggaggtgtttatcacttctcaaggagctctgaatatagggg

SEQ ID NO: 345289 - DNA, 1000 bp, Homo Sapiens
ttttttttttttttttttaaaattatttttattcacattttacataagattgaaaaaaatgtcagttgttcactaccagaaaatggggaactaatcactctgtttgcttttgtacctgtaacattaaggttctgtttcccagaccccagagataagacctacaggttgtgtttagtgcttcagaaaaaaaggaaactaagaaagatagctatcataagaacatttcacattaaaagacagagtagattgattttctaggtatttttgtttttgagacaaggtctcactctgattgccaggctggagtgcagtggtgtaattttgactcactacagcctcaacctctgcaggctcaggccttcaaagtagcgaggactgcaggtgtgcgccaccacacgcagttaatttttttatatttttagtagagacagggtttcaccatgtagcctgggctggtctagaactcctggactcaagtgattcacccgccttgacctcccaaagtgctggaattacaggcgtgagccaccatgcccggctgagtttctgctcttaaaagaaacagtggggaaaaaaagagaagacatattctcatttcaaagcaatttatgttagtaataactgagcaaaatgatagaattttttagttgtgtgttttcagaagtaatgtcaaatttacttcagataatttaaaaggttttttgcatattaaatggttaataaagtggtgttattatactaaagaaaaaatgcaaaaccttttttacagaatagtataaatgtttattttctgtatgatttactttgctgtcctgtttttacaatatagaaaagtgtattctttgaatagctctagtaaatataaatttaatctttctactttgggatgtaaatagagctaaaaaattatatacccaaccctccccaaatagtcttttaaaatcattgaattaatgtggctattcatcttgttcagcaatttgatgcaaatgcctgaata

SEQ ID NO: 345290 - DNA, 1000 bp, Homo Sapiens; identical to SEQ ID NO: 161130

SEQ ID NO: 345291 - DNA, 1000 bp, Homo Sapiens
atactgaaactattgttttaaaattttatttataaataaaagatatatacatatgtgctttaatatgattaacaggttccattttgtacaaaatgttaaacctagagtcctctgcgtcctggatgaggcgtccaaagggtggaatagtacagcattaggacctttgttctcctcttggcttctggaagagaaactcttgcatgccctcgactttcaccgcaaaaataagtgagaaaaaagataaatcccatttatgcaatgatatgtagctatgagttaatcacggtatttcattccatgaaatccattaagctgctggcatttgcatggctctaagtttattttaagaggctcattcaaacatggccaggaatatattggcctcttgagagtttgcatggcaaggagttatacagcaggaaaaagaaaaaaaacccaataattatattgatgcaagattcatcagtattttagaatattgtcgtttcaacatgttaaattgtttctgagcactgctgatttcagcactgtccctggtccacgtgacgcaaatgccaccctttccatatattcttcagcaaaaatatatgaaaagcccgtcactccctaagaggaccctgatccctctggagaggaaaactaaactctttaagaagaaaaccaaacccaacctgaactaatcgtccaaggagtcctgtttggtcccacgaaaggcagatttccatccacaccagtgaggggcaagtgtccgggttccaactcgaagccaggcgggcctgtgcgggggtgagtcctttgccacccggcgccccccaggctctacaagcgtctagaggtcggagtcgcagggcagcgagctgtcgcaggggtgggtgctgcacgagggagcgtcctgggactcccacccctccccgtcgaggacgtccaccgagttggtgtaggccttgggccgcggccgcggcatggggaagccgaccttgggcttgggcttgggcttgcg

SEQ ID NO: 345292 - DNA, 1000 bp, Homo Sapiens
tttttttttttttttttttatcaataaaatatttttaatgcctacaatttcttgtatacataaattgcaaaactttcacctgtatatgcaaaagtatattctcttgcaggtcaacagcaccagaaaacaagctaagctatctaaaaatttttttaacttgatttgtccattgtgtaaaagacaggatggatttaattactccaaagaaatctctatctcactcttaatcatacactaaacgtctgaatatttaatcacatccactcagaaaataaatagtagtctaatatattcaatacattgaaaataaaacaaccagtctctcttcatatatttattctctttccaaacatgttttggtctcctgctatatctcagaaatttaccaatagctgcttttaagttacaaaatacaaaacaacaatttatttcttggagaaaatcttggggattacattaaaaatgaaaatttgagttcccacattcttttttttttgacatggagtctcgctctgtcacccagcctggagtgcagtggtgctatcttggctgactgcaacctccgcctcccaggttctagcgattctcctgcctcagcctccccggtagctgggattacaggtgtgtgccaccgcacccggctaatttttttatttttagtagagacggggtctcacaccatgttggccaggctggtctcgaactcctggtctcaagtgatccgcccgcctcggcctcccaaagtgctgggattacaggcttgagccaccatgcccggccagacttacttttttgttaacggtctttgaaccttttcacggcacacatgtaaggccgcctgtgacatgtggtaccctggcctccaactggacacaactgcatttatagtttagcgaaaatacaaagttctgaaagtagccttaaaagaagtgccctttgctttgacatagcaatatcaaaagcaagtgggactgtgcaatcagagccatgagttttatga

SEQ ID NO: 345293 - DNA, 1000 bp, Homo Sapiens
atgagaacaccataccatgggaactttaattagaacagagacatgtttcgtacaggctgaaaaaccagaaaccccgggaaggttatgcttagctttggagaccagaaatcaagctagccatggctgctgtgtcactgggcagaggacagggtcccaggatgctggaggacacagcagcttctttccatctgatgtgaatgctccaggcagaggctgtctggtcaggctgagctgggctcatggtgggtcctcgggttgggaattttccagaggagattcgcagcctccaatgcagagaaatggccttggggtgcaccacgtccccttggccaatgtggtggattatgctaggtccttggccaatcattgcttgaggaaatagctaagaattgggagaaaaaaaaatacagtgcagagagaagttcttatagcacaggaccccggagaaaaagctaccaagggaatgttggacattgagtcaagctgatctgagctcaagggagcttgggcatgtcaactccccctcctgagcctcagttttctcctctgaaaagtggcaatatgacctatgtcactgggttatttgaatgattgtacaaaaatatagcctgacaatgaacaatggttaaatccagagcagggcaaggtaagcccatcttggtctctcccgtgatgactttggaccacggggcttagagagaagttcaaactaaatacagagggctttaacccaggatacaagagttatcaaggtgacagcaacttgaggtctcccatatatgactgtgggactcaacgactatgacctcattctgcaaatgaagtccaggccctacttttttgtttccttccttggttgacaccctttaatctgcagtcagcagaagacacaagagacaatatatccaacagtatggagtccatagcatcagggcttgagcccccatttcccacgtcttgcagataatatataggacaagccccattttacagatgacaa

SEQ ID NO: 345294 - DNA, 1000 bp, Homo Sapiens
tttttttttttttttttttgtacacagtaaacataggcaatttttattagtcaatgttagaaaatattttttaaaaaactatgtagtttacaaagcttaaagtatttgctatctggcttttaagaaaatgtttgcccatcccttccctggagtcttggagagcaaggatggctctctataccttttatagtacctggcatttagtaggtacatattaaatatctgttgaaagaagtgaagagcctcaaggcccagctctaactcctctttaatgggaggctctttttttggaagggcagggctagacaggtatgggtcagttctcttctgatagtcccagagtctacagcgaaccaaagatgaaagctctgaaggagagacaccagtactcacaggtctcatgtccatgctccgtccaaggggacctagctacttccttaccccttctcagtttcaggagaagaaaagtgttggagattggttaagaccctttcccaccaattgctgtggtgaaccctccagcaagggcatggctactttcaggaaagcaaagagggtcctctgcttctctatccttcccaaaaaacatgggctggggtagaccctaaagagcaggcatggaggactgtgggaaggactcagccttgctgtagaagctctctgcaaagcaagaggcagggtatggtaacaaatgccaattcctggttaaattggacttgacaggtgaaagatgtcaggctgtgtgtggtcacattgtacatatgcatgcctgggggttaccaggctgtatgcaaatatacaaggaagaggtaggctctgagaacctgccagggcccctgggatgagctgtggatttttgcccctgatcccatgaattggagggtcctctgctcaaaacatatgatatacatgtcttcttttaatttggtatcgtctttaggtccggaagagaaaacattcccttccttgtaccaaagtcctcagctcaggttccctgagt

SEQ ID NO: 345295 - DNA, 1000 bp, Homo Sapiens
aaggtggaaacgatgccatttttcctttattctcccgtctgtaagaccagaaggcaattggaggatcctcaaataccagggagaaaccaggtagcagaagaagtagtatggtgggaggggaagatcaaagcaaacgcctggggagtgagtgacaattgcgaccccaaattgggtctcctgacttgtcaaggcccttctctgggctcctctgcacctgtcctctgcccaggttgatccagaaaaggatggaattggttgcatggtgttttcaggatccgattgggagatgatgcgttcgcgtgggaacgctcctggtagggtctgtaagcctcttagggggattacatctggatgtataatttttttttgggaaatgtgaaagcttatgggaaaaatacgttttacttccaagcagtggcagttccttatttcctatgaggaaggagtttatagccccactcttgactgaaaagtgtgagagacaattcaagcgcttgaaaattcacctgttttgcatttccggaaagacagagaaagcgtcagtgatccatttcacagatcaagggtataggaaagtggatggcactttgagatgttcattaggtttggagagggagcagacatctgccagcaatcccacctcttgtgctggagtcttgcagttcatttttctctcctgccctcttccaaatcctatgtccaatatcaaggatatctgacagttaaccatcagaatcaacgagcggttcccacagagttccgtcctgcaggagaggtaccgggacaggggcgggaggcctgaagctgcgatcagaaaacgctgtgccttttacgctcctaaggaaccttagaccgagagtttcaagtttcaaaggcaagcagttgttggcccctcctgtaggatcctgtgggctctggaccgggaagagagcctggcagcgaggggtgacctgtggtctcggctactctagaggctgaagcgggaggatcgctggatccc

SEQ ID NO: 345296 - DNA, 1000 bp, Homo Sapiens
tttttttttttttttcttttttttttttttttcaaggtttctgatacgggatttaattaataagaagttaagcaccacagtaaaatacatttttagaaaacagagtggactgccatcaatacacaagttagggacaaaagaaagcacttacactttaccccacccttccccccccaaaaatttaagcactctaatcctatcaatcagaaattttacaaaggattttttgtgtggttatctgtgtgtggttattatatggaagatacaaaccgaaattctatttaagatctcaagttctagaatcatgatttgattcagtaagaatgtcacattatttgtgcatgttatatatttatttttagattatatgctatatttttatgctttctctcctcaaagtctatgattaaaggatggcacttatgcattctgaagcgcatgagagaatttatgacaaactgccttgtgaaaaaatatctactctgaagagttcaaagtaattatgtataaataaaaccttaaaataaactgctgtaaaacctctgcatctatttagcaacacaaataacttcaaaagccaaaatactattttaagtttctctcctccatgatgtgtttaattacgctgttacaagtaagactaattttttagcatgtgtaacagaccacatgctaaaaaagtttaagggttcagaaaactaaaatttataattcttacatggttatacttaagccagaagtacaagactagaaataagtaacttcaacctaaaatatgctttaaataccacaaaagaagaaaaaagaaaaacaaagggaaaaaggatttctcctcatgtaatttttgagtagactatgtagcaaaaaagcaaaatattaaatatctagttttcacttcaacagaaattattcataaataaaattcactaaataagatataatgagattaggagtatgaatatggggtattcagacttattccattcagatgagaagatga

SEQ ID NO: 345297 - DNA, 1000 bp, Homo Sapiens
tttttttttttttgaagtacaagattttcaaagtgtagatgctgcataatagtttattaacaaagctcaaagtttacagaaataacattaaatgcaacactttttgattattaacacatgtacaattttacactgcaaaacaattgcaactaaaagtttaggaggtaaagaattagcacacttggaagtctgtatacatttaatacaaatttgcaagatatcagaatgatctctcctgaaaattcaactttccttgtgtatatatatgcaaagagatacctatattttaaaaaagagagctacctgtatgtcatgcatcccatccaaaacatgtcacaatattttatatatattacatagtatttacaacaaagccccttccatagtatttacaataaagctccttccaaaatcaccaagaggcttctttccagaatagcaagtgctttcaagttactgtaccaagtattctcactaatacagtagtgtatctaaatgggggaggtgggggagtatcaactgcctaatattagttactgaattttcagattagatccctagtttaaagacacttgcaattgccaatagtttcaagatactggcttcgtaaaaaaaaaaaaaaaattagcaaagattctttcttaccatgggactcagtaatgttattacatcaatatcttgaaatgtttcttcatctgtgtaataaagtagttgaaaataattttaaattatcacatgagcattagtactttataaaaattgatctagaagactctttagagaatgctaccaggtattgtttgtcaataagaaaacaaaatgaggccctatgattctaggtgaattttaaaaaaatttttccccaaggaacaattcttaaaactttcagttacagggaagagaagaaaattgtaccttctaacagttatttgttttgcctagtttattaacattgaaatcaacccaagttctgatactataaaaataaatgaatattcat

SEQ ID NO: 345298 - DNA, 1000 bp, Homo Sapiens
agagaataaaacttggatttattcagaccgtatgcttcccatttggggtgcagagtgggggacagtcatggggacagagaaaggcagtgcatttggcttctagggacatgctgattgctgactctttgggtgacctttgggccaccagatgaccagctgaatgatggagatggtgatgaaggggctggcggccaggtccttctggagacctcacagtgattccaaacagagaccaacgctgtgtccagttggctctgttcctctccagggattaaggagcagatggctgggaacactcagactaattaaagaaataaaaactctgggtagagggacactctggggggctccaattcaggcagtggtgtgcaaattcacacatgtcgatgcgtgggccaggcctgtgtgaaaaacatgtgtgtgtctgtatatattacatcctccacaagcagctgggagcccccatcctacccccacgcctgtgcaactctgtgggcctcttccagacctttctttttccatttggaagaactgggcctattgaaagaactgcgaaagggaaatggcccacagtaatcctctgaagatgccatttcctcttggtccttgctccagtgtacaggaggcaggtacccacttcagtcctggggcagtggaggccaggaacaggtggcaggtgtggtgggaggcggtgggcctcactgggcagctggctgggagtagctgcaggacacctgcaccgtctcagcttctgtcaggtcactgctgaacccagctgggctgtgcaggaactgcctcagcaagggggaggcgtggagcccgaggtgggagcctgggttcctgggtggctctgcctgctcggtgactgtggtggaagacatgaggactgtgttcccaaactggtccacctcctcatactgttcagtcacggttctcatggctccatagtgttgtgagctccctggccccgtctgtagctccagaacactcttttgccacc

SEQ ID NO: 345299 - DNA, 1000 bp, Homo Sapiens
gagatggagtttcgctctgtcacccaggctggactgcagtggtgtgagcttggctcactgcaaactccgtctcccgggttcaagtgattctactgcctcagcctcctgaatagctgggattacaggcacccactacctcacctggctagtttttgtattattagtagagatggggtttcaccatgttggccaggctggtctcgaactcctgacttcaggtgatccacccgcctcgggctcccaaagtgctgggattacaggcgcaagccaccgcatctggcccaaaagctttgtgttgttacagatattagacatgtttcttgtttaagaaaaaattttttaacaataacataggagaataagagaaacctttttccaaaaaaaagaaacttgtgattattttatcttattggaatgttggataatatagtctgcttcgttaatcatcaagcatgctatggattttccatttttataggatctttatctcagttatggtaatactggtaatttttgtactgtgtttgaagatgaaaaatataggccaaaatcgtagaccttgcatagaagctggataatgaagacagctctggaggaacacatagatacacacacacacacatatacataaagtatacacacatatattttttaaagttttaaagcttttaaagcaaaagccggcccctcccctctcccagagggggcggcccctcccctcagagtaggcggggacagcagttgcatggacagctttccttgtgagccacaggtccctctggacatactgctgcctggccacaccccctttccctttcatctttgtcattgaccaatgggcttggagcattaaggccacgcccctgttctgcattctatgggggccctagttgtgcctcctcgggctcagtcacacagctgcctggtaggcaagtggaggtgttcatcagtgctcactgggattttgctcacgtggccccaaccccgcctccctccccac

SEQ ID NO: 345300 - DNA, 1000 bp, Homo Sapiens; identical to SEQ ID NO: 161131

SEQ ID NO: 345301 - DNA, 1000 bp, Homo Sapiens; identical to SEQ ID NO: 161132

SEQ ID NO: 345302 - DNA, 1000 bp, Homo Sapiens
aggagctgcatcaggcaatctgcctcccattttatttctaaatgagatagctacaaagatttttttaaaagctaaatacctccctcacaatttgcccactgggaaattccttgtggtccctaaaatctttagtctaaaacagttctgttgaattttatcctgacaaagtatattgatagcttctcttaataggtacaggacaaagaacagaactcaaagccatccctctgctcccccgagacaaatgcatatctgattgcttcctctgccctatgtttattttaccttctgtaaaagtgcagatccactgagctaggtgaatgcataagtgactgttcctctaccccttctctcatgagaaaagctgatcagactcaaaaaaatgcaactgtttgcctcctatgtacccacacctctttccccattagcaccctttccccactaaatgttgaaggcctcaaaatcatctttggagaaaggcacagacctgtcttctgggtgtgtatccttaaccttggcaaaataaacttctatattgactgaggtctgtctcagatactttttgtttgcaattctatctcccccactacactgtaagttctagcagggcagagaccgtatactatttagtcactgttgcatactctgtgccaggcacatactaggtgctcagttattctatactgaatgagtattagagtattctaaactcctcttgggtttaaccaaagggtagaatatgagagatatagctgacaatgggttggcagacccttctccttggggaaaattgaaatttccttgctacatctgttctgggcctttatattttgtatgaaggttaacaaacctgctctgatctagaggaagacatctgcatccttttctccaacaggacaatttgacaaaggggttggacctaactttgcccaagctgatgatgaaggagacatcctggtgctgttctccaaggtgggtggagtgaaggcagccaactggg

SEQ ID NO: 345303 - DNA, 1000 bp, Homo Sapiens
aaagactagatgcttttactggcggtggagagggggccaggcgtgacccctagcggcatgtcggagaggctgggcgcgggcatttacggaaggtcggtaggaagtggcaccaccgggtggagtacctctgcttgctgcgtcggcagcagcgtgtccggggtcagactcctgggcacgcagaacggcggcagggcgatgacgcgtggccgcgaggtgagtaccacctccccgcggctcgcctccaccaggatgttctggatcatgttctccagcagcgcctcctgcaggttggcgaaggccgggagccttctgatggcctccttctcgtcctgttcttgctcctccttcaccatgacattcagctgctgttgccactgccattgcatggactcctgggactcaggctgtggtgtgggcccgatgcccgcccagctcactttctcttccttctcatccctctcctcctccttctcctctatctcctccttgcccaactcctcctcttctgtctcctcttcttcctcctcttcctcctccaactcttcttcttcctcttcacccttctcctcctccccctcttccttctttcccaaccctggatagtgctctggtctgtcttccttcggctgcttgcccttcccatcctcccagctgctggagggtacaggcaggattggcattaagtacaggctgtttttctggtccatgaacttagttgactgctcattccagaattggcggaagtacggcacctgctccaccaggctttggtccacagcctcatggaagttcttgtcttccagcaggcccctgattattgtggtgagaatgtcaaccaggagctgcttcttctgcttggaaacagggccccacttgttaggggatttttcctcagaagtctctgactcttccctgggggccttcctctttggcagctcccggtgcaaaaagtggcagggaaaccctgagaagaagttagccagaaagtagtcggtggcat

SEQ ID NO: 345304 - DNA, 1000 bp, Homo Sapiens
gcctcttttacttttttatttttttgagactgagttttgagttgagtttttttgagaccgagttgttttatttccgcacatgaatggtagttccagctactcaggaggccaaggtgggagaagcgcctgagcccaggagagaaccatcgagaggtaattcacatggagtacagttcgcccaactgaagtgtgtaattcgagttttcagcatattcagagttgtacagccatcaccacagtcaactttagaccattttcagcccaaaagaaactgggccatcgcccctctgtctccccgccacctgcacgcatcctcccggcctcaggttccgggccgtgtctgttctggccatgtgttacgggatcacgcagcaccgtggttccagggctcatccacactggagtctttccttcatatggctgagtgacatcccacggtacagacagtgcattgcatctgcccgtttgtccactgatggacgtttggggtgtttccgcctttggccgtcttgagtcacgctgctgtgtaaggatgagtttgcaggggatggatgctttcattcctctggggcagatgcctaggagtgtcatggctgggttttgggctcaccatgtctagtcggttgaagaactactttccagacttttctacggtggctgcatgcgttgagttgagcctcggggatgggcccctgtctgggtgttctgctatggccaggctgatgggatcccaggaggtgactcttctcaggacacttggcccagccactctgactttgtgaccaggacgggaagcacctgtggttccactcgcctgcccatcacggagacccacggccatcccgagaggtgtggccacgtgagcaacaacgctccacgctgggtgtgggcgagggtcttccagggaccctaagccttcttaaagaacaacttggagatgtacttcatgcagcgttcagttccccgttgcgggtgcacagtcgggcggccgtgcactgca

SEQ ID NO: 345305 - DNA, 1000 bp, Homo Sapiens
gcgctaggaatgggaatctttatttagcaaacacatgttcagcttcagctctacagcagggtcttcagcagtggaggaagccggagcgggccggctgcagggtaggcccttgtggaaaagccactggcttggggctgcggccggtgctacttcccttcccggccctgcctgccccaatggccaataccacccctcccaattttacatcttcttgagtgtccgtccccttgggccctagtcagctgcgagggtctctctgttccatccaacagcttgcccgctgccctccaggttttgcctggacaatccccagggattgaggcagggagtccagataagcctgtcgcctgactgcaccctcctctgtcccagggggcctggatgccaggaggaatattcctgaagcctcccgtccctgccactccctgctgggccatctcacagctgcagagccccacctccaaagtccctgtgggcttgggcccagccctcctcagccccagagcctgggtgatgacccattctcctggctgccatcagaagctggggacaagccacaccctatgccagccatgcccagcaccatgcccaggaatactccgcagcacccagagcccccgaggacggactccatctcccttcctgtatccctccctccagtacccaggcccctgtgaagaggtgcactgtgggtgacacccaggtgccctcacggagtatccacgccccactgaggtctggctgctgcccacccctgccggcattctcctctgtgtgcagcagcctttgagagtgggcaccagccaccctgcctggaggactctctcagccactgctactcccacgtccctgctctccagccttgctggggcccacgactaggccagggctggtcaggctggaggacaggggccccatggggagcctcctttgaggaagcagggcctccggagcaccctgggctggggcactggcctggcgggcatcggtgtgtgaccag

SEQ ID NO: 345306 - DNA, 1000 bp, Homo Sapiens
aggaccaaagaactttatatttattttaaatatcaaagtaacacaaagaactagttcaatatacagtacacttcctactcttcacagagaactgaaattttctataaagacatttatacttaggaaacatcagacaaccaaagtatgtataaaactcacaagatattttacacacagttcacaataattaattctgatattttagatttttctgtcattgcttttaaagtatccttaattaaaaacaaaaattattatttgagactgaaaacaagtgcaaaagcatttctactttaatatacactgtaaatccccataatcaaaacatttactacacaatgtggaacagctaaatgcccagttttgtattattttctggcagccacactcatcaattgtaatacagttttatcaatagggataagaagagttcaatcgttagaaggaataaaaattttgtaattacatcacagtacattgtccagctttaatgcaagcaggaataccaagcaaaaaaatacgcagtaacaatgagatgtgtacatcctcttcattcaatacatcttttagaatctccaacagcaatgcaagcattgattacttttctttacctaagaatttgaccaaacaaggttatattctttgtataacctctgtgctctaaatataatccttaatttctcctctgaatataatccttaatttctctttatgtaattggctgcataggctaaatttaaattgttttaggatttttctcaagatcatagatttatgatcatacacagcaagttgaaacatgagtaaacaaaacataagcactctctctacaaaaaccttctttttctcatcttccacacatcttaatcctattacatctatcttattaatgctacttccaaagagaaagagcagaaagcatgctaagattatagggaaaaggtatcttaagtaaaaacaattttagaggaaataaggaggggattccctctaccctcaa

SEQ ID NO: 345307 - DNA, 1000 bp, Homo Sapiens
tttttttttcagaaataaagatataatgaaagaccttttttttccacaagaataggttaaatacatacaattggtaaattatagagcaattctgaataaactgatcaaaaaacgaagaaagatgagcgcgtgcgggctgggcttgtctcacgcccgcctccggacagggtgggtttcttgccggcggccgtgccccacctcgacgcgatgcacctgcggtacatcccacccaggcgaagtcacggaacagacgcagaagaggggagacggccgagacccggggagccacgcggcccgaaacagcccctgctggctctggcgtctttccgggccggggtgcccctctgccatgttccgtggacagcgaacacccgggccggagccattacctactgtgaaggccagcgcagggggcacgggatgtgagggaggcccccgagtgcacggggccttctgcagggactccggtcctccgccttccaccagcataggaggacgggcttctggcccaccggacataaggaattcagagaaaaggctctgcaggtacccaaggccccccagcctgcagcaccgaggggcgcccaggaggcccggcctgcggagggcaccggcagcccccgccccgctcgcggccgccgcagtcaagggcgacttgtggttggagtgagcaggctcctggcttccagggcagcaaaaacccccaagcactttctagaaggaatgtgtttcattctgactgtaaacacatttgtaaatgctgagaccaaaccccgacttatggatcctgagccacggccgtcactggccccgctaagcctcatcaccacacggccaggccagaccagcacccgcggacgccagctccacccctgggccccgaggttcccacccgctgaggagccgggagctccgagaaacgcgccaggagctccaagaacgcaggagcagcccgcggtcggcagcaagtttgcatttctaagtgaccacatctaataaa

SEQ ID NO: 345308 - DNA, 1000 bp, Homo Sapiens
tttttttttttttttttacactcaaaacctttattcattgatttacaaactgtacaatatttacaaagtttaggcattaatcccatattgacatgaatgctgtggagagtctaaaaataaatatgtggcacatagcttaatatacacatcatggctctttacacttaagccattaccaatagtgagatgtaatggagaatttaatgtggtagaaaagtcagagtggctgaccagtcccggaccttccatgtgaatgactcttccttggctccttgaggctggggatagtgagcaaataactttctttcaagagaattaaacactgccattctgacaggcacatgggacgcatgcagcaacatctatgcagagtctgcaagcactccctgggtggtggttgaatctgcaccactgtggacctgatccctgtacaccagccagggaggctttggtgtggtcactttcttgtttcttattcaatcacatgtagtacttggaagatgtcagtggagtgtaatcatgcacaaaaatggtacttgtaggtatgtacaacatcaaactttcattgtcttatagcatctttagatgcaacatcaactatctcctcttttagcaagagggatgaatgaggaagccaaacccctactccccaaagaaaaaacatcacctggggacacatgcaaatagcatcctgcaacagcagggtgagataaactccacatgataagatggatgaattcctatgaagtcaggcctgaaagtcttcctagggggataatcccacctttctttcctcttcaatcccacatcatcccacataacctaaatctgaaggaaacagcttcacaacattgcgtttgagctttggtaccttcatttgggaagtgtaaatgctagtaacattctttataggattcttgcagggattaatcctaacttatgtaaagtgcttagcatagtgcctggcacatacgaggtgcttaataaatgtcttgctttc

SEQ ID NO: 345309 - DNA, 1000 bp, Homo Sapiens
ttttttttttttttttcttttttttttttttttttaggcaaagatcttttatttgtggttaggcttacaccattccaaaaagtaaacataaataacaaaacacttaaaagtaccagaggaggtgccccggtatcaacactaatcagaccacagaagaaagcttgacaaggatcttcatatacggatgccagcttcaatcatgtcaaatgaacatgttgttctctcagtggtaacagttagtaggccagagcagaactggagactcttttccactggtgtaggcagccagggctctccaggagtactattatagatgacatgaaggtgactaccacggtagcaatgacaacaatcccagttacaatgactgaacaaagctaaggccatcagtataggcttgaagcgatctagaaatccttctggagcctctcatcagctgatcatccctgatacatcccttggatggccacagaatccattttcacaaaactgaatccaatgcattgtgttatcactgcaacacgtgaggtctggtagttgctaatttggaaaaatggtaaatactaatactattgcaaatagtcaatctatgctacaagaaaaacatattaacacacacaggtacttttggtggtatggctttaaattctgtgctgggctataaaaagcattataagcaaagttaatgagtaacagtttttattaaaaagaaaaaaaagaagtaatttaccaaaattagtttaagacatattaaattttatgcaaatacctttacaaaaactgaattatataattagagtgctttttatacattaatactgaatatgttacattactatatattaaagatataatttgaaaactagagctgtttcaaaatactgtgttcaaatgtcattctttgggaacccagagaaattgcctgatcaccatgctgtccttccacaaggggtttctctcctgagtcaggagagagtcattaagtaacattcaaaaaaaa

SEQ ID NO: 345310 - DNA, 1000 bp, Homo Sapiens
ttttttttttttttttttaatccagaaaagcatcaccaggatttttttttttttttttaagagacagggtctcattctgtcaacctggctggactgcaatggtgtgatcacaactcactgcagccttgaactcctggactcaagcaatccccccacctcagcctcctgagcagttaggactacagatgggtgccaccatgcccagctaatttctaaatttttttgtagagataaggtcttgctatatttcccaggctggtcttgatcttctgcgcttaagtgatcctcctgtctggggctcctaaagtgctgggattataggcatgagccaccatgcccagcctagagaaatttgttaaaataacaaaactggaagacttactaccaaatttcaagacttcctctaaagctataattaagacaatgtggaactactgagaagacaaatagattgatgaaacagatcatttcagaagtatactcatgataaataattgatttttgcaaaaggtgccaataacaacgtaagggcgaaaatgaaagacatctcccaaaactggtgtcactatgggtcaataatatgggggaaaatataattcaacctttacctcctccattatccataataaaaacatgaaatagatctaacagtaaaaggtaaaaatacactatagctatagaaaacatggaagaaattctatgtaagctcagcatagaataaataatacttcttagaacataaaaagcagaactaggtcaggcacaatggctcatgtctgtagtcccagcactttgggaggctgaggcagatggactgcctgagcccaggaggtcaagacaagcctggacaacatggtgaaacctagtctctacaaaaaatatagaaattaggtgtggtggcacatgcctgtagtcccagctacttgagaggctgaggtgggaggatcacttgagcctgggaggcagagactgcagtgagccatgattgtgccactgcact

SEQ ID NO: 345311 - DNA, 1000 bp, Homo Sapiens
tttttttttttttttcattccatttcaggaaactgaagcatttactagtgatttctgccagcttcacactcacggggaaaggaaaggtcagaagacctcttggggtaggagctgatgaccagacttggtcctcctgtgtctatgcaagtgagacttctggctaaagccacgcccacactccctgcagacatacggcttctccccagaatgggtccgctgatgtcggatgagggcagacttaaagccaaagccgcgcccacattcatcgcaaatgcagggcttctctcctgagtgtgtcctttggtcagagataaggtgtgacttctggccaagtccttgtccacacaccctgtctacgtaaagctcctcctctgagtgtgtcctctggtgtcgggtgaggagcgacttaaagccaaatgcacgcccacacttggggcacagataaggcttctcccctgtgtgtgtcctctggtgtctgatgagggtgaccttctgaccaaagccacgcccacaatcagggcacaggtagggcttctcccctgtgtgtgtcctctggtgtccaatgagggtgaccttctggctaaaaccccgcccacactgggggcacaggtaaggcttctcccctgtgtgtgtcctctggtgcctgatgagagtgaccttttggcgaaagctgtgcccacactcagcacagacataaggcttctctcctgagtgtgtgacctggtgactaaggaggagtgactgctgcctgaagctacgcccacactcaaggcacaggaagggcctctcccctgtgtgtgagctctggtgctggaggagtgatgccttctggcaaaagcctctcccacactcaggacacacgaagggcttctcctccaagtgcgtcctctggtgtagaaggagggctatcttctggcgaaagcctcgcccacactcctgacatacaaagggcctctccccggagtgaatcctcttgtgattagtgagagaggatgtatac

SEQ ID NO: 345312 - DNA, 1000 bp, Homo Sapiens
tttttttttttttttttttttttttttttttttttttttttttttttttttttttttttttttttttttttttttttttttttttttttttttttttttttttttttttttttttttttttttttttttttttttttttttttttttttttttttaggaggtccaaggttttttattcacttgttcatacaatcacattagaataaatgcatcatataaaagttcatgctgtcagtgctgtaaccattaagtaataacgtttcccactttttctgaatggtccaccagtataaatattggtattacaaacctataaatgacaaaggaatattcttatgttttctgagttatattatgaattataagatgagaatagacctgccaatattcttcacatttgaaagtttcctaccagcataaattccccgatgttcaacaatgtttgagccacacacgaagcacttcccacactcctcagactcttagggtataacactcatatgttttctcagatgcactttaagggctgaactgtatctaaaggtcttcccacattttttgcatttaaagggtttctcaccagtgtgtacccgctgatgttcagtaaggaatgaattaagtctaaaggccttcccgcattccttacattcaaaaggtttctcaccagtgtgaacactctgatgtccaataagttgtccataaacagtaaaggctttcccacatttgttacattcatagggtttctccccagtatgaattctttgatgctgaacaaggtatgagccagaactgaaggccttgccacactccttacactcatagggcttcttaccagtatggattctgctatgttgtacaaggtacgaggctcgactaagagtctttccacattccttacattcatagggctttacatcagtatgaattttccgatgctgtgtgagatgtacgtgcactctgaaggccttgccacattccttacactcatagggtttctctc

SEQ ID NO: 345313 - DNA, 952 bp, Homo Sapiens
ttttttttttttttttcttgggttcacatttattgtaacttggaagcccacccttcttcctactcctggagctgtcgtccccaagggctcaggaattagccttgctccacagcaaacagcccagaggccccacctgggcaaaagcaaacaaaacagatacgttcctttccggcaggtgcagatgctctgcccaggcctgcggaagccagctccggtctgtgtgtaaatcctccccaggacttccggcccaccagctccattccagcctccactcggctcagctccgcggcttcctcgagccaggctggtcctgcatcgccatctgctggccgcgcggcacggccggttcctggagccagcaggagtcggaggctgcagggcttgaaggcctcttcaccgtgccctccagggagcctagctgccgaagtattcctgctggaacttctggaagtcttcctcggtgaacacggtgccctcagccttcttcttcttggtcttggccacaggccggtcacaggccttgcggccccggttctggcgcaaaatctgctggctcacagactcagccacggtgcttctcgtcctggtcagaaacttcaggtttactctgaggtggtctcgacactctcgcttccggtactcgtccagtgccgacttgggcacctttcccttggccgagttccgcagtttctgggcctgaattgccttcgtcttccggggccgtttcaccggagcccctctcggcttggcctgacctggagggtcccggggggcctcggacgccgccagcagctccaggccccgccgcagcagggcggcggacatggcggcgcttggctccgcccacgagcctcacactacttccgacctggcagtccctgtcgtctcggcggaaacccgagcccgaacagagggatccggagggggatgggcggaagtgccggacgcgtgg

SEQ ID NO: 345314 - DNA, 1000 bp, Homo Sapiens; identical to SEQ ID NO: 161133

SEQ ID NO: 345315 - DNA, 1000 bp, Homo Sapiens; identical to SEQ ID NO: 161134

SEQ ID NO: 345316 - DNA, 1000 bp, Homo Sapiens; identical to SEQ ID NO: 339045

SEQ ID NO: 345317 - DNA, 1000 bp, Homo Sapiens
ttttttttttttttttttttttttttttttttttttatctgcaatcataagcaaggtctttattttctctctttgatttcttaaaattattttggaaaaatagttgtgtctccaaatgtactttcacagaaggaagctcatatgaccaaagcaatattctgagtcattatggcaaaaatatttattattgaacaactgagtgtttcattcacttcacattttacacatacttaacacaagcagaaagggaagtttcagtgtcagaagcaggggtcgttctccttaactgaaagactatcaggagagagcctttggtgattagcaatccaaatttgagattttttaaaacaccattaaaaataaaggttgcctataaaatatggaaacacataatattttctgaaaatctttttggaagaatgtctttttatcttcattgttactatcttagacattttgaggtttatttaacacagcattccatctgcttaacattcaaatttagacacactgattatctgttctactctcctgaatagttaagtacactctataaataaacacatcaattttgctctattactactcttccaaaaacgtctcatataattggaattaacctagcatttacttatcattaaatatatttttttgttagaaaggatatacagcatatgaaattgcaggctttttatgagttaaagacaaaatttagaactctcaaatactatttacaatgtaaacttcacagttattacattagctagaatacatcacaacattcacaacacaatatttttatttggtttggatattgaagttgttttcttgaattacttatgtagaactcaaaatttaattatgttgcgtatcattttccttcaagaattcactgggaagttgtcatcagctttgctccaaaggtctttttcatcatttttctaactcttctggaaagtcgggagattctccctcactgctcctctttccattcagaatt

SEQ ID NO: 345318 - DNA, 1000 bp, Homo Sapiens
tttttttttttttttttttttttttagctgtaggtgggtttcaggtttattacagatttattgggggaggccccaaggagaagacctatcatcatgtcacgggagctcacgttccataccaggaaaggagtgttcctgtcaccaggtgaagggggaagggtcctgggaccccggcagtgggaggcctcggggaggggtgtcatcagagtcttgaatggacccagacgctctcttcccgccaggacaggatgcgtaggagcagagaggaagcagctttgctgggaaccaccctgggtcgtttactgaaccaaaggctcctggggccagccagagggccagggaggtaacacggtgctcaggcttctctctgggccctctggccttgggcccagatacagtgggctcgctggcaggaagactgcctcagcatctatttccttgcaggggccgtggcatgaagaaaagttccagaaccggctccgtagtcagggaacttgtgggctaagtgctcagacccccttcacagcactttgcctggattcatgaggccttgggggtctagcacggccttgagctgccgcatggtctccacgcccacggcgcccacctcctcctgcagcagctgccgcttgcccattccgatgccatgctcccccgtgcacgttccgtggagagccagtgcccgcctgcccagctgttctgcaaaagccttgaccctgcccagttcctcggcgtcatcagggttgaccagcaggatgcagtggaagttgccgtcacccacatgcccgacaatgcttcctgtgagtcctgaggcattcagatcctccttggtctgcaccacgatctccggcagccgggagatgggcacacacacatccgtggagtagcccttgcagcctggccgcgtggccagggctgcgtaccaggcattgtgccgtgctgtccaaagccggctgcgctcctcggcctccttggcccaggagaagtcagaggctccgtt

SEQ ID NO: 345319 - DNA, 1000 bp, Homo Sapiens
attttcaagatacatatttatctgataaggaaatgtcatccaaaaaaaagacacacaaaaaagaaatgtcatccaaaatatacacaggactcttaaaactcaacaataagaaaacaatccaattaaaaaatgggccaaataccttaacagacacttcagcaaagaagatatgcagatgaaaaatcagcataagatgctcctagtcatatgttatcaatgaaatgcaaaataaaacagcaagataccactacatacctatcagctggccaaaatccagaacactgacatcatcaaatgtgaggacgtggagcaacaggaactctcattcgttgctagtgggaatgcgaaaagctgctgccactttggaaggtagtttggcaatttctttcaaaactaaacaccctctcaccatctgatccagcattcacactccttagtatttacccaaaggagctgaaaacatgtctacacaaaaccctggcacatggacatctatagcagcttaattcataattgccaaaacttggaagcaaccaagatgcccttcagtaggtgaatggatgaactatgatacatccagataatggaatattattcagtgactgaaaaaatgagctagcaaaccatgagaagagatgggggaaccataagtgtgtattgctaagtgaaaggagtcaatctgagaagccacatactgtacaattccaactccaggagagtctgaaaaagggaccgtaaaaagatcagtggctgtcaagggttggtgggaggtgggggaaggatgaacaggtggcgcacagaggatttttagggtgtggcactattccatatgctgctacgatggggacacctgtcactagatatttgttcaaacccatagaacattcgacacctagagtgaaccctaatgtaaaccatggacgttgggtgataatgatgtattcaagtaggatcatcagttttaacacatggactgctctggtggaggatgaggatgatg

SEQ ID NO: 345320 - DNA, 1000 bp, Homo Sapiens
tttttttttttttttttttttcattcatccattttatttaacaaagtggagcctcatctgaagcatttcctcaccaggcttgaagagggcctttttccattcattataggctgaatgtctctctccccgagatgcatactggatacttctccatctgagttcctccaggagcttcactcttgtgctttgttcttgcttcattgtgctccatgccatttctctcaactcttgctctctctttttctttctgaactgagtctttttttcctcctgctgttgccacaggaagtaaccggctcccccaagaagcagcagcaagacaggcagggtccctgccagggcggcgatccacctctgggcgctcctgaagaaggggtctgcgatggaaatgctggctgtcttttccaggccgaggagggaacttctgatggtacaggatacaccctccccagagctgcctctcatgatcacagatgctgctactgcatacaggcccactccgtctgcaaccacaggtgcttccacagtcgggatgttctctcccttgttgttgctccactgtatttggggttgggggtaccagccagtggacctgcactccagatggatccctccatccttgtaacccttcacatcaacgtgaagatcagaacccagtgctgcaaccttcagctccaccagggctttttcatagaagtcaccatcttggaaataacacaagtactttccactgtcagaggctgtgacgttgtgtattcggagagcagccttccctgcagtgatgccatcccgcagaatcgaagttctccctcgatacggtgcactctgcctgtcttccacttcctttccatctgcatacacgttcaccacctgccttaggctggaactcacccacttcagctccatggtctctgcactcatggtcgggaacaggtgacagggcagatcagcgtcttcacccaccatggccaggatgggcccagagggtccaagcacagaa

SEQ ID NO: 345321 - DNA, 1000 bp, Homo Sapiens; identical to SEQ ID NO: 161135

SEQ ID NO: 345322 - DNA, 1000 bp, Homo Sapiens
ttttttttttgagacaccacatcatataattttattggtaaataattctttagcaaccagataaaaattaagagagactcatgttctctccatgtgtgcacaatgggggcctccagtacaggctctggcacatgaaaaaatgctcaataaatgctcactttatgaaaaagtgaatcagtcaatgtacagaccaattctctcataagtagaatagttgacagaccacctaaattctatggacctcccttacacatgaataagaagagcttattatctatccctacaatgacagataccaatccaaccacctgttcatggagaatgttcagttcataagtggatcttcatcatctcacaaactgacctttgaggaccaagacaattaacatcattccagccccatcttttgggtgatttacgaaaatttagcacaacgcagcgctcattgggatcactgggctcacgtggatgccagaatgtggaactttcattgtatggtgtctgatcaacccattgccaatgtcgctgaccttctggatctgagagccccacaaaataagcagattcttcttgcagattctggaagatgaaatcctgctcttcttgagtgtttatcaccagcaggtgagcctccattctagcacagtccttctcactgtcttgccaagatgctgattcagtagaaataaagtagcagttggaactaaatgacttccaattctttgggcaacagctccaggctgtcttgacaaaagcaataaagaatgagattgccaatagcaggaaaaatatcaacagtgaggcacaaagcagcttggggaatccggtattacttttgtgaggggcagtcctctccttggaagctgcagaagaggctgtgttgatgcctgaggacttgaattcatttttgaacctcacttcagcataagtgatttccgaagtcataatgggaagagagcttctgctttcttcagaaaatctgtttcaaatctttcttaaa

SEQ ID NO: 345323 - DNA, 1000 bp, Homo Sapiens
tttttttttttttttttaagattacatcacagcaagcaactgtttaattgggacaaagaagatacactaaaagccaaatgaattactgtaattaaatttgtacagtttattgacttttttttcctttttatttatttgagatggagttttgctcttgtcacccaggctggagggcaatggagcgatcttggctcactgcaacctccccctcccaggttcaagtgattctcctgccttagcctcccgagtagctgggattacaggcacccactaccacgcctgactaatttttgtgtttttagtggagacaggatttcaccatgttggccaggctggtctcgaactcctgacctcaggtgatccacccgccttggcctcctaaagtgctgggattacaggcgtgagccactatgcctggctattgacatttttttttttaagcaaagaggtggggcacatccactgcagtccaggcattctggcaccacctctgttattaactggaatcaaattttaaaaatttctgtgatcttgaaggtcttgttgaagttttagaggtcttttgtttttcttttagccactagatttttcaggaaaaattcaccttaaggtgacgccttgttggctgcatatattgtcctaaagtcaagcagtctacatctgcctcacgaagtgctttcattgttgcatatacttgctcatcattctcgcctaaacccaacattatagatgttttagaaataacatcaggctgaaccttcttggcatgtttcagtacacgtagggactgatcaaaattggcccgaggatcacgaaccttactctgtaattccgggactgtttctacattatgtgcatacacatctaatcctgacagagcaactttttctattgctttgagatcacctcgaaaatcaggagtaagacactccacaaggatttttggattcctttcctttaaatatgatacggtctttgcaatgtgttcagctcccccatc

SEQ ID NO: 345324 - DNA, 1000 bp, Homo Sapiens; identical to SEQ ID NO: 341096

SEQ ID NO: 345325 - DNA, 1000 bp, Homo Sapiens
tttttttttttttaaactaacaccagacacaaacttttattggaatattttatttacattttatatttaaagagaatcaatacaaattgggacatatttacagcatttcaaatcagtgtacaagaatgcaatggtttcatccattcagcaaacaaaaatacatgtctgttttatttttgcctaaattctgctataatttgaacaaaattctaaaacaaaagccacacagagtacaaataaagtgcatttttaaatagctctatttaactttggtggatgaagcttcaaactttatattaaggcacctggaattctcccccccttctttttcaaacaccaggaaaatgcattcacaaaatttatagttacacggacagaattttagtttatctaatgtaattttagcccatttaggtcaaacataaactcaattttcaaagtaacattgtttggaaaacattttcaacagactaattttacagaacattttttttctgtagactaattcatgaacgaagatcaatgaccaatattagtgttacttactctgtcattagcaatttcaaacagtatgatgattcatatactgagcttttgaaaaatcccacaagtttgagaaatagttacacagtatttttgtaaggaattttttgtctaatcttgtgtcaagttgatgtcactaatataccaatcaattaagtccataatctctgataaactatggttgacaaatcacatgaagtacattcagcctaattttaaaaataagaaaaagtaaaaatgaatattttgctttaatcttttctattaacttaaagcagcttaaatagacatttcaagaagtactcgcctaagtttgcattgctttttacattacaattccagatcaatataagcacctggagaaaaaccctgacacatgtagcccaagctaaagaagtagtatttttcattaagatactatcataaaataaagtgattacagctactccacatttta

SEQ ID NO: 345326 - DNA, 1000 bp, Homo Sapiens
ttttttttttttttttttttttttttttttttttttttttttttgcactcatagttacagtttattacagtgaaaggatacagattaaaatcagcaatgaagaaaggcacataaggtaaggtccaagagaacttccaattatcctctcctggcagagtcttcaggataatgcttaattctcccagcaatgatgtgtggctacaatgatgtgtgcacagagtattaccaaccagagtagctcacccatgcctaggtgtccagggcttttactagggattgatcacattggcatgcttcactgcccacatggctaacttagtctcctcagcttgaccttgcaaggtcaagctgatactgcatggcccaaggcccacaggtaaacaaaaacactcttatcaggcaagatattctaatggcttagaggttatctcccaggagccaggcaggggcctattctttatttggaatgtccagggttcaaacatcccaagttcatcctgtatcacacaaaaggattaacttcaaaagtggtattcttggccaggtgtggtggctcacacctgtaatcccagcaccttgggaggctgaggtgggaggactgcttgagaccaggaattcgacaccagcctgggcaacctagtgagatcccatctctatcgtaatttttctaaaaagtggtattcttaagtcaagttactaccctgattgatgacagggagagagaccaggaaaccactgtgttgtaatcccttaggaaaccttacacctttacttgctttattatcaggtaatttccaggatgtaagccatacagccagaaggcagggtacaaaggagaggaggcagagatggtacactcatacagaagcttctcctgattgtccactgaatagaaggcaagctttccctcctcaaggttcagccagatgcccaccaccccaggtctgtctgagccaaggacagtttccttgaccatgtgccatgcagagagctggctagt

SEQ ID NO: 345327 - DNA, 1000 bp, Homo Sapiens
ttttttttttttttttttttttatcattattataagctgaatttttattttactaaattatctatgtcaaaaaaattctgtgcctggcgtggaatttcactccatcaagtgttacaatgattttttcattttcattacaagcaggagaatgaatgtaggacaagtgttaggaaacatggcaataaattagaatataatttacaaaagcaaaaaaattaacagtgtaccacattattactgagtataaaataataagcaacaactaatcacaataatacaaaggtaatttcgttctgtgttactgaggatacctatgtgacattcattcaaacaaaaaagttcctaatgaaatggactatttggaaatcatatgtatctcacggggtttaatcattagggtacatttaccgttccttttttagtaggactttatcccagtggcagatactgctcccaggtgtagggtaccagtttccctggggttccctaagtagtctatgtagctcactacttttggaaggtctgccatggtggcccagcctccactgacaatgctattgttattatttaggaatagggcatcatgtagccatgggggtggctacagagtagcagcagtattgtgatgtgctatgaaatagaattgttttaacctactcaggtttcaattcaaggcttacttgaaactgtttcatcctgttacattctgtgcgtggctccctctagaaaggcactctgatgctgccccgggggatgcctgcattttgttctcagtgctggggcacatcccagaagtgacactgactgccctcctcttccagcatcagccaaggtgctgtgcagtgcctgggggatggccctcacaatggtagtttccaggtgaggtaaaaaatagcttttagtcggtaataagaaatctttttgaaataagaacatgagctgatatttatgttggagaaaatcagatctggattgcaaacctatgcctaaaatgccacag

SEQ ID NO: 345328 - DNA, 1000 bp, Homo Sapiens
tttttttttttttttttttgataagagtttttttttattgaaatgaaatccacataacataaaatcatccattttaaactgcataatttagtaaaattggtacaatttcttttcacatattaatcaacattagaggactgtaaatgcctccctagtaatacagaaatatccattggaaataaaaatagcaccagtgggaaagtatgaaaaaaataagacaaatcagcacatgaggaaatatagtttcattccaataataccattttacagtaattactgaaaaaaatggtaaaaattgtaaaacagtacatcacaaaactaataaaacatattccaaaatgttaatacttgttccaatgaggttggttacttttttatattcatcatcagattttatgtatttttatgtatttttgtatttaaaaagcagaaaactttcctatgagagcagtttccctacaattacatattatacaagattctaggctgggtgcagtggctcacgcctgtaatcccagcacttgggaggccgaggcaggcagatcacttgaggtcaggagttcgggactaccctgaccgacatggagaaaccctgtctctactaaaaaaatacaaaattagccgggtgtggtggtgcctgactgtaatcccagctacttgggaggctgaggcaggagaattgcttgaacccagggggcggaggttgcggtgagccgagatcgtgccgttgcactccagcctgggcaacaagagcgaaactctgtctcaaaaaaaaaaaaaaaaaaaagattctattagagatatggcagatgtactctctgagctatttaattgataaagaaaaagtaggagttcctgctttttactaagatgataatcataattatgatcatactgatgaaaataataaaattgctctgactgtggtgaagattttttcccatttcttcatttagctattcagaaatatatttcaccctcagttcataactgatatact

SEQ ID NO: 345329 - DNA, 815 bp, Homo Sapiens
ttttttttttttttacacagaaatctgtactggatgttatttaaaagatgaaatttcatggttcaaatgtatttttctcccataaaaatattttctcttccatttaaatatatacctaatctttgagaaatcttgcacaaatggcattttattaaagaaaatctaatttacaaagctttgtaaattttaagaaaaacattcatagatcataaacaaaaatttcaatatgcaatattcaaatttacaagaaaataagcacaaacttttagacagtgcagttattgctgcactcctttaattccttatccagagcccaaaaaatgtagacaaaccctaaaaatgtagcagaagcatttccgcacactggtgtccagaatctagtttgtgcagaaatgtttccactagatttatagagtactcttcagaagaaagaggcgagggctcgtcatttggtcaccctttggacattttgcaactcttcaatgggtttccattgttggttgattgttataagcttttgaggtacagtagggtccacagtttcccaaggttctggatttttttttcgatcaaggatcacatcggttttccaaagagaatacacagcgaaagatgaggctccacccgccgccacagtcatgaacaccaccaagggaatgagttccttccttttcatcaggagttggaaaaagctcatgatgacttcagcgaagaattgccaaatctggacgccgggcggtgcgcacggacgatggtaacgcccggaaccgaacgggccggcggcctccccaccttatatatagcgaccacaaccg

SEQ ID NO: 345330 - DNA, 1000 bp, Homo Sapiens
tttttttttttttttttgaaaaagtgatatgtctttaatttaaaattatgacccggaaataactagtcagtttaagtgatccagacttcctcttcatacccaaatggaacagacacaatattggctcagatttccaaccccagaaaaaaaccaaaccaagtcctcaggaagtccctgcagcgaccttgctggggccatcagaccgcacagagtggaggtgcccaagctgctaggctgctcttaatccagccacactgagaagagctttccttctaccagcaactccctcgctgggtccgatatcccccttcacctcccttttagctggcactgcacgaatgcctccacagagaggctgacagtacagcagtcacctcccagctgtcttcggtgcatcttcagggccaccttcctgtggtcacaatagaggagttgagcattctaaacgttcgtgcccaggagggcagcgtcttctctttttagctgaggtctggagccctgagttgtaaccattggtcatatgtggctgaggcaccgacagcaaatcgccaaacttgggaaacgatctggggagatgcaagggccttggtaattgatggtgagtctgaaaatgaaacagacaaatggcatctgggtaaaatccttacagacatctcagaagagaaagtgtaaagatggaacagggaacagcacctccttcagcactccaaggctctgcctgctcttccctgagcatagaatccaaagggtcccatttgtttttttggttttttctttgtttttttttttgagacagagtctcgctctgtcgccaggctggagtgcagcggtgcaatctcggctcactgcaatctccgcctcctgggttcaagcgattctcctgcctcagcctcccgggtagctgggactacaggcgtgtgccaccacgcccagctaatttttgtgtttttagtagagacggggtttcatcatgttggccaggatggtcttgatctcttga

SEQ ID NO: 345331 - DNA, 452 bp, Homo Sapiens
gccaccatttccttaagaaactttttctgattagccatggcagaaaacagttggaaaaggcaagtgttcataaggaaagacaggtgggagggttaacttcatctttgttcccttctctccttggagtgatgggactgagtcccgcaaactgtgaaagctgtctttgatgtggtccctacgttttcgttccagtgcattatgatgagcccgtttgtcagccgcagattgaaacctcggttgctcttcgtcgctctccacctcgatgtcatcgttatcgctcatttcctacggcccagggagcggccactgcagcggcggcggggaggggaaggggtgaaggggagggggaagtcaccgacaacaacaagccgagtcccccccacacacacactcactcactcactcactcgctctctcactcacacacacacacaacacgggcaagaaccacc

SEQ ID NO: 345332 - DNA, 1000 bp, Homo Sapiens; identical to SEQ ID NO: 161137

SEQ ID NO: 345333 - DNA, 735 bp, Homo Sapiens
tttttttttttttttttttttttttttttttttttttttttgaggtttccaccgcaatttattgttcattatttttacatcttcttcgtgaagacaatgcatgtatttaaaacatcctcaaacatttaaaagacattatcgggcattaccactttaaataactgacactgtactagcaaacttattagtataaacatcactgaaattctttcctcttacttttttttaaataacactgatgaactagtgggagcaattttccttctttgtgaagcctatgagtgtcagttgcacctccaataaaagtaccattgacaaatattcttggaacagttctttcaccagtcattttgtaaagagcatcttggaactggtttccatattcaagcaggtccagttccaccactttatagttaacattcatgtcatggaaaagcttttttgccattgtacagtaagaacaggatgtttttgagaaaatcaccacacaattatcagaaattgtttcttggatctggttcacaggcgccgtcgctaaattctccaaagatgatgatgtattgctctccatcccagaggccgcagctgccgcagctcccgcagctcccgccgccctgtcaagccagcctgccgagccgctcctgctccaaaccagccgcgtccccgccagcgccgcgcggcgccaaatcatggtcagagcccggatctgcagcgagctctactgccggacaccgc

SEQ ID NO: 345334 - DNA, 1000 bp, Homo Sapiens
ttttttttttttttttgtagtgttaggaagatttatttccaaacagtggcctccacactgcgcggcagcacttctttttagtatttgtaagcttttgcccactttcaattgagccagccctagcgtggtatgtattgcatgctgaacaatatagagtttgtttttcctttctgatgattttaaactcttaaagaacaggaaagcatctggtaagaagaaatcatgagtccgtcagtgcccttactcatatgcgtctccagtggcctcatgttgtggtcacaggagtttcctgttcacagcaatgtgtgtgatatggacccagcatccactgtcgtgcttttaaactgattcctgggacatagcttaccactggaacagcagaccagtgttgcactgtttctaaagctaagcttttccttatttattttggtactacctaagtgacttggttttgactgtccctaagagagggaaccactttgctgaatttttaaaaagtccaactgctctttcatcttttatgcttagaaacctgttctctccagatgcacttctgaggcatggatgagctgagcgtatggctagaaattggaagtttacagctattaccagggggctaactcccggggcatcgcagtagcttctggcacccgtggcttcatgtctttagcaaagtcttgatgtcatggaaagagaaaaagtgtatgcagttagttacctgattttgtaaacaaacagtggctgacctgggcccttaaatcaccttcacaccttttagaaccacaagtggttctttttgactccaacaaaggaaacgaagttgaaaaagtcaagcccctgtgtactggggccggacttcccatcatttgagtgcagcactttagttcagaatctctgtgccatgtggttttttaaacaggaagattgttggttccttagtattaagatagatagtccctattttgagtggaatttttcatttgtaaggggtatgttcctt

SEQ ID NO: 345335 - DNA, 1000 bp, Homo Sapiens; identical to SEQ ID NO: 161138

SEQ ID NO: 345336 - DNA, 1000 bp, Homo Sapiens
tttttttttttttttttttttttttttttttttttttttatccaataatacataattaatttttattaacagtccaggatttgtttagcatcttgtttaacatttgaaaatcaaaacataaactttttggttctcaaggatagtgctattaaaagaaaatcttgaacatcagtggttagtaattttttacttacagaacaaaaacttctgaaatttcattgtgggacttaatctatttacattcctaaaactgagaataattaatgtatttgagatccttgtatgctagtatacattcataaggttctactgttctcatgaagccatttgactggcaaacatattcattacagtttcaaaagaaaacaccctatttgactcaccagaaaaacctttgtgatctatatcctactatttctgctgctgctgctgagcatggaatacatgtggggttgaaacaggggaggaaagagatagatttattagggtaataccaacttttatggctccccctgccccctccacctaaaattaggaggtcagtgaaagaactgcaaatgaatgtaaagaggaatatttcctgtactactgtagaaattttagagattaaaaacccctatgatttgttctgtaccttttgaacaatgaatgacacccctcccatctattttccaattttatagtaaaaatcggatttagaatcagaatctaaaattttcctttggtgtaaaaaatagttttgcattttatgaaaacaattgtccttttaaaaattaatcacatatataattgaatatattggttgcatatcagaagaaaaggtttaaggattaaagcattcaaagaacagtaatttggtggaatttcagtcagtgttatgggatcatgtcagagatgaacccttttatcaaaattccaaaggtggatccatattttataaaatttgataccaaataaattatgttataggaagatttcaatattgtctcaaacactggag

SEQ ID NO: 345337 - DNA, 1000 bp, Homo Sapiens; identical to SEQ ID NO: 161139

SEQ ID NO: 345338 - DNA, 1000 bp, Homo Sapiens
ttttttttttttttttttttttttaagcatgtaataatgatttaatgtacattgtgcacaaatacaatatttaaaaaataaaaatagaaaatcaaaattcaaatacaaaagtaaactacattcatcactccaaaatatcttttaaggagaattgttaaaactgaccaaaagagtcaactaaagcctgaataaaattttgatgctactgttacattaataattgaacagcatttacaagaaaactatatactccacaaaatgtatgtgttcagtcttagtcacttatctgctcttaagacgtaaataaatgttcttaggggggaaaaccaattatccagtcctccccgcttccttatttgtctgttcccaccactatcctctccccgacctatacatacatacacacacacacacacacacacacacacacattctagcatgatattgtctatgtggtagagccttaaaaaatgttatttctttcagatatggtctacaaatagaaaaaataatattaatgagcattgtcaaaagttttacaatattttgagaaaatcacgcataaactattaagctgtatgttccattggaccacaactttatggttgagcattgttaaaacaaaacataactatagacatcattttctggatgactctcattcagaattgctggtattcctggctcttctttgggtttttctttcatttcttgaggaaaagtataagcatctttagcatcttcctggtgtgctttaggatcctggccttggggcccacctgtttcttggtgtggttctggaaagcattctttaggcacatccttatttttatatgtctcagtagagaggtcttcaggccccggtgtttcttggtatatttcaggtgaatattcttcaagctgggatgtttcttggtatatttcaggtgaatattcttcaagcccaggtatttcttgatacgtttcaggtgaatatttttcagacccaggagtttcttgg

SEQ ID NO: 345339 - DNA, 1000 bp, Homo Sapiens
ttttttttttttatctttaaaaatcgaatacctttatttgtgctcccttaagcagcatgtgagaagtggcagtgacctcagcagcaggcctggtatctttgccctgttgagaagccaagatctcagctgtactagtcaggtgttttttcagacagcaagtagaagaggtggtggccaactccagtgctgtatcctggaggaggtccgggtcagcactgggcaaggtaggtagctagctgcctgacccctagtctggggttggaacttctgtttgcctgagtaaagggatgtcagtcctaagatttctccacattgtgtctttcttctgcagtggtaaaaaggctggtccttgaattgtcctgcatggtaccctaaggcaggcccactggctctttttgatcaaggattctgagaaaagctgcccttggaggcccttgaaataacatagggagcagaatgagtgctcgagtcgtggctgacacagtccagctcacactgccatcacagaggctgagtgagcagtcacccagggagggggctcccagctcattccattcccatggggcaagtgactagaaggtaagagcacccgagtaagccagtgccttcctgtatccacacccaggaataccttccagttgtccaagcagccgtagttgtaaggattcctaaatactctgcccttggcctgtagccgacgtctctccttcttgttgatgtgcctttcgatgctagtctcacctcgactgatgagaacagcatgccatacagttagggcacccagggcaagtgccacagaactgcacaggaaccagaggtagacaagactcttgtgagtcatcctttctcgaaaggagaaggtgggtggtggggtctggtgataagtctggttggcaaccgcctgtagtttgttcttgtcgagctgtttcattttctcaatggcagcataagcctcccggaaaaggtcccaacttccatagctgcagtagacacagcccag

SEQ ID NO: 345340 - DNA, 1000 bp, Homo Sapiens; identical to SEQ ID NO: 161141

SEQ ID NO: 345341 - DNA, 1000 bp, Homo Sapiens; identical to SEQ ID NO: 161143

SEQ ID NO: 345342 - DNA, 1000 bp, Homo Sapiens
ttttttttttttttttttttttttcatgtaagccatttattggtttgttttaaaaatatgtattttatttatacatgaagtttggtgagaagtgctcgattagttcagacaacatctggcacttgatgtctgtccttccctcctgctggtcattgtgcagttctggaaattaaaaaggtgacagccaggctaaaagctaagggttgggtctagctcacctcccacccccaaccacaccgtctgcagccagccccaggcacctgtctcaaagctcccgggctgtccacacacacaaaaaccacagtctccttccggccagctgggctggcagcccgacctgcctcccaaccgcattcctgcctgtgtagcaggcggtgagcacccaggaggggcacatacctctccaagccttgagagcaaagcatggagatctacaaaaataggatttccacttggagaaatgtcgctgggacagttaaaccgtgtcccacactggactcaaagggaacacaggagaagagaactagatctgtcaggggcatgggttgggtctggggttgccaccaagggaactggggtgacaagaagaaacataatactttactcgccggcaatgcccccttcagcactgccacaaatgtccagccctccgacagctcggcgaggtaggttaggagcagccagcccagagccggcaggtgagactgaggtggcctgggaggcatgcgcccggtggaggggctccatgggagagctggaatggggcagccaagcccctgcctgctcaggcttcgccagttgaccctgttacctcagggtgacagttctctatgttaaaagatttgcatatgctaaataggattgtcagcagctgaagaggtcctgggggtgattggactagtaaaatatttttccctgaaaaagccttttcacaagacctatgggaccacctggatcttgccccaaagaggtcctctgtgtgggtgccatcaggatcccg

SEQ ID NO: 345343 - DNA, 1000 bp, Homo Sapiens; identical to SEQ ID NO: 161144

SEQ ID NO: 345344 - DNA, 1000 bp, Homo Sapiens
tttttttttttttttccatctgctttcagagttattattttaataaaggaagatctgggatgggctggtgggccattccagcttgccgaaatcaaagccatctgaagcctgtctctggtgaacaaacttcctctctggcctctcaggaatcagggtggacatggctcacaacagcagggccttcttctttttgacgtgcagaatctcagtggcatctgggttcacctccccactctgatgatctccagcctccactgcttctgccccccggtaagctccctggagacccaggccccttgcgttggccagttccgcagcccgccgagccatttccactttgtaggagccaggaggggtccagccaacacctctggtcaggttcaagtctgatttatacttgacatcactctgcagctggtgggccttctgagcatgcctgaggcccagctgctccgggtcgcaggtgggctggggcaggggctgcctgtagtgcacatcactggccagctgctggctcctcttggcctgaaggaggccgggctggtctgtgctgctgtgaaactgggaccgactcttggcaaagtccttcttgtactcattgtcactctggagcctgccaacgttgaggaaatgcttcatccttgggtcatcgtcgacactgcggtacccgatctgcaggcctcggtcccgcaggaaagcctctttgtaccggaaatcactggcgatctccctagatgcccgggcagtctggaaggggatggcatccagcctgaagtcataactgccagcccgggtctgctcccaggagtttctgtagactttgtcactcagatgcagcgcattgaggcgagctcgggtgaaatcgggatggtcggggatcagggtgtatctgtgcagggattctgcatctccagatctatacatgcgctcattgcagtgcatatagctgttcttggcatgaaccaggtctggggagtcaaccactgtggtgaacttgata

SEQ ID NO: 345345 - DNA, 1000 bp, Homo Sapiens
tgtttttttttttttttttttagaatttatttttattctttcagacctctcagggatgaacggacataggcttctaacacttaggtgtgggcaacattcttcgaagcacctccctcaaagtggaaaaggcctgggggctcagacgagagaagagagaaggcagggagaaggtggaggtgaggaagggaggagggggcccagggctcagtggggtgttggggagggtgggattccaccggggtttgcccatccacagctcagtggggggatctatggagtgtgtctagcaagagaggacccatggcaggcttggtaactaacatcatgcagtagcttcttctattctctcttatttttttggaaacggagtctcgctcttgttgcccaggctggagtacagtggcacaatctcagctcactgcaacctctgcctcccaggttcaagtaattctcctgcctcagcctcctgagtagctgggatcacaggtgggcaccaccactgtgcccgtctgatttttgtatttttcatagagatggggtttcaccacgttgggcaggctggtctcaaactcctgtcctcaggtgttctgctcaccttgacctcccaaaagtgctgggattaggggcatgagccacagtgcctggcctattattctctttttatttttatttttctcatatttttcccttatattttgttttctttgctttttaaaaatcttttttactcctcactgacttgaagctcaaaactttcctatttagcttctaatcacacactctctcttttttttttttttttttgagaaggggtctcactgtgttgccctggctggtcggtctcaaacctctggcctcaagccatcctcccatctcatccttcccaatagctgggattacaagtatgggccatcatgcctgagtaaattcttaataaatgctttctgaatggatggacggaagtatgaatgaatggcgaagtgaatgaaggaatcaactt

SEQ ID NO: 345346 - DNA, 1000 bp, Homo Sapiens
ttttttttttttttttttcaaattccagctcaagtttatttttaaggattagttgagcaagtttggagttggaagtgagagaatcgtgtttaaaggaaagggtaggtcatccacagaacagctttcagtcattacaaaaaaaaaatacttcttgcttttatattaccatcttcccccattaggcctacctgcatactgtgcttcatcaaatctaagatcacctcacaactataccattattttaggcaccactaaaagacagtgtattgctaacaaaactatgataaaccattgataatatatccagatttcagagatgttacagtgcatcttagttgatgaaacaaaaatatacaaaacatgagacacagtaaaaatgataagtaccacctcattataccttttcacaagcaaatagtggccaaagatgtgaacggccagacacggtagccgacatatgtaatcccagatactctggaggctgaggcagaggatcacttgagctcaggagtttgagaccggcttgggcaatatagtaagaccccacagaaaaatgtaaagccaggtgtgatggcacacacctgtagttccagctactggggaggctgaggcaggagggatggcttgaacccaggaactggaggatgcagtgagctatgatcacaccactggactccagcctgggtgatggagtgggacagtgtctctttaaaaaatgtgggccaggtgcagtggctcgcacctgtcatccaagcactttgggaggctgaggtgggaggatcacttgagcctaggagttaagagaccagcctgggcaacatagactccacacaaaaaatttttttaattagctgggtgtggtggcatgcacctatagtcccagccacatgggaggctgaggtggaaggatcatttgagcccaggagattgaagcggcagtgtgtggtgattgtgctcctgcgctctagcctgggcaacagcgagaccttgtctcaacaac

SEQ ID NO: 345347 - DNA, 1000 bp, Homo Sapiens
ttttttttttttttttatttgtccgctgcatcatttattgaaccaacgtggcctacaaagtaaaccgcatttctgtacacctgagagctggaaatgttggtttgggttccggggcgtcctgcgccaagaggagggaacgggccgccctatcgcagtgcgggaaccctacagatcccccggagacgggaggcctggaccgcacccccggcggcctcaggcgagcagctgggaccttgggccactgcggcctaggaggtggctcttaccctggggccggcaagggagtggtggactcgcagctccagcccctgcccctcggccatgcccaattctagcaggagaggcctctcacaggcctgctcgggtgaccaccccccacccccgtgcccgcgggaaagcctggccctaaggaagggctggggagccggaccctccctccccaggccaaacccagttgggggcctaaactgggttccagcctctgctgcctccctggctggtcccagtcccccactcccctccaccaagagggtcctccccagggccaggcactccttccaccccccaacacacccgccctggtattctgtgctctgtgaccacatatgtgggcaagtcgtggccccagcacagggaagcctggcagtgggggctatattaagtggggacggggctggggtgagagagttcagctgccctgggaggtctagctgctgcatctggtgctggctttgggccaggacatccctgggctcgagggctcaggcgtgaggccacctccagggctctcaggacaggcactgcagccaccccatcacccaggccaggcccccagctgcccaggactcggagccgacgccccctggactgcaggtctgtcgaccaccgcggggagctgctgccagaatctcgtggccttgggtgcttgggaggtgaagggaccaggtgctggctcgaggtcccggagggctctgaggccaggcttggggggctggaggga

SEQ ID NO: 345348 - DNA, 1000 bp, Homo Sapiens
ttttttttttttttttttacatttacatagcatttattttgtattagacattataagtaatctagagatgatttaaagtatatgggagaatgtatgtagattatatggaaatatgagggtattttatttaaagggacttgggcctgtggataccaaggaataactaaggtaaaactgagcataagtggcctgtccatattttgttaaatatcagattattgattagtgatcatcaacattttcccgcattcatgcagtgcggcctctgaaaacatggttgaacatcctatggaatttttttttttttttgagatggagtctcactctgtcacctaggctagagtgcaatggcgcgatcttggcttactgcaacctccgcctgccccacctcgggttcaagtgattctcctgcctcagcctcctgagtacctgggactacaggcatgcaccaccacgcccggctaatttttgtatttttagacgagacagggtttcaccctgttggccaggctggtctcaaactcctaacctcaggtgatccaactgcctcggcctcccaaagtgctgggattacaggtatgagccaccgtgcccagcagaattttttaactatttggttacgactaatttggataatgtagtgcatgcagctttgatttgtgccactaagagtgggcaaactgtcttcctttttgtgaatcagtaaaaattttccctcaacatgtgtttgacagttgtcattcactgctaagttaaggcatttggtaaaccacacagcctctgcatccttcctagcgacagccacaagaaaaggtgggcatgggagggaaaatgctcttgtgaattgaactggaggcaagctccacttttctttagaaaaagatgtagatcaaaataactaatattttcttccttgctcgatttctgtgccttccatggtacatcaaaataataggaccagtaatggccacaatcctgttgactgctgttaccttcgccc

SEQ ID NO: 345349 - DNA, 1000 bp, Homo Sapiens
gttgttttttttttaattccttgacccgctcttagatgatggtgatgtttagctccctgttctcggcagcccgaaaagaatggcatgcagcctctcctgctcctcctgccgcctctcctgtaccaacagcttctccacccaagcctgggtgctcctggggagtccaccctgcttgtccgcacatccaagctccttgtgggactggggctccagctactggtctggctgctgctgcagactcggagcctcttggctcttcagctccacccgacttctccagctcctttacttgctgctccaactgcagtgtgctcttgttctcgttgttcagctcctcgaagccgctgcgtggctcggcccgctgcttgtacagggcttcccaccccagctccagcatcctctccagctcccgcagcctctccagctcccgcagagtctcctgctgccacagcctctcatcctgttaccgaagcctctcctgctccaggagctcctccacctcgtccaggagctcctccacctcgtccagcagcctctccctctccagcagcctctcctgctcctcctgccgcctctcctgttctaacagcttctccacctcttccagcagcctctccctctccagcagcctctcctgctcctcctgccgcctctcctgttctaacagcttctccacctcttccagcagcctctccctctccagcagcctctcctgctcctcctgccgcctctcctgttctaacagcttctccacctcttccagcagcctctcctgccctggcagcttctcctgttcacacagcctctcctcctgttcacgtagcctctcctcctgttcacacagcctctcctcctgttcacgtagcctctcctcctgttcacacagcctctcctcctgttcacgtagcctctcctcctgttcacacagcctctcctcctgttcacgtagcctctcctcctgttcacacagcctctcctcctgttcacacagcctctcctc

SEQ ID NO: 345350 - DNA, 1000 bp, Homo Sapiens; identical to SEQ ID NO: 161146

SEQ ID NO: 345351 - DNA, 1000 bp, Homo Sapiens
ttttttttttttttttttctttgtagatggtgtcattttaccaaaagttaacagaactaaaccaacaaactattgaaaattaacaacagtgagatgactatacaaatatataattaaaaataactttcccatgtaaaagcaataatcaactataaaaatataatggaaaaaactacaataacaaaattgtgtaaaacaagtgaagaaaattagaaaaattttcacaggaatataatactctaataaatagaaaggcatgtttctggatgggaaacatacactataatttttcccaaatagcttataggatttctttattccaatcaaaacaccaatgtataacttttggaaacctaaagcaagcaaaactgaagaatccctaaatcgcaccacacgatcagtccgtaaaggcaccgctggccttgcttctaggcagaggacaggaaggtatggatatcaagaggctgaagacaattaatacccactacaatgaagacacctggaaacctgtctcttgagaggcaatgtgagctaaccactggagacgtaatttctaatcatacaacactttgccttgtgaggtagtgaccaccccattgccaaaggtctgatgacagcatagaggggacctaagcatatggtaaggttattgatgagacatggatccaagccaactttttcctgcctccaggttgacccttcctctctgggtcttggggtttccttcgtagcacatgagatctgggctcaacagagggacaagattctgaagagcttttctagtggtggggctggatggccctgcctgagtaatccaaacttcttttagcaagggagaagcatgagacggctgctggagagatcaacagcagaacaaaatacaataagaacagtagacacctaaattatgttgtgaaaaggaatctgtaaaagtcagttttatcacaaattgtaaatattattgaaattgattgcaaatttagatcacatacaaatgaga

SEQ ID NO: 345352 - DNA, 1000 bp, Homo Sapiens
ttttttttttttttttttttaaaaaacttttaacaatttattagtcttattttccagtaaaatattcaaataatgtcaaaagaatgaaatgatagcgatatagccaactacctttaattaattccacataaatatttaaaatctaaaaacctcagatcagcagaccgagtcgaaatctgattcttcaaagcaagtattgctttacccttgtcctgaatgcagtccgtcatatgaccactaacttgcatgtgaccaaatgtttgcagagtgttttttagatatgctctcggtgagccgtcatccgtcaatccaagaagaagatgttgttgaactgcgttgcacaaagtttcttgacctcttcatttacttcaatcaggtttgcatttttttgattcaaaataacatagagctcccgccgatcagacttctttccaacaacccagtaatcactcatggccttcacaatgatctcctcatcttcatccactctggtaaagtcactgttgatgtcaccgagaatcttcattaaatccgggtgcacggaagtgagcgacacgctgggcgttttcctcatgtgaactgtgctcttctcggcgagattcatgtggttgaagtagataaacttaaactggggttctttctcagacccagacatcctcttgttgatgttaaactgttcacagatgtcagaggccagcactgtgagctggggcccaacgatgctgtccagtcttcggcaaaaatccaacgttgggtggacagaggcgtcgatcataaagcacacagccgcactcatggccttataaacgattaaatggagctcttcataagtgtcatctgtatttacaaaaattttggggaatctgcattttgcatctggatcattgaggttcaagggtccggtaagaaatcttccatagtgttgaagatttcctggcatttctgctcttattggagaatcccttcctgctaactcaggttcgatgtgccttgggaaaag

SEQ ID NO: 345353 - DNA, 1000 bp, Homo Sapiens
ttttttttttgaccttacaagtcattttcctttattttcttaacatataatgaaattccaactccaaagagacatatatgcagagcagacagatgcagggccttggtgtgcagcagcctagaaccaggcagggggtgggtgtgacccctctcccctccatcacaactctccccactcctggcccctggccattgcccaggcagaaactgagaagctggaaatgagaggaatcagcctcgtggtccagggagtagccagagacagggccttggttactaggcctggccaaatcattgtctagctgaaaccgtgggcctcagtttctttatctgttaaatgagctagaagttcctgctagggaatggagaagagagtgtgcagatgtgatgcactggtgatagttaagggccttctggttgtccctctgcttctaaatacctgcgtaattgtgtctcttggtttctgttgccatcatggctaagtgcacagtggtggagctgctctggccctggtggaattgaaaggacttatgtagatagaatccagccttcaaagctgatcctgatctctgaactgtccttgggctgcaactatagctacctcattaggtcaaggctgacctctcccctccaggtcaatgcagagggaaggctgtggccaggggtcatacagcaagcctgtgcaggttattcagctgctcaaatgcctctgatcaggagctcatgagcaagggaagagcttgctccatcctggtcaggaccagctgagggcttggaaaacccccaggcccagcaagggcatctgcctccatgggctgacctgcatcagggtctttctgtcctcaggctttgggcttcagacagctcaagtgctctttgataaacatacaccagcataatggtgacctgtgtctacactgacaagagggagtagagaactgaagaatgagcaagataatgcagtgatagatggaaagaccaactaaaactcagagaagtaa

SEQ ID NO: 345354 - DNA, 1000 bp, Homo Sapiens
ttttttttttttttttttttttttttttacaaaagcaattatccatttttattttgtttacattgcactgaaaatttacatcatacttttacaaagtttcttttcataaaaatatacttctttacaaaagtgtatgcattaatataagaggagtagccagttgcagaagaaacattgtttaaacaagatcttaaatgtattagccttaacattaatgaatgaatcattgttattgcagtcatttgaataaacaagaataaataactgatggcataaaatttaaaactgcatcctgccagtagagtaccatgttgagaaaattgtatgaatttccaaaacaatgtatctcaaagtggtttacaagaaattcattaaatgttgtagagatagagccaagcagcgctcccaggtgcaagggtttctcttaggcactctgtctcatgatacaaaaagtcaagactgttcacagagttatccatatttgaaagggacaacaacaaagagttaacactgggtacatgatcgtattcaatgaagtaaaacagctataaaaggaagacgatgacctattaaataaaaatgctggcattactgtatgatacagtttaaatgagccaccaataacttacaaatacatatcttaatttgacaatgaaagaaacctcttgtatgtgaaacttggtgtttaacaataaaggtacagaaatttaaaaatatataaaaatatgataagtccacaattgtaggcaataaatttatattggtgatttataataataatttttttcagtcattatgtttagtggctagaccaaaatatttttctaatccattgttaaatgaaaattaaaagtgtcaaaataatgctaaatttgaagactcagctggaaggaaatgtagatataaatagagtagattattaggacattttatttggtcgatcaaaaatattgtaaaataaaggatggtaagtttggtgtctcagataactgcaaaataa

SEQ ID NO: 345355 - DNA, 1000 bp, Homo Sapiens; identical to SEQ ID NO: 161147

SEQ ID NO: 345356 - DNA, 1000 bp, Homo Sapiens; identical to SEQ ID NO: 161148

SEQ ID NO: 345357 - DNA, 1000 bp, Homo Sapiens
tttttttttttttttttttttttttttttttttttttttttaccaaatcgaagcagctttattgcaccattaagtacatcactgcatcaaagacagtgccacaaatgcaaatccaatcggagaaggtagccctgagacatgtggtggctgcgagggagaaggacccccaacccttgaggagcagcgctggaagagaatcattccttaatatggctccaattccagaactgggctttatcatcacagaaggaatggccttgggctaaggctccaacataggtggagtcaagggcagttccccataggctgtggttcccctgctcctgtctcacagcctaagacagcttccagcaaaaggcagttcatccctttcaccttccatccaacctagcccacccttaataatgccggcagatgagaaattccattttaacagcgccaaagtttcctctcttggttctgctcagcacccatccctcacgtccatgagttgttcaaagggtgaacagcagtcagctctaccccagaccctgggctacagagaaatacggacctggaaataccaagtcagaggcagggaaaaggtaagggcaggctcataaaccacagaagggagaaacaaaagacccacatgatgggtcacagcagaggtaggcttaaaagtaacaatcctgttcaccctctcagaagccacttaaatagaagatccctgggggagaagatatcctgccccaggtccttacagagtgtagtattagggagagtgaagaactgattctatgccctgcctccaggcctgagagtgtcttggacagatcctagaaggccagacataaaggagtaaaaagcaggcactcagctggtttggagccaagcctacagcatcacatacctggcagcaaggaaaagagtcgggaaaaagaaacagaatctgttgcagaagtcccctcttctgcagggaggagttatgtaacagcagaagtggcctcctagcaagaga

SEQ ID NO: 345358 - DNA, 1000 bp, Homo Sapiens; identical to SEQ ID NO: 161149

SEQ ID NO: 345359 - DNA, 1000 bp, Homo Sapiens
tttttttttttttttcctgttgccaaaaaaattttaattgcctaatccaaaccagaatatttagatcaacctgtatactatatattatctctgatatactatatctctagtcctcagcattattcttcataaaaccaaatacccacttatttgctgagtggccagatctaagaggaagcttttctgcctttacagggatggccttttgaataattgagcagacgaagcattggaatatgaaatatttgtaaatcactggtcagctctagtcaacctcttggtgcttttgtttcctctggtcccagatgtgtctcctggctctggaaagggagaggccagtagtaggatcagaaaagggagcaaccaaccagaaaacacctaagttatgaggtttgtgcttttcctgacttagagaaagtccatatctcaggagataaacagttctggctgcagctctctggagtaatcccctgaaatggtgccagagggagcatgtagggtagccaagattctgactccttgaaccatggtctagcaaagccctcagatcctgcatgagagcgcttcctatttgtaaaatacccttgggatctctccagtgaggcttgggggccagatcagccccattcctagctgagacttgcagagctcctctgagagattggaacttcgcattccttgagatggacattcacattctctacctgctcagccctcagcgagccagccccactgcctctgccgcccttctcacacacacaagcctgctgccgcagttgccagagcattcggtcaaagcagggcgccacaaccacagagcaaatgagggaagtggggccgagacacaaacatcctgtcctcatgacatcaaatggctccagcttgagaatcggggtcactgcccagtgacatacacaaacgtctcatccctctagccactgccagtaagagggcattttctcctgagtccatggattgaaaaagtgctatcctttggctt

SEQ ID NO: 345360 - DNA, 1000 bp, Homo Sapiens; identical to SEQ ID NO: 161150

SEQ ID NO: 345361 - DNA, 1000 bp, Homo Sapiens
tttttttttttttttttttttttttttttttttttttttttttttttttttttttttttttttttttttttttttttttttttttttttttttttcaccatcaaatgctcacatacaactattttatgatacatattattacaatattttatattctctattatttaaaggaacataactgttacagtatttgcttcaatccttttgatacttccactaaattgttagaaattgtacaaaggcctaaataataaccatttttgaaaatatgtgattttataatcattggcattttatcttaaaatacactacattcttacaaaataatgaaaaattggtaattattattattttatttttatttttttgcgacacagtctcactctgttgccaggctggagtacagtggcgcaatctcagctcactgcaactgctgcctcccgggttcaagcgatcctcctgcctcagcctctgagtagctgagactataggtgtgcaccaccgcgcccagctaatttttgtatttttagtagagacagggtttcaccatgttggccaggatggtctcaatctcttgaccttgtgatctgctttcctcagcctcccaaagtcctgggattacaggtgtgagccactgtgcccggccaaaacttggtaattattaaaactgtttcatttaaaatacataattatgatcttgtaatatatttatatgtatctctagaacactatttttaaactttttgttcaaactgctcttggattcatatgggttttaagccactgatcaattgcattttcatacttccttggttccttctgccagtcttggtgccacctaagatttgctataacgtttgaataattctgtcctatactttgtttccacttgataaactgctctttattatactggtggacagaagcagaaactttagggtagtttataatggaatgaagcttctgatccaaagaataagtaatttctggaaattttaca

SEQ ID NO: 345362 - DNA, 1000 bp, Homo Sapiens
ttttttttttttttaaaagcaaaaacagaataatttatttgaatccatctttccttgaaaaaaataaaaataagactttaatagtcatttccttaagtgttcacaagtcttctcaaaaatactactggtgattgaaaaaaaagagaaggcatagttttgtttttgtgacaaccatccttattactttgttgtacaaataacaagatagaaatttggaaataaaattgaaacataaatttagcattcttaacactaataaaaatttaataaaacaaagtctgctgaaaaatcgaacaatgtaaagtttccacatttgtaggtgagacaggatagtctcagtgttgatgatagtgaaagtgtagagtagaactaattgaggtttgtagagatatttcatacaaaacttatgaggaaacccctgtcactttcgttctccccgtcagcatgagaacgactctccactgaggaatatttccccaacatgtttttctgttgcacaagacattgtgtatatgctgaaaaacctgcagttcaatttgcataaatgcctctattctgcatgtaaaggaataatgagtaagaggtgttggtcctggtttcttcactgattccagattaatatacttttccactgtttttccttaaaatgtttcttcagaatttcactcgaatgtactgtttagcccatgaaagttcactctggatggtcttgctgctgggcagggatgtgctgaataacttcatacactgtactgtgcaaatcttgccccgatacacaatcagaggctggaacagacctgcttggaatcctggaaacaccagaaacatctggaaaagcaacaaattcatatattccgaagtcatccagagcatcttcatggcctgaaaatgtttgagctttcctgtattctgtttctggcctgccttctagtttctgttttataactttgtagggttgatattttttccataggaagagaagacacatggatataatcaa

SEQ ID NO: 345363 - DNA, 1000 bp, Homo Sapiens
agggaaagctgggtccaggggggtcaccaccttctggtcccatggtgccaacaatgcactggatataccagcatttattattaagtttagcaagggcaggggtaggttaatgagggatttagggtcatttgattatgaggtgagatggtcacatggggatgaagtaattctttaacataacatttgtatgtagaagtacagtacatttgtatgtagaagtacagtatacagagataagaatttacaatatactgtgtgtgtaatttctaacagagccttaaaacagaaacacaatctttccataacctatgattagcaagatattaatcagcagtaacaattgtaacaaaagctggttacaaacaatccatggaaacaggacatgaagctagacaaccgcttagaccagaaattctcagaaggaaatatgccttaaccctaaagaggcctagaagagccatggcaagatgaggacgtttacaaccctatcttatccatatggacaggcgccttccatgcatccgtttataggctctccacgaggggcgcattccattcccagagctatgaacatctgcttttctgggataggaatcttggtgatatgaaacctccctgactgcacgtccattcataggctctctacagggggaagcaagtgctgttggctcattctggcagtccaacctggcattgtctttacacaatcccgcatgcaattttgtatttacaataatcaggagcatttcatcttttattccacagcaatagtttcagggggtctgcctacagcagagtgagtagatacatatattttcctgatattcttatctttttttgcatccagagaaaaagctttaaacacagtatttccaaaagcaagctcgtttgctaggatgagaagagaatagaccatctacagcataggacgtctcagaatccttctcctccactagctgttcttttagcttttccagctggttaagttcttccagtttgt

SEQ ID NO: 345364 - DNA, 1000 bp, Homo Sapiens; identical to SEQ ID NO: 161152

SEQ ID NO: 345365 - DNA, 1000 bp, Homo Sapiens
agaaggaaaaaaaagcaatgcaacaatatgaagtaaccaactcaatgaatcctatgctgggaggaagcattttaatcagatggtcggggatggtaacactgtacagggagaactcacagctccaagagcttccctccaaattatgatgaagttcctgtaaataactagatttcctacagcctggtcctctgcccatgggaaggaggggaaatggatgtgaaaagcaatgtggtctgccctcctgtcattcatagatccagttctgagcacagctcgtgtaatctaccagttcctcagggtgaaaccacaagccgatctccttctctgcactctccacagaatcactgccatgtataatgttcctgccaacttgtatgcagaagtctccacggatggtcccaggcttggagtctgcagggttggtctccccgagcatgactcggcccgtcttcaccacattcagcccctcccagaccatggcaactaccggccctgagtgcatgtatttcaccaggccggcaaagaatggacggtccttcaggtcaacgtagtgttccttgagaagatcttcggaagcttgcatgaatttcagaccaacaaggcggaatcctttctgctcaaaacgcttgataatctctcccacaagaccccgctggaccccatctggtttgatcgcaatgaaggtacgctcacagttggccatggttcctgtatcacagcttgagataggaggcccctcgccttgaaagacgatccctaaagtagacagtagcaccatctcttggccccatcttcctgtcctttagttaacctcttcttacagcatcttagcactgtagtccaattttctgtttgtgtgtctgcctcccctgcacaccaggctgacttagtcctgtgtagagactctatggtacctagccacagggcccttccagctgcttaggtttgaactccggctgcagccgccagcacccgaaacgcgcccgggacccacgtggtt

SEQ ID NO: 345366 - DNA, 1000 bp, Homo Sapiens
ttttttttttacgaaatagacatataaaatttaattcctttggtttaaaatacatcttcaatgatacaattaaaaataacacgcaagacaaaatcaacttcataaaaaatacaaaagttatatgacccatatcccatatcttatcttagaaaaccagcaatttagttcccatacttcattagaatactttaacctaagactgtaactaccagtccatttacacgaatgacctagtctagttccctgaacctaaagatacccgtgactttgttataaaattacatattttagtatttttatatacttaaatgtgtacaaaatgttcccctgccatagtaacatatttttgtgaattcatgaatgttttctagaattgttaacatacaagataatcaaagcacgaaggctctgatgcgtgataaaataatcatttctcaaaacaggaagatgagaactgcatttcgagttgtatcacttggtacgcaatacttgcaatctgtgtgctgtaattacagtgtttcttcactctaagtgcatctgactgatactagcataacaaaagacgtgattgcagtagtgtttttcttttacttcatttgttaaacagtgcagaaatccaaataacaacattctcaacagcaaacagaatctctgtcatttgagaaggttttgctatgctacagaatgcctgtgtttggaaaaacagagaaaaaggtttttagcgggttccactaagcacagtattctatctgcttggtatacacgatcaaaaaataacttaacctttgtctagggaaagtctttaaggtagctcttactgcatatcttcactatatgtacacagacaccatatttatatattatatatttatataagacatgtatgtacacatttacagaccttcaaaaatatattgcacttatatacaatgcagctttatcttaactgatttcatactgtaacccattaaaattcttcatgagaaaggcagttgatatg

SEQ ID NO: 345367 - DNA, 1000 bp, Homo Sapiens
ttttttttttttttttttttttttgagagacaataggaatttttaatgcatggacaggcctgcagggactctgggcagacccacaggtagcaggaagaggcagggtcccacaaactcaataatgtccagcaaaaaagagagagaagtccttaaagacccatgcttcctcactgcaaccatcctcagagcttccttcctggtgctgaagaggtcaaaactgtctcctctaggggtcaggtcaaaactgtccctccataggtctcctccaggggtccatggcaggaagaaagcagagtgtggcaggaagaaggaagaagagcaaaggccgcttggtctccacctgaaaacttctgcctcgggattgacagccatccataagaaaaggtttaaaaaggagagacttttgatagagtcaaataatatctttgaaaaaataaaagatagagaaaaatgaataattccattggttacaaaggtctctgtccactatccacaggagaaaccgtttgctttggccttgctggcaagcttcatctgctaggcccatcctcagctgtcccccagcccacccaggccccaggatccaggagaatactgctccccctcccatggagagtctctgtgctcacggagggcaataccctccctcaccggcccttggactccccgtacgtgtttcgggccattgacaccatcttctcctcacacgtgattttggtgtccttgaggatgctataccacaccatgcctgcaggccggacctcctcgctgcggcagaaaagatagggcactgtttccacgcggctctggatgtaggcactccgcaggaggctggagcagtggctactcaccctctccagtcgccgtagaatcaggtgggccttcctgggccccagctcatcctcacttctccagacgaagtcgccaaacttttcatagtgagagttgtagtggtgctggactcggaacagcatcgaggctgagacctccatcagtgtgt

SEQ ID NO: 345368 - DNA, 1000 bp, Homo Sapiens; identical to SEQ ID NO: 338893

SEQ ID NO: 345369 - DNA, 1000 bp, Homo Sapiens; identical to SEQ ID NO: 246461

SEQ ID NO: 345370 - DNA, 1000 bp, Homo Sapiens; identical to SEQ ID NO: 161154

SEQ ID NO: 345371 - DNA, 1000 bp, Homo Sapiens; identical to SEQ ID NO: 161155

SEQ ID NO: 345372 - DNA, 1000 bp, Homo Sapiens
ttttttttttttttttgtctttgattcttttatttctgtttcatctacacccaaggcgaatctgatgggttctcccttccaaacagggtggggggtctgacgctcctctgcctggctacagccccggatgtgttaaatgtctgcatctcgcacctcccgttccaaaaaacgtcacggagctctgagccactgcttccctgaaaccatcgttcccacgtcaccgatggcccccaccggccaaatcagagggcctggctggtcggcaccttccagggccttccacaacctcctgccccggctcctgctcaaacactcctcacgttgcctatgagacactgcacacccgactctgcttgttacccagtttggcctccgttcatccctggcccagacaccccctgcctgccccaggcctggggcttcggacaccatctggctgtcacccagggctggtgaggctcgtgggctatctccttccccaggactcccacctgggctggactgagtctgagctcccagccccagctcctgtttggccgggcagtgggctcccctgtcaaactcagaggccaggatgtctcggcccagatggagcctgggttctctctgtggcccttggcgttccttcctccccagccccactgccaccagctccagtggcgacatgggtcagaggtcgtcatccaggctggccagcaactactcctcaccacccacagggccctggctcgccactcccgccacaccagccactaggcctggccctcagtgtccctaccgctgagaccctgcctgtcgccctgcctgcccctccccagcctctccctccccttcctcactgtcctgtccttcagggtactggccacatcgtccacgcctttattgcagtctctgttttggagtaggcttggggggcagcatccgcgtcggcctcatctgctgctgggtcttgggggcctgcccacgaacacgcttggacgggtgacactaaaggagggaa

SEQ ID NO: 345373 - DNA, 1000 bp, Homo Sapiens
ttttttttttttttttttttttttttttttttaggcttttagaaaatttattatgaattccgagaagtctgctcatcatatacctcccccagccccaaataaaacaaacaacatgtttgtacataaagcctggatttacttggtacaaaatttgagtctttgaaaaaaatagttaatggaaaatctcaataaaaattcattttgaaagtaaccagtactgttcagaaataaggaagtcatgttacttgagaagtcaaacagttttattacagaactatgtgtatatattttgggtttaaaacttgccaatagctgtttgaaaggatagctcataatttattcaaatagatattttattaatcaaatgtttttggtttatcaacataaccaaatgtataaaaaatgtttttaaatacaagacataactataaagtcatgaggctgattgaccttttaaactaacataataaaatctatatggtcaaaatgagtggtgatgctttaaggtaatgattatgcgtcccatctaaggatgctgcaatggcctagggcagttttgaaatgtctctttgcaactaccttcaaaaggatatgagcttcataatttaatcattcatttgatttggtccccaatattattccagttcaatcatcatttatattcaccagtcctggcgattttgaaaaatcttattaatcttatttgtcacttattagcgtattcaaaggaatgtcaattgaggttctgatggtaattctgaaatttaagcatttacacacttttaagatgtgtaaattttagtaactactcacattatagacttgtttttggtatatgtctatcattttgaaataatgagatttttcttttttctttttttctttttttctttttttttttgagacagactcttgctctgttgccaggcgggagtgcagtggcatgattttggctcactgcaacctctgcctcccaggttcaagcaattctcctgcctca

SEQ ID NO: 345374 - DNA, 1000 bp, Homo Sapiens
ttttttcccagtgaattatttttttattttgtagagacggggtctccctgtgatacccaggctggtcttgaactcctcggctcaagcgctcctcccacctcggcctcccaaagttctgggattacaggtgtgagctaccacgtctggcctgggataactcattgtaaaactggtgaagacctgggaccttcccagtagacaatgggacagagtgattgacaggatgagttctggagtacatggcagaaatgtacagagaagtctcccagagaaaactaactggctggaaacagagcctctcctttcttcttcgagaggatgagagtgtcactgtcttggatgccatagatccccagacccaaccagtcctgcaggacttggccttggaattccagctgctgctgctttttaggaagcccctgctggtcttcaatctgctgcttcagacccaggatgaagctgttggggttgatggcataggcgtagctcccaccatcaggattcttcacgaagacctggatctcggaggggatggtctccagcagatagatgtgagtgtgggagaagatcccatatttggctaaggagcacctgctgctgagaagctgcctctcactgccaggaacctggaaggacagacgctgcaggccagagtagcccctggtcctccggattttctctttaaccttccttatgggctcataagggttcacgatgaggttgaaatctgggtaacccctctgctccactgtcaagtggatgtctcgtgccctcttcacgttccagctggagatggggttctccctgttgtcatagcaacagtcctgtttcaggcactgggaggccctctgagcaacgatgtcccatctgtacccttctgccacgttgagggtggggtcggccggatccaggatgatgggcctgctggtaccagtgtttcaccaggcgcaggaggctcttcagcttagttggccgatgtttcacgaaatttctctgcagc

SEQ ID NO: 345375 - DNA, 1000 bp, Homo Sapiens; identical to SEQ ID NO: 338339

SEQ ID NO: 345376 - DNA, 1000 bp, Homo Sapiens
gtgatctaattttacttaacttttattgaatggttcaatgatgttgtataattagctcctccaaagtaacactagaaaagcatcctattacacaagtttataaaccttaagtgtgttctagactagaagtcatttgatgatagggagatgggtcaatcaagaaagcattatatacacagaatacaaataaaagtttattgtacaaaattaaggccttcgtatttcatagttcaccaaggctaaagaaacactggataatttaagtccttcacaaaaatttcacttttactcctcctcatctctaactattaaaatgacccagccaaatgttatcaaaacaaacactgtaaataacaccaagtcttttaaagacgactatcccaaatgttatttcttggcataggtgatcttcatagcatgggacggtgtgatcttaaatccctgtaaagcatccctggcagctccagcctgcccatcattttcaaattcaacaaaagcaatgtcatgcctccctggtaccagacgtacttccttgaagccagggaactgattaaacagcatggataacatcatctcattagtctcttctggtaagttattaaggaataaaatatagtttggagggtaatcagggacctgaggatttggtgttgaatttccttgggtattagctgaatttggagttccctggccaggctttttgtttgtggttgttgcagtctgttccacagttttggcttttttcttttcttttttcttttctttgtcagcaaaagttccacgcatttttgatattatatccgaatctgtttttgcatactgtattcgcattggtttaccataaaatggaaatccttgtagctgtctcaaggcatttgtggatgagcccagttccttaaatatgacaaaggcctgccccctcatcttcatggtctttaaagccacaatgtccaccacatgaccaaactgagaaaacagggcatatagggatctcttcaat

SEQ ID NO: 345377 - DNA, 1000 bp, Homo Sapiens
ttttttttttttttttttgggtcctcagaaatgctttattgggcagcaggaggccagggccagggagccccatggccagcatggcgaatgtccggggccagtgcctccagcgaggtcaccccctgccctcctggctgggctcctgagggtgtggtggccagggtggcccccctgaggcccacagaatccacctgggctgccccaccccgacatgtccacaggagagttggccaggccagggcagctcagacgaaggtggcgtggtgagcgctggtcttgggcttagcaggctcacccgggacggggcccaagccagggaggtctgatgtaggaggcccaccactggcctgcgacctcccagggccagcctgtgcccccgctatgccaccatcccgcccgggcgccgagccagttacaagatccacatcgatgattctgttgactgggaggtctcggctgccatgggtcccacttcctggtctggaaggtcctggcacttcctggggggtggagggcggcggcagcaaggtgctgttggggctgctgatgtccccctcccccatcagggtcagctcggccacgtgctcatcctccaccgtctggatgcccccggcctccacttcctgagactgcctcttccagatctgggcggtgccctcctgcgcgagggagacgggggactggggagtgcagaagggcccgctgggagacttctgcccggggggggtcgtcccaggaggtccaggggggctggaggctgagcccgggctggtggacgggctgtcgctgctctcctggactggctcccactgctcgccaggctgggaggcgctctcccggccgttgcctgtggcgcttctcttgctaaagcccttggccacagcagctggagtggggagggtgagttctgtggaaccaggaggtaaacggaggaactctggcaacaccaggtcttccttccttagcagcccacgttggtcatctgctctgttgctctgag

SEQ ID NO: 345378 - DNA, 1000 bp, Homo Sapiens; identical to SEQ ID NO: 345377

SEQ ID NO: 345379 - DNA, 1000 bp, Homo Sapiens; identical to SEQ ID NO: 161158

SEQ ID NO: 345380 - DNA, 1000 bp, Homo Sapiens
ttttttttttttttttttaaagaataaccatttattaaagtagatacagaacacttgtttggccaaattttaatactgctttacatgttttctgtttgtgaaacaattcgtattacatttataaccaaaaatttcaactggtaccagattgaatattcactgtcgaacacacagttgataatcttgaggggaaaatacatcaaaggcatatatacaattatagaagttcttattgtacatgtagcatggaagatacattttatgactttttacatattctagaagacattcaaatgaagataaatagattcaaactggtcgataaactgttcaggtgctttgaggtccttcattttcttttttgtgataagaaaatccagaattattaacgttgaatttctcatcgtacattcatctaaaaacagtaaaaaaacttgtgaagggagattgtagattggttatttaggtgttttatactggcttattgttaattgactgctggggatacctgccagagaaggaaaaaaaaattggagaaaattcctccagttatttaaatctggtgaagaaataaaaggaaaacaaacaaatgaaaatggttgcaaagccacaagatgctatgtctggcctagtctgttatgtcctaatgatcattttaagtgttttctttttcaaaaaggtaaatgtccaaaaagaaagacacattgtgtatgtttttttcccaaaatatagatttttaaaaaatatatacatacaatatatagaagctgaaattatgcaaaactaataaacaaaacaccacagtagattaagtgggtgcagcatatagattataaaatgtccccacagcagtttgggggcttgcccctccctttacctgcttcatgattttataatcacacctaagtattatcaagcctgaagtaaaggcactactgataacaggtagtgcaaagagctcagatatttctttgaataagaataaaatactttaaatgag

SEQ ID NO: 345381 - DNA, 1000 bp, Homo Sapiens; identical to SEQ ID NO: 161159

SEQ ID NO: 345382 - DNA, 1000 bp, Homo Sapiens; identical to SEQ ID NO: 161160

SEQ ID NO: 345383 - DNA, 1000 bp, Homo Sapiens
ttttttttttttttttttaattttttaaaaactttattttaacacctaatacaattgcaattttaaggattacttgcacaaaaaaataaacacatttggtataaaaatgtatcactttaacgccctttccccttcagtcccccgccccctccctcatgaactgcactctatctggatgcagaaacatagaaagactaatggcacaaattactttttacctacaggagtttctgtttatgtacccaggtactctagaggataccagcccacattatcacatgaaccatttccttcagcctgctgaattagtttcacaaagaaacaaagcttattataaaggcattttaaaaaccattatcttaaattctttttagaagcactgacttttttttttttttgcaaccatttatatacagtgttacataacagctctggagtacagtacatgcagcagaatatacctgttgaatataaaatactttccttaaaatcttcatcattggaattccttgaagtctaaatcatagaatgcccattactttgagaaaatggttgaggagtacaaatgtctgcatatgttggccactgaaataatccaaggctaactggaataatattcatagcacaccaggagtgcataaataatttacttacattattaaaatacaacccataaaattcaagttcaagatcttataggattgtctatgtaaatcctttaagtggttgcctggaaatgcattgtttcttctttctcttctcttctttttaaagtcctatataaaatcttcagctgaagtttatttcttcatcaaacaaaaggaccacctttatttgtgtctgctgcctcttctcttcattgcagcagtgcactgtggacagtaccatttgccttttggtgcctctgtcaatccaacgcagccataatggaaccattctatagggcaatcttggttatcacatcccaccatctcaccataagatacctgattacaaatgc

SEQ ID NO: 345384 - DNA, 1000 bp, Homo Sapiens
tcagaaaatttacccattttattgatgcattgcaattgctctacattttaccatattatgtagaaaatactgaaaatacaagctactttgtaaaaccaaagacaaacattgaatccaaagataaactatgttttacacaatggacccttttcccatagttagtattaaattttaaatatctatttcttttgttaaaatgattattttacatactccctaagtacatctgcattacaaacatagctcagtaattctcagaaactatctgtttctagaggcttgttgtaaaagaaagcgcacaaccaaaaaaagggagaaagcaaaaaaagtttaaatcgcacacaataactagcatatcaaatacatttaataaagtaggaattccattgcaatatcaaggattcaaagcagaaatactaacattacatataatgtacatataatgtactgctacatgtagtgagattatttttcaagctgaattgaaaccacacattatataaagtttagcaacaaacaaccatgtagacatgctgcaccatctatcagttaaaaaaaaaaaaaatcaaaataggaagcaggctcgggccactcctgtcactgagaggcaatttcatttcctatcctaaaacaaaccatctcaactagtgaatttttgcataataatgctgaacaaaacacacattactgtgcttgcctggctaagggcagtcaagcttagcccctctagtggaggacaatggatgagcaatcacaaaagcaggctcagaatggccagaactgtttgaaatggagttcttattcctggggttggtatttcagctgagcactgaaaataatatcacctcctgggagctattaaaaactctggagtgaccaagtgtccctatgagcccagagtggctacactgaacccttctccgcttcttctctcacccggaaaggaagaagttggaaatgccaagttctgagagaggacttaaagccttaagctggtttg

SEQ ID NO: 345385 - DNA, 1000 bp, Homo Sapiens; identical to SEQ ID NO: 345384

SEQ ID NO: 345386 - DNA, 1000 bp, Homo Sapiens
gtagaaatggggtttcaccatgttggtcaggctggtcttgaactcctgacctcatgtgattcacccacctcggccgcctacagtgctgggattacaggcatgagccaccgcaccggcctagaatttcaactactaatttacattaagcttttaattatgtttaaagtgcttttcctatcagagtttagcctcttagatgtagtatgtgctagacacttgaagttttgtttgttacagccctttcttagctatcctgctttgtatgcaaggatgttttctagaaatattgaagggtgagaaaacaaaactatcagccattgaaaactatatttaaatttggatacttttgtacatactaaattatcttaaaaaaatagaaacgccatatttctttcccatggcttgtctttccaaataatgtgttgtttttaagtctgtcacaattagacctattctcccctagcctgtttggtttgatacatgccacttatgataacataaaaggagaaagaaggcaggtgccaattatttactcaggtaaagaagagagaaaaggcaccaaaggtttttttttttttttttttttttttttttttttttttttgagatggagtatcactctgtcacccaggctggagtacagtgacgtgatcttgtctcactgcaacctctgcctccccagttcaagcaattctcctgcctcagcctcccgagtagctgggattacaggtgcctgccatcatgcccagctaatttttgtatttttaatagagacggggtttcaccatgttggccaggctggtctcgaactcctgacctctggagatcctccctccctggcctcccatagtgctgggattacaggcatgagccaccgcacctggcccaaagcttgattttctaatttctagggttcacactacttctattattacaaaaatctcaaattctatgcacctagtggctagaatgaataattaaggcctctaggaacttggaa

SEQ ID NO: 345387 - DNA, 1000 bp, Homo Sapiens
ttttttttttttttttttttgcttggaaacacaaagtatttaataggatttgctgactgctataacatagaaactcaaaatacagtttcatggttcttttgccttgaagtaagcaaattcattcatttgttcattcattcattcatttattcaacacacatttactgagcacctaccacattccaggatctgtgcaaggttctggggataggaagatgaatagaaggacacagctcctgccctccaggagctcacaatctgatggaggaggtgacgttcttgggtggtgttccaagaaagaacagatcagaggagaggagacaggaaagagaaaaagtttcactttggacatgatgagtttgctgggcctgcagaacatccgagaggatgagtggggctggagctcaaatgcaagatcggggaatacagatttgagaatcatcagccctaaggtggtcattaaatgaagggtctgcctgagttcatgcagagactgtgtgcagaatgacatgagaatgaatcaaggacaaaaccaactccaggaaatgtcaatatgtcaggggcagggaaagaaaaaggaccagcgaaggaacctgagaaactagatcagaagatcatcacagggaagtgggtcaccaaaatcaatggctgggagtgatgattgacatcgaaaggccaaatcacataggaactaaaatgtacccattagatttgatcttggtaagagtccttttagtgaaggagtgggagtggaagtcaatctgcaatggattcaagaagaaatgcaaagtgaagaaaggcagatgataactatacaactaaaaaaaactcagtcatgaagattaagatccaagagttctcagcatttttactgattgcacctgagaaggccagtggggtgacaaatgtcaaggatccaggatggagaagcaataatagatggagcaaagtctgggggtcaaagcaggggaagggatccagagtacattccaaagggaag

SEQ ID NO: 345388 - DNA, 983 bp, Homo Sapiens
tgctcaggaaaagaatttcttcattcaattacagcataattcattgaaaggggaagtcatgagtctcttatgagacttcctgaacagtttataaatacaacaagaacatttattcaataaataagtggttcctaaagtctttactgatgatctccaggattgtccatcgctatggtccaggccagctccactttctctgacaggctttagctgccagtggaatgggatgtttcctgtctttaggtgactcttcttgtgtcatacagactttcatcaatatgtctcttcatagtctgaatccaggcactcagcgcaacggacacaaagcctcgccatacacgcctcttcctcctcctgatcagtgtcatcggaaacctcaatagatgacttcttatagccagacctgctcctcttcttcagcccagcagccttcctccccattctcaccagcagcagagcaaccaccacggctgagggcacaaagacaaggatggaaagaagggccacagaggaaagcatggtgccaaaacccctttctgtgactgttagctctgtcatgggaatattatggtgcacatctgggggattcttcacagcacagctgaatgtcccattgtcctttatggtagggttgcttatacttatagatgcatcccctttgtatacatttccaacccaggaaatccgatcccgaaatgtgcctgctgtggttgggtactggaaagactgataatgaaatattgatactgtgtggctgctgctgggagggcgatatgtccagtctatagtaagcttgtcagtgacatctgaagttgacttgaaagtgcatttcaacttgatcttttctccaacataacctcggacatgggcatctgcacgaatctccaaggaaaagacgatataaacaccctggaagaacaggacgcccagcagagggaagagagcgcagccacggcttccagctgctcctctctgctgcatcc

SEQ ID NO: 345389 - DNA, 1000 bp, Homo Sapiens
ttttttttttttttttgtatttttagtagaggctgggtttcaccgtgttagccaggatggtctcgatcttctgacctcatgatctgcccacctcggcctcccaaagtgctgggattacaggcgtgagccaccacacccagccggtctcttggtttacaaatatagacaaatacataggaacactgactggtatttccatgtcaagaaacatggtcatatgtacagacaagacatggataaccaacaagttttaaagaaatgtatacatctctagttaaagattctaaccagaaatgctacgagagagctggcaaatgacaaccaccaatacatagatttctacactcctgaaaaagacaacaacatcaaaaaaaattaagaaatttggcatcaggtggacaacatctaggttttagggttaatatactgtttcatatactgtacaaagtttcatcattgcccccaaccttggaatttcagagtgagagcatatacaattcaaaacacttgctttgtcccttttctcagagctctgatattttcctaactcttacagtctctagaatgatctgtcagattttcactcaacaacactggatcagatctcttctatacatgacctcatccttctcatgtctcctctgtttgcagagagccggtcaaagtcttggaggtggaaacgaactgccaactgattaaccattttccttaaggtaagaaatgctgcaacaacttggaaagcaaggaagagagtgaagatgatatgtatcgctttttccaagggcagatttgttaggccttcattaaagagcaagaaaagaattaaaggtaactgcaatagaaggctcaaaagccaaaagccagccaactcaggaaccttctcctgtaggttacccacgtagcccagatacaaccggatggcttcaattaaggttattaggatgataacagtgatcacaatgaatttgtagtagtcaggcaagattgaatacttcatgtg

SEQ ID NO: 345390 - DNA, 1000 bp, Homo Sapiens
ttttttttttttttttttgcaggtcaaacagaatctattggtgccagtgggcaactttaggctcagatggagatgccaagagctagccagaaaacagcgagtgatccgggacttggggtggaaggaggacatagaaaagtggaaaagggagcagcagatggcaccaggtgaccacacctgcagcagctgcctgaatgaaccattcatgccctcacgtcttgccagtcttgtcaccgttggcacctgtgctcagggcgtaagtccttcttgtgtccactgtctactccattcctagagcagagctggcatacagtaggcactccttggcatttcattctcaaaatacttaatacacatactggtatttttagtcatgccaacccctctttctactctccccacagcaccggcccccagtcaccttccactgaggacattatggggccgggatcagagtgaggcaagggaggcactcagggccggcatgtgcccaagagggagtgccccttcaaattatgtaccgaaggcagctcccctgcctcgcccgagtgctggccctggaggaacagcagtgatgggtgggtaatggagttatcaacaggcctaaatggagagtagaagagggcccagcttggggaaatgcacagagaagactgttgcatggatagagggacaaagagaggctgggctcctttgatggagtgagatgcccacctatagatacaggcagattacagaggttaaagcttaacatgggagggagagatgcccattttccaggcgttggccttgtgaagccttctgtcttggaatctgaacaagcaagagtgtgagcatatcctttccttatcaaaatggagacacaactcagccctagtcccatcccttttgcttgcagcttccagagctcaggcccctgaatcttctatttcctcatgcttggcagtccccttcccatggagaatctctgtgtccttaggcagccctggggtctgggctg

SEQ ID NO: 345391 - DNA, 1000 bp, Homo Sapiens; identical to SEQ ID NO: 161162

SEQ ID NO: 345392 - DNA, 1000 bp, Homo Sapiens
aacgttcaggctgtatatttcagttccccccaaggccctcgagacggacgatttgccaaaataaccaggttcagtggcttctgtaaaaagtcacttcctctcagcaggaaaggcccagtttcgtggggctgggggagctggggcagtccgcctgcagcccctgaggtgggagggtccccaggactaggcctttcgccaggtcagggatggggagggaggacaggagccaccctaaaagggaaaagggggcggtccccagggcgagcactcccgctcccagcgcctcctggccaccaaagaaaaaccagacgcctgcgacgggctctcctcccgcccgggcttcctcgctcctcgcccctcgccggccatcgggcgccaccaccgcgggtagcagggcggggcgctctgggagccgctgggtgtctgggctggcgtctgcaggggccccgcgggatcaggccggctgcaggggcgcggcggcgcagcccaccttgttgctgaagagccgcgagaggctgcgcgtgggcggagggggccgcggggcacctcggagcccgcgcacgtcccagaggcgcagggcgccgtcgtgcgaggcggtgtagagcacctggccgtgcacctggatgcagttgatgatgaatgtgtggccccggaacaccctccgcagctctccagactgcgcgtcgaaggcccgggcgcaagcgtccccgctgcccgtgaacactccagacagatgacggagccccggtgctcccggaacacccgcagctgctccccactcaggatgtcccaggcacggatggtggcgtcggtgctgcctgtgaaggccgtgtggccgggcgtgtctagcactaggcacagcactgcacccgtgtggccccgcagcgtctggtggcagcagccgctggccacctgccacaccttggctgtgccatctgtgctgccggtcaccagaagccccccggccgcggcctcctccgcgcagggagtgctggggagg

SEQ ID NO: 345393 - DNA, 1000 bp, Homo Sapiens; identical to SEQ ID NO: 161163

SEQ ID NO: 345394 - DNA, 1000 bp, Homo Sapiens
ttttttttttttttttttttttttttttttttttttttttttttttttctgaggtctgtttgtgtttaatcagacaatatgcaaagtatttacaaccaattctggatacccccccaccccccgcaagtctgggccttggaatttcggagccccaggcccggcccagagccaggggtcccccaggcctctgcatagtcatctgaaatctacaaaacactgttaaaaaaaaaaaaaggacagtattaagacaccttacacaaagggccttaggcagttggagagggatttgagagctcgctggggtgagtgagcccagatttgactggaatggacgggagaagacttgggtaataaagacgtatgaaaggaaaagttgaaatttcataggcaggcactgcttggcctccttccccactggcagggcctggctggctcaagaacccctggcagtgggaatgttattgctatgatgagggggccatggtgaaatgtacaacatgtttgggggacggagcgggggggacatttttacatgttaaatatggacgcacatggagacacgcacacatgcacacacatacacacacacagggacccttggcaagatgccacaaactgtcagctgcccctttacagatgggcacactgaggcccagggagaatccaccacacacccaaaggccgaacagagccagagcccagtctcctgatgtcccagggctaggctcaccatgtgtgtcctgccacagggcctggaccagagctgagcagttgcagaggccatggccacatgtggggcagactctgcagcccagagagacagcaggggccacccaaggttacacagccagtcctggtgcatggcagtgggtaacacgtcctctttcacccccgcttaggcactcttttccctcctcatgagttaaagggtgccgacttggggaggagaacagggccaggaattgaaatgccacgggacaaagtacggggaaggaggcca

SEQ ID NO: 345395 - DNA, 1000 bp, Homo Sapiens; identical to SEQ ID NO: 344342

SEQ ID NO: 345396 - DNA, 1000 bp, Homo Sapiens
tttcggctaaagtttatagaaattctttattattagacaaaaatagactctcttttttcccctattcatgtgatcctactctgaatctctgctcagaggaggcagtgactcgctccccacccctctcccatccctgccgtgctggcacctgcagctgggtggaactggcaggggctgatcccctggagggctgacgttctcctgcaggtggggctgcctgatctccttcggggctcaactgctgatgcctcctcacccctcacacacccatctctgccatctgctcacatgcaaggtcatcttgtgggcctgtccacttaacttagcaggctgggggcggggaaggagagcagtgtcccaggcctgatgcccactcctcattcctaagggagggtgctttctcctgggtctcctgggtccaggccaggggatgtgagggctgtggggtgctgggaggggggcagtgttgatgtgggctctgagcttgtggccttccttcattttctctggcccagtagaactttggtgatgaaggtgacaatggcgccagcaggctgatctgggtcaagctctgcaaagaggtgacacacattctcccaggggcttcccggcttcttggccacgaaaccaaagatcttggaggtggtcccgtctgggttggtccatctccggtcttgagggtcagtgctggagaaggtgatgctgttcactggataatggcggcgaaagaagagcttcctttggttgtccgtcagtgtaatgccctgggctgacaccttgaagtggacaacagctggtgtcgggcgggggctacagctcagagctgcagagctggcccgggccacagcttgggggcccgtcagtgactctgtctccactgaggtcaagtagagcacgctgcaggcagcaccctgacgcaggaggtctgccgctgtgctcatgttggtgggcactggagcctctggggtctcttccagaggatctttgctgggaatgcgca

SEQ ID NO: 345397 - DNA, 1000 bp, Homo Sapiens; identical to SEQ ID NO: 161164

SEQ ID NO: 345398 - DNA, 1000 bp, Homo Sapiens
cccagctgaggatttattggcgtaaatgcaaccatataaaaacataagttatgaaaaacacagtcacgatgtgccctccccatccccccagcccaggcccctaaaacccccttctgcgggagggagggagaggaagggggagccccgaaaccgcctaggaacgctcagcccctgggctcgtgcagggcgggagagccgggcctcagcgcatccggtagtcggtggagcaggacagctcgcacagctggcccttgaagtccaggtcgatggtgaagtccaggtcccggttgttcttggcgttgggccgcatgccgatggtgccgaagatctcctcgcccgtcttcacggtcaggtagtcctccatgtagaacaccgtctgcttccagtgcgtgtacggggactcggggctggtggagaagccggtcctcttgtggcagcgtgtgaactcgatgttgaagtaggccaccagggcgtgcacgtagtcattccgcttcacttgcaggcagaacggggaggtgaaggtcaggtcttccaccttgacggtatagatgtccacctcctttatgaggcaggcgttggtgaccagctgtttggggtccacgacatccactaggggctccttaatggccacatctttgatgcaagacatgtcgaagccatacacgttctcccaccagtggatcttgtagtctttgtactgccggtcctcgatggccgtcacatacagcgtggcccggtctgggaagatgaggccatcgggcgccagccacttgtcccgggcatagagcacggtgttgagcatggactcgtagaagaggcagtagcccatccactcgctgatgatgatgtccaccttctccactgggagctccacctcctccaccttccccttgatgatggtcaccacgtggtctaacttgttggctttgacgatcttcaccgcataatcagagatactggaacacacgatcccgatgaccttgcgggccccggccttggc

SEQ ID NO: 345399 - DNA, 1000 bp, Homo Sapiens; identical to SEQ ID NO: 161165

SEQ ID NO: 345400 - DNA, 1000 bp, Homo Sapiens; identical to SEQ ID NO: 337677

SEQ ID NO: 345401 - DNA, 1000 bp, Homo Sapiens; identical to SEQ ID NO: 160234

SEQ ID NO: 345402 - DNA, 1000 bp, Homo Sapiens
ttttttttttttttttttttttttcactttaaattacaatggtactttattttaataatcacaagatttaacacgtaaaaaaaaaagatagcactaataaataacaaaagtggaatgcttatcaaagtaacgacataatgttcagttgagaatcagtcacttcaacagagtaaagctctaaagacaccagacgaaccaatacttgttggaatatgccatacaactttcttactgtggggattacaggggcagccctggttctgtgtggtcagagttatagtcagacagattcagcacaattgtgtttcagactaaattgtttttgagacacggtcttgctctgtcccccaggctggaggtcagtggcacgatcacagctcactgcagcctcaatctcatgggctcaagcaatcctcctgcgtagctagaaacacaggcatgcaccactatgcccagctaatttttgtatttttttgtagagacagatgtttcccaggctggtctcaaaactcctggcctcccaaagtgttgggattataggtgtgagccactgcactaggcccagactaaattttgaagttgtggatcatctacataagatgtcgaggatgcccctcctggaataaattaaaacctgactgacttctagaatttccagtagccaatatgggtgttcttacattcctgaaaacagcaaaatgaaacctaataggtgctggtattcacctctgatgtatcaggtttactgtgtgacaagtcttaatgctcctaggtttacattgtataggcagcagagtatttttaatgtgttcaagtagaatacggggaaaattaggatcaaatgagaattcatttctctagtgtcaataaccctcaactcctcagggaacagttaagccatcaaaactaaaatagctttatattcaaatgcttcagtaacatgttaaagtcactaaaaactaaatgtgtaatttactttgtagaggtaagaacacacagg

SEQ ID NO: 345403 - DNA, 1000 bp, Homo Sapiens
ttttttttttttttttttttttttttggttttgaacctttaataaaagtaaaaaatgaatgcaaaaagaacacaatgttgaaaacttagtatgaatgtgaacctcactagatgttcaaatctggtagagtgcaaattttgttcatactattttacatttttacaaactcaaatcactttggttcatatattttctataaactattggcaaaaaaatcctcaaatttacattcttttggctacattatttctaacagatatagatttacttccggtttcggagagaaagacttattgtgtgtgcgtgatcaagtctgttttaaagattcactcgctgctttcatctaataacttctggtttttcataaaatgctgacatcttcattggaaatttttttcatgtaactgttttcattttcagaaaatatataagggggtcattccaaagttcagaatgatcctatttttttaaaaaacaaaattcctgtaaaacaaattaactccaggaacttaaaatttactccaagacatttccctcaaaacaaagcaaaaaaccccagcaaagatcgttacatcacaaaaccaaacacaaagaccagcgctcacaggcaagttcctctaagcttccattctgctgactggtggcttccatttaaaaggagtcttttaatcaagccactttcacagaatttaaaacaaaccaaacacatgtaaattgcaaaatacaaaaaggtaaatttataagtaaaaatgaccaaacccacaaaactggagtatttcgaaggttgagggttcagtggagggtgtaacacgaaaggaacttcacaactgaaagaaatcattgccgagtttcctccaggcagcactgaaatgaatggagaaccttctctcgaacatctcacacgttaaaaaaaataaatatttaagagatacaaggctcagattggttttcatatacattgcacttgaagtttaagacccaatacttgcaaattaggtct

SEQ ID NO: 345404 - DNA, 1000 bp, Homo Sapiens
tttttttttttttttacatgttaaatactttattcacattgtttacaaactatatccacctggaaaacacatgaatccaaaatagattattttacagtaattcacattttttaaaacaagttactttgaagttcaactctaataaggaggtcttcagcctgtacagcgattcagtgcctcaccacttgattcctgctctggtgaaacagaagtcctaggggcagtccacctagctgtcagtcactgataacttacataccagtgattgatgagaaaatgtcagtgcagactttaacctatgaacatttattagtgtgaattcactgtcactatttttgtcaaggaaatacgtgttatagcgcttgaatacacatcaggtagaaagacaaaacaaaaaagacacacaatttaatttgccattacagagttgttaggacatttccggttttataaacgtttaacatctggaccagagatggaatcaatgaatttcgattttattgtgttgacagcttgaatcacagaaacagcagtgattttgtaattgatgccagtgtctgttgactaactctgcatatcagatgccagccatcagttagaagggggaataaactcagcaacaattaataatgtggttaatgttaagtgtttaagtccagaaggatgtctgtggaagttttgctgagtggtcaaaaagatgctctggttaggaaactttctgtgaacctatgttaaatccaattaagtcccagcttgatggcttagctctttcattaattaagatacttttctgcccaggtgccgtggctcacgcttgtaatcacagtactttgggaggccgaggtgggaggatcacttgagcataggagttcaagaccagccctgggcaacatagtgagaacccgtctcaaaaaaaaaaaaagggatacttttctatggatttttgactttaataatttaaaatctaaagtatgtatgtcttatatctcaccctctccta

SEQ ID NO: 345405 - DNA, 1000 bp, Homo Sapiens
gatgagtcacttacagtttatttttgcctgaaagtatttcacatctctttgtacacagctacgtgacagtagtattaaccatcaggaaaagcaacagtgcgaggggaaaggtggcatgtcttgtttcttctttttttttttccttttttattttttttatttttatttatttttttatttttattttttttgcttctgcttcttcccgcaccagagtgctgtgaagtatgggaccggaggggggaaagaaaagaaaaccaaacaactgaaaacaacaacaaaaaacaaaacacaaaacagaacacactcacacacacacgaaataaaacctggcacggaaaatgaattaagactggaacccagtttcttttttttttccttttttaaaaaaatgagggcatagtgggggggtaataaagtctacctagcaaagtataaaacgacaaaagcatggtttccattgaataagattaaatatatataaaacaagtacactgactgtggggtaggtttggaggtgccggaggagggaagtatttgtgctaaaccaacagaaaaaagggctggggggagagggggaccccaaataaaccatcaacgggctgttctgtacagtgagggcttattaagaaaaagccgactgtttataaaagaaacggaggttggtttgtcttcggagcaggtggggacagaaggagtgtcttcgttgcagtggtcacatgtggggggtggcgggggtggggtggggagggcagtcggactggcggaggcgacacatctctcttttcccaagagaccatgcagagaggcgggcatgcatggggccacgtgaagcacacgatggcagggggagcccaggggtgacagagtctccgttggggacaggggacagcaaaggctgacagggacaggagctccctgggggtggggaacagctcttttaccggggtggactggagagggcgggttagcagcctcccattcaagtctaaaaggtgcc

SEQ ID NO: 345406 - DNA, 1000 bp, Homo Sapiens; identical to SEQ ID NO: 161166

SEQ ID NO: 345407 - DNA, 1000 bp, Homo Sapiens
tttttttttttttttttttctgttattaaaattaaacattttattatataacaagagttaaagtttttgaaaattaacatcaacaaaaccaaagccattctaggcacaaccaaaaatttttactatcaaaactacctctcacttttcagaaatctgactgaaaacaaatggttgaatgtgctgctaacagagagggccaaacgatgatgtctattgtggcagctgaacaaagtgagacttacagaactggaactgctgccctgacagcaactgaagcagaaagagaagaaaggagcttacaaccaggacactcaaactcaggccaggagtccgtctatgatccaattccaatcagtctgacaagtcactctgatccagcacgattatcctggatgattcggaccaacctagtcgcttccaaaaacaggattttagttcatcttcttcagaagtccctagaacaccctctgatttccttctttctggtgtaatgctatcttccctttttcttttctcttcaccaactttttgatctttgatatttgtctccctttcagagcccttgggaaggtcttgtagctccacgctctcctcaggtggctgcagccatctttccaggtcctcatccagagtagagtgagctctctctgtgtcctctccaagatcttcagtttctttggacaaaagcatactactatcttcttttttactgtcagtttcttgttcttctaagtgcctttgatcatttgcagtgcctcctccatcacttgctgtgttctcatgcaacaccgtggatgagccctgctgctgtttcaagagctcaatgtcatcaagtagctcctgagatggtggtggcagctcatcaatgtgatgctgtgagaaggcttctactttaggcaggctccttctctgggtggcatggggtggtgatgagtcacatgccttaacaaggctgggggatccagccccaataaatgaagacaatcttttaagaccagtc

SEQ ID NO: 345408 - DNA, 1000 bp, Homo Sapiens
tttttttttttttttgctatgagtcatttatttgagatcatttatcaaaaggcacttaccgaggaccaatttttgaggcaatgtaataatgttattttatttttacatgagctagttcttatacaaccatcaattctgaatcttgtttagtttgatgttaagtaatatacacaatttatattgttcatgtatgaaatttgtctatttttccatagctttttctgatttcctcattaggatttcaaatatcttttggaaaatactcaaagccaaaaggtggtcagaatttcacattctaaattgactttttattttattttttttgagacagagtctcactctgtcacccaggctggagtgtaatggcacgaactcagctcacttcaatctccgcctccagggttcaagcaatcctcctgcctcagcctcctgagtagctgggattacaggcatgagccaccacgcccagctaattttttgtacttttagtggagatggggttccgccatgttggccaggctggtctcgaactcctgacctcaggtgatccaccctccttggcctcccaaagtgttgggattacaggcgtgagccactgtgcccggcagacttttaatacagtgatattaattcatttgatggtctcctcctgtgtcttctaaatcaatatcaaaatctaaatcatcatcactttcttcatttcttctgcagcttcttctatggttggaacttagattattttcagtatgttctattttttctgtttctttattcaacggaataacaatgtcttctttctttccacattttgcgcaaacttcaagttcacaggcacatggcctgcacattatgtgataagaatccttcactgtcttttgtaaacatttaacacttggtctgcacacttttatcgaacttgtcatttttgaagctaaacgtattctggtgcttctgaggtctggaacgagccacgttgcctttctgggagctcatcgccgaa

SEQ ID NO: 345409 - DNA, 1000 bp, Homo Sapiens
attgtgacctccgaggagattctattatgactccattcaccagttaatgaaactgaggccctggtaagtcagctgctccaggtcactgagctgacaatggtggggtcaggatttgcacaggattcacatccagggctgcctgcccccactgccacgtgtgcttcctgctccaccatgtagctctgtggccctgggcaagccccttaccctctctgagcctctgtttcttcatctttaaggacggctagagaccccatgggcccactttttggggcactgtgggatggactgggctttgcgacatgctggtggttagacagcagagggtgtgaagggctgatctcttcgtggagcccacctccaccggagtcagcaggtatcactaagcatggccctgtgccccctccagcctccttcaccacagccccacctctgagcctggggctcacctggccaaggttgtcaaagttgtacttgtgccggacccaccggtaactggcctcggcacagtccgatttattggtgatgttcctggtatcctcgccctggcacacgaaaaacttccctttgaagagctgcacccccaagatgccgaaaatgatgaagaaggcacagcagatgactacaatgttgccgatgggtttcagtgaggacatcagcgtctccaccaccagcttcagcccctgcgcccggctgatcaccctgagcgggcgcagggtccgcagcagccgcagcaccctcagcatgcccaggatcttggtgccgctgtcagagaccatggacaccagaatgtcgatgacggagatgagcaccaacagcccgtccagcacgttccaactgctccgcaggtacgcctgctccccgaagcaccagcccagtgccaccaccttcactgtcatttcagccagaaagactgcggtgaagatgtaattggagagggtcaggaagatgcgttcagcgctgtgggggtcaattttggggcgctccatggcgatggtga

SEQ ID NO: 345410 - DNA, 1000 bp, Homo Sapiens
ttttttttttttttttttttttttttttttttttttttttttttttttttttttttttttttttttttttttttaaaatcagaatagaactttatttgtggattcaagattttaaaaaatgattttacactttaaagtgtgcaataaattttgatacatcaatcttgatatatatatttactgtgtcagaagattttaaaaagtcaaatagtttataatcaaaatgaattgtgtttaacttgatacttatatggaataacttcagcattataaataaaaacccaaaacaaacaccatttaaatttgagttctgatgaaatgcatttgtaatacaattttgttaaaaatttttaataagagattgtaggctaaagttatatgcttgtaatttctagaaacatatgatgtccttgctttatgaaaatgatcctactgactgtcccgcagtagaatgcatttgagacacttttctatctgggataaggggctgtgttgcttgatacatgtttcttccagaccatgagcccctagtgggagatgaaggggatgaaggtctgcagctggggactggtggcagttgagtctggtctcatttaacatcatgttctatgagtcacagaatcatccaaatgagtatcagccagatacaaagaaagctttgtattttctcatgcttagatagttcacaaacataatatttaaataattgtggcaaaatcctgttttaacaaaaataattttcacattccattctacataatgaggacatttccaaaatgcattggcccacattactattactttgctgatatgaagaaaatgaattatgatggtaagatccatatacagatatacacatgtgtatccatattatttatatatttaatatcagaaatgttcctacttccttgtctcttagaagtcactttacttttaaatgattctttgggagtgtggtcaatttgcacacctgacttgacacaatctgacggtcagcaca

SEQ ID NO: 345411 - DNA, 1000 bp, Homo Sapiens
ttttttttttttttttttttttttttttttttttttttcaaatccaggcagagcacacaccagtttattttgaaatgcaacacagatcagtattttatgaatacaacttattactacattatcaggtaaaaacagctttcaaatgcatgcatagaaagttaagcgtagtctctggactccttatttctaaatatacaaaaaatacatttaaattatataattttagtgaatcaaagacttataaaattacaattttggttttcacaacatagaaaaaatacaaaaatgactatatatacggttgtacaattttttacccaaatttcaaaggagcagtatgtattgaatttaatgttttataatgttttatctgaaactcagaactgcaagtaatttgcaggttgtaccatatcaatgccaaccttttattataaatgaataaccaaaaaaataagtgaaaaatgagggcacgatctcttcttacacctcttcaactctccagcatctaaacctttcctgtcagaagtctgctctggagacttttttcatctgcaaggacagtgctttattccatgactaactctccatggtgcctctggataatggttggtatgtgttaaatgaataagcccaacctcagcaaacagaacgcagcaagatgtagattagcagtctgtgctgacaaaagcactactgcggacctcaaagaattctctgtcagaagaaggcccccacggagggatctgaaatacataatcaagtgggtagttgggaggatgatgcctttgactatgccctgaaatgaaacctctaagtctgacaaaatacccacaaaaacatgaccttccttgttcacactttataagaaggtgtgacatttggtggtgtggttgttctcaatttataaaataataaatgacttcaaaggagaaatgaattcatgttagggataaagaaaccagttactgagagaggttactgaaggacacagtgacatgcc

SEQ ID NO: 345412 - DNA, 1000 bp, Homo Sapiens
tttttttttttttttttggttacaaagcggtttaatagagatttatttccaaggcttgttttccatgaaacagtcaaaaaatacttcacagaagtagttgcttaaggctctgtgggggtacgggttctcctggactccggaggttgaggggtgagaagggactcccaggcttccctgagatcaataggaggcagctaaaggggacggcacacaggcggatgaagggagtagtggaaaataggccgagccctgaaggctgcaataggtgatgaggacccttggagaggcctgaggatgctctgtggggctggcgagatgtgagccacaggtggagggcccaatggcagggaagggtcacagatggtcagtggcggggctgggatcacagggtaaagacgcggagagctgagatacccacaaggtggatatccgagattggagacccataggtagaggtgggtaagagaatgaaggcaaaggacaggagagtttgggatgatggtgggttaaaggactacaggtcaggtgacccagagctgcagggggaagaaaaggagtaggatagagagggcagttgagccttgggcagaattacctgatgcggggaccacggccactccacctcggctggcgctgtcagtgggcagcactggctgggcctgcactgaggtccctgctggggcagttcttccagaattatcttcagagggggcctccagctccctggtaccctcaggggcccgtgtggctggaagcagggaaggggcaccctcggagcttcctgtctcctcgctctctcctcgagggaccccagatagctcaggaccaccagttgcctcccccacctctcttgcctcaaccagagtggaaggtgatggggatgctaggttcctctccctgggagtgggcagagtctcagtaggtggtccatggacccttggaggcctggaagcttctgactctccatcaggaagtggtgatgcaccaggctgcaggactg

SEQ ID NO: 345413 - DNA, 1000 bp, Homo Sapiens; identical to SEQ ID NO: 161167

SEQ ID NO: 345414 - DNA, 1000 bp, Homo Sapiens
ttttttttttttttttttcaatttcttcaacaggtcatgttcaatttcttcaaagttttaacataaaaataatgagagccaggagtggggccggggcctggggggacgaaggtggtatgtgaacaaggttggcacacaggcctcaccctcctctgcctcagattcccaagtgggcaggtgggggtgaatggggctccgggtagcacctcagctcctctcagctcccctcagcctgttctccttccagacccagagagctgagaagagtagctgtgaggctcagggcagaggctctctgcctttcaggaacagccctaaccctgctccccttgcttggcctcaggaaggtgccgcgagctctcctgccgtccctgggccgccctggctctgctgtgtccagatggtcaggctactgccagctggggccttgctgctctgaagtcccctgcggagggcccagtcctgtgtgggcactgctgggctgtcgccagcctgggtgcaggagggctgttctagctccagtggcacccatagccaggtcagctggggccctttcccaccccagcaggtgctgtggcctgggccagctcctgccttacaagccagctgtgaggaatatgggaatagccctcccggcctggtgccagctcttggagttgacacggtacagggaggagacacagcccagggtcccttcccagccctgcctccaaggagttcatgtcccctctgttctcatctgtaatagggaggtgtccccattcttcagaatggacacaggatctgggagggcagcaaactggctcgcagctccagccttactgaagagaatgggcacagatccgggcacagatcccagcacagactgctgccaccctcagctgttggcaggtcccatgctgccagggcagggctagggtcagaggctgctgtgctccctggaagtggggtagggccccatgtggggcagaggcagagctctgattagggattggggttc

SEQ ID NO: 345415 - DNA, 1000 bp, Homo Sapiens; identical to SEQ ID NO: 161168

SEQ ID NO: 345416 - DNA, 1000 bp, Homo Sapiens
tttttttttttttttttttttttttttttttttttttttttttttttttttttttttttgctgtatctttctttattggtttggggaaaactggagggggctggaaggccatgaccatgacacaagcaggaccacccacactcagcgaagcacacaacagccgtgcaggaaagacagcccctgaggcccgcctgccagcaccccctcggcttttggcggggcggggggggcaggggcgggagaggcaacaggggaggggagccactgcccccaggcagggcagagcctggggacagacttgggggtgccccattccaaccccagcgccatgcgccacaccctcaaatctcaaaatccagcagaggccagccccagggggaggggttgggggaggggaccgaaagcatccaagggaaggaaatctgggggtcagtccacttggcctcggcatctgcctgggcatcaccacttggggggctggccagcacggaggcctgagtggctgtggcgggccatgccctgctcagaggccccctcgccctctgggatctgccccagcttccggatgtggcgcaggaacgaggtggcattgaaggctcgcttccagtgtgtccgagcaaagttcttccggatctgctcactgacagagcctaagatgtccctgtcgaaggctgtgtccccagagatccaaaggtgccgcaaggcctgttggcaggtgaacctcttctgggggtctcgctccagaaggtgccggatgaagtctttggctgattctgagatgtcatcccagaaaggagagtcaaactcatagctggccctcaggatctggctgaagagctcagggtcgctctcgtcgtagaagggggggtacccacacagcctggcacccacagatgaatcatccagctgtcccaccctccccaacccagcaggggcaggcaggcaggagacaagccttcccagcggtcactcacaggatgtaggagatgacgcccagggc

SEQ ID NO: 345417 - DNA, 1000 bp, Homo Sapiens
tttttttttttttttttttgtttgctggtttctttgagatggagactgactctactgcccaggctgagggcagtggcacgatcttgcctcacggcaacctctacctcccaggtccaagcgactcccgtgcctcagcctcccaagtagctggaaccaaaggtgcacaccaccaccccccggctaacctctgcacttttagtagagatggggtttcaccatgttagccagggtgctcttgaacttctgaccttaggtgatccactcacatcagtctaccaaagtgttgtgattgcagggatgagccaccatccagctttgatatcccttcttttcctttctctttgagacagattctcaccgtcgcccaggccggagtgcagtggcacgatgccggctccctgcaagctccgtctccaggatccacaccattctcccgcctcagcctcccaagcagctaggaccacaggcacccgccaccacgcccggccaatattctatattttcagcagagacggggcctcaccgtgctagccaggacggtctcgatctcctgaccctgccatgggcccgtctcggcctcccaaagtgccgggatcacctacatgagcctccgtgcccggcctgatctcccttttataaagtactatatcaaaaaagtactatctctttaaaaagtactatctcaaaaaagaaaaatagaaaataagaatcaaaaaacaggctgggaaaagtggctgacatctgttggccatgctggtttcaaacttctgacctcaagtgacctatgtgccttggcctccaaccgtgctggaattacaggtgtgagaaaccacacctggcccaatcctcttaacataaacacttgaatgtcaattaagggttgaactcaatgttaagtcaacacaaactcaagtcaatgctggactgactctagtgtcaattaatgcttgatggtttgctatactcactgcattgggaacagttatctcaaaaatgaatt

SEQ ID NO: 345418 - DNA, 1000 bp, Homo Sapiens
cattccacaggcatttattgagcatctactgtgtgccagatgcaaagaagacagtgggataactgggtaaggagcattccaggcagagggaacagccagtgcaaacatgggagatgcgggtgcagtgagaaggagcagaggagaccaggagttgaggcgactgcagagcgattgcagagctcatagacgtgatgaagaccagctgggcactgcagcggctctggcttctgctgtgagggacggggagctgtggagactccctctgtttggtcccatttccatattgctgagcacctgctgcatgctctctgtcctgctcagagccaatacctggatggaggctgtgtgttctgggtggactgggggagaatgcattctttgcagaagagacaaccaggtgctgaggcctgaagtcataaccagacctggggcactcagacaaggactggtggccaggccagaggagcagagctcagggtgtgcacagaactcagaagtcagaccactgaacagtgacagaacctttcagcccattggcaatgaggctgcccaggcagccagaggcctggtcaaatctgaggtctgcagagatggagctgtcattctgtgtttcctttggcagtcccaacaccagcctcgttgcaccctcctcttagcttccctgggttctccagccctaagggtggtagcagcttcctgcaagtatccagctctgagattctgcaacatccacttttgctctctgagccttgcaaaacctgcacaatcagtccctaacttatatcccctctgtttgaaatacctagtgtggtttctatttcctgacttgactctgactggtgtggtacttggtataaagaaggttccctggccaggtgcggtggctcacgcctataatcccaacgctttgggaggctgaggcaggaggatcacttgagcccaggagttttgagacccgcctaggcaacatggtgagacactgtccttacaaaaaatttta

SEQ ID NO: 345419 - DNA, 1000 bp, Homo Sapiens
tttttttttttttttttttctttttttttttttttttttttttttttttttttttttttctgtggggggtttatgtatttattcattaaaagatctgtaaacaacattttatacaaatcttgattcttttacaaaaatatccagaattcctaacactttacagaaaacacaacagacctaaggaaatgaagcagcttcaggctgcgaggatgaagacaccattgctgaagcaaaggtctcctcctagagggatagccaggatccatcacagtaaacccttttacccccattttataaacatccaattattaactgttcctgctgggttggagtgtaagaagagaccaaatggagagatgtctagtagaagccccactgggggtaacctgcttaacattaaaaaaaagacaggctcagttctattccctggacccacatctgtaggaattatattatacagcaccagtcttaaatggtgttctgcttcagattcatgcatacctgaatgggttgtaatgacaatactgtacaagtcaataaactgtatcacaatacaacttacacagttttgtaaggttgaataaatactttctgtgccagttaaaaccatcagcagaaactgaagaaaacaaactgacatttgctataacattaatcaatgaaaagtgcaccatctgaacttgaatttgcccatgagtttgaaaacacacacacacacacacacacacacacacaggccgggtgcagtgactcatgcctgtaatcccagcctcagtttattagtaaaatggagatgcaaatatctatctcataaggttgatttaaggattggttgagatgatatgcatacatataccacagtgcatggcacatggtggacactaaaaaataaaggtggctcccatgcccttgaaaggacattttcatattagctataatttcacaaagtttaaatttatttacttatttttaaaatgtttttgtagagatgggatcttgc

SEQ ID NO: 345420 - DNA, 1000 bp, Homo Sapiens
tttttttttttttttttttttttttttttttttttttttttttttttttttttttttttttgatagccaatttcactatttttttattgttatcattattagcattgtctcttacattttcttatttatttctgaatcggtaaaataagatttctttacaaaattcaagagtataaagtgaagagtatgtattccttcaacccctacattcacttggttcttcccagaaggagccaataataatagattttgattaatctttccagagatatatttgcatgcttccatataataattgcattttttccatgctgataagataatctacattgctttacaacttggttttttttttttcattttacaatgtctcttcaagaccattctttactggtacaaatagagcttcattgtcaatttgtttactggctatataatattccagtacatgcacatactaaaatttatcttaccaatctaatgtgaaggacattcaagtacattgcaatattttgccattaaaagcaatgcctcagtggacctcttgtatgtaaatgatttttcaaaattatatttcctaaaagtgaacaaagtttttcaaagtgtgtatggatctgttctctcatgtgggccaggcactgatatcctctaataagcactttttatgtttaaaactttgctaaatgagggctgggcatggtggctcatgcctgtaaacccagcactttgggaggccgaggcgggtggatcatttgaggtcaagagttcgagaccagcctggccaacatagtgaaaccccatctctactaaaaatacaaaaattagctgggtgtggtggtgtacacctataatcccagctactagggggctgaggcaggtgaatctcttgaacccaggaggcagaggttgcagtgagctgagattgcaccactgtactccagcctgggcaacagagtaagactctgaaaaaaaaaaaaaaacttgctgaatgaaaatgaaa

SEQ ID NO: 345421 - DNA, 1000 bp, Homo Sapiens
tttttttttttttttttttgatttacaaaattttatttttcaaggttgaacaatgattcattgtaggctttcagatgaaacaattagcagtcttgaagtacacattgaatacaaattaatttgatttcagtaggcacatttcttggaacaaactgaagagtacttaaaaggtcccattgaatgcatgtggcattattcctagtttacggatactgtttgaactaaatgaatcttgggagagggcagttagtaattaatgcatttagaaactgatagcgctaaaatattaaaacttatgcattccaatgtttacatgtgtatgtgtgtgtgcacatgtgattctgctttgcctgttttactatcttaatgattatcccttcttactgtttcctctgaggatcttatctcacttctactgacagccagaaattttcttatcagcccttttatccatcattttctagttttcaaatatttccaataatgccttttattttagacaagggctttgttgaaaaacctaaattacaccaaaataaaaccatactttatccctagtgctgctcataacctgccagaactttcatgcttcaaatcacaagggctagggaaattgtctagtcaggagcccccctccacacttctgtgacgggctggggcttccaggtactgctgctacaaggtaatgtatagatataatttcttctgtctcttacaaaataaactgaccatgaaatatcattgtcccttcactttcttgtttcagctggcaaaggatgtaaagattccagatggatttacatctaagtcagaaatattcattacctatgagccactttaaatattttctgtcctttctaaatgattacctaacatttcgatctccctttttgacatgtgcccagcttcctttctttattaacactttatcctttaaagctcggtttatcatttacaatctctcttacttggttactttgggacatcattgtagattcag

SEQ ID NO: 345422 - DNA, 1000 bp, Homo Sapiens
ttttttttttttttttgtctttacagactcaacagaaaacatatttattaatatgaacatatgaacctttattaagtggctcacatttcagtataaatcacactaaaaagatatttaaaagctatttacactacagtgctgacacatttaaaatgaaaaaaaggatataaataagctctatggaaaagctttaaattgttgaaaaagaattctggctcatattacaaaatatatatatatatttatatatatatatatatgttaatgtcagctctattctaaaacctaaaattccaacgtaaatgatttttttttaaagactcctttatgtttaaacctgcaatgtttacagtgcatctggccctaagtgcttaatacttcacagttatggacaggcactgaggaatgttacaaagctacataaactatgttttgtaacagacataggagcaagtccttggcttgctttcagaattcatgaatctttattacattaaatttttttaaaaaaggattttagatggtatatgcaaatttagcacaaaatgtcatcgtcttttttatcttgatttgaatgtgctgaactgtgttgccttgtatcaactagacttagatttccagggcacaattcttcctttaaatctttgttgctattttcaaatttagaatccatgtcaatcttaaattctgcaaattgaacatgatccaattttgctttaacattcttgccatccatattattcagtgctgtagtcttttcaggaatattaacattcacaggttcttccttgattcttacagatgcaataggttcatgtttaatctgctgtaattcatatttagaatgaagtttatctgaaaaaacagaatccaaggaggctttgcttacagcacaaatcatgttgtcagtgtgaggtccaagaacagatgatgtggaatctgatgatgtgcctgtttcatgagtagctgtattctgagaagtgtcctcctctgagtgata

SEQ ID NO: 345423 - DNA, 1000 bp, Homo Sapiens
ctcagaaaatgtttctttaatttagtttaactaaaatttcatcaaggtagaatgcagttttgtaaaaagttccaaggatcctattacacagttgctaattaaccttcagttccttatttatacattttttacttacagatataaaaggaaaaaaaatcctagaaattattttaaacagaacattatacaattaattaaaagtaggaattagagtggaacaatgtggctttagatactgataattaatagacaggatgaatcacaaaatatattaagtattatcattttccagtctctgcatctcatcttgtcccatctgtccaaggtgagacaaaagtttgctataggcttccctttgtgctatattcctgccaaggccccatttctgctctgaatccttcagagactgagtaagggtagaaatcaagtggatgacaacctgctggtccaatgttgctactgtttctaaaatgctgtaaacctggtaatagtacctcataccataatcctggataaactgcctaaacacagaagtcagctgggaggaaggttcttcttctgaccccacttggcaggcttttaccatgtattgcaggttctctgtggccagccttttaacttgtggttcactgactaacaccaagcattttaaaatgccagggaggagtagttcaacttcataaatgtctgtgttagtttccttgaagagttggaggatgaaggccagaatggatgctaagcgaggaggaggtgaggaccccttatactcaaggtaggatttccttatgacttgcacaatgcatttctttagagatgatattggcggaatagtggctgtgtttctcaatgccagcaaaacaggatgttgtccaagatctgaaacatatggtgaagctggaagaaatcgcccaatatactgctcaataacattccctagcaattgattcaaataggcattcggattttgagattgacaacacacgatacacatgccctggag

SEQ ID NO: 345424 - DNA, 762 bp, Homo Sapiens
ggactcttgagactgaacgtttttccatcattttcacaaatcagggatactcgtcccaattggcagggcccaccccaagactgccggcccctagagccctggccagggcccaggtctgggagctgccactgggaggcctgttgtgagtggtggtactggagctcagggtgcccccagttcctcttccggcccaggtggtcttcaccaggcctacagcagggggttgagggcaagcacccccttcctgaggatgaggtttccgtagagggccgtctccctgcagaggagccaagcccagcactgagctgggctgcagggccagggtgccgagaccctgcttcagcatcccgttgccacaacagcaaaagccttcttagcccgttcataaaactcaaacctctctatctttgccagggctctcacacagccggccctgcgtaggatggactcgtactccgtccacactggggtctgcaggcccctctccttgtcgctgggcaccggctccatgactgcagccggactctccacataggtgtccaggggcagcagcttcagcacggcctccaggagctgcgggatgcccaggccgtctgcacggatctccatgggcccacactggcagatggaggaggccgggaagttcaagtccgcaagaacgatctcgtccccgtgccccatccgcgccagcgcgtagagcagctcgggggacagcagtgcggggacacccttcagcgccaccatggcccggcagacggggcg

SEQ ID NO: 345425 - DNA, 1000 bp, Homo Sapiens
ttttttttttttttttgctcagtgtcacttttattgaatttaaagcagaaagagagaaacagaggacagcaagacaagaggaggctagagttggggtcctcacccttagactggttttctggaggaattatcatttgaaaggcctactgaaaggtcttgtgcagacatgaaaactggctaaagggacagactattatttttaggctgaaacgatgaacgcattgactataagagtaggtgaacaaacatacgtatttgatgcttccttgggcaatggaaaaactatgggatttgtagtattttctagctgtatctttcactttgtaattgtgttactcacctaaactctagaatgacagctgtaaagacttgtgcatgtttcacaaaggtgaaacgagaattcaatgatgtgcaaacactccacacctggaaagcgatattcaaatgttaatattttcactttattattacatctaccaagcttagtggaaggacagggctaggggaaatagaggttaaacctcaataagaaatagtattttaagccaggtgtggtggcacatgcctgtaatcccaggtacttaggaggctgaggcaggaggatctcttgagctctggagtttgagaccagcctgggcaacatagtgagaccttgtctcaaaaaaaagaaaagaaaagaaagaaatattaatagtattttagttgggcagtgaaaatgggagaatatcaatagacatttgaaaaagagggaagagcttcagcaaaggccaggggagagaaaagccagtggtgaatattaggggctggcatacaactctaattgtgggagggaagatggcagagttacagtaaatgctggggagcagtaaaacaaaaggcttgaagtaggctgtatcagaatgtggtcatccttgagagccaggaggtttgggggagtaatggacattgttgaaactttcctgatgatatgctctcatctaagctcttggaagatacctaa

SEQ ID NO: 345426 - DNA, 1000 bp, Homo Sapiens
gtcgtagagctttttattttgcatctggagtgtatttggacacgtgggctgggtggggtaacaggataatgagcagtttgggaaagaggcaggctccaagcaggctggttcactcacttggcagtcactgggcggctattcttgtgcctggatgtgttacaatgcaggggacacagtggtgagcaaggctgctccaagccctggctgggatgggggatgcacagacaggctgatcagggctgggatggtggacacgcatcctctttaccctgatcactggttagaaatactgcactgtggccgggctcagtggctcacacctgtaatcccagcactttgggaggccgaggcgggtggattactcaaggtcaggagttcgagaccagcctggccaacatggcaaagccccgtctctactaaaaatacaaaaaattagccaggcatggtggtgcatgcctgtaatcccagttacttggggggctgaggcaggagaatcacttgaacctgggaagtggaggctggagtgagctgagatcacgccaccgcactccagcctggacgacagaacgagactccatcttgccatgtgctagtcatgtgacctcaggccagtgattccacttctccaggcctcagtcttgccatctgtcaaatcgggtccatctagcaccccccttacagggttgccagatctgctaacacaggtagaggggctggcacaggtaactgctcccagatgggctttaaaaacccggccgtcagtggcccgtgagggcgagaagtccgtcagctgcaggttgctctcccggacctggtcgtagtcccacagctgatagtgccaactcttgccctgcttggacagcaggtagacagctcccggggagccctcctctggcagggatggtggttggcagggcgtgcccagcactgggtggaacaggcccggcagctcagggtcctcagtgtagccgagactgggcacagcccgaacacccagcag

SEQ ID NO: 345427 - DNA, 1000 bp, Homo Sapiens; identical to SEQ ID NO: 161170

SEQ ID NO: 345428 - DNA, 1000 bp, Homo Sapiens
taagacgagaaacttaattttattgatatggacgaagagcaaggaaacacagtatctgcatctccagatttccgataaccttggccagcacgatcccccctcctttagtggccagggctgtcttcttgctacactttcagtgccgcatattcatgagatcctgggggctcctgggtggtgtctgaagctgcctcagacagggcgctggtgcttagctcagcataggtcactccttgggggtctgccgtcgagagagataccctttccatattggataaatctgcctcggcagcctcytgctccggaagtttggaatggctggttctcttggtggattcctcagatgatgaaccgtgctggctgcatctgtagatgatgaagactgagaggaagaggagaaggatggagatgcagctgaagatggcgacaaagatggttctggtgtctgttttcattgagggagcttcaagttcatcgtgtttatctgtgaccaccagctgcaagtgttcactgctttctgaccactcatgggaggctgttgtcttgtaggcacaaaagtacctcccagcatccttaggcttcaggtccgtgaaggggaattcagcttcgttttctgccgagctctgttcctgcttgtacccagagtcgttcaccttgcgcagcacaaatgtcacattctgggaatgagcctgacacttcagggtcacattgctctcggcttcaaccaccgagctgggccaggcgtggagggagggcttgggcggtttctcattctttttctcatcttcgtagcccagacacagcccgaggcaaagcagggagaggaattctgcggtcatagcgtcccttctgccagaaccaaggccccgccttgggttttacccttcaaaggcggagcgggactgggccggccgcagctctccggctgcccggttcgtccccaggatgtgcagatagaggaggttttgctctgacactctggttctctgccccactcttg

SEQ ID NO: 345429 - DNA, 1000 bp, Homo Sapiens
tttttttttttttttttttttttttttttttttttttttttttttttttttttgggagtcacacaattatttttattttccagtacctataacagttatgtttaatctatattatagtctattaagtttgcaatagcattatatctgacaatgtacatactttaatttaaaaatattttattgctaaaagatgctaacgataatctaagtcttcagtgagtctttgttgctggaagacagtcttgcctcactgttgatggctgctgaatgatcggtgtggtggttgctgaaggttagtgtggctctagagatttctttaaatgagacaacaaggaaggctgcaacatcaactgactcttcctttccgaaggatttatctgtagcatgtgttgctgttggatagccttttacccacagtggaacattcttcaaaattgaagtcaatcctctcaaactctgctgctgttttatcaactaagtttatgtaatattctaagtcctttgttgtcatttcaacaatggtcacaggatcttcaccaggagtagtttccatctcaagaaaccacttttgtggctcttatattagaagcaactcctcatttgttcacgttttatcatgagattgcagcaattcagtcacatatgcaggttccacttctaagtctagttatcttgctatttccaccacatctgcagttacttcgtccactgaagtcttgaacccctcaagatcatccatcagggttgaggtcaatgtcttctgaactcctgttaatgttgatattttgaccttctcccatgaatcacaaatgtccttaatggtatctagaatgatgaatcctttccagaaggttttcaagttactttgtacagaacaaccactatggcagccacagccttacaaaatgtattccttaaataatacttgaaagtcaaaattactccttgacccatggagtaatggatcctgcagaatggatgttgtttagcagacataaaa

SEQ ID NO: 345430 - DNA, 1000 bp, Homo Sapiens
actcaaaactttctgtttaataaaagaatttaacctcatttcattgaatcctcacaagatctttatgaaataagcaaaagtaatataattgtctccatttcgcagaagaggaaattaaaccttaggaaaggtaaggaaatttttcagggtctcccatgattgatccaactctttcctaagaaaaaaatgggtctaattaactaagtactagcaacaattatttggaaaatgatagggtcaccggccttaaaagattatgtcaatcatttctccaaacggtatcatacagcaattcctctcacaatatcgactttatctagtctttccttgaacataccaagtgatggtgggctcactgtttaaagaagcaacccattccatcattgaaaatttataactataagaagttctttcttatcttgaactgctatccaaattcctaaatcttctcaccctctggtcataataccgctttctagatcccatttatcaattaaggggatagcctatatatgacagtttttacaaaatgtgaagggaattcataaagaccctcttgtcgtctctgagttcactctttatgcaaaacagctttgattccattaaatgcttatcccattgttacagactggctctcagaactaagaaacatctccctcctgtcatcctttctgaactgtttccattgatgatggtgcactgtgtcctttagaaggtcatttgggaacagtctggcttaggttacaaagggggcaaatgtgcagagagaagtcgattgtcaggctgatccttaaatggtaactcaaaagaatgtgctggacatttcagaggcttctgccaataaatgccactatcttgaggcaaatggggattttcgggcagcagtattataataatttgccaattatgcctgcttcagaaccagtgccaaaacaatccaacgacttttcattccactactgttgacaggacagctatggatttcaacatttccttttac

SEQ ID NO: 345431 - DNA, 1000 bp, Homo Sapiens; identical to SEQ ID NO: 161171

SEQ ID NO: 345432 - DNA, 1000 bp, Homo Sapiens
tacatttggaaaaataaaactttattaaatcaaatgaatgagtatgtctgtttcctaagaaagacaatgataaagaatttggtggaaggtataataggggtttgttgactttgcttttagcctcatggtagttggtagagagcatgattagcttttttctgtatgtgactgcttcttcattgctgcagcttcagttttgaattgatgtctggactgccagcggcgtccattattccagacgcggccaaaagagggcagccagcctgcactggtcctggagctgtgatcaaagttggccccaactcggtctggggggagttttttcaacttctgtttttccttttctttaagaaattcttcataggatggtcctatttcttggttcccagcaatgtattcttcatcttggatcatccagggaggtgtggcacctgagtggatgttaccaactcctggtatatcctgatggccaatgaatgtcagagatggtcctgtctccatccagtcaagctctggagctggtggcaggtccaaatttgagggctgctgtaagctggaagctacttggctgttcatccctttccagcttctaggtgctgaagagccctcttctgggtctggcactgcctgaggctctaagacagaccgaaccacctcctgtcggctctgctccacctcacggatctgagctgccatctccttgatcactttatcctccttttcttcataggaatccaaacctttcaccatggatttcttgaatcgcgcataatcctggggagtgaccagaaacttctctttcatctggacctcagctttgttctcccaccagaatttgttggttgctttcttgtgctctgggctggccagatgctccagcagccccccgtacagcaccgtcaggtttccatggctcaggtgttcccgcacctcacagccgcagcacaggcaccagcagcatcgctcgtgttcgggcacatagcgctccacctgagcggcg

SEQ ID NO: 345433 - DNA, 1000 bp, Homo Sapiens; identical to SEQ ID NO: 161173

SEQ ID NO: 345434 - DNA, 1000 bp, Homo Sapiens
gagagtcacagggcatttattgaacacctactatatgccaggcacagcgatcccccagagcaacctgtgaagtgagtgatattggccctgttgtacagatgaggaaactgaggctcagaggacacgtggcttgcctgagggcacacagcagagcccacctgaggatccaaggccagctaagttcttctgactgttgtgggcagttctctcttatggggtccctgccccagtgccctgaggtcctccacgggggcctcctccatggagttgtcctcactctcctccccttcttttcctgggctccatatggtgctctgagcactctaaataataataataataaaacgacagcaacatcagtaatgataatggcagcaacaagtctcaagtgtttgttgcgcaacaggccgggttttctgtgcttcgtatagatctgttcatctgatactcagcacagccctacacggaggttactgttctaagccactctgcaggcgaggactctaaggcacagagaggctaggagactttcccaaggtcacaccgccaggagcagtgggctcggaccaagaaatagatagcataaagaaaaacaatcaaaacttcaggaaacattggatacactcacagaaatgcaaaatgctctggaaagtctcagcaacagaattgaacaagtagaagaaggaaattcagagcttgaagacaaggtctttgaattaacacaatccaacaaagacaaagaaaaaagaatcagaaaataagaacaaagcctccaggcagtctgggattattttaaacggcttgggattgcacttaccctacgtcgttagagagaatgtcctggaagcatgagatgcccaccctgcccacacacacagtgggctggctgccccttaactacccactcacagagactaaacctgccatgattggcatgaggatgttcagggtcttcatttgccctactcagctggacctgcagagttccctggctggcgag

SEQ ID NO: 345435 - DNA, 1000 bp, Homo Sapiens
ttttttcatttctcaaatatttattgatgcttcctcaggctgcaaaaacagcttccagtttggtggaaaatgcgagaaaaccaaacagctccagtcctcagtcacctaaccttggttagggagagaagtggaggcatatcacggggacgcaggagcagggattttggagctagtggaggttaggttgggtctgcgtgagtggagttaggatgaggtcggcatggaggtcccagagcccaggcactgggctggacagggctatgttgggccaagtgtttctgagactcagcagcggtggatgaggaagaaaaaaactctttggcaatcagctccaggagccagggaggtgagcagcccccaggatacgacatgctgcaatgggcgcggctccagggcactgggcggggtcagcagttgtgccttttctcacagatccagccgtccttctcgctgtcacacggtgcgtcgttccacagccccgtgtgcagcatcatgacacagttctcgcgcccccaagcgtcattgggctctccctggttccagtggctgaagctgagagagactccgtccacccactggtagccctgaaccttgcccagatggcgcacagccctcaggcccagccagtaaccacggccacgcgtgttccgagtgaggaagccctgctcatccaggcccccaacgatcaccaggtgcgcgctggcatctgcgcagtgatcctgcgccgccgcccacgtcgtctttggcacagagaaaaagtagcaggagccctcgaaggacagccacgacgtggggcacggctcgcaggagttgttctggagcctcacggcctccagcgcccggaacagctcagtgcggacgtcctcacggcccctgccggcttcagccaagccctgggtcacgcgctcacgcagttcccgcagggcgctctcctgctccatcagcttcgcctgcgcctccccaagctccgcgcgcgtggtctgcagctgcgcctgcgtcc

SEQ ID NO: 345436 - DNA, 1000 bp, Homo Sapiens
gagatggagtctcactctgtcacccaggctggaatgcagtggtgcgatctcggctcactgcaacctccacctcccgggcccaggtgattctcctgcctcagcctcccaagtcactgggattacaggcacgtgccaccacatacagctaaatttttgtatttttagtagagacagggtttcaccatgttggccaggcttgtctcaaaccgctgacctcaggtgatccgcctgccttggcctcccaaagttcttggattacaggtgtgagccagcacccagcctgcaaatgtttattttttcaattacccaagcatggtgggaggatcacttgagtgcaggagttacaggttacagtgagctatgatcatgataactccactgcattccagcctgggcaggagaggcagaccctgtcaagaaggttgcgggggtggagagagagagagagataagagagggagaagaaggagttggagagggaagaggaggaggagagagaagaggagggggaggggaggggagaggaagggaggggaggggagaggaagggaggggaggggagaggaagggagaggaagggaggggaagggaggggaagggaggggaagggagaggaagggagaggaaggagaaggggaagggaagggaaaagggagaagggagaaggagggtaaaaaaaaaaaggagcaaacacaggtcttctttgtactgctccataaacacccactgggtcggccaaaaaggtggctgaaagttattgcagtgttcttttgctttaaaaaattgaaactgaattgctcatacattaaaaggataaaaaactaaaaactttgggagacatttaaaacagggttatctcaaaaccatggttaaataaatgtcaactgacaaagtattactgaattacccattccttttccttctccccataagggaaaactagctttcagaacaggacaaagaagagaaagccataagaacgaacaataagtgcttttta

SEQ ID NO: 345437 - DNA, 1000 bp, Homo Sapiens
gaaagtttaagagaggtgatattaaatcaagttcatgaagggtaatagattatcttcatatggaactgaagtgcttcagtaacttaagtaacatgattatctttttttttttttttttaactgaccactgtccgctagtttttgtacaactactaaacaggtgagtttcttggtgtatgctcatttctctttaggcagttacattcgatttgatcttggaaagttgctcccaaaaattcttctcttatcttggttgctctggtatatttgtgcagtaggagatgcaatattctgatgtgataaaagagatggagagatacttatccctctgagttgccgaaaagctatttctgcatggatgctccgaggattatttgtcagaatcccagcattcttgttttttttgtcttcaacttcaggagttaaagtgacgtcagatcccaagtaatggctgaatccactaggcagaagtacatttgttatctctatgggaggagttttcacttggccaaatgatctgccatccataggagagtgggtaacaggaataagcgaatttttctttgcttgtagttcagcgaggtgaaattcagcttttgccctatcatctgaattcacaggacttccatctaacatctgtaagttaggcagtcgaaatataagcatgtggcgatgtagcatttttctacaaattcactggattgccatacactgtaagctccctgagagtagagataacgtcaagtttttccagttctgtgatatcctggattttattatatcctaggaagagtttctctagttttaccaaagattgtaatttgcccagttctcgtagtctgttttcctccaagtgaagtgccaataaagaacttggtttggcaaaagcactgtcattaaatgatcggatgcggttatggtccactaccaattcttgaaggactactaagttgtcaagcccttcaacttggctgatttcattaccctgtagaaagaggaa

SEQ ID NO: 345438 - DNA, 1000 bp, Homo Sapiens
caaaattcaacacatcttttttatgtataaatgggtcagtggtacagagggagttactttttataaatatctgcagcaaatcccctaaaaaagatgtgaataaaaactctctctcagcacaaagggcctattccttccccaaaagtgttaaattcccgagagcctgtgcttagccaaacacttgtgaggcctcctgggaagaacaggaggactttgggaccgagaggagagccttcccatctccccggagagcggaggtgacttgaaggtcatctgttgcccaggacttgggagtgattaaactgtttcttcccaagacttgaggtcttctttgtcaagctgctgattaagcggtctctctgtttcctggcagtggcccagagggagggaggagaggaacctacaatcgcgtgaggaagtaaaaaactctgggtattttgataaaaaaaaacacttggtaatcactgtaaccctgtaaagccgatgtatcgaattcaccagagggaaaattgtagattagcattctggaagctataaacacaagcatttctttaggaagatcattacttagcaccaatgtctctctctctctcataatttttccttttcctccaagcccttggctgtgatcagtgctgtcggaccacagctcagcagtacttttaatcagtaacacagctgggctcgaaggggagtgccgtcacatgccacagaacaaacagcgcgctcacaccaaacggcaaggctcctgggggcatcctggctggggaatcgcaagcggacccccggcctcttcctggggctgctctttggcaatccaggctcaggggctttactcgaagcgacgcaggtggttgtacagcgactggacgtaggtgaagacacacatggggtccggcttgcggcccatcaccatcatgtcctccacttcgatgaggcgctcacagttggccagattctcggccatggtgaaagccagctcgaagttcttctgcctctg

SEQ ID NO: 345439 - DNA, 1000 bp, Homo Sapiens
catcattagaaataattttattatttattttaaagcagttcaatgtaactggtagcaaaatggtacagacaataaacagaatcaattcccattgggctacaaggactattattgactttatattttattttcatgtgcaagtataattattttaaaaaggcaacatttcattaaaagtcttttataagcatgtttttattctttaaataacagaaagactaataaattatcattattgtagcaagctggtatgaactgtgtcaaatattaaatttggactaatgttcatagtcaaaaataattattttaaaatttatgaaacaaaatttttagttatataggaaatataatcatatcctagcttaaaatcctagtctcaacaactgtcataatgcaaaaataccaaacttcagatcttgtggggaaataaaagatttgtaaaatcttacatttattcctaaaaataatgaagtaaaaaaagtcaacttaaagaaacatcatacttgactcttgatatgcaaatataaaacaagttcataaaatttattgtttttctctgttacatatattagttccattctgccttcagtttttaacaatttatatgtgaatgtgtgtgtcaaatatatttcacgtttataacatatacacatatatgcatacaatctttaagttttaaggcatgctcccaattttagctaacctgttataaattctacttctctgatcaaagtagattaaatacagggtctctgttttaggggtaattcttggtgttcttgttattctaaaatgtgaataatgtaaaataccaaaaagaaaaaaagacatttcatagcctccaagccaaattatacaatgactataatctttgatttcacattgcactttacagttttatttctgtagaattattgagagtacattagaatatcttttctttaaaaattttattatcctttaagttgatctgcttcattatgaaaagaaaggaaaaaaa

SEQ ID NO: 345440 - DNA, 1000 bp, Homo Sapiens
ggactttgcttcaaaaggcacatttattccagtggcaatttaaataagtagagaaggaaaaaaaaagattaaaaacaaaacaaactaacaaaaaccaggatgggttttgtggaatacattaaagtaaacaaaaatctggggtctatacaaaccactcgagctcctcaccaatagtttaaccagagtccctaaggtagaattcacagttgtatcatgacacacgccttcagaaaacactgtttaagaaagtaattgagaactctcaagcagcttcccctgatgtccagttcaagtgtatgcaatgcagaaggctgtgaaattcaaaactatgtgacaaagaaaattcagtgcgtaccacaggctttgataaattatgaaaaatcaatgtatatattactatttaaataacatctgaaaaacattttgaaataattaacttgtgttcacattccatgcattttctagcaggttaagccctgggtttgcgtctttgtgcctgtttcctacaaagctccattcttttgacaaatccaagcattcctcagactgaaacagaagttcccaaggattctatttaccctctttactgtgtacctgacctcacaggggctactccttattaccaatggcacagatgattggaaaagcaaactctttggggctttatttgggattttactcactgcctttgagaaatccctggatgtcaaagacatcacctgaattttttccaggggcaagaacaagtgactatctccctcccgcttgaccacccctgccaacctccctacttcaaagcctccagtgggttgggatccctttgtagcagtgaactttttccctatggttttgcagcaccttccttgagcaaagaagaaaacacaatgaaatttgaaaacaaaccaacaatagcaacaacagaaactccaaacagatgggcgaaccagtagtctcctccaaggcggaggctcactttttactgcagaattcggagctgttt

SEQ ID NO: 345441 - DNA, 1000 bp, Homo Sapiens
aatgctcaagtagtttattccagcagtgctcttacaagacagaaagcaggagctggctggtgtcataggccggatatagtcagaggtcagatgaccaactgactaggagagcttctatttgaggaccgttctcagagtttgggagatctttcccatttcttatacatgtattcagtctgggtcaattaccaagtgtttctttcatagagcaagtttaatctagtaaggttaggctttgttctaaaatttatgaaagttgcatctgtgctgaggtggccttgtcttctggaaatccctaggccaggttgcatcctgctaagtgacatgtaatatcaccactgtgagatgcttgagtgggccttatcgctatcgttaatcttaaagccatgagatgtttcttgtggtatactacagttattaaaatattctctttctaaaaaaactaaattttatttgtgaactcctttcctatgtatttaagttccccgatgtttttaacctaggaaaagaatctaaccaaatgaatccactgaagcttcccttttaaagtcctaaaatatcctttggggttgtaaaacagactttcaaagggcagtaagtaatttcaaaagctttctctttatcaagagaatcaaaagacaatatggcaaaagacaaacagcttggctcgtgatgctttggctacttgtatatcttctgacagagcagaagaaagaaagaatgaaggaaggaaagggagggaagacaaggaaggaagaaagaagggagaacataagagcaaacagcaaaatattaaaagattgatttaaagttatttttaaatatccatataatctgtcagccgatgtgtttaaatgcaacagttaccatttttaaagaaatggtctatttgtcataatcctctttgtatacttacttttgctaatacctatatttctaaagaaaagcaaaaatttttcttacaagaaatatgaacacaactctatagtatcacaatgca

SEQ ID NO: 345442 - DNA, 1000 bp, Homo Sapiens; identical to SEQ ID NO: 161174

SEQ ID NO: 345443 - DNA, 1000 bp, Homo Sapiens
gcatttcaaaatcattttgtcctactttattgcaatgagtgcaaacacacacagtcataaaatacacaaagatagttgttacctttctttggtcagattctttgagaatgttatgaatgctagagatccttgtcccctcaaaatgagcacacacacacacaaacaaactggtccatacacatacacacaccaacatacttgtaggtttgctttttaggcaacagagcattccctaactcgttccaaagtctatgattcaagttaagaattactgaaataaagaataagtatttggatttacatgggaatagatatggaatacacaccatacacacacacacacacacacacacacacataatatatccaaatatttaatgactatttaaataagtcttatacagtacacaatttcctactcaatctgatatatgcaattgccactgacaaaattctaggaaaaggatcaacttatgctctgcataatgaagtgacagatgctcctacagtgttctgcaaaccactatttacttgaagcagtttcacaacttctatgtgtttacagcagggttgaatttgatatgacaacttggctcaatgagtattacagccaatttctagtggaccctgtatcttggaaggtaaggtaaccaaccacagaattcactcatctcttcatttaatagtataaaatggagcaaaattatttccacaatcactggtgacttcctcagcctgtctgcctgtcccaaacaaaggcagaaatgacacgtctttgtagtggttcccctgatctttgaaattagtgatatttaccaagagcatattttatagttcagctaatagctccatcaagattatgtacataaaggcatttttaaaattactaacaatagacaatacacagttcacacttcctatggagaaaaacactttacagcaacacttgctatagtataagtttactagcttataaattttgctattctaattgagcttt

SEQ ID NO: 345444 - DNA, 1000 bp, Homo Sapiens; identical to SEQ ID NO: 342423

SEQ ID NO: 345445 - DNA, 1000 bp, Homo Sapiens
aaggagcatagctttattttaatatcagttgtctgaactgagcaatgggcatcttggtatccagaggcagaactgaagttttctttccttaaattacagtgatagtcaggatgggagacagtaggtggtggcaatgggttgctagctagctggctggctaaaatacatacctgagctctactggagctatgcaaccttgctgtgtatccgttatttgtaaaggctgactgaacaaaattgccttcatcatacaagcactgctgtctgcactacagtaataaagaaacacactgacagatacaatggcttcaagtgataagcaatcatcaggaatttgtagtgaaattgttggttgactggaaatgttctctatatctccagctgctatctgtccttgaagtagccattcattgccttcagctgttagaaaccagcaactggatactccttcagttagctttgatcccgatgggaggtctaatctgagtttgaactgaagagtctggccagcacacgcagtcacgggggaaagcctaatgcttggagcagatttaggtagtttgggtaatgtcttctgtttttctactaggaacgggccatctaccacagcattttcagatctgaagatggggagcacagataccattttagtttctaaatccatcactttaatttgatgattattggtgtctgctacatataataattctccattctctccaatacacaagcctcctggttcattaaaagttgactctgtaaaactggaactggtaacattatttgtgtctccagttcctgctaatgttgtacagttttttgtttttggatccacaactttaatcttgtgattgtaggagtctgcaacataaagtaaattcctttttttgtcccatgttactccaagggggtgttgaagctttgcattgattcctactccatcaacatcaccaaaagcaaataaattcatggggtctctttctcctcctacgaggtgctt

SEQ ID NO: 345446 - DNA, 1000 bp, Homo Sapiens
ttttttttttttttttttttttttttttttttttttttttttttttaatttataaagaacacaagtttaattgtcccacggttctgcaggctgtacaggaagcatagtgacttctgcttctagggaggcctcaggaagtttccaatcatgactgaaggcaaagggggagtgagacatctcatacggtggcagcaggagcaaagtggagaagtgctatacactagtaaacaactagctctcaggagaactcaaggacagtaccaagaagaatggtgctaagctattcatgagaaacccacccccatgacccaatcacctcctatcaggacccacctccaacagtggggatcacaattcaacatgagatttgggcatggacacagatccaaaccatattatatagattagaaagaataggacagcttgaggttcaggggcatataagaagcctgggaacacggtatctacttcttctccttttccttcttttagaaacaaaatcaaaccacagaagaactcttaaagtttgagtaacaagacaaaaattatcttaaagggctaacacatcaattctagataataacaatttgaatattttaaaccccatatttcccacaaggatccgttgtaacgggtaccattcatatatctatcacaaagatttgattctcagatattctgatcaaatctcagatggctgatcaattctctgtaagttatttgctttcctgaagatctttctgtgccaatgtcaactccaaaaattctatttctgtttggagagcttcataaacactttccatgtcatcttccttataaagttctaattcttttttaagtcttaagcattctgtatcattttgaggcttttcactgatttttattttttctgcctctagatatttggtagtacaaatggattcattctcttcatcttcaaaaactttaagttttctttggagagtaaataattcttgtatcaattcactcttttgttttt

SEQ ID NO: 345447 - DNA, 1000 bp, Homo Sapiens
ttttttttttttttttttacaacgaaaaaaatagtgtattcaggttaagtaagccagcacagtagtgtcaccagaatatctgtatcagctgttaagcaacaataacaaataacagtaggctttcagtttccaagtatgatgctgttttgactaaaaggttactgtacactgtattttattttatttttaggtgagaagaagcatcagaagcagttgagggaccaagaagtgggtcctgtagagaggaagaagcattcctctggatggcttttttaaatgtttctttcagagtcatctgcctcattaatgatgctttttgtcttagaagtctctctttgattttataaactgacatgatttcttgctctgttatgaatgcatgctgctctagtcctttaataagcccatcacacatttttaccatgtcgtctataggcactttttctgcagtgttaacatcatcttcattatcattatcatcatgatcatcttgattcagaaccatttttgttacttcaccattggacaatgaatgaacaactggagcctcattattactgttaaaaacatctttgatatcctcttcttccagcttactgacagtctctggatgtatattttttgtatatgtaaggaggtcagacattatttttttctcacttgacatactgaatccttcaaagttaccatcttgttcatcatcattactgaacttgccagtaaacttctctgttgcttcatgaccagcagatgctttattgccacaagtctttaaaaatttaatgccatgtcttttcttaaatttctgcaaccagcctgttgaatattcacagttcccctcaatttttagttcattgtgatatatctttgcttgtttcatgatcagcataccattaagtggcatgtgttcactgcgacgctgacggatccactctttcaatacacgatcaagatcttcatttttagctttatgaagtgtttttctatttttcattaatat

SEQ ID NO: 345448 - DNA, 1000 bp, Homo Sapiens; identical to SEQ ID NO: 161175

SEQ ID NO: 345449 - DNA, 1000 bp, Homo Sapiens; identical to SEQ ID NO: 161176

SEQ ID NO: 345450 - DNA, 1000 bp, Homo Sapiens
aaaatacgttgctctttccgggaagctgctgactcgtggctatccccgtcgcaaggtggacactgaggaatgagaaatgactgcggtccccctccccgacaggtggtcctgggcctcccccaaggacagcccttcttggtcccctgtgatgccctcactccgccctgccctgccccatgcttctggttttgttagtgtgtgcctgacgcggggcctgtcctggctttgttcctagtggggccccctggtgaggcactccagctagggtcgaagtggacgacatgtgttgcaatccactgtagggacactcacttccagaaagggatgtaggacaggggtcttctgggggctgggtgccccccagctgtcctgcaggccagggccagggccacgtgcacacctggcttgaggagcgcatgggagaccccgggaggtagaaggcagagtgccctgcctggcggtccgtcgacagggcggggaagggggcctggacaaggtagaggtgggcagtactggccagaggggagctcagacatccttagaggcaggagttggccgtgaaaaagacatggctcaagtggtctcttcttccagtgtcaggacccctgaagagctctgctgggcctggagagaccccgagggccggtgcccttgtgacctgtccccagtggccccacttctcccactccccacggaagcaggccagggagacccagatctgggcctcgcgtgctctccttcccttgctgggatgcctgggcctgtgctggctcacagccggggccagtagtacagtctccatttggtctaaaggtccctagtggtgcaaatgactcggggagggagggctcagaacagtggggcagtagcttgtttctcggctgcaggaggtgcagcctgcagcccatgggtctcacccccatgccctcgcccccggcccccgttaggggtggcccagcttgcgctatagcacattgtagtaggccatctctttcatggc

SEQ ID NO: 345451 - DNA, 1000 bp, Homo Sapiens
ccatttcttaaaaatctttattatttggtattcttttggtttatctttattatttcgtattctatttggtattcttgttttctaaatcctcagctgttactttgaaccttataagaatgaaaaataactacccaatcaaccataacagttccacagcagatacaaagctcaaactgaaaggaagctttcaaatatattctataacatacttaaatacacttggctatggctaccttagctgggtattttttggctaaatttcttcttaggtagcacttttgggtttagaaagtgctgagataaatattagcagcagaagacatttataggtacccctttccaatggaaaatattttatagttaacaaacaaaactgataacaaacaaaggatcctaaatacagtatcaattccattatcatccattatcacttctcttgcaaaccttcccctggcatttttgcatacatataattgtcagtcttggagggcaacggaggtgtaataccactatttagttgtttggttatcttcatgagagctgaacagatgtgtatccagtggtatagatgttcaatgacaacattaccaaatttccatacttcagttcgggaatgatctctgatatattcatcaataagctgtacattaacttccacatgcttggcagttggatcaaaggcacaaatattgttgactaaatatttgttaacataaaatttacacttatcccaacttccaaagtcacttgaaaattccaactctggatgaaagaacaagataaccgccttcaggatgtcacgcactagtttcacgttggcttccaactccatagatttgctgtcttgaggagaatttggctctgttacaagagtatggtcatagagcaacagtgacacaaattccatggaattgagtagttggatgctttcctgtagctcgagcagcatgattcggaagaagagaattcctgcccgctggacttccctgacattttcaat

SEQ ID NO: 345452 - DNA, 1000 bp, Homo Sapiens
aaggagctagcgatggcccagagtgggcacctttatttgtttagagaaagtgaaactgtagccgggcgcggtggctcacgcctgtaatcccagcactttgggaggccgaggcggacggatcacgaggtcaggagatggagaccatcctggctaacacggagaaaccccgtctctactaaaaatacaaaaaattagccgggcgtggtggcgggcgcctgtagtcccagctactcgggaggctgaggcaggagaatggcgtgaacccgggaggcggagcttgcagtaagccgagatcgtctcaaaaaaaaaaaaaaaaaaaaaaagaaaaagaaagtggaactggaacagtatggcagagggaacagcctacacaaatgcttgggggcgcgaaagaagttggtgtgtcacggaggaacagggagggaggcagggtgggcgcagagggattgaggggaggtggcagggaaccgcggggactgttttagggaaggtgagtccagaccccgctgagatgagctgggtgtctaaggtcccagggagccttcccttcccgtgacaccaccaagcaattctccaccagggacaggggcattcacatgcccaaaatcactggccatcttcagcacaagggggtgctccagagccaggaatgcctctggtcccggcattggcctctcatggagacaatgacagaacccacgcggaagagcgccctggctgctggggaaggcagaacacagagagacattgatcagcggggttgtccacacctggaagtggcgtgggggccctggcttcagagagctgctgcccaacacaggaggcgctggccagcccccagccctggaggggcagctgcattcctgggaagcccttgacccacatccccagcacgggaggggaggctctggagtggggcattgctctctctgctgcgctcctggactctgcaggaagagggtgtcttggctatcatggagacgctgacctcagccccagc

SEQ ID NO: 345453 - DNA, 1000 bp, Homo Sapiens
tttttttttttttttttttcatattgtcattgtgtataattagcttttaagatttattttatatgctaccagtctttttaaggtataaaaactacaagcaaagctaaagtctccttttaatcaacagcctcaaattcaatctccagagacaatgctatcaataattgggtgtgtatccttctattctattttaaatagttttacatacaattttcaataatagaaacagttgttctttataaatgatttcattccaatttacataaatattattacacaatgtttcatttgtattttgatttttttcattcaacattgttttaactatccatgttacacaatatggatctggttcactgcttttaagtgctgtatactattctatcatttgaatatatcatattttattcatccattaccccactgatgaatatttaggttgttttcaatgcagatatatgtctatatatttctttttttttaagagatggggtcttgctatgtttcccaggctggtcttgaactcctgacctcaagttatcttcttctatcagcctcccaagtagctgggattacaggcatgtgccactgcatctggctatacatacatacatatattatatatatatttcttatgcattatttgtgagtttctataggatgtatatatacctagaagtggaattacagagtccttttgtcttgaaaaaaaaaaaaaaagctccttggcctcaacgtcatagacaatatcatctattttctcccaatggtttcacagtttggcttttcaaattccagtatttaaatcctttagaatgttaattttttggccaggtgcagtggctcaagcctgtaaaccccagcactttgggaggccaaagagggcgatcacttttgaagtcaggagttcaagactaccctggccaacatggtgaaaccccgtctctactaaaaatacaaaaaacaaaacaaaacaaaacaaaaaaacccggaaagcaga

SEQ ID NO: 345454 - DNA, 1000 bp, Homo Sapiens
tttttttttttttttttttttgagacgaagtctcactctgtcacccaagctggagtgcagtggcgtgatctcggctcaatgcaacctccgcctcccgggttcaagcaaatctcctgcctcagccccccaagtagctgggactacagttgcctgccaccacgccgggctaattttttttttttttttttttagacagagtctcactctgtcacccagtctggagtgcagtggcgtgatctcagctcaccgcaaactctgcctcctaggttcatgccattcttctgcctcagcctcctgagtagctgggactacaggcgcccaccaccatgcccagtaaatttttgtatttttagtagagatgtggtttcattgtgttaaccaggatggtttcgatgtcctgaccttgtgatccgcccgcttcagcctcccaaagtggtgagaataacaggtgtcagccaccacgcctggctgtttctgctttaagtcaggtcatattgattcagcgacagtctaaggcctttctccagtctaaactttctggtgttgaatacggttaggcctttggctgaggccttttaccatattcactacattgtccactctgtgaactgtccagtgttgaatgagtttggaggtatagctaatggatttccattagtaaccttcaagacttttttacactgtgaactttctggtgttgaatgaggttgaaacaccagctaaaggatttctcacaatcattgtatttctccagtgtgaatccttcgatgtttaacaagactggagctgtggcgaaaaaatttcccacattccctgcactcataaggctttgctccagtgtgaaccctctgatgtttaacaaggctggaattctcactaaagaatctcccacattcattgcacttaaaaggtttttctccagtgtgaacttttcgatgttgcatgaggcttgagctttggctaaaaaatttcccacattcactgcactcataaggccttt

SEQ ID NO: 345455 - DNA, 1000 bp, Homo Sapiens
ggctttttaaccatcgtctctttatttacagctcaagagcacatgcaacatgacatcatgaaactacaagggcgtggcacttccccctccccctgccgctccccaactttaaaaaggaagtacagcaccctaggaagttgcctaagagtcagaaaaccctacactgagggtcccaggccgaggtgctccattcattgcctccaaaaataaagaccagttgcagcccaggaggcttgggcctcagagcctgggagtttgtcattgctggtaattagctacgcaaaacaggtctcggatttgccagctcacacctgaatacaaatagcccgaattatccgaatgtccctgaccaccccacatttctgttttccccgtcgtatcctagacctgtgattctcaaatttgatcgtgcccaagaatgacctggagaacttgtgaaaagccaaatggctgggccccacccccagagattctggctcagtaggcgtggggtggtggggcccaagaatctgcatttctttttgttttttttgtctttttttgagacaaggtctcgctgtattgcctaagctggagtgcagtggtgcgatcatggctcactgcagcctcaacctcttgggctcaagcgatcctcccacctcagcctggagaatagctgggactacaggtgtgcaccaccatgcccggctaattttgttattttttgcagagatgaggtctccctatgttgcctaggctaagattctgcatttctaccaagctcccaggtgctgttactggcccgggaccgtaatcttgagtgtctaaggtctagaaagcctcttgcacccagaagtgacccagccatggatcctgtatcagactgcttgttctgacttagaattcagaaaatacactccctgcaatataaacccctggttctgcaaaccgcccttcccaggaaaggcaaccgtccctgctaacctcctccccaggaaacacacacagtcaccattgcctg

SEQ ID NO: 345456 - DNA, 1000 bp, Homo Sapiens
tgaagttattggtgtttattagctcaccaggccacaaaagcaaatcccagcagcagctcctgcctggtggcccatctgtctacaggccttgagcagctgcctagagtcaggcctccagagggtcagtgggttcgagctggcacagagctgagccactttctgctgtcagagttgtgttccctgtttccttgagatcctgactggaagaaggggctgcggatgtcaggatccaggccagggggtgtgcactggtctagtgcatagtggttgctcggctgcctacggaccatcttcttgtccagctgtgggcagagcaggatgcagggcacctgggcataggggctctgcaggttgggagcatagttctgctgcttcagccggctcaggatactgaggacctttcgttctggaacttctgagctctcttcttgctgggggttgtagggaagcttctgcaaccgcagccggcctacggccgcttccatctcctgggccttgcaggtgccttccttcagctttttctggtagtagtttgtgatttcctctaagactgcctctggtaaggccagcatctctaccagcagggacaggatctcaaagagtagagtgtgggggttgtggggagccatgtccgacagggcgttctgttccacagagcagaagaagcgcctggtgtctgtcatcacagccaagaagtctttgaagtccacacgaccatctccattgacatcagcactcatcagggcgtcctccacctgggccagcgtcacagagaagcccattaggagcaggatattcttcaggctctgtgcatccacctcaccaggaccattgaagatctcaaagtagctgcggaaggcttcctcttgcttcagggtcagttgctcctcggacttctcccggttttgataaagcttttggaggctctgctcttccggctcctgccgcgccttggcgtagctcagggttctctcgctgctctggtgcaagagttccatcc

SEQ ID NO: 345457 - DNA, 1000 bp, Homo Sapiens
tttttttttttttttttttgagaggtaagccacatgacatttatagggagcatggctggaactcaaccaccctgaggagggtttggggctcagggacgtcacttcttcaaggacatcttccaggagcccagtgcctgcatgatccaggagcgccgctggtgggaagtgggcaggttctcacagctggggctccagcggtgggtggtggctgagtaacacacccatgagttcccgtgcggcagccaggagttctgccagcagctggccaggatgtggtcctggacctgggctgcgtagatgcacactgatgcttctgggtcatgtctcaagttatccagagcagctttcacttcattcagacgatcttctgtcattatgctctccatgcaggggaccagggaccctatgaacatgactgagcacttccggagggaggcccgtgagttcttggcatactccaggctctggctgaggaatatgaaggcgctgtctcggtgggtgttcacaaggcacttgcaaattttggccactgtctgctgttggttgtcccagggcttccggctataagctctttttggcaactcccaagccatgaagtaagaacagcgtaacagggtcttcacacacttctggcttaccttggagttgccctcctgcatggtcagcagtaggggcaccaaggtgctgaccagctgctcctccatggcctgagtgcgtggtgcccgaagcttctggaccaccttcccatacaggttgatgcaggaggagcgcacgacctctcgtgcgtcgctgaagtgcggcagcaggatctgcagcatctccacatagaccgcactgtccatcagcttctggtcccgccccttgaagacagccttgaggttgtggaccgcttccaccaccagcatcccatccatgttcttcaggcccttcaccatggagggcaggagggccttcaccttggcggtcttctcagacctgcgggccaggatgaccaggcctc

SEQ ID NO: 345458 - DNA, 1000 bp, Homo Sapiens
ttttttttttttttttttctttttttttttttgggacagagttttactcttgttgcccaggctggagtgcaatggcacgatctcggctaactgcaacctccgcctcccgggttcaagcgattctcctgcctcagcctctcgagtagctgggattacaggcatgcgccaccatgcctggctaatttttgtatttttagtagagatggggtttcaccatgttggttaggctggtctcaaactcctgacctcaggttatctgcccacttgggcctcccaaagtgctgggattacaggcgtgagccactgctcctggcctgttatatatgtcttaagtacccttctgcatgcagtcagaaatgttcttttcaagaggacatttcctttaaaaagttcaagtttcttatcttacgataaagagatatttcctatacttattgtcctaaaattctatttggtcactcttacctcttttgtgaaaggccacatcttgctaaagtagcagctactgaactgaccagaaacaaactcaaacactgaatttgacaaaccaacctgctgaatataagcaactttttctaagatgaaatgtaaaaaagaaaaagaaaaaacaaaaagcaacaccttctagaaagccattcatcttatctcataaaattaattccccagagttatctcatgtagtagcagcattatcaaatagtgcaattcttcaaaattgatttcaaataatatctttctaaaataaattacatttacttacagctttgcttataaaaccacagcttaaaacacttagccctcaaatgggtaaattactataagcaataactgtcttgtctacatggtaatgaaatgcacgtgcacgcacacatgtgtgtgtgaaggccaaagataccgcaacaaggtaaaaacatgtaatattaaataaaaagtaaacagtacataatggaatttttagttttggtacttctaatcatattcccgtcaataataagaacta

SEQ ID NO: 345459 - DNA, 1000 bp, Homo Sapiens
atactgattaatgtttcatttattgttgctcaaagttagataacagtaggttcaaatagccactggattcttaaaaatctttagtaaaacaaaatacatgggaataatattagtgattaatccatacaataagcagattcattaagttagcattactttgctttcatagaatatttttcttcttgttaagaaaatataaaaatgaaattttacattggttcttgtcaaaatccaattaatagccaaataattatttctaagtgcaacttatttctaagtgcaatcagcccttaacttaagggcttattgaaacaaagccactgtaaaagagcttttcaagaagttacaatataatgggaaaataaatcggcccatacattttgttgcaaaaagtgaacaaagctaatcaaatacaggagaaaaaaatccgaacaattatgaactactttttaaaaataaaaagcatgctttgtgattaggtgtctttattctttctcttatcaatataaaaagtatttgtttgttttagaaaataccatcaaatattcccaataaagacttcatttcatcagcttcatcatcaggatgatacatactgaaatcaacttcctttttacattcactgtttctaataaaaaaatccacttttttataatttgaagaatttgggtttttttcagagaaagtaaagcattgcttctcaatctctggtgacagattttgtggttttctttcttgaaaatggacaataactgcatttccagcttgttgaggtaattttgtcatggaggatgcactgaacttgggcatagcagaatttgataaagaaatatccgacatctcatgtgatgaaacaaaactgatatttttgtcttctcagtatcagttgaaaagctagtaacttctaagttttcatcatcaaaatcatcccaaacttcatttcccaattcaaagttcacattcaaaacttctttgtcttgatattcagatggttcttgtc

SEQ ID NO: 345460 - DNA, 1000 bp, Homo Sapiens
gtctgcacagatgagcttttcaggactgtatttgtaagttttactcctggctcttgcagaggctttatgccactcttttggaatcacacagtgtgaagtgaaagtgaagtagggcgagctggcatgcagcctggccttctctatttcttcaagttcttttatggaatgtcgttttcctgtctcacactgaagaccagttctcctctcttcatccacctcttgctgtctttgaaacagaggatcaacaaatggtgggactgtaaccttcacaatggaattttctttaaataatattgcacatactgcttcatcaatgtcttctctagctaataccagacgctgaagtatgcagaattgactggcaagcccagacctggcttctgccggggagctggggtggctgccttcacccgcccggctgcccgcccccgtcggtgcgccagcccccaggctggcgactggaaacactcttggccacactctcggccaaatctgagcccgaacattccccttcaacgcctgctttaaagcaggcactgtcacaatcctccattaaagaaacggactcgggctccggccattctcttaacttttctggcctgaaatgttcatcataactcgcagttttggtggcagccatggacaggagaatccctgtaagattgagggcgacaacgtaagaggaatggttttaagtgacgcgtccggctccgaagggtgaaggtgccacaggtggacctggtttggattctgatgtgaagaaaccgacttcaaaacatttgggccaatcaggaaaatgcgaaaactctgactgagcatttgtccctttacttgatgttccctggcaatgtcgccttttttacatggtgaaaataactgttaaggatttgaaagattctcctttcaataggtagtgcttcactgagtcttcacctaggctcttgctgcaggctctgtgtctctttctacataccacaactaagtcagttaatctcatagt

SEQ ID NO: 345461 - DNA, 1000 bp, Homo Sapiens
ttttttcctctggctatattcaaaacagaatctttctcatcacttgtagccttcaagcctggtggtttctcagaagacactgtcctagatttttctccatccttgttttctctggctatacccaaaacagaatcttcctcgtcacttgtacccttcaaggctggtggtttctgagaagacactttcctagatatttctccatcctttttttctctggttatattcgaaaaagaatccttctcatcacttgtggcctccaaggatggttttttccgagaagacacttcaagcctggtggtttctcagaagacacttcaaggttggtggtttctgagaagacactttcctagatatttctccatccttttttcctctggttatattcgaaaaagaatccttctcatcacttgtagccttcgaggctggttttttccgagaagacactgtcctagatttttctccatccttgttttctctggctatactcaaaacagaaccttcctcgtcacttgtagccgtcaaggctggtggtttctgagaagacactgtcccagatttttctccatcctttatttctgtggctatgttcgaaacagaatctttctcatcagttgtagccttcaaggctggttgtttctgagaagacactgtcccagatttttctccatcctttatttctgtggctatattcgaaacagagtcttcctcgtcagttgtagccttcaaggctggttgtttctgagaagacactgtcccacactgtagtccatcctttatttctgtagctatattcaaagcagaatctgtcttgtcacttgtagcctttgaggctggctgtttctgagaagacactgttccagatttcccaccacccattattcttgtggcaatattcaaaagagaaactttctttttaaatataaccttccgggccgattgtttctgaggagacactgtcccagattgttgtcccttctttatttctgtggctatgtttgaa

SEQ ID NO: 345462 - DNA, 1000 bp, Homo Sapiens; identical to SEQ ID NO: 161178

SEQ ID NO: 345463 - DNA, 1000 bp, Homo Sapiens; identical to SEQ ID NO: 161179

SEQ ID NO: 345464 - DNA, 1000 bp, Homo Sapiens
caaaacttcgaaatatttattattaagatataaatacatattttaaaaatgtacaagttaaaaataccttcaaagttaaatgtcagttctttcacaatcattgtgccggggtaatacgtacaatatcttggcttactagtaattttataccagtcacttgaaacaacatccttaaactttaataatatgttgtaataattccatttttcactttttagagtttgatagaagacagtcaatatcgtgaaggatttcagaggtttttttcaatgctattgatactctattttcattaacttctcctagcaaggtttctgaagatcctggtttataatgatcaaaagactgttgttcatttttcttgttagaaatctggtttaggataccactattttctagtagcaagttaaacttctgtatcttttcaagttcagaagcaacagaccaattttcttggagaacagaagatgacgaatgagtgggcatctctctgggactagtctgggtcagtctcctgcaccatgatgttactgttgtcacatatctttcatatggttcagggtgttcaatctgaattaactgctcttgtccatcaggaaaagttaacttacaccaacctaagttaagaccttgatttacctgtctcttctcaataggagagctgaaattccaatttagggttagagtaatgccatctaaaaagatagcatgtactttgtcatcagagtaggcaagaaatcttcccacactgggtatgagtgactctttcaaaaccaaaggcagtatattgctatcatttatcccaggtaccattttccagcagcatatacgatagttatggcttaaagaaagtctcatcttcacacaatgttgaagaattcttgttgcctgtttaattagagaaccgacagtgaatggacttcccggtctatctggaggaaggttatttactgagtaagttttctcttctctctttcctgatccttcttgaatagaataa

SEQ ID NO: 345465 - DNA, 1000 bp, Homo Sapiens
ttttttttttttttttggaaaaccattgcctttttattgtctccttttaacatcaaatgttttataacacacttgatccttttgtttctaccccctattcattacagtcaaattaacaggcaatataataggtctaacagaatgcttgcatttcattagtgaaaaatgaacgtctctctcctgaaacaggttgtcggtaccttgaatgacataatattggtgtatagactaggttcagcagagggattttttccacatcttgaatgaaaatgttaaacatgtgatgcacagagtattaacctgtttcaaaaaagtatagataaataatttattaaaaaatatatataccttgtatatttaagccatatttgagaacaggctaggataggattatttaaaaaaagatatttactagagttagaaattacaacctactgattaaataatgcaggtttggtcctgtaagattttaaccacttttcatgcttttagagcttctgagcagttggagagagagttcaggaggtattcttggcattcagtgcttggcaggccctcaggagccgctccagcccttttgaaagggctctgcatcagggttcaagtccgcagcatagaagagcaggagcttcaacaagtgcactttgtcttggagttgggggacaagaggctcccccagcatctggatcaggcggctgcggaaggcctcaatctgcttctctacgtctaccactgtgatgtcatctccttgctggggtttgggcttaatccttttgattattaagtcctttcggtcgatcacggaactccttaagtgttctcttaaaacatgttgataactggacagcagaaactgcagacgctcaaccaattcgtcccaagtctgccactggcttttatctgactgacacttgagcagtgacgtagaattattcagaaagtagagggcctgggccagagacagaggcaggcgggtgggtgtctcacagctgtggaggaa

SEQ ID NO: 345466 - DNA, 1000 bp, Homo Sapiens
tttttttttttttttcgttgtgaaatacccttatttttattctgaagaaatgtacatatgttaaagtactaaatccaaagagaacatatctgtgaattgctaagaaaatatagaaaagtaaagaaagttctagtcttcaaaacaagtgataaacttttaaaacatttttgcaccactgtaacaacatagtacacattttactatctgtcctagagggagatatactagtaaattataggcgaactatgacttacagtatagtacatagtgaattcctgattatgaaaggttcaacaatatgaatatttacaaagtatttcaatgttcttttggttaaatagaagtcttaagtaattatcaagtgggcacattctttttctgtggcctccacttcctatcaatgtgttgccttctgggggacctgctttcctttctgactctagagtgaccctttcggatgtctgctggttcaggcttaagtgggatacctcccagtaatatttctacttgatttggagaccactgaaatgatagctttcctccctctcctctaatccacttatatccaaggatccctgaatcggcaagaggcctgggctctgtggccttttccctaggcgggaccttcctgttgaatgttcctctgtgtgtccccagctggctgctatcctatcccacagtttttccctgcagagattgagtaggacagggagtggggccttggctgccactttggaaagattgccagttccttcatttcagctcggaggccatcacatttgcctaaagtgtcactttttatattttccagttcattgtgcaccaattgtaatgagatagttagaaaaaacagaaaactgacacagggtttctttttttttttttttcctgaaaaatctaagctcttaaaagaatcctgttagatttcttcagactaatttgcaattacctattctaaaacaactaatgttatccacatactggagaaccctacaacaaa

SEQ ID NO: 345467 - DNA, 1000 bp, Homo Sapiens; identical to SEQ ID NO: 161180

SEQ ID NO: 345468 - DNA, 1000 bp, Homo Sapiens
aaagttttcagactttatttcacagcgattgacacagaaacatactagagttagtaacacggcacccagccccaccgccgcccgcttcatcgggtcctgctcctaggaggactgggctggggctgggggtggggatgggatgggggtggggaagggacgggacgttgcagtttaaggcatttctggcttcggagccatccctgccacctctgcacctgccccttgaccttggtcagacactggctggcccctggtcattctgagacaaggacgactttcactgacgctgtggggaggatttgcagtgaggcagccctcagccgctctcaggcgagatgggaaagatgagacccaccactccaggggtcaaataaaatcaacacatgaagaacacagccatggccaggcccagatacccaggcaggcggcagaggtcaaccccatcccacagtgagctcctctcgatagcccctcgcagggcctggggtgtggcagagggatacggtcacgtccagggtggctgggcagggccagctgagggtcaggacacccagatcggccctggtctggcctctgctcctcagcagcctggggctggcgcaggcagcacgggagcaacgcagagctgtgcccagcagtaacattgtttggaagtcacagtattggcgcaggaggccgaggcagggcccagagcacacacaggaaggagcagctcaaatgggggcttggaaaggccctgtggggtcacccggaggaagggccccatcagacctcagcagccccttcctctctgggacacgagtcccgcctgacggagcgagggtgattcaggagccggggctgcttcccggcggggacaccgtggggcaggcgcagtgcaaggcgggggctcagcaccttgaggcaggggtgtgtgtcctgaggctgccatccacgccgagccctccacgctgccacctcgcctgtccatccctcggcactaggtctgtctgcagcacgg

SEQ ID NO: 345469 - DNA, 1000 bp, Homo Sapiens; identical to SEQ ID NO: 161181

SEQ ID NO: 345470 - DNA, 1000 bp, Homo Sapiens; identical to SEQ ID NO: 161182

SEQ ID NO: 345471 - DNA, 1000 bp, Homo Sapiens
aaagcttttctcattttctttattgtggttgaatccaatttaaattaaaatatgaaatgcttaacaatcataaaatcagtatttgctgtggtaaacaaaagagatctacactagtatttacaactctttaatttgtttaaaaaggaggcaatataaccattttaacacatttaaaccttttgcctctagaagatatatcaattaacacacaatattcaaggaaatcagtgctgtatagatatttttggtctattaaggtgcaatttataatacagaaccaacacaatactgaagcagaaaccataagttacaaagtagtaactctcacagacagtaattagaacccctgtcctacatgcccctccacatatagcaacttacattcttccagaaaacaggttctttccctgactaggatacttcacaggtctttccaaactaaagaaacacttttccactcaacactggtttttaaaaaccattagaacttttggttttacaagttacaattaattagtattcctttaaaaagaaactattttcaaaagacaatgtattttacttgttatattaacttatagtgcatttaatttcaagcagagagataattaccaaagacagcaaataaaaaattttttaaatattcaattcattaaataattgctacagatcaatcttctaaaagccttaaactagacactgaggggaaaagaacattgaccaaagaattagcttcactcttcaggagctcatcttatgcaacagtatccaccactgttacacaatttactgatattcagttattctatcaacacggcagaataaattcaattattaaaatctacattcaagccaggtgtggtggctcacaactgtaattccagcaatttgagaggccgaggcaggcagatcacttgaggtcaggagtttgagaccagcctggccaacattgcaaaacccatctctactaaaaatacaaaaattagccgggtgtggtggc

SEQ ID NO: 345472 - DNA, 1000 bp, Homo Sapiens; identical to SEQ ID NO: 161183

SEQ ID NO: 345473 - DNA, 1000 bp, Homo Sapiens; identical to SEQ ID NO: 157817

SEQ ID NO: 345474 - DNA, 1000 bp, Homo Sapiens
ccaagaaatggccttttacaaaatgtcaaaggttcttcataccaactgctggtcattggctggggttttgaacactgtatgacaatacttaaactacaaaattttttttacaaatacagtttcatcaaaacttgggacatacatcaacttcatttcttttcagtaccttaaaaaaaaaacatcagttctgggacataacaaagaaatactaggagaaatggtatctggacaggaacagaaatgtccacaactgcgagggattttcttttacactggccacagagcgtttattgacaccaccactcctgaaaattgggatttcttattaggttcccctaaaagttcccatgttgattacatgtaaatagtcacatatatacaatgaaggcagtttcttcagaggcaaccagggtttatagtgctaggtaaatgtcatctcttttgtgctactgactcattgtcaaacgtctctgcactgttttcagcctctccacgttgcctctgtcctgcttcttagttccttctttgtgacaaaccaaaagaataagaggatttagaacaggactgcttttcccctatgatttaaaaattccaatgactttcgcccttgggagaaatttccaaggaaatctctctcgctcgctctctccgttttcctttgtgagcttctgggggagggttagtggtgactttttgatacgaaaaaatgcattttgtgcagctggtgaggtataatccaaagcaaaagcaggggcaaaaatggacttcctgaagttatctctgctcctgctggttatcctccagaatctgtcatgttgactgagagtgcgtgcttgctttctcaggcctcctggccaataccacaggtctgctggaaatcacccacatggtttttcattgcctgtgcagtcaggtgatgcctctatgtttttggaggtccacctctgttgtttcttaaccttcccagccttcccacagttgtcccctgtattgctcatag

SEQ ID NO: 345475 - DNA, 1000 bp, Homo Sapiens; identical to SEQ ID NO: 161186

SEQ ID NO: 345476 - DNA, 1000 bp, Homo Sapiens
gttcctgaagggacccccatggaggacccaccttcccaagagggctggcctgagtgtgggaactgggcagattcagccctgaatccccggggggcacctggggagaggctctgatggtggctgaaggtggggaagtctgggggtgttggtctggtggcaccccacaccccattacttcccagtgcttcccatggcaagctccatccgtggcccatccgtggcaagtggaggagcacaggaacacaaggaggccgccctgaactcaagtgccccgagtcactgggccccaaagcaaaggactcttcccagtggagtctagacaagtctttataaaagaaccaaaagctcaataaatacgtaacttcacagaacccagcccaagccaggggtggcctgtgggactgggaaggtgggggcagggcaggagtgaatcccactggaggccagtgagggtagaagtaggatgggcagcctaggagcccagccctgaagactcgagctgagctggtaacttcggggagtaggtgacgaggggctgcctgggcaggtggggtggtactgtggcctgggcctcctccactccatccagtccggcaaagcgcaaatcgggcccgggcgtaggcagggatcctgcccagcatccggctcatgcatacaggaggcagtagctgaagcaggtgccggcacgccccaggaggcaggctgtctgctgtctcttggtcaatggcactcttgggggcctccctctgctcagacctccgaggcagtgagcgtggagttaagcagcagggtggtcctgattcggtagagctgggccagggtcagcttcctgtgctgggcagagacccctggtgggggctcaggctggaccctgggagaggcccccgagggcaggtctccacacctcttcctgtgggagcctgcaggttccccggccaggcagccgactagcccaggaccgctgccagggctaggggcccctcggcaatcccagctgggc

SEQ ID NO: 345477 - DNA, 1000 bp, Homo Sapiens
tcaggctttggatgatcttaaggagatcactcagcagctggacttctgggttgaggtggggccacagcaggccgggcgggagcatgcggggcggcaaaggagagacacacaggaggctgggcggcagcagctggcctggcaggaggaggtgggggcgcagcaggaggggacgggcacgcagcaggcgggcctgcacacggggcggcagaggagggacacggaggaggagggtctgcagcaggaggtggtgcagcaagccggctggcagctagactgctggcagcatgaagtggaagccccagagcagacgggcacacagcacacaggcttacagcagacgggcacgcagcagccctgctggctttgggaggaggtgcagcaagctggctggcagcatgaaccggaatcatcagagcaggtgggcacacagcagacgggcttgcagcagacaggcacacagcaggcctgctggcaaggggaggaggtgcagcaagccggcttgcagctagactgctggcagcacgagggcgtgcaggagctgatgcagcctgattggcaggggctgggctcacagaccgcctggcagcagggactggacacacagctcacacagctagactgctggcagcacgaagaggaaatcccagagcagacaggcttgcagcagatgggcacacagcaggcctgctggcagggggaggaggtgcagcaagctgactggcagctagactgctggcagcatgaagaatccccactgcagacaggcacacagtacacaggcttgcagcagacagtcttgcagcagacgggcacgcagcaggcctgctggcagggggaggaggcacagcaagccagctggcagctagactgctggcagcacgagggcgtgcaggagctggtgcagcctgattggcaggggctgggctcacaggtcactcggcagcaggggctggacacatagctcactggggtgcagaccaggctcaggcagggggccggg

SEQ ID NO: 345478 - DNA, 1000 bp, Homo Sapiens
ttttttttttttttttttgcaagagaagaagagtttttattctcgaacaagaggctgggtccagctcagaacacactctttccctcctcctcccgctcagaccctgccaccaggtagacgaacagtgtagacgcccctgcaggtgtgaagagtaccagagaccccagctaggggaagctggcaggagttgggggggttcctcccagatggaatgaatggaaagaataaatcagggacttaaaggcgcaggcaggagatggagaggggtccatgggtggctcaagggtggcgtggcctctctgagccttagtttcctcatctgcaaaatggaagcagtcacgtcatcaatcatggccaaacaggtgaggccttgcaagtccccgacaaaggcgcctaacacggggcacctgcacctcccaagccgtgactggttccaggtgcccgtcgtttttctcggttttgcttttctgtcttgatgacttcatcttgggctgtggccaccctctcaggggtgtctctgtgagtgttctggctccagggacagttggagggaggaacattgccgtctgggactggaggggcaccccccggtgctcaggctgccgcggccgtgacgttgagctcctgactgcctcggcggcggaggcgcgatctcggaggcccaggacgcacatggtgatggccacgttcacgtcctgcacgtccagctcccgccgcagggagccgaagaagccgtccagcgcaaacttggccgccgagtagggagtggagaacgacgtgggcacgcggccgagcagcgaggacaccaccaccagggagcccttgctgtccgtcaggctgggcagcgcccgcgacgtcagttgcacgtagctcacaaagtttacctgcatgagccagcgagttgcctgggggctgcgggctcgcgtgccggccggggcgccgccgatgtggttcagcacgaggtagtccagcccgccttctgcaggagagcctcagtgtg

SEQ ID NO: 345479 - DNA, 1000 bp, Homo Sapiens; identical to SEQ ID NO: 161189

SEQ ID NO: 345480 - DNA, 1000 bp, Homo Sapiens; identical to SEQ ID NO: 246612

SEQ ID NO: 345481 - DNA, 1000 bp, Homo Sapiens
ttttttttttttttttttatttgtataacattttattgtttgcgtattgcatagtgaaaagaacagagtcagaagactcatggtcaggctcaactactaacttgctgtgtaaattggatagatctcttaaccttgctaaacccttacttcctcatctgaaaaatagagataatacttattttacagaattgctaaatactgaatgagatacttatactgttttcctcttaagtaattagtcaaaataattatagagtttgctattgctaaccccttgttcatcatctcaatgctgttctcaataaatgcattaagacaacaggtaccaatgtaacactttaattttgaatattaacaatagcaaaagaaaaacaaactcaaaaatgaccctaccctttattatttttagaatactggcttttaaatacttattgatactatcccatcaggaattcaattcatttaaatattttttttcttcttcaacctactcaaaatgaatacctacatatgtgaaaaacccaagattacatgtgtaattactttatagtttcctctctggcatagtataagtaaaatacatatcatgggcaattaaatacttccccctgctacattagggatgataatatatatgaagattaattccttatgcattatccctaatgtaaagaaaaatcacaggtattttatactgcttgtcaagaatacatacacatggtagacacagctagacatacacaccccttctaagaatatttcaactatcatcaatatcttctgtatgatcccttacaactatctgtagttgaaaacataagactcccttttaaggtaattctgtatgaaactgtattataaaatacttttgttaagcaaaattgcatgtgtgtgttgaacccccaaacactcaaagtactttactactcttaaaagataaacaaaattcttatacattataaaaaaaatttaagctgctctgcaaccctcctttgctaaa

SEQ ID NO: 345482 - DNA, 1000 bp, Homo Sapiens
aaccttaaactgataactgtatttgggtttcagaaacagtaaattctatctataacaacaaaaatctagctacagatttctaaggttgtggacacagcaggagagggaacataaagttccttctccagttagagtggtccagaggtcagactctgtgcccaaaggccaaaagaaaaataatccaattaaggacggagagaaagaaattgatgacctctgagtgaacagaaaaagaagataacaaacatgaaagcaaaggacattatgtggaagaggcagacgacagagaatgcagggaatattacaaaatatttcaaacggacagaaaataaaactcatatcaacttttttttttttttttttaagacaaaatctgtcacccaggctggagtgcagtggcactatcatagctcactgtaaccttgaactcctggcctcaagggatcctcccacctcagcctcccaaagtgctgggcgtgagccactgcacctggccttccttcggtacctttaagtaataaaaagttacatatatagcagaaagtccctatgtattccttgccagtattctcattgatttggtatgaattttttacgtaatatttatttggtggaaggaacttagaggaaaataaaaaccaccaacctaataggagaatggcaggcaggcaaaaacggagggatagaaggtcattacagagaaagtggacaaagaaaaggttctcataaataaaaacaccaggtgctgtactttctctcctaaagctagcctttgctgtttcctgtctcataagggtttacctccaagagatgctgttttttttaacagttttttcatttcaataaatttattttgattggttgaattgtttaagaggaagagaagaatatgttcatgtttttcaacttgtttctgtaactctgtgcagcagcaattcatcctatacatcttttctgtatttaaagcactctgcctttgaggtgtgatgttttttgccag

SEQ ID NO: 345483 - DNA, 1000 bp, Homo Sapiens
tttttttttttttttttttaggtgctgggcccagctggcagacacttccatttaatgactaaaaatcacacatctcaggtcacgggtctaggagaaaacacacacacacacacacacacacacacacacacacacacacacggattccccatcaaggggacatttgcagtttccaaaccttgaagatactgaagggaccagaaagttcctttgagtggctggtcacccaaagctcccggtcctccacccactgccctttggagggactcaaaccttgggaggagaaggctgagcttcctgtgggcccctcccacccacacctgagccagagagaagactgcagcaaagacatccaaagccaacggcaagggaagcgtcagcgggggcagaggagccagccctgtccttggctcacccagcttccaccatacaggaacccaagaccccagccttgcttccacagagaactggcaggggtcccctggcctggccatcacagggactcacatgggagccttttaaaactccagatggtggctgagcacagtgattcatgcctgtcatcccagcactttgggaggccgaggccggtggatcacttgaggccaggagttcgagaccctcctgggcaacatggtgaacccgtctctactaaaaatacaaaaattagctgggtatggtgatacgcgcctgtaatcccagctactcaggaggctgaggcgggagaatcgcttgaacccgggaggcggaggctgcagtgagccagattgtaccacttcactccagcttgggcaacagagcaagactctgtcttggaaaaaaaaaaatacagatggccaggcttgcctctagattggctgggccagaatttctggggtcagtctgaaaagtctgcattcttagcccgggattcagatgatcattaggtttgggaatcttaaatagagtctcccttctctcttttcactgttagggagggagagggagtgatgtttttgat

SEQ ID NO: 345484 - DNA, 1000 bp, Homo Sapiens; identical to SEQ ID NO: 161190

SEQ ID NO: 345485 - DNA, 1000 bp, Homo Sapiens
tttttttttttttttatgattcaaggatttattaagtcatacatgcaaaacataatgctaattgcattagcaaaagatcaatgtaaaaacactccacaattctgcaactgtcaatttaaaaaattctgttgtagtggctgaagggtcccacgctgtattctcgccagtgagttaagttgtacagaacatcgtcagcactagcacagtttacagaacctcacagacccaaaggaacatcaataggcaaagcgactacaggaggcgtgtgtccgcgtgggcgaggtaaagagggtcagtattggtcaagtgacagtgtcggtaatctggcaagacagtgatgttaagaaggttcatagtttaagaattatctaaaatattttaaaaactataaagctgcaacacatgatttttacacctagttactagaaaactaaggaaagcacttattagctctgaataaagtaacatggaaagcacttttactaatcgacaaaaaaaccttctaatgcattatcagaaagattttataatacaaggaggcatattgctcagtcagaaggggttctataagaaaagcacttactaagttagcgactaacagaacaaccagtttaaagatgaattaaatgcccaatttggggaggcatggcaggtgtaagagaaaggaaaagcttaagaaaacatttcctgataataccaacctttctttcatcatctactgcatttgacagaaattaaccttttagagtttttacccgtgacactttcattccttgtacaatgtagtgtaaatctccacttcgtattttgtcaaaatactgtctttgtcctttgatcacacacaccccacccggcacacccacagctaaacagaattcttcattagaggaaatagcagttctgttcaaaatctccgcaaaagctggtcagaaaactcgctatgaaatcacaaagactgatccaaagagctgagctgctacgctcactccattacagtaca

SEQ ID NO: 345486 - DNA, 1000 bp, Homo Sapiens; identical to SEQ ID NO: 161191

SEQ ID NO: 345487 - DNA, 1000 bp, Homo Sapiens
ttttttttttttttttttttttttttttttcttctacaaatgtagaggtttatttcaacaaaatgtgtaaagagtgcatctgaagctcctgctcatcacagtatgtgtccatcaaattctgagacaagtgaaggctgttttgtgaacgaagagaacagataatatggcggtctccgtccaagcaggtcttggtcaatatccatcatttatactcctcctgccttagtagccttgcatgtttgaggggctgtgggaatgtcagattgctcatgttctgtgcctccaacttgaaaaaatccttgtccagggtaagacctacagtaaggagctctggggatgggggaggaggcattacagggttctagagaggaaacatactcgtttgtgtcataatttggtggggagaggggaggtaaatgagtgtaacccaccctgcctctgaagacatgcctggacaggcctcctggggggtgcaggacttcataccacttgtagatatgtgggatttgatttattgcaaaaaagcatagaagaataatctggtcaaaaatgaatccaattcttactaggtaagcaaatagccagcaatggtcaatgcattttcctggactgagaattgtcccccaccactttatgcccttttctgaaggtgctgaacacctgtaccttccaccagggcagccgggctgaggctctgactcctgggggctgtccgctccatacccagccatacagtgcccacctgcaacccagaaccattgaaaagtccagccaatctatccgcacagattcctcctgaagaaggggaggtggagctcgttcttgtgtgcaaactacagggttaaggctcagaactgtggcttgtccaagaacgttcataccactgcttctcaaatgtcttagtgatttcctccttggtcatcagtgacaaatgcagttagctgcactaaaggaaccggatgctacaccagccctgatcacctgccactcttgctttagg

SEQ ID NO: 345488 - DNA, 1000 bp, Homo Sapiens; identical to SEQ ID NO: 161192

SEQ ID NO: 345489 - DNA, 1000 bp, Homo Sapiens; identical to SEQ ID NO: 336398

SEQ ID NO: 345490 - DNA, 1000 bp, Homo Sapiens; identical to SEQ ID NO: 161193

SEQ ID NO: 345491 - DNA, 1000 bp, Homo Sapiens
gatgagttttaagtacttttgacctttgctttaaatatgatttatttaattgtaaatgtatatcatttttaatactgactgtacttaattaacaatcagcttgcaaaattcctgaaagattaacaaccagaatacaagcagctctagtactccactaggtcttgggttgaaaaaagagggagaaaaaggggagctaaaaggccatattgagtatgaaagcactaaaaggcctctatgccattcacactttatgactcggtccttctgagccttgggtccatatgttcatagaaatgacatggttgctgttggtcagaagccatacgtgcccggtcccaggcccagctctgccatttgctagctgggtgatcttaagcaagttggctaaattctcttagcttacgtttcccacccgtaacatgagtacaataaagagcacctgcttgctaaggttgttatggggattacatgatctactatattcaaagtacgcagcctactggatcatatagaaaagcctcaataagtggtagccatgagtactattatggttactatgctgatctattcctaaaatgtccagagtagccacagctagtgatggggtttaccaggtacagattcatgcagataccaattgttaaagacaatcttcgtgtggcctgacctccatttcggcgtcaaccatgtatgtaggctcagcctcaaggggaggaatgctcctctctccacacctcctgaaaaaaacctctggcagatgcctgaagttcagatactggtaactcatttttcactgttaagtgcgctgtctctctaggccttcttttaaaaggcaattactccttagagagtgagtcattaactctagcaccttggtgtgaatgaggcaaccagatcccagcgttctgtgcagggactcctgggactctaaggtgagaaacctgggtgtgggcaaagggattcagaaagggcctggcgcactgaagcctccatctgcagc

SEQ ID NO: 345492 - DNA, 1000 bp, Homo Sapiens; identical to SEQ ID NO: 161194

SEQ ID NO: 345493 - DNA, 1000 bp, Homo Sapiens
ttttttttttttttttttttttattcaaattttattggaagtttacaaatgtattacagacatcagtaaaacatcatatccattttacagggcacggatctcaagcaaagtgttcagaacagtctctggcagagcccacaccaaaggcctgttgcagaccttcttaacaaatagcttgacactcaacacagaacacagactctggcctgcctcaccttcccaggccctttgaggttttgtttatgcacttgaaatgaaagaggagatggacaaagcaatcctgtggaggaaagaatgagtttaggagaggaaaacctgccgaagtcctaatttgctaaaaaataattaattaaaaaatggaggactcatagtccttacaatgttaagtcagggtctatgatagaatcatgacactttatggaaagatatgaaaatcaactaggtaggtttaagaacagaccttattggtaagtaactctctctgaaaaatttagaaaagcttggtcagtgacctgttgaatatcaatggccaaatgccaagcagagtgaagggatatctcagagaactctcagaatagaacaagcagatttttctctatcctacggattcatcgtattcaaaacacaggaatgttttcctaacactatgtgactttcccctcctttatatttccttgaggaaagctagttttgtcagcaggaagtaagcttataaaatagtatggctcccaatagtgagtcatattttatgggagtcttgtgttgactaggctactattatgagaaaatggaaaaagaatccaattttttcttgatctttactttgaggactacttccaaatggtcataagaataagctctggtatctgctgaggcaccagagggacaaaccactggagacaaggcaaaggccatttctacttctcttgtgcttaaagaaatgtacctcaaaaggtggcgatctgaaactgccttcaacaattggcagtggaggcttggc

SEQ ID NO: 345494 - DNA, 956 bp, Homo Sapiens
ttttttttttttttttttaaagatttttttgtttatttggtatggggtcttctgtagctcacacaaaattattgggaaaataaataacccaggggagccccctttgcccacggttcctaggtcgcggagtcacagcagccccaaaggggcaggaacctgggaatccgaggggtcccggccctggcggtcacttgcccagcaggaggccggcgcgcagcacgcggggcacgcggcggatggtcagcgagacccgggtgccgcgcaccaggcaggctcccggccgcgccgacgggcaggctgccgcattgggcggcgaggaggcggcgtccagcgcgtctacgcgggcggcggcgatgccgtggagaagacgcgtgtaggcggggccgcggagcaccagcaggctgcgcggttccagcagtagcgaggtggtgggccggggcggaggccgaggctgttctgtagggtcatcgtcctctggccgccgcggctcgtagaagtccagcacggtgtgggagcccaggctgatggtgcatgatgccctccccaggcagatactggttcacgaggacatggttagctgggaggcctccaaagaggctgaggtttgacactttgtccacgtagcgctggagccatgggggcagccgctcaggaaccatccctcggggatgaggaagcccaccccagttctgtaactttctcccagagagctgggtccactttggctttggggcattaaaaacctgtcgaagcaaatactcctcctcttctttggagatgaagtcagggacatagtagattacaggtggtgcctgctccactctgaacggttccagggctgggactctggcgtcctgctcctccatcaacaccaactccttgcacccaatccgtccaccagcgtcccctccaatttccaaattcaacatccccatccccctcccagccatttccgc

SEQ ID NO: 345495 - DNA, 1000 bp, Homo Sapiens
ttttttttttttttttttgaaaagacgtgcttgtcattcttaataaacaactagagtaagaatacataagagaaacagagtggtatctttatatgatacacaagtgtatgttacaagaattccatcaggcacaggagcctcaggttttaaggcctcaatgttaggccaacaaaaaaaaaaaaggcatggtaaagtttttacttttacatctaaaatgtcacttgtcataaaggagggtgtaatagaaattgtctttaataaatcataattgaagttcccctcatttttcttccattaagatgctaagtttatgtctgatcatgaagaaagaaaagaacatcgttcccctgtggtcagcaaagtctgtcagcccagtggaagtcggctggggagattccctccagggtccatccatcattaattccatctctcttgaagatggaaaggggccacatttcttttcacagtccaagccctttccccaggccccagacaaaaaagagtcagccagcaactttctaggacatatgacactcaaggaaacccagagccaccatcggctgaggagtctgccgcagcaggtttatgaagatgcaaagggggcaaagttttcttttatattttaaacagaagcagcctgaaaggcttcgtaactacaccaataaaaaaaagaaaaaaaaaaatggaggcctcttctttagtgtgaaagtctgtctggtttttcctggctggtttctcttgtgccatggccaaggcatctcagtgcatagtgcttgcattggccactgcgatggcctcctgaatttctcttatcaccaggatccgcgtcagcatttgtcccatctgctctctgctgataggctggactgagtaccagattgggctgttgggggccaccactggctcaggtgtcaggtaaaaggtgtcattccggcctttcacactctgggggcatttgaagaggtagaaatcatagagcttgatgggacatctcaatgga

SEQ ID NO: 345496 - DNA, 1000 bp, Homo Sapiens
ttttttttttttttttcagtatatgaaaattcatttatttagtgaaaccctgacattaaagcgtcccaacacaaagcagattcgaacataacaactggtgattggctcatctcacaggctcacatcatcagtgtgttaacatacaataggactgtacccttttacaggattgagtgttttggatcccactcacacactaaaaccctgccataaagttgtatcaattagggctgttcaaatgtgaaactgtattggaaaatgggaaactttatctccttatatatgtatattttttgagatggcgttttgctcttttgcccaggctggagtgaagtggcacgatcttgggtcactgcaacctctgcctcccgggtttgagcaattctcctgcctcagcctcccaagtagctgggattatagatgcctgccaccacgcccggttaattttttttttgcatttttagtggagacggggtttcgccatgttggccaggctgatctcgaactcttgacctcaggtgcttcacccacctcggcctcccaaagtgctagcattacaggcgtgagccaccatgcctggccaccatatgtttttaagtataggttggatgataatttgttgggaataccatagaagggatgatgaaatttaggctggagatgatcaccaaggtactttctatctctaagatcctgcaacccttgaaagacactctatttgacagtttcatgaataaaggcagtgacaatgaacaaattcataaattacggtgttacattacataaagcttagtttcttattaaaattggcaaaacttgtcaattggcatgaaatgtaatgctgttaaaatatactttctcttatggttacaaatactaagtggctcacgcctgtaatcccagcactttgggaggccgaggcgggctgattacctgtggtcaggagttcgagaccagccctggccaacatggtgaaaccctgtcgtctctactaatacaa

SEQ ID NO: 345497 - DNA, 1000 bp, Homo Sapiens; identical to SEQ ID NO: 161196

SEQ ID NO: 345498 - DNA, 1000 bp, Homo Sapiens; identical to SEQ ID NO: 340894

SEQ ID NO: 345499 - DNA, 1000 bp, Homo Sapiens
tttttttttttttttttttttttttttttttttttttttttttttttttttttttcattcttctatttggtttatttagaaatcacctattctgactgatctttaagaatgaatgctataaagagctaccaaattttctttcaaattcataaaactgttcacacttttttgaaacaggagttaatgccgagaatccatcagaagtatctactgtttagaaggaaatggagcagcaccaaatgggtctaattcgactggttgggactgttgggactgatgtggagtgatgctttgcaccacaagttctgtaaagggcacggcaccaaaatcatccattttcaatacatctgcactatggaatgacccatgtagtgaattttgtcttggccgccctggcaggacagtattgtgatcagcacggatgtcgctcaggccctgatgtggagggtgccatgacaggtctggagaatggaagggcttggcaccgaaggggtccaacaggctctcctcaggttgtaagacattccccctatctttcccatcagtcagtgcaacactaatgttctccttggagtctgagatggttaaaaattcattgctactttgagagtctcggcggcccacttttttgtgcctgcgagccctctctggagtgcgataggtaggcttcaaagtcttctttgtgctagttggcgtgccatgatgccgcttcccattacttttggacatatcctgctttgtgcgcctttggcgagaggacagtttctgtaagctgcgctgtttgactttttgctgctggctccccgttatttcatcaaagggcacaagcccaaaaaggtcctcattgctttcacttttacttgttgatgtgaggaagggctgaaatggagtggagccaaatacatctacacttttgggataaccagggatagtatgtgcctcaggccccactgcatggcattcttgtacattcaccttcttgctaaaaggcgcctttgtg

SEQ ID NO: 345500 - DNA, 1000 bp, Homo Sapiens
gttttgttttttgagaacgagtttcgttcctggtgcccaggctggagtgtaatggaatgatctccattaatagaacctctgcctcttggattcaagcaattctcctgcctcagcctcccaagtagctgagactacaggcatgcaccactaagcccagctaagtttgtatttttagtagagatggggtttcactatgctggccaggctggtctctcctgacttcaggtgatctgcttgccttggcctcccaaagtactgggattacaggtgtgagccaccgtgcctggcctgatttatatttctcgcattcttactatgtattttcacttcatggaaaccaagatgcatagcatgggtcttatttggcacacaagaaactgatgtggaaatataataatgtggtgcatatgcatcaatggcaatgcagattttggggtgtaagaatgtgaaattaactttcagtaagattttcattataccccaataagtatcctaagccacagtgtggggcacgtaattcaagcacaaaatgcggttataggtttccaaaactgcgttatttgatttcaccatgaaaaaaattgttcttgatcgtttaagagcctagtggtgtactgctattgtgttatggagtatcctactgagacaggataaaactatgttggcagaaagaatgtgattcattcatagagaaaaaccattctattttattagttaaaacattatatctatgatacattctgaataaaacattagcaaaatgtgcttcaagcagataatgtgagttctactaaagaatatgttactctacttctgttgattaaactcttcactctgacaactactctctcttcagtttttctttttcttctttagatggagttttgttcttgttgcccaggctggagtgcagtggcatgatcttggctcaccacaacctccgcctcctgggttcaagcactctcctgcctcagcctcccaagtagctgggattacaggc

SEQ ID NO: 345501 - DNA, 1000 bp, Homo Sapiens
tggcttgtgagcagactcttctggtggatgggctgagcacagacaccattccctgagatatgtctcagttcccaaggagccactgtacacatccatccttgtacacggacaccaggtgctcagagacagacacaggcacatctgcacgccccccacttgctccccggagcgaggaccagtctccaaactcagagcaactttattgtcagcgtgggcggagcgttgggaggcacctcagtcatgatacaggcgcaggaggcagccgcggagggtgcccatgtagcggtcccagagggcctggtgtcggaagccatcgagggagtggacagacgctgaatactgattcaggaagaaccgcacgtcgctgagtggccagtggtcggagcggcagggttccacaaacttctccacgaggtccacaaacaggtctctgacatctttattgtgggtcagcttggcggccacgttcaccagcccccgggacaggttcttgaagttggcttccatctcagagaagacgcccagctttccccggagagcagtgcacaccaggctcttgtgcaggtccagaaggtccttgtcagccactagcaccttgagctccttcaagtcctggagaaattccttgtctaagtccatgtccatgtcatccatctgtgagtctgggtcagtgggggcctcaccgacggctccaagggtccagttttggatcatgagctcagcgcagaaggcaaagtcaccgaagctcagatactgcagttttttcttccctgtctcaaagcggttgttagcaaagaagacgatggctgcatagtccctggccaaccggtcagagaggaggaagtgttgctgaatattgtccaccagggagccccgcatttcctctaccaccttgaagacccgtttaaagttgtcaaactgtctccggcagctcttgagggtgatgcctgttttggtgctgatgtcatccaggtctttcttggtgcctttggacagcttc

SEQ ID NO: 345502 - DNA, 1000 bp, Homo Sapiens
ctactgtgatcctttactgcacactagggatacagtaatgaatacacaatttctaccacaggagctcatggtctaataggaagatatacatgagaactgttatacaaaggggcaagtgttattacagagacaggaatctgaagaactaacatttgaactgtgcatttagaaatttgtaggtggaagaggttggagtgtacacggggtactaagagcaaaggcaagggggtggaaagggcatgccaggtctgaggaggaagaagcatagctaattgtaaactggtagcacacagattgttctttctggcctgtacagtgttctgtaaaaatttggaatttgttgctaacattttaaaaccaggaaacttcacatagaaaatctgaatctttagcttctcttgtcaatatggattatctagcagtactgagctggatttgcaaggcattctgcagactcaagctgagatgccactttagaaagggcaagtcatccttctcaccattccttagtgccttcttgatactgtcgcaagtgtcagctgccatttaccatcacacatggcctgttgctcttcttctactggagaagagaaatagttctcaatatttacatcttatcaaaagtggaaaagtgagtgagtgatggactaaaccttgtgttccaaaagaaaaaaacaaagagcatatttctttatggaagtgaagattctaatgcatttgaggagataatacagtacagtggttaggagcgggactggaggcagactgcctacagtaaaagtctagcttaactgcttgctagttgtgtgaccttggataggtcacttgacctttctgaccctgtttcctcatctaaaaaatggtgagtgttccaccagagtacacctaattacagagattaaatggtacctgggttgaaagggatctggaaataaagctagaaatgtctcactgcatatacatttctttgaagtactgttttgccttacaaattcacgta

SEQ ID NO: 345503 - DNA, 1000 bp, Homo Sapiens; identical to SEQ ID NO: 161197

SEQ ID NO: 345504 - DNA, 1000 bp, Homo Sapiens
ttagaatgcagcatttttattgtaaaagtccacatgttaggcaattccctttgtgaaaaggtttccaaatacatagacagggagcagcttataataagtattagattatatataatatatattcatattgccaatactatgcacacattggaaagctagctttttgtagtgtccccattacagaacacatttcaagttgacaataatgtttctcaccattgaaacttgccaacaactctcccaaagagtcaacatttaatatattgacaattcaaaacaagaaaataattcgttctatttacatttgtttgaggttatatactggagcactgatatattaaaggtttgtaaaactggcagctaaatgtgtttcaagattcatccagatgacttgatgatgactttacatggttttatactgacaaagccactctctcttcttttctattctttttaggttatctgtaaagttatactagctatgatttaattatgacagagtaataatttccataaaaataattaacaaagggtgctattttagaaaaataaggattcaggatgagtacatgaagatagagctcaactcatcatgttttaagtctggagaaattgctttgtttaactacaatgtaatctaatgaggccacagtcattggctcaacctctatgtgagtcattcatttttttttttcagtttttaaaagctaatcttcaatactttttcgcacagaatgctacattctgaacactagtcaggtatgaattttgcttattcctgttataagttcacaaacaaaattgtggatgggcaaggactgactcatccccaaacctggaaaaataatacacaaactctaattatgccctagtagagtcatgtctatacacaaacataggacataaatattgttttaaaaggagtatggactttgcctaaaataattttttgaagatgaacataaatagctaaagttctttggatcctactggttatttt

SEQ ID NO: 345505 - DNA, 1000 bp, Homo Sapiens
tttttttttttttttttttttttttttttttaaacagtaattcttcagactttattaaaaaatgacataaagtgcatcttattaaaaaatgtataaaaaccacataaattcagggcccctgtgctgggcagtgttgatatcccttagagtggaggaaggtgagggatggagggtgaactggggactggggagaggaccagggtgcagttagttcctcgtgtttgagttcaaagatggagcgagggtggatatggtgggaaggggcacacgggttctcacgcaacaacggaggaaggcaggcgacagtctcttccctgaattctgagggaaaggcgtacattgtcacgaaatctctcctgagctcgcgctgtcctctcgtgtggccacagcctgatacaggctggaaaggtccaggagttgggtccgagcccaggacctggtgagggccgcagtgccaacctagccctctggtccctgaggtggtgggacgacggcagcaacaactacatcctcggctgactggcaaggcagaacgcacgcagcccaagctggtcctgaatctgcagtgagacagggcagccggtggcagcgggataatgtggaaggtgaagaggccagttggtgagggtttccaactctgtctcagacaaccactttggatgcatccccagcacccctgggaggccatgaactggagcagccgtgtgtgctgcatgccatgctatctcttccctctcattctagtttcacatttggaattgttttttaaacaaagggctcagtttacataaggagcactgttccaccaacctaggcaggcccccatatttggccaggacctctggggccacggctgtttgggtgtctgggtggtaggagcttcgctacttgactggagagcagcaggccagctggccccaaggctcccaagggccgggcaccacggtcgtgttccacgaagagcagagcggaggggaggtccagttgaccctctccgagc

SEQ ID NO: 345506 - DNA, 1000 bp, Homo Sapiens
gagacaggggagtcttgctctgtcagccaggctggagtgcagtggcatgatctcggctcactgcaacctccctctcccgggctcaagcaattctcctgcctcagcctcccgagtagctgggtttacaggcgtgtgccaccacgcctggctaatttttacgtatttttttagtagagacggggtttcaccatgttggccaggctggtcatgaactcctgaccccaggtaatccgcctgccttgccctcccaaagtgctgggattacaggcgtgagccacagcgcccagcctgcggggcgctaagaactgttggggaggagtgttggtaactccagggtccagcttctactctgcagttagacctaggctgttctgcctcctggctgcagttgttcctggacatgtagcatatctaggcttgtttccttatctggaaaatgggatcatgcctgcctgcctcgctcactttcaaatgagaccatggagatgaaaaggcattcaaacagcccagtgctatgtcaacatccttcccctgtgcatgggggagacgcggggagtgtctagggcttccctggctgctccttacacactgtactccttattcagctcattttctcagagtccaggtatggactgaaacctccaaggcagaaagggctagcaggtcgggttttgcctcactgctgctccagtcccaggaggcctggggttcagtccctgtgcctggagcaatgtcttgccaaagaagctgacagaaggttgggagagccatagacaggtctttatttgggggcctatctggggaacctgatgctccagggctcttttccatacagaatgttcaacggaggtctttgggggcagtggagatgtcagagggattttctgatctcctcctctgccctcacctactgtcacctccagccccaaagtgagtgcatgcatgccagacagacacacacatgcacacacacacacacacacgcacagctcactctcca

SEQ ID NO: 345507 - DNA, 1000 bp, Homo Sapiens
gttatttgatatccttgtccttggtgaccttggtgaaggaactgctggatggggttgttggtggcatctgaggagtcttgagatggctttcaggtagggttgtgctggcctctgaaggttttggatgctgactctgttcctggggtagtgccatgctcctggagtcatggcttctctggtttgtatttttctgtatctggatgaaactatgcatttctgacatcagttttgacatattttccctctttctcagtcgaaagcagaagagtcgaagcttatctcctttttcacaggggatattgtggcattctccttttcctactacagccatacttcctgttttatcctgaatttcatagattgtcgtcttcctatttacaattttcgtatgtagcataaataatccatatacaatatatcctgaagtttgtttgtgaagaatattgatcttcggaattttctttgctcttctgatgatgtcctttggaacctcaaacgtttggtcaggaccagcttcagatacagaagaggcttcattcacctctaggagactattacgtttggaataatttgatataatgatgattctctttttaatgaatttcctcttcaagttgatgtttaaaaccttcacatgaaagaactgtgtctgcgtagccactgtagcatgaaacattcttctttgctcattttctgaggattcatatttaaatacttttgttgcatttagtaccatcgcgattattgggtcttctcggaaaatatttttactggcagttgcgtgacggttggccaatggttttaggctctcagttgaggaagtgttgggtggagctgatgatgaggtctggggaggtggggaacggcccatggctgtggacgtgctggctcctgcagagcaggaaggccgagtctgctctttggacatcttactccttttggttccagtctcttcttcagatggtttttttcttttctgaggtccaagagtctcctctgc

SEQ ID NO: 345508 - DNA, 1000 bp, Homo Sapiens; identical to SEQ ID NO: 340240

SEQ ID NO: 345509 - DNA, 1000 bp, Homo Sapiens
tttttttttttttttttttttttttttttttttttttttttttttttttttttttttccatgagatgcctgccatgacaggcgccacaaacctttcctttattgcaaacatgtcccagtcccgggaggcttgggaagagtgggaaccaggggaacccagggatgggattccactgaaaacaaaccgtcctgctgtcctgtcgagggcccccacccacaggatgtagccatgggacagccactgagggtccaggaagaggggcggcagagcagggaggcagggacagggaggggtcgccccagggcagtggcagggctggaactcgtccctaacatccctgagccccagcaggtgccctgtgttagaagcgagagggctggtgggggtgcgtggacaaggggcagaatgatcctgcccccaaccagtatcgccaggcgctggcccagtggccccaggccctggcagctggcgtcttccgctgccttccctctgctctgcgcggggacattcagtgcgctggggaggcctcggtgatggccctctccacccgcaggtaccagggctggatgtgcgtgtgctgcatcaggtcatcgaatgcatccagcccctccatcacacgcagcacgccatacaccgccaaatcagcgagattcggcttctggccccccatgaagggccggtccttgcccacagcagccacccacttgtcagcagcctcatagaggtcctcgcgcacgttgtcctggaggcggtgcctgctcttgagtcgcttgctgatgaggtacatggccgctgcacccatgtacttggccacggcaccctccacggctccgaacttgccctcgcggacaatgtagtcaaaggacgccagagcctcggtgggcgtgcggtacacattgggggagatcaggtgcaccagccagtcgtccgcccactgccgccacttcatctcctccgtcctggcctccttcccaccatacacttgctgggcctccttctc

SEQ ID NO: 345510 - DNA, 1000 bp, Homo Sapiens; identical to SEQ ID NO: 161198

SEQ ID NO: 345511 - DNA, 1000 bp, Homo Sapiens
ctagttccacttttttctactcaatttttattaaggacagtaatagatttcagtaacttctcattagaaacacgctaagtagtaatagaattagctaatgtaccagtttcaatattcttattttattcttaccatgcaaacttgtaactttcaccgagttttgaaaatccaagtgtgcaacagatacctttaaaatattatccccaatcaggagttccataaataaattgatatattttcattacagtggtcagtaaataggaaaatgattacttaagaatgtatttaaagccatctctctcaactgtcccattatctgtactcttttattagaaaaatcttaaattttatcatttggaataataagaaaattgaacctaatgttctcattttagtttgttttaaaaatggatacaatgacctttaggaatgggccacaaaatcaaatcaaatgtattttctcaaatacatcttagtatagaccaagaattagtttatataccacagcaaattgtggttatctgtaaatgattttcagggataaaagccttgcaacattgcagagagttgagagatgtggttaaagtgacaaagcaataaatcaggtttcagtaatcataacagaaaatggaaataacaatcacttggaatcttgagtattatattcagtttctccagctgaaatctggctgagccgcttgctcgatccccaaaattttcgagaaagctgacctgaacgcatctcagcaggcttgccaacacccactacaatcaatttgccatcttctaaacctacaagaatatggctgtattctttggtgacacaaacacaatggataggcagtcgcatggctaatgggttgatgctgagattcaagctgtggagatctcttatagacaggaatccttgtatgctgcctgtgacaatgtgttctccgattatacatatatctgatacttgttccttcaggatttgagaccctagatacttgccatttat

SEQ ID NO: 345512 - DNA, 738 bp, Homo Sapiens
ttttttttttttttttttttttttttttttgctgtggaatcgctttattctgagctggtgctgggccccgggagccgctgagcgaggtgggtggacactggccgaggtcacaggaccctgtgggcgccatccctactggggacgcagcactcacagaaggatcttgtgagcacaggtgaggtccttctgcagctgggcctgctactgtgacaggaagcccaggctcctgctccacttggtgaagagccccatggcctcctggctggctgtctccgtcagactgtacagctccacggtgttgaagggctcgtccccgaactccagctgagtgaagatgatggcatagtctctgaagttggtggccagcacccagagctccagcacgcctattgagggattctcaaacacccatccggagtttcgctttatcaggtccatgacactctggtcacaccctcccagcccgtgctgagaggacagcgtccgcaggttgttttctggagtgagggtcaccaccacccccacgacgttcttcatgtccttctccatggcaaagcccttttcccgggaggccaccgcaagcacgtaccagggcccaagaagctgctcagggtccagtcttcccaaccacacggcctgggccctgggcaccgagaccaaagccagaaaagcagccagcagcaggccgcccatcctcccaggtctacactgcgccgcaggcccaggatgtgcagtccc

SEQ ID NO: 345513 - DNA, 1000 bp, Homo Sapiens
taaacttttatttaggtttaagagtccatgtgcagttttgttatataggtaaactgcatgtcaccagggttttgtgttcagattatttcatcacccaggtaataagcatagtaccccataggcagtttttcagtcttcaccctcctcccaccctccaccctcaagtaggccccatatctgttgttttcttctttgtgtccatgtgtactcaatatttagcttccacttatgagagaacatgtggtacttggctttctgttcctgcattagttcgcttaggataatgaccttcagttccatccatgttgctgcaaagcacatgatcttgtacttttttatggctgtgtagtatgctatggtgtatatgtgtcacattttctttatccagtctaccattgatgggcatttaggttgatttcatgttttgctattgtgaatagtgctgcagtgaacatatatgtgcatgtctttatggtagaacaatttatattcctttggacatatacccagtcatgagattgctggcttgaatggtagctgttttaagttcttttagaaatcacccaactgctttccacaatggctgaactaatttattttcccactagcagtgtataagcattcccctttctctgcaacctcgccagcatctgtaattttttggcattttaataacagccattctgattagtgtgatggcatttttttgatttgcatttctctaatgattagtgatatcaggtattttttcatatccttgttggccatgtgtatatcttcttttgaaaagtgtttgttcatgtcctttgcccactttttaatggggttgcttgtttttttttgcttgttaatctgtttaagttcctaatggattctgaatattagatctttgctgtatgcatagtttgcaaatattttctcccattccgtaggttgtgtgtttaccctgttgatagtttcttttgctgtgcagaagatttaattaggtctcatttgccaa

SEQ ID NO: 345514 - DNA, 1000 bp, Homo Sapiens
tttttttttcttctgcacctcacatcccaataaaatatttattatttcaagaaataaatctttaaaaaaaagagagaaaaagagtgtctctattgctttcccccacaggttagtccttgagaaccaatgagattttttgccatcgtggtttctgtggctgcaggggccagccaggtctggaggggactcccacaggaagcgtccagcctggcccctccaccaactctcagcatcccggggctgcctcccgggaagggtggaggagcaggcctaggctggtgggtggggttgcctggagagggagcgggattataaaactgggtgggtggcagtgttctgaaggcctgacccgctgaggcaggcggggctctgggcatgggggggagggaaagggggcatcctggggcaggcgtgccactcggagaaggacagctagatccagaggcggtttgaggctggaggaagctggaggtagggacaaggactcggcactgatggggtggggggctacctagggtaagtggacagggcaactggaaactgggcagggcgtaccatggggctgagggtccatcccaagcccttgtctgcaaaaaatgccagggagtgcgggagtcagcacctgcggaagtggctagtgcatgaaggccaccccccaggcaggggtcccagagcctgatctctgaggctggactggaaacctgccccttggagggggtagggattgaggctttggaacaaatccaccacctggagttgcaggtcatgccaggatgggttttgggagaagcccagagtgaaaagggttggaacaagcaggagagagaaacaattcaaccagggtctgggtggtccctacacccccaactgtggtcctcaagtgtagagggagggtgggggaatcgggaaatcgggagggaagggactaaggggaggcacaaacaggacccctcggcttagccttctcccagccccctgcccctctgtccacatcccaaac

SEQ ID NO: 345515 - DNA, 1000 bp, Homo Sapiens
tttttttttttttttttttttttttttttttttgtcttttatctgagtttattaataccatttaaaatattacaaataaatcaattacatttcatgcatttaaaatgcaaatctaaaatgctccagagaaaggcttttcatttcaatgtgaaatatccaaattatttcaacattacaatgagcaattagtttgcagaatctgcaaacatttaaatgtagtgtcagaagtatttattaacagttaacaatattaccttcaggaaatacacaaaggccaaagttagtcgagtttcacttggacaatttatttaatacatgggttttggcagacccacttattatgaaatataggagaactctcactttaactatgcctgaactgccagcaaatgcaaataagtacatgctccattaaattaaatgtcatccaacatttatcaaatattgtcttagttacagcttgatacctatctaaattcatattcgagcaaaactaggccccgaaagtgcgtttgtggctctgcacctccagaagtgagttcaaaaaacctgcagctcatcagaactgcaacaataactcttaatattttcttgtgacaaaaaaaaaaaatcaagtttacttcaatatattttcaaatatttactggaagtaatgtacaagaaaaatactatacaaaatcgtctcctggacaactgcacctcacacccttacactggcggagttatatttaattggtaactaatctagaacgattctccagttgtacaaaccattaggttcagatatattttacaaaggttcttttttattttccctcttttggtatttaaactacagcctcgtctgaaataaacgatagcttcttcacttgtttgtaagtttaaatcacacacaaaaaagtttaaccctacgatcttcaatgaattgagagaatttacagaaattggtactatacaaattgacggccggactaacaaaaaagattgggaggttatgttt

SEQ ID NO: 345516 - DNA, 1000 bp, Homo Sapiens
ttttttttttttttttttttttaagttgacttttaatgagtaaaaataaaaacccctcacaagtcaagtttactcagtagccaatagcctaaaatgaaattttaattttgcttgttcacataattttgggttttttttccccttctctgttctgacttctctcagtcgagccttggcgacaggaaaagaaaaaaaaaaaaggcgtatttctcttcatgcccctctcaccccagtaaaaagtaggagaaaaagaatacacagattaaaacagaattgtattatacattcacttttgagttatcaggtgaacttaattcactccagaacaatcacagagacaaagacaggcaagctgggttttaggctctcacccttgacactccaaattgtgctgggagtggccaaggctttgttagaaatggccctaagggtatatacactgcctcagctgccttgggcttcatgccctgggctcctccaccagggccagccccaataggtctttagttcgaggtagaggttctgctgttatttcccaggtgagctagaagcaggtgagtagcaagcactctctaagactgctttttattgtgtggtgacaagtttcacaattgtgctgatgatccgggatcctcgaggacacgtacacagatcaatgcttgggtttttaattttatcctggagaagctgatcaagttcgcaacgaagctcctttaccagttcagccacctgatgggaagcagctacaaaacggatccaaccatcatccagggagacaacgaactctcctctttgaagctgcacattcacttggcctcctccaaacaagaccagcgggtacacagacaccatgctgcagtctcggatgaatactcgactagtttttatcttctcgtggtacaacaggtaggggctgtcaaagtgtctcacctgatagttcactgatgaagggtgaatgtgtacatatccatcgttcttggtgacaaacttcaactcagct

SEQ ID NO: 345517 - DNA, 1000 bp, Homo Sapiens
tttttttttaatatgttgcaatttattgagtgtttactatatgacagatatttagtccacatataatctcatttagttgacaccaaactctatgaggttggtacaattatatttcacagaagatgtaagtgagtcttagaaaggcagagtaacttgccctaggttgtgaacttaaataaattcagacccaagacttggccctaagttatttgatcccaaagtctaggagtgtcattattacctcaatctgtgagctaaggataaacaagccacataaatgtgaagttttatttttcctacggcattaccctagaaaaattatttcatcttgccaatgaacaaaaagatacatgagaaaaacctatatccttgtaagttaatacttaaacattttcagaaaccatttattttgtatgagctggtagaaaccagagttaaatttaattaaacaaatttaaggcatgtgtttaaaacataatttaagttctttacattaaaataaatttgagatttaattaaatacatttaattaaataaaaagtgtgaatggctcagaatcgtttatgacatgatgctgttctgcagtgtttgtagataatatcaaatgcttctatattctcccttgaagtgaaagaacgtaagaaatgaaaaacactgaagaaagtttgcccaggtgtgagagtaaggggaagaaacacacttctccagcaaattatgaagatggtcactagcttctgaagcttgaatatgaaattatttggtagagtggtaaaggattgatgttgggtgacggtggagaaagaggaatgggctctagcgcctctctatggtgctggaggacaggggtgtgtgtggtaggggggtactgctttaaggcagacaatattctgagttattctctgtcaattgctacacaatcgatagagatacataaagggagaaaattctaggtttgtccaagccaaggcagaagggaggctccaaaacccagctgagagca

SEQ ID NO: 345518 - DNA, 1000 bp, Homo Sapiens
tttttttttttttttttttttttttttggctttctataaaaaataaacagtttatttacaggatttgtaaaatgttttctacatttatatagaacatgaaaagcatttagtaccaaaggttcaagaagtattcgtactctagcctttttaatcattcatagatagaagtctttgtacccactccttatgtttcttttcattcataaacaggtgtataaggaacaatgtcttataaacagcatgggggcaatctgagaatattcctcaaaaggtgtccaggttaaatagacatgttactggctgcacacaggcaaattctagtttgttttttttaagtattctacaacatttatttaaaaaggtaaatctttttgttgaagcagcaagttatctggtagaacttaacttctacaggatcagagaggatcttgctcattcatggccatatccacatgcccatggccactcagtagattgttgaaaaagcaaagccacaccattctctttgatgtatgcagagagttacgtagcaggggatgttctctgatttattccactggcaccattagtgaatatttagttgttttcataaacgatgctgtgatgaagactcatgtacatatttagcaaattttggtttcttacatgtgcctgtcatgactgtaattcattatgactgctccaggaagggctaatggggccaatatattattgcctgtcatgtggcacatccatgttaaggggctgaggcgtccctggcacggaatgcagagccctgagctagggcatcagcagaagctgagatagagatattggtcatggttgactgaggagccaattaaaacctgtttatgcctagtgttccattattggaacactaagcatgtgggagttatttatatcctactgctcaaggtcatcgccaaggtgtgattggaaaaattcaaaaaattgcaacctcaggcataaatgggttaaggacatcccaagcccaagtggt

SEQ ID NO: 345519 - DNA, 1000 bp, Homo Sapiens
tttttttttttgaagcttctcacatctttattggaaaggcacagctaagcccacccttgatacagcattttccacttctctctgtagagatcagacgattgaacacgagataagctgactatatacagacacaggtgtgggtgttgcttttttttaaaaacacttttgtctttttttttttttaatatcccctttcttaaaagacaagctagtatactggaaaaagaaaaaaataataataaaataaaaaccaagacaactttagtaccctcatctttatttgggaaggggagggggaatcctgggtcgcccaccctcaccctgctcctcccagctcagctaagctcgtccctcgtgcccccccttttgtgggcgatgggagaggaccaggtgggcgtggaggtgtctggaactagcagaggtggtgagtggggcaggtggaggtgggagcatacctgggacccggggtcgggggagactcggggtgcccaggacgggaaaggggcagctagcattgcgtgcatgcagtaccagggtgagagggctgtggcccaggcagactgtcggttacacatgttcaaaacgggggaagggccggggctgctgcgcttcgcgaggtcttgctcccttgggacctggtctcccatctgaccctccaggccttagcttgcctcacatgtcagggcaggtatccacctaaccaggctgcaggggaggaggagggaagccgggaatggggtaggaagaaagctagaggtggcctgcaagctgggctggggcccccgccggcggccaccataaatactatgggagtttagccaatcccgagctccgctgtgtcttgtgctaaacattcctttctctccgtgcctctgtctcccctctgtcccccctcccaacctccctgtcccggccccctgctaatccgacttctcgccatcatcctcctggtgggtgtcaccatcgtgcccgttcttgtcttccttggagaggtgggcct

SEQ ID NO: 345520 - DNA, 1000 bp, Homo Sapiens
ttttttttttttttttggccctccctccctccctcttctgccatgtaactggaggatgtgctatgagtttgcaaacagctggactgtcaggctgctttttttccagatgttcctcctctgcctccccttcccctcctctcccctccttttccttccttccttcctttccttggagcactgagcaccatttggaagcttgagagaaaccaaaattaaagagagaaagagagagcgtgcacgctcctgctttgtctttcctgtgtgggctgtttgcatccattgtctcctccagaggtctgggggtgtcactccaggcggatctcagccaggggctggaaaggcccccctgtcctccctatacggcacagccagagtgtctgcaggggctggcaccccacttcctggctgagggtgaactccagcttggggaggtggacctgggaaccatggggcaccttggccacggtgaggtgggggtgcagctgccctggagactgtagtgtactcagcccctcggcttccagcctctggctcagcacttgtgccatgctttccagtgtgggagagggtggggcacacagcacatgcgggcccaggaggaccagctttctaaagctcagccgagggggtgcatttagccccggggccaagagggcccgtctcagagctccaatggcagcggcctcctccccagcgcctgccagtcgcagcagggccagggtcaggtgtaggttctgagagggcactaggaagttggcgcagtgtggggccacgtggaccaggtattcctgggccttggtcacttctgcttgtagcccaggctcggtcaccatgagggccacaaaatgtgtggggcgcggttggcaaggggctgcaacactaaggcgggcccttttgtcctcgggccaggccgcaggaccccactcggcttctgtcgtctcagcggagccccccgggactcccagggcctgtgcttccttgccccccagcaatgtggtcc

SEQ ID NO: 345521 - DNA, 1000 bp, Homo Sapiens
ttttttttttttttttattttttcccttgacagtactttattaattttcatccatattttacttgactaaaaatacaatgtatgaaaatttatctttaatagcattttccataagctactataacaatttattgatacatctgggattcagccaggtcttatagtatttaaatttataacccctgccatgcttagcattaagtaaatcagtatgcaagcagtatttaaggcaaagctttaagaatactttaaatttcatttgtaaatacatagatgcaagactgtttccataggaagtcacaaatcctcaaacagaaatatgtgtgttctcaatgttaccctgatacagaaatcaaacttggaagaaatatttttacattagaaaaaggactcagtataaggtgaaaacaaaattcccagtgggctagacatgaacaaaagtattcattccccaaagggcacatttctttataacagttttttcaaatctacctccctatttaatgaaagcatattcattaaatatgaaactatgcatacattaaaaaccaggatttgtttttaatgtgctttagcagcagtagattctaaaactgtgtcttcttgtcctctcattagtttgaataatcacactccctagagatcagagcattgagtctgaaatgtcaaaatgctagagaaaagagggagtaatttttaactacccagaaagaagatgcacaaatacatcttttcctacgtaggtcacggcatatgttggcttttataatttgggatttctcctaattgatgacccaccctattgggcagtgaggcatagcaaagtgttcctcagttatcacaggaaacttcaataaaatcttacatattgctatgggtattcacaaagaggaaaatgaagttgacttagaggataagactgattaaaagacactacaatgcatattagactgaattgaagaagagaatggatttgtcttatttttcaaaatttgttttc

SEQ ID NO: 345522 - DNA, 1000 bp, Homo Sapiens
tttttttttttttttttgggctgggacaagaaacatttaattaggggtctggggaatcagcaaggccccagacccatcatgcagcctcatgtacagtgggcattgggcccgcccctgggatattgctgggggggggggcctcatggcagcaaacagggcagtgtggcttgagaccccgctttgtgggggagaagtggggcaggggcctttgggtacgagggtctgtgtttctcccactgcatgggagggtgtaactgtgcccaggatgggggtggcatgggctggcacaatcaagggcataagaggaggatctgagcttgggggagggaggttggcaccgagaaaagcagctgtattaagagaggggtcctctctgtgtatgcccaccccaccccatttcctggtggccaaaacagaacattccaccttccttgtctgtcttccaccccctctttttcccagggctctgtgtccagaacaagggagcagataaagccagcaaaggggctcctgcagcacctgccctgtcccctgcagagcctggagagaagcaggagaaaggtcagcccagagggttgggttcctggggcggccgggcaaagcctgggacaggaactgacagtcacaggctcccctggcgggtggttcctgtgtgaccgggggtcctgacagtgaaatgggtttgctttgaccaagcacgggccaggattttgttctcagttgggtttccgtgtgtccaggcagctcttgggtttccttttctttctttctttttttttttttgagacggagtctcgctctgttgcccaggctggggtgcaatggtgcaatctcggctcactgaaacctccgcctcccgggttcaagtgattctcttgcctcagcctctggagtagctggcattacaggcagacccccatcatgcctggctaagtttcgtacttttagtagagacggggtttcaccatgttggccaggctggtcttgaactcctgacctc

SEQ ID NO: 345523 - DNA, 1000 bp, Homo Sapiens
aagtactgaatggcaaagcctttatttgggccaagacgatagggaaatctggggaagcgaacagtcactgtcaacaccgccagtaattattctctcttccaattaatggtgacatagattaattatcagatgaggcaaagccaattgcaatcagtcacccagagctgaaattagatcgttcctgacagcagcatgaaagtcacctgtttcattgttatggatttgctgtgagtaaaagagtggcaaagcatgctgggaggtgagtgagtttttcgttcatggaagtgtgaaatggcaaacaggtgaatgtccaattacactgttatctgaactgtgtgacttttcttgtcttttatttcagcatccaagatacattggttgtttgcttaaccatcgttttcgcatgtgccatctgtcaaagtctggaagaaacctaagatgtgttgcattaaatttgaagattcctcctgcacagctaatattttctgaatactctcctgagagtctgtctggaagttggccagcctcatctggctgaagaggaccaccagtttgaagtgctcctgccacagtgtgtgcatccttctctgcagctgacagagctgtttcttatctctaattgaagtatcaagtgatagctgtttatcatatatattgaaataattgtccttttcttttaagaatgtaaactgtagctgttgatactcttgagctaaacgcagattttcttcaagtgaatcagctattattttttgggtatcttgaagagttttttgtcttacagcaaggagcactctaaatctctgatcttcctcaaagattctctcttcacagtcttttttctcttgcatataatgatcaaacacagtttgtgcatgttcccttttaaatctcatagttataaatttgttcttcaatatttcaagtgtctgatcaaaacttttcttttcttcttcttttgcttttaattcctcattcaattcatttatttttgcataaa

SEQ ID NO: 345524 - DNA, 1000 bp, Homo Sapiens
tttggaatgtttaactgtatgcattttttattttctttatttttgattcttaaaattttttccaagaaatagaaatacttgaatctcaaattgaacagtgcattataaaagactgattgcattgtttcatttacaagtccattaattcacaagcaagtgcatttgatggaagaaggcatcttatgtgttctttggtgtacatgtgtttggattaagaaacacttcctctctgtctttaagtacaatattatacctgcaaagtggtggtctttctgggtatgtaagtgattttaacatgagtctctggatcttgtatgtgcatgtggaacactgcagatttgagctctggaaatatgtcaaaccaatgcttgaaatatttacaaagtcattataaaattgagcaagaatcttgacttcttgaagtttataaaatggtttgttcttttcataaagccttggctcttcaatcattccaagctgatttaataatttaaatgaaaacgagccatccatcatagttttatctggaacaattatactgagaacaaaataataggtacagaatggatatgtaccacttgtatccaaaaacacagtggtcctaagaggtcttccttccatcctttcttttaaaacacctttaaatagcttggcttgataacccagccgaggacatgatttttccttaaaacagtcacagtccacacataagctagtcttgtaatctttgtatgaacgacaaggaaatgaaataaaattgcagtttgtttctaaagatgccatgaacaagtgaactgctctctggtggttgcatttaatgaattgaattcctgagaaaattgatttaggacagccaggttgtttatttcctccatttggataaaaatctatatgtcccaagggctcttgaatgcctaaaccattggagtcagaatggatgacatccacaaactttgcatccgtgtaatctaatctgctatatggtggttttctggagaac

SEQ ID NO: 345525 - DNA, 757 bp, Homo Sapiens
ttttttttttttttttttgggaggaagatcaccctgctttattgcctgggccttaaggtaatcaggggtgtccctctccagccaggacctgggattccgtttcaggagctcgggctgaacggccaccttcctggtgggtctgagccccagtgcctggtgtgaaggggcagacgcccatgacaacagccaccccgcatgtcccggcatgtcccggcactgtgtgagccacatttgctgaagtctgggtcctggccctggcagggtgggctgggctaggagatgacacagcagcagcagctgtggcagcggcagaagggggggcagtggcagcagtggcagcaggggcagcagcagcagtggtgggcgatgtcatccccgcgccccacgggcggagggccagcgtaggtcagtccggcctggcgctgactgctgctgtaggggttgccaggctgctgccaggcctgctggttctggatgggggcagccccctggttacccttggcgcccttgggccctgggacctcggtcggctgcaagaggtgggttggctctggggcacagggccccactggcaggggctgcatctccgaggatgaggaacaggtggaagccacctctaactgctgccccaggtcaggccgcaggtgagcccgggggatgctgatgtgggcatatgggttcttgacgaccatctcttgggggtccatggtccagcctgtggtggcaacacggcagtctgtcctctcggtcttctgag

SEQ ID NO: 345526 - DNA, 1000 bp, Homo Sapiens; identical to SEQ ID NO: 161203

SEQ ID NO: 345527 - DNA, 1000 bp, Homo Sapiens; identical to SEQ ID NO: 161204

SEQ ID NO: 345528 - DNA, 1000 bp, Homo Sapiens
aataactgttcagctacaaaattttattggtatctttttatgttccctctagaggatgtaatgcacaaaagcattgccacggaacatataaaattacaaatgaaatttattgtaaaaagtagaatgtcttctagactggtgtcagtatttatgtcattcataaaccaaaactgctgtataatatattcattgtcagcaagttcatgtgtgtaaattgccatccaatgttattgactgatataagacagatattgaaaagacaatttaaatttactcttccaaacataaactgttccacaaaagcactgtaaaaactccttcaagattttgggttgtgcttgacatttatggttaactacataatttggtcgtgtcataatccattgtgtttggcaatttggcattaaacgcctgcagagcagattggatcctcaccacctcactagtagacagcttgagtctatgacgaagcaagcaagagaaaagatctagacgacgctgaccaggtggggagagtttatttacacggtctctgatctctagtagttgcaaaagtgctgaatcctgggatccctgagtataggggtagtccagctgcaaaatcaggtcccgaattgcttcagggtcaaagtgcatgctgtagccaaacacttgaatgttattgattttcatatagcccaggttccgggaagggtcaataaactccagaggttcatagtaaatgctctcattaccattgggaccattggacttgatgcgacttctcaggtagatgtgtactgtctcaaaaaatgtcttccatttgttccccagagttaatgtccagttataacactgcaggggtaggtccaacttagtccgctcccagtctggaaagctgttttcattcacaggcataaaccagctctcagagtggctgcctccgaagggattgacataaacagccaacactggctccaaggtgctgtttttagttaagcaaatctgtaaagagagaccc

SEQ ID NO: 345529 - DNA, 1000 bp, Homo Sapiens; identical to SEQ ID NO: 161206

SEQ ID NO: 345530 - DNA, 1000 bp, Homo Sapiens
aattcttctgatcatttattttcgagtgaaattcattaaatctaagactcaatttcatatatgtttgatcatttttaccttggtttttaatctcagcatatattgtaaaattaccttagtttttctaagtggaaatatagctccaaagtaaataaatgaaattaacttactaaaacgatgtaaaaaaaaaaaacttgtattttgacatattatagatttttaaaagaacactgtgttttgaaatcacatgtcaatgatcataaactgatcgatatctttcatagttcatttacggacatgagtcatgtgatttacataagaagactaggaaatcttcagacagggatgaaacatgataaagataaccttcagattttaacttatggttgaattctttcaaacattagtcaatatgtcaattagatataaacatacggtaaagcaaaataaagaagtcatttttaaaaattttcaaaatagtgtattcaggataatacaggtccagttttaaaatattttaaaagcctttccacatttaaaaggacaccgcctgtaactataaattctagcacttagtcatgatagccatatacttcaacaaaacattttacattaagaaatcataagatatattgaaactattttcacatttgcctacttttcctttttctgttttccttttaattatacaaatgctttatggaataactgtctggagtagacaagaggaaaagtactatgaacataaatacaaaaataaaattctggtatccattaacattctctgttatggagaaacattattgcaaatgtgctaatattttcatcacaaattgtgccagtacatgtttaaatattagacaaaccacttggttgaaaaactttgcatataaaaagtcaaatattctaacaattccaggtcattaggaggtttcatgtgtccataaacagatgatattctcacatcctaatatatgagcataagttaattttgggtata

SEQ ID NO: 345531 - DNA, 1000 bp, Homo Sapiens
ttttttttttttttttttggtttctgaatccctgtttggggccaaactgaccctggctgtacaggcagcctctctggcacaggccgcatctgaggcaggaggcacagagccctcaggcaggggacacagccactgccgggccccatgggcccagggacaggggaggagggacagttggctccctgggaggaggagcaggggctggcaatccccaaagttccctcctttaaaaacacgggtctagaaatgccttctcggcacacagtacagagtgcagctagaaggtccgactcgttttctgttaaagtatgttctagtgggaaggggaggagcttgcactccacatcacgtgtttactgaaaaagccctgtggaagatttccatttggcatctgtgtagcagcatcttgggttaacaagagcaaggaccagggaggtgggcgacgacactctgtgagcttaggcgctgggtcggggaggagggctggctggcagaccccaggctggaatgacaggatgaagtcaacttgcctcttgccaatgataaaccatgggttttaaattcattaacattcattttggtgataaaaattccttagggtgggagcaaaatcacattcccaagcaaatgttaaatcttcctgagggaaaggggtacagttaaacattaaattctcaaaataccactgagctcagagaggtgattgcaggtccctctgaggcaggctacaccccacagtgatgacagacttggcaggttctgcagtaacacggtcttcttcattcagccagcgagatcgacggtgatgcccactggggcacagaggaagggtgcccctcgctgggagggccaaggaaggctaccggaggggcaagtccagcccatcagggtcacatcatgggatcacagcagagttcagacagaacaacttaaaactctgcaaaagacactttaaaaacatgatctcttgaaaaaataaatcgcaacaattttcaacttc

SEQ ID NO: 345532 - DNA, 1000 bp, Homo Sapiens; identical to SEQ ID NO: 161208

SEQ ID NO: 345533 - DNA, 1000 bp, Homo Sapiens; identical to SEQ ID NO: 161209

SEQ ID NO: 345534 - DNA, 1000 bp, Homo Sapiens
atttattttgagacagagtctcactctataacccaggctggagtgtagtggcgccatctcggctcactgcaacctctgcctcccgtgttcaagcgattcttgtgcctcagcctcccgagtagctgggattacaggtgtgcatcaccacacccggctaatttttgtatttttggtatagatgggtttcaccatgttggccaggctggtcttgaactcgtggcctcaagtgatcctcccacctcgacctcccaaagtgctgggattacaggcatgagccaacgtgccaccagacgtaattctttaagacaaaaaagggagtctctgaagaaaagccacaaatgttcatccacctcatctattttgttccattagaaaatgcttagaggttagaacaggttagaatatgttaaaaaaaaataccagttgggatttggaataggtctaagggcaaccacatttaacataataacctctcctttgtatttgaaaatgacctcacattagcaggtgataaatctcaagctctttccagtaagagtggtggactctaccattctaaccccactcttgtcctgtatccctggacatgtccataggaggtgggcaggaaggtctttatgtgcacctgtgaaatggaactaagtttactggctccaaaaggttttgaatccatcacgtgggagagaatttactctcaaaatgacctgttctggatgagattcccctctttttttattgtgaagttgaagataagagtccgttttcggggtgggtaatcccaaagtgagcttgtttttttccacaaaatgttgtttggatttccttcgccgagggccacgtgatcccggcaggaaaacctcgttatgtgaacttgagctcttcacgtacggagaaaggctgctcgacttctcctccaggtcactgtcgctcagctctgaaaacggcttgctgcgacgggcaccatgctcatagtttgggcttaaaaattcactaccaagta

SEQ ID NO: 345535 - DNA, 1000 bp, Homo Sapiens; identical to SEQ ID NO: 161212

SEQ ID NO: 345536 - DNA, 1000 bp, Homo Sapiens
tttttttttttttttttttttttttcaatttttataagtttagttaaagatgtgaccatcttacttcattacatctccattaagacagtttggtatttcagttacaggtgtatgactgggagttcaattcttttctgtgataagtacgaatgactcaagctaccattcaatattcactttacagatatatgaagcttgtctactcacgttcaaaggttttccttaattcgtcttttatctaaatcagtcaagtctcttctcataaatgagaaatattaaatgagtggcagctctcaagaaataaaaaagtgactagcagaaataatctgcaacttctgtgaataagatttttctcagtgtctaaaataacaaacaccatttatggaccaaagactaggtgccatgagttttagaaattggtccccactccactgttatgtgtaccattatcccagtggcagagatacacagaaagccaaggctcagaggcagtaagtcatgggtccgaggcctcttgctgatgacaaaactggaatctgaacccacgtcaggcttacatttacacatacatgtatacaaatgtacacatatacagcttagattccataaaatacagtaatctagtggtggaacaaattatttctaataaatgttataaaatataaacgcctctctgaatcctttagaaaattaattttgccatgaagtacaaaaaggaaagagatacaacttaagtatgaacaaagttataggatactacaaacagttggtaatatatactgtctttaaaaatcatttctccttatcgaggcattaagccatattgtttataatgtgaagagctattggcatcttattttcctacccataaccatgaccatcacttattcatcttttcatgcatccaggtgcatggaaaggcagtaagtacaatttttaagaaaatagcatcaaaagcagattttaaatctacctgtttttcttcgtttgttttctccaa

SEQ ID NO: 345537 - DNA, 1000 bp, Homo Sapiens
ttttttttttttttgagaaccagagaacccatataaaacaaaatcagaatcgcttcccattacagtacataacagaacatcaatggtttggggaccatcatcatgtctagctataagaccagattttatattctagatatagaattatccagaataattctattgaattgactgattacaaaatgttaacagctggataaacggtaaaatatgcattatcttcacatgaaaaggtttcagtttataaatgcttaaatactgtatctattggcatttaataaaatctttccctgatcctgatttctgcactgggtgggggaagaaacaaacaaaagcaaaagcaaaagcctgctctcctgagccttttatatctccccaaacaaatgactgaaaccaaccaaaccaaaactcgcctttattttcctagtgttagatccttatcaatttgcatatctaacaactgaacgtagggaagttttctgccaatcagtggtcccctctgctcatcaggtaaatacctggctctttcagctttggaggtattttccacacagtgatacagcaaagggttttgtttttgtttttgtttttttttaactggaaaggaaagaggaaagaagggaaggaaggaaacgtgtcttggaagaggagatctcctctggttcttcagcggttccttcaggcctctagacactggcttatcccaatatccaggcatgactcttacttaggtttggctaagttctgttttctgcaaaggcaagtaaaggtgacttccaagtgttcagtatattaaagcaaaaggaagaaaaacttaaaggtaaaaaagaaaaaagtgcttgaaaataattctcagggacttatcttgagaggagaaacccccgtgtagcatccctctttctggtgttatccggtccctgctcagggcacaaagacctcctcggtccacgctctggagcagggcgggggacgggtggtgtcctaaaagactttctttagg

SEQ ID NO: 345538 - DNA, 1000 bp, Homo Sapiens
ttttttttttttttttagagaggtgtttttattctttggggacaaagccgggttctgtgggtgtaggattctccaggttctccaggctgtagggcccagaggcttaatcagaattttcagacaaaactggaacctttcttttttcccgttggtttatttgtagtccttgggcaaaccaatgtctttgttcgaaagagggaaaataatccaaacgtttttcttttaactttttttttaggttcaggggcacatgtgtaggcttgctatataggtaaattgcatgtcaccagggtttgttgtacagattatttcatcatccagataaaaagcatagtaccagataggtagttttttgatcctcaccctccttccatgctccgacctcaggtaggccccagtgtctgcggttcccttctttgtatccatgtgtactcaatgtttagcttctacttataagtgagaacatgtggtatttggttttctgtttctgagtgagttcatttaggataatggcttccagctccatccacgttgctgcacaggacatgatcccattcttttttatggctgcatagtattccatggtgtatatgtgccacattttcttttttttttttttaaggcagagtctcgcttggttgcccaggctggagtgcagtggcaggatctcggctcactgcaaccaccaccttccaggttcaagcgattctcacgcctaggcctcccaagtagctgggatgacaggtgctcgccaccacgcctggctaattttcgtatttttagcggagacggagtttcgccatgttggccaggctggtctcaaactcctgacctcaggtgaaccacccgcctcagcctcccaaagtgctgggattacagacatgagccaccactccctgccaccacattttctttatcctttctaccactgatggacatttagtttgattccctgactttgcgattgtgtatagtgctgccgtgaacatttgtgtatata

SEQ ID NO: 345539 - DNA, 1000 bp, Homo Sapiens
tgcaacacgtttcctcatttattttttctttctttttctttttttctttttttggagggagaggtccctgcaaggtcccttcccgggcaggggagggatggaaatgccgtcacagtagtagggactggagcgtctacaaggatggaggggagctactcaggcctaacgttagctacaaggaaaaaggacgccttccgtgacagatccttgaggtgtctgtgtctgccccaagtggccggcagtggccttccctccgggcccaaggcctgcagccacctgctctaactcttgagtgggggggcggggggggacctgcaggggctcggggacaggacagcagcaagaggcaggggccgaggacggaggccttcccgacagtggggtgggttgtacattcaagtgtgaggtgaaccctttggtggggagggggcccctgaagcctcggcggggccacccctccccgcggcgcctctgagtctagggagaggggctgctggctcggcccggccggcctggcttcacagagggtctgcggattgacactggttcttttcataaaaaaataaaattaaaaaaagcagcatgtcacgtccgttgtgaccgaggcctggtcgtcgaaggggaggccccgcctggccaggctaccttcccactggagacaggcagggggacaggtgctaagggacctggcaggcagggctggcaggccccatggcgcctgttccagcagatgacaagcccaggtcagggtagagcgggcaggaggggggacgagggctcccacaacatgattttgtgtaaaatatggcagcgacacacgctcagggccgggaggtgggggttagggtggggacggcggcaacatcgtgtaaaaaagtgtcccagttcccatagcaaagagagctgtgaccgggtgttcgagcttctccagtacaagggggaaagccgcccggcgggggcggcgggcagggacatcatttggtttcctggtgctgtcagt

SEQ ID NO: 345540 - DNA, 1000 bp, Homo Sapiens
tttttttttttttttttaaatattaacgcacactttttttttattatattaaaatcaggcaatggtctgacaataaaaaggctgcttatggaatactgttatgttaaacttcacttacaggatgttaaatccttagaactaaggttttccccccagaaaaagattaatggaaacatcaattgcttttcagacttgatagttgctgcttcaaaaggtggttttacacaaatactaaattaaaaaaaaaaaaaaaacctttagtacacaatgaattgcttttatttcggtatgcatccacatttcagcatttagtggtcctgaacagcaagtggaaagacgcagcaatttgccaggaggtcaagcccaccaatttcggggatctgctgtgcacaccgggttccttcttaatccctgctgaggatcttgggaagcagcagcagcaccaaaaccaaggcatgcaccggattcaaggttctttttgttccagttgtcagattccaaactagaccccaatggattgcaaggatgaccaaatgaaagccctgtttaaaacttcttcaatttttaaaagcaaaagcagttacaggaaagtaaaacaattcagagggatcatgtgtgcttacaagtatcttcatgcggtctttctccaagttcaaccaccaaggactccgagagctggcaggtctgagtaaccctggtgactattcttttcaccttatcaaaacctgagctaaaaacaatgcatcagctgatgacagcagagggtggcagggctgaggacccaatattcatttcccaggctggtggagagtgagtgagtatggttccaaaactaaacaagggaggtcagaggctctttccaaccttacctgatggcttctggccaaagcaaggaagtgtcatggaaggtgttgggtggtgacggtgcaaaaaggaacttgaggaggagggagaaaaagcagcacccctcgataaaggtgggggagagaagatatgggga

SEQ ID NO: 345541 - DNA, 1000 bp, Homo Sapiens; identical to SEQ ID NO: 161213

SEQ ID NO: 345542 - DNA, 1000 bp, Homo Sapiens
ttttttttaagctccatcactaacaactaatgaattttatttcaggtaaataaattcccacatacagtaggacgtttataccatgaaacaattagcattttattgctagtgcatataatgtcacatttgatacaattttagtacaagtgaaaaaatacactgtggctaacattgaaaagctgcaatcacatttatatatcatatatatttctttacaaattgccagtagtttgagataatagagaagtataaactactgacattcatatggctccacttcaaatatatgaattgttcgactataaatatattttgaaatacatttgttttctaaagaaacgtaaaaaaaaatgtgcacaaaaatatatataaaaaaatgccttgcaaaaagttacaaataccaccaggaccttctgtggatcgcatttatgcatggaaatgtcaccttgccaacagttctgattggaacctgaaaccctgctgtggcttcaggagggggtagtggcaagatgatggtttattcactgattttttcgcttctgatttcggaaacctcagagtttgttagtgcctccatggcatacataggcttcagaggcaatcacaaaacccagtcactcaaagcgagctctcagatttaaaattgcatttgattctgtaaagacttgtcttttgcgggtaagcagggggaccattacacatccccaggagagggccagctccattctggaggaggccaaagacggatctcacagagggcccgagctgtggggcaggccctgggaggagagggatgcagggcacgagccccagcaatcaccctcttcccggctggtgcggcgctgatcaggctacagaaatgagaagcagaagcaagattaagcatgctctcggagtcggggagagagtaggaatagctgggagaggggtctctgagcacagtcccagtaatagtggcttctacatggagcccacagagccaatcactgaggttgaaaga

SEQ ID NO: 345543 - DNA, 1000 bp, Homo Sapiens
ttttttttttttttttttccaaagaattgtaaaatttattgtataagtattgcagcttttcagaatgtcatcattgccactaatgattactgatacacaacaagcagtttcttcaggcctgtggattggcatccaaatacagagtcttacgcagcggggacgtgggtgcgcgccccgcatgccacggaaagcttacataagtttaacttgaacagagcttgggaaatggggctgcaaaggagagcagttcccacgccaggaaccaacgtgaaagcattggaatcagcacaacagccatggaatcaggcaggcaggggaggacgggctgtgtccttctgagctctatagtacagcaagatttcaagcagtttccagaaaaacaacaacaacgacattttctttccttatcgacgggatattttatggttctggaagcttcgtgttgcacataggaaaaaaaatttctctgaaacgtacaattcatagggacgaccaatgaggacagggaatgaacccggctctcccccagccctgatttttgctacatatggggtcccttttcattctttgcaaaaacactgggctttctgagaacacggacggttcttagcacaatttgtgaaatctgtgtagaaccgggctttgcaggggagataattttcctcctctggaggaaaggtggtgattgacaggcagggagacagtgacaaggctagagaaagccacgctcggccttctctgaaccaggatggaacggcagacccctgaaacgaagcttgtccccttccaatcagccacttctgagaacccccatctaacttcctactggaaaagagggcctcctcaggagcagtccaagagttttcaaagataacgtgacaactaccatctagaggaaagggtgcaccctcagcagagaagccgagagcttaactctggtcgtttccagagacaacctgctggctgtcttgggatgcgcccagcctttgagaggccacta

SEQ ID NO: 345544 - DNA, 1000 bp, Homo Sapiens
gatttttaaacagttttattttttaaaattactgaagtccaacaggagcattattcagcatttgaggccccagccagtacagcgctgcctggaataaaaagtaaaatgtcccccggaaccccagccctcagttctccctccctggacccccctcctgagaatcttctcacaaccttggcttactgactccacattacggccgtgtccccgctctgtggcccggtggacgcaggtagctttgactcaaaacaggaatttgtttccatcctttcacggtcacaaataataaaaagcagcttctggacaacaatgaagttgagataaataccaggaccagaccggccacgggagccgtgggtgagccgagggtccccctcaggacccctgcatcctgcctgagtgtgcagcagctccccccgacaggagcgtcagggccggtctcctccgagtctcctggcagaggcgttgctgtcgcagctggcactgtgcatggctggcagcagaagtctgtgcttggcagccctcgacacctgctggatgtgtttgcagggctgggcaggcacctgtcccacggcccagccccgagggtctcgtggcaccagcctggcaggacgggcagcagggagttaacgggagccactgcgaggacactgtgatctcagagctgcgtcatcgctgatggaagaggtgacgtcccctccacagaaagcgcctttgtgggcgaccctggctcgtccccctgcagcccccacgcaggtagtgggctgccctctccctctcccggagtcccctcggggcaccgagaacagacccctccttcatccctgctgtcagctcatgacaccggacaatttgggtcccaattatatctagagaaccaggggaaaggtcacgttgtctagacattaatccagcactgtggcattttttcctgggcctgtatcctggcaacaggagggcgagtgggggccccagctcctcccctcctcagaaccttctg

SEQ ID NO: 345545 - DNA, 1000 bp, Homo Sapiens; identical to SEQ ID NO: 161214

SEQ ID NO: 345546 - DNA, 1000 bp, Homo Sapiens
tttttttttttttttttttttttttttttttttttttttgctgggtagctactatgtgcaatttattcacgatacaacatatgactgcctactatgctccaggcattacacaaagttctgaggatatacaggctaattaagtgcaacaagaatacttagaattcgtacaaagcagtagactgtgctatgagagccggtaatgagggtcctaggttagaggggaaaagaagacttcccagaggacgtgatatccaagacaaggcctgatgataaacaggactggccaggtaaggaggggaagagagagccaggcagagaaaacagcatgtgtgaagacgactcacaggcaaaactactgttatgggtgcctcacatacagatcctcagtgatcatcaatccagaccaactctattctttcctttgtggttgttattccttccaatttatttagattttattgtttagtgaaaatgggcctctagtaaagtgtccagtcacaggtgaaggccaatatcagagttttaaaatgggaacagagcctaattatttgaaaaggagactcctaagatgaggagcaggtggtactaagcctgccaatggcctcagtcccttggcaacatcaagtcaaagcaaatgcctgagtacaggccttttgccagcagcaagtattttctgagagccacccaccggcccagagcagaagcaggaagagaatgaacatgtctgagtgttcccctggaaggctgggccttacaaggacaggcttctgtcagcatggtgacagtcttctgtgtagatgggggagggagagaagtcccaatgtgccacccatgggatccagcagaaactgggctctggagtattgctggccccagtggactttcatccaaggagttctttggtcttcactgccagatgcctgtccagttctgccactgtgtcatcggccatttggctgattggggaatgggtacccgaattagcgtcccttccacttct

SEQ ID NO: 345547 - DNA, 1000 bp, Homo Sapiens
ttttttttttttttttttagctgttcatatgacatactttatttccaatctacaaccattaaaaacgctttataagtttacactgtacagttattctcatgtctgaaataagacacaggggcagggagagctggtggattggactgcagttgtcctagcacccgatccatcctaggaaggagccttttgaagacagaagtggaaaggagagaatagtggacaagagaggtggacagttggcccaaggatgcccttggtcccttccctcccatgggccttgccctgggggtcccccagggcccatgactgcaggaccctcaccaggaaaccaggctgagtgggaagggggttcacagtattggcgggggctggggaggggccaggatgaggaggaagggcagcttctggctccctggggggtcctggcaggccagggcacccaggtggttgcagtccctcgacgagagcccaggcttctccttggtgtctttctctggatcccctggctcggagctcacaaagccaaaggcagggttgttaggcagcttcttgccccgggcatctccgccagcaaggtaaggggaacagtcgagcaaactttcaaactcagacatggaagaaacagatttggttctctttaaaccatttcctccaagctcaacttcggaaacagcctccttgtcgtggatcttctcactgcgtgtctccttccagctgttgtcctgcttctccagctccgagtgcttcaggacccaggggtcggcagccttctgcagctggcttaggcggttctgcagctccttcacctgctgctccacctgctgcttctcaccctgcagccgctccaccagctgcagcttttcctggctccagttgcgctcactgatctgcagctgccgagtcagctccatgacagcgctgtaggactcagctaggaggtgctgctgctcctcacgctcccgctgtagggctgccttccagtcgggccctgcccgctccc

SEQ ID NO: 345548 - DNA, 1000 bp, Homo Sapiens
gtattccaaaatccaaaatcgaaaacacttccagtcccaagtatttcagataaggaatattcaacctgtatgaatgttcctagggaaaaacagacagccaaaatataagaccatgtataagaactaacttcagtacacagaaagaaaaaagtaccaggggaagaagaaagagaccgcattttaaaacaactatacaaatttgagctgtaagaaacactgacattttctgtaagcatgctagagcaaataggagaaattcataagacattttctagaaaataaaactaatataaaaaaacttatcaagatttgtcaaggaaaaagaagaaaagttaaatataatggcaagaaaacattcctaccaattttatttatccaggcatgtcttaaatatggctgtttgttacatacagtgattctgcagacatgttgacataacagtgaaatacataaatatgtaatgtggataaaacaaagtcattacaattaaagactcacccctattagtgagtttttggcatttccaattgtagtcaaatttaactacaaattttgtagtcaattgaggtcaaatttaactacaaattttgcattgtctacattgaacacatgattcttaaaagcctcatgttttatttcagaacaggactcaggaagctgcagactgtgcaggaggttgtttagggcacaagtcatttctcccaatattaacttataggcagtctccaaaacaggaatattcttcaagctgagcactgcttgataaacagcacgggctacagcaacaacctctttttctttatgataacgcaagaatagtagtttagatgatggtataaacagtttttctacaaatgatgatggcagtttcgtatttatctgttcaacaatcagcgtgagtaaattcaagactgagatgatataatcggtaccacaagtctggcaattctccagttggtctaatccatatgtaatgaccatgtcacaatgtatagtcatg

SEQ ID NO: 345549 - DNA, 783 bp, Homo Sapiens
tcaggagcccatctggggctgcagcagccagcacaggaacaggaggcaggcagaggcacagggacctgagaaggctccattgctcatttgcttcttgatccatttggtgtatttggtgatgcgggtgtacacacctggattctgtgccttcacgcaggccttttcccaggacaacaccccagccagaatccatctgccctcaacttcacaagccaatggccctccagaatccccatagcacaagttttccccataattggtggcacagatcatgtcccccaggacaagggggacaactggggggaagaaggacttcttgtaatgccggtcacacctcttgttgtccatgataaacacctcagcctcctgcagctctggggtcagcatggagttggctgaaaagcgctgcttaacctggctccagccagtcacccaacactgcgtcccaaccttcaggttgaaattgggctccgggaggcagatgggctgcacgtactcactgaaggtgacaggtgtttgaaggtggacaagggcaacgtcacccatgatgaaggcccggccccagtacttggggtgcataatgatgtccctcacagggacccagagggccctgctgaagttcatgggctgcagcttggaggtgccaagcaccactgagtactctttggtgccttggatgcagtgggccgcagtcaccacccagctggggtcaatgagggcccctccacacacgtgctcattttccatccggaggctcacctcccagggccaatggcgggtcat

SEQ ID NO: 345550 - DNA, 1000 bp, Homo Sapiens; identical to SEQ ID NO: 157266

SEQ ID NO: 345551 - DNA, 1000 bp, Homo Sapiens; identical to SEQ ID NO: 161216

SEQ ID NO: 345552 - DNA, 1000 bp, Homo Sapiens
ttttttttttttttttggttaacattccaaacatgtataaccaattaacatggcctagggttttctttttattggtattcacttcagtaacttgaatccacagatataagcagtatataaccagaaagttacaagtaaacacaaattatacatgcaaatttctgttcacaaaggtcacatgtgcaggtacatgaattagaagcgtgcatctaggattatggccaaactgttttaaaaatgcagaaatgtaaaattacatcttgaaaatatgaagagatggtctacacacttcaaaaatcaaatgttgcttataccagagatgtatgacaatcacgggattcaagtgacaagcagtaagatctcaaaaattaatactggtcaaagataacgggaatatttttgcatttcactgaaaatacattgactactagaatacgaaatctagcaggaactcagggaaaaaaattacaaaatctaaagccaattacttaatatttcttattacctaaacaacagcatgacattaacagaaaactgcacctgcatttcaattgccaatctcacgttaattaagttctccaaaaatgaaatgcaaccaaaacgggttcaaactccaaatgaaagtctgcaaggctcagattaaaacatggaatgtttcagatgaaagtaataaaaacactattggttttgttctttattgaatggaataaaatgttgacatttctttgaaacttggaactactaaatttcatttttccaaatggttctacatttttttcttagtggtgcaagttgtcttaagtagcttaggaagtcaatctctacaaagtacttctgtctgttgccattctgataaaacaaaaactattcattaacttaaccatatgtgtattttttttgctataacacttaacacatgaacagacatctattatttctccactaaaacaaaagagtacaatagttttcttctaactatcagtattgtatttaaaaaagg

SEQ ID NO: 345553 - DNA, 1000 bp, Homo Sapiens
tttttttttttttttttggatgcaaaaataaatattattgtcctcctcatccttcttttggccttctagcccgccctcccttctccaggccaaaaagctcagaataatcacatacacagggttagggtgcctgagggtgtttactgggagcggaggtcttagaggccaggcctgggttgatcacacttttctggtgatgcttttgggggtggcaagctcatagaggcgaggggacgcctgtcgtatccctcgttgaggcccttgcgcactttgggcttggccagggagatgatccgggggctggccaccaccttcttggtgacatccagcacctcccagcgaggatctcggtcaggaacgcacttgtccgactgagctttgggcctggccaagtgaaggaggcggttatggtctgacacatgtggcttgggttttggcacggggtcccactcttccaagagggtggctggggccttcggctttgacaactggaggatccgcgagctggggactgccatttgggctgccctggatacctgggacacctcagacatgggcatgctccagaagttatcacgaatcttcggggcggccagttccttcaggcgactcgacgctctgtattccagggaggaccgaggaatgggccagacaggagtcgtcctgttgttgttgtaatattccaggtagaatctcttgggccgagacagttcctccacgcggcgggacaccgcgggcactgtgatggtgagggtggtgtcctcaaggaaccgctcggtccagtacacagagggcctgtctttcaggacttgccagtttatcttgggctctgccagctccatgagcctcctccgcctcctcctcttccttgctttggtcatggtggtgctggggagcttctggctgatggacagccggctgatttcaggaatgtcctcttccaagtccttgtccaggactctctccaactcagaaagtgcctctttgggatccagggtct

SEQ ID NO: 345554 - DNA, 1000 bp, Homo Sapiens
tttttttttttaaatattaacgcacactttttttttattatattaaaatcaggcaatggtctgacaataaaaaggctgcttatggaatactgttatgttaaacttcacttacaggatgttaaatccttagaactaaggttttccccccagaaaaagattaatggaaacatcaattgcttttcagacttgatagttgctgcttcaaaaggtggttttacacaaatactaaattaaaaaaaaaaaaaaaacctttagtacacaatgaattgcttttatttcggtatgcatccacatttcagcatttagtggtcctgaacagcaagtggaaagacgcagcaatttgccaggaggtcaagcccaccaatttcggggatctgctgtgcacaccgggttccttcttaatccctgctgaggatcttgggaagcagcagcagcaccaaaaccaaggcatgcaccggattcaaggttctttttgttccagttgtcagattccaaactagaccccaatggattgcaaggatgaccaaatgaaagccctgtttaaaacttcttcaatttttaaaagcaaaagcagttacaggaaagtaaaacaattcagagggatcatgtgtgcttacaagtatcttcatgcggtctttctccaagttcaaccaccaaggactccgagagctggcaggtctgagtaaccctggtgactattcttttcaccttatcaaaacctgagctaaaaacaatgcatcagctgatgacagcagagggtggcagggctgaggacccaatattcatttcccaggctggtggagagtgagtgagtatggttccaaaactaaacaagggaggtcagaggctctttccaaccttacctgatggcttctggccaaagcaaggaagtgtcatggaaggtgttgggtggtgacggtgcaaaaaggaacttgaggaggagggagaaaaagcagcacccctcgataaaggtgggggagagaagatatggggaaagccc

SEQ ID NO: 345555 - DNA, 1000 bp, Homo Sapiens
ttttttttttttttttttggacagtgagcaataaagtttaattaaccagtactgtgaggtcaccttcacggactagcatcccttccgtgagctgaaggactgaataagcagaagcacaggccaaacccatccctccatgctccccactgtgcagatgggctcactgaggctctggtgtacattgcttgctcagcactggatctatttcgggccaaagtgtcagcagaactgatacccacagggcatccaagtccacatccagactgggctccctctaatgccatctcttaaaccgaaccactgcctgccgatggtgagtttccaatcacgagctgcactgggggtgctggaggcctggctgggcacacatcctggtgggtatgaaggggatttgggagtggcatctagaagatcagcatgaggggcacagaggagaaagaacccacagcttgcagccagcaggggaaactggctcagcacacagacagggccccagtgaagcccatccaggccagctgccctaagtacagacctgagtgggacaggacaggactgataactaaggaaaacgagagaaactgagtgtgcaggggccctactgccttctgcctgcaaggaggctatgctgggtgtgcaaacagaagagcaggtacatgaagatcctcactgagggggcatgaggagacaccaggccagaagaggcagggccagcagggcctgcgagaagaccaaaggagacagtcagtgaactatgggggagcccggcaccccatccaagctgctggggtcaaaggcaagtccagtgccagcccctccaatggaccaggccctgcctgcctgctccaagctgctgcccatctgagaggagccctctatgggtcagtgctgggtcctccaaggccaccgtcacacggcacctcagtgccatggttaaatctagggacccgagatcactagattcaccgctatttcctggctgtatggtctcgaggaagtcatt

SEQ ID NO: 345556 - DNA, 1000 bp, Homo Sapiens
tttttttttttttttttcccagtcaacaggttcggatttttcggcagacgtgcaaagttcagatacaaagatcactgtaactgtcagagaggtaaggacctctgatacaatggatttaagaggttttttactccaacagtcagggcaagggaaagagaaaaccgtgcttctcttggaatctcttccaacaagggggtttcctccagtcccctccagatgcgttgaccgcgctgggaaaccgagtccagggccaggatttgtttttccaaagccgcgcgaccccagcagggcttcagatccgagttcccagttgctcttcagtctcccccgcgttcttccaaacgctatcaggagccacgcaggttaccgcaccaccggtcatttccctgtttcttctaaaagttctccagccaaatttcagcaatttatttaaaaaggcaccaggtcaccgcgaccttcgggcggctcctcaggcctcatggggtagtttggtcaggatctgcgcgcccctcgacgtgatcagaaccgtgtgctcgaactgcgccgacctttgattgtctagggagaccacagtccatgcatcctccaggactttaaattcaggggatccctccgtgatgattggctctatagtgaatgccatgccctcctccatgggtagatcactgtcgtttgcatgatgccaaatttctggatgtccatgaaagtaagatcctattccatgtcccacaaaatgtggacagacttgaaaaccattctgatgagttatgtggctgattgtgtttccaattacagagaagggagcccctgctctgcaagctgcaattgcttcatctctacacctcctggcaacctccactaactttttaccacattcgtccacattgcccaccaaaaatgtttcagaggtgtctccatggtagccattgtaatagactgtgacatcaatgttgataatatctccatcctgaagaggtcgactgtcaggaataccatgaca

SEQ ID NO: 345557 - DNA, 1000 bp, Homo Sapiens
cagttttgtctagtgtatagggacagcatttctgagagaaagcttattcatttctcaagagtaaagatctgttaagaatatgggatcagagtcccactgagaatgatagtaaaggggatgggggcgttggaaggccttgaatttgaagcaaaggaaattaccctttctctgttttctgactcaaggttagtctctccctctgttcaactgccaggccagcccaggcctttgcagagttatcacagaaaaagagcatgtagagaatcagtgagttgcaaatttctgcagaaaatagaccaaagagctagctgctctgatgagtattgctgatagcttaaaaaaatagcttctgaaggtttataatgtacagtgaaaaatgattcccttttcagtcctgtgtatcccttttaccagggctttgggtttcaggagaaagtaggaaatcttgtccagttgtctcccaggggcgccctgcagggaagggagctgtacacgagacaatgctgatgtcggcagtgtctgagaaccttacccttcctgagacagattctgggagtgggtgtaggatgtgtttagaagagggctggtaggggtgggcgttggagcagaagggtcaggaagcagggggtggagctggaccacaggggtgggcaaggtgggtggaagagggaagagcgtatactgtccagtaggaggatgggttggggaaggagaatatccaggctggaggttgggtggcagggagcctgtgtctgatgttcctgaggaaatgtccggggctcctagggtcctgcgtgagggtccaggaaagagtccacgagttccattcaagagttcgtgtatcctgttcaggtatccggggatttggtccagggacctggaggtttggttcagcagaccaggaatcttggctctgaatccctgctgccacttcagaagcccagagccagtagttctggctgaggcagtgaagtttgtctccaacaatccagaagtcctg

SEQ ID NO: 345558 - DNA, 1000 bp, Homo Sapiens
ttttttttttttttttttttttttttttttttttttttttttttttttttttttttttttttttttgtgagacgaccactttattaaatcaccaggtgttcaaaacatttgaaaagaagactatgactgggaaattactgctgtgtgtccgacaccggggctttgtgtgtgttaagggtttgctttgaagctcaccgagaacttcaacatgggcttctcccggggcctcaggaggcagatggagctggggaagccccggagccgaaggcggctcactcccccgtcggggacgatggtgagcctggcgtgagtgatgacatcttggagctctagggtcaggctatcgaacagatgactttggttgggagacaacttggtcactggaagcagtggtttccacttgtgggccgggagaatccacttttgcctgatcacggcttcttcttcctgagttgtcaggatgcacccatccactttacagctgtcaggagcattgccttcaaaatattttgtgtcaatttcaattcgagttattactccaggatgtgccaatcggaaaactgcccattcacaacccggaaccaagagaatgccattctcatcattttctaatattggtggccggtccagccttcttgcagtttcccaaccatccgccatagactttgccccgccaactcctattatattgtttgggtgcccaaacttagcattactaaatcctacacagacacccccaaaagcgatggccactaggtctgcaggttctttggggtcagttgcagtccagtctttttgtccagtaccgaatactctaagtcgtgcaattccaccatctgaaaaggaaaggtgccttagttattgtttgtaaaaatggctgcttgtgtatcatacactacaggaccctcctgtcttctccagtgtcatctcttggtaggctttggccacacccacctgctgtttctcaaatacaacaagcccactgccccagggcctttgc

SEQ ID NO: 345559 - DNA, 1000 bp, Homo Sapiens
tttttttttttttttttttggacttaactactgcactacttaaagattttattgtatagcttggacaaaggcacaagctttatggaagagcaattctgggtaataattacataatgacattggggctacaatacaggtaatgaaactctgcttcttcagagacagcaccccaggaacactttcattttcctcttaagcataggccattttctcagtttagacaacagccctctactcagtgagcctccacccttcacagagggacagctccctggctggcaccatggtctgggctctgtccctgccaaccctgcagggacatgtggggcccccaatgggcagccccagcctgaggctcacatgttctccttgtcaaactcacacatgaagtacatggtggtgtggcaggccacgtcgttccagccgcccgaggccaccatctccacgcagtcctcctcgtcgtaggcattgttgggctcaccgctgcgccacttgttgaaggtccgcatgggggagtggtcagagtacacgaaggcgccctccttctccaggtcgttgatgccgatgaagacacgggccaggccggcttgcgccaggtatgcggccatcaggccattggcagcctcgtccttgggcatgctcagcgtgcccccgcggccctggcaggacagctgggcgtccgcgtagcgcttctcctccttcaccagcaggtagatcttgctctccgtctcgcgcacaccggcgacagcattcttgatgaacttgagctcgctggtcagctgagagacctggttgtccatctccccgatggccttgcgcagctggctgcactcacatgggaggcctggttctccattaggaccagggggtcctatgtcaccggaatctcctttctcacctttagagccaatgggaccaatttttccatgacgacccacactgcctttctgtcctttgtcccccatgtctccctgtgatcccatttctacaaaggacgagg

SEQ ID NO: 345560 - DNA, 1000 bp, Homo Sapiens; identical to SEQ ID NO: 161217

SEQ ID NO: 345561 - DNA, 1000 bp, Homo Sapiens; identical to SEQ ID NO: 159116

SEQ ID NO: 345562 - DNA, 1000 bp, Homo Sapiens; identical to SEQ ID NO: 337669

SEQ ID NO: 345563 - DNA, 1000 bp, Homo Sapiens
ttttttttttttttgccgctcatcttatttttttacaaaataaagctcttcccttcctcctccatgttccctgcactccagttccgaccccagagcaggagggaagacgggcagggcgcccactacatggcatgttcctgctcctggggcaccacactgccccgctgtgaggactccagcccgccccagaagccgaggtttctcctgagcgaggtgagcacctgtacctggaggttggagacaggggcagggctggcagccagggctgcggtagccatggtgcggttcagcagcggattgggtggcgtgctgctgggcgggtgtgtggccttccaataggcttccaagtactccgccagatgctcgcaggcatcctccaattggttctcatccaggatgatgtcaaacatttcaggggggcactgtgccagcttttccgaggccgctatttggacattgaggtgtttggactgagactttcctcgggacttgatgagcctttgaagtaccttgggagaggtgatcttgatgtaaacaatgatgggggccagcgaggtcttggacagctgggctgggtgattgatggtgtcagcatccagagcgaccaactgaagggtccgggccagctcgaagattcgctcgatttcactctgcacctcagccaggctggagcgtgtgttggagcgctcaatgatgatgtgtttgctggggttgttgagaactgagcgcttagccagggaaatatctgccgtcacacgagtgatggagatcctgccatcaaaccgatgcttcaagaagtcaaataaagctttctgcatcatgtctgtaacctcgtagcccttgagcgacggtcccaccaggatgatgggcctcatggaaggcaccacgtcataggggggcacatgctctgtcttcttaaagaaggggatgcgtttgccatggggtggcggggtggtgacactgctaacactagtcttggcagagccactctgctcaccaa

SEQ ID NO: 345564 - DNA, 1000 bp, Homo Sapiens
ttgccgctcatcttatttttttacaaaataaagctcttcccttcctcctccatgttccctgcactccagttccgaccccagagcaggagggaagacgggcagggcgcccactacatggcatgttcctgctcctggggcaccacactgccccgctgtgaggactccagcccgccccagaagccgaggtttctcctgagcgaggtgagcacctgtacctggaggttggagacaggggcagggctggcagccagggctgcggtagccatggtgcggttcagcagcggattgggtggcgtgctgctgggcgggtgtgtggccttccaataggcttccaagtactccgccagatgctcgcaggcatcctccaattggttctcatccaggatgatgtcaaacatttcaggggggcactgtgccagcttttccgaggccgctatttggacattgaggtgtttggactgagactttcctcgggacttgatgagcctttgaagtaccttgggagaggtgatcttgatgtaaacaatgatgggggccagcgaggtcttggacagctgggctgggtgattgatggtgtcagcatccagagcgaccaactgaagggtccgggccagctcgaagattcgctcgatttcactctgcacctcagccaggctggagcgtgtgttggagcgctcaatgatgatgtgtttgctggggttgttgagaactgagcgcttagccagggaaatatctgccgtcacacgagtgatggagatcctgccatcaaaccgatgcttcaagaagtcaaataaagctttctgcatcatgtctgtaacctcgtagcccttgagcgacggtcccaccaggatgatgggcctcatggaaggcaccacgtcataggggggcacatgctctgtcgacttctgcttctgtttggcactggcagggggtgtggggcggcgggtgccagtcaccacatctcccagactggaactggagttatcgcctgatttgctgg

SEQ ID NO: 345565 - DNA, 1000 bp, Homo Sapiens; identical to SEQ ID NO: 161218

SEQ ID NO: 345566 - DNA, 1000 bp, Homo Sapiens
tttttatctatatatatttaatagatttatgaagaacatatataaacatatataaatatagatgcatcatcaaggaagacttaggacacatgaacatgtggcaggggttggaaagaacataattctttcccagaaggggaagggggagctatacttagtcggatccagctacaacatcattggaagtcatttctcgccaaaaagtatctccacagcaaattctggtggataaattttccatgctttttgtttatgtggattatccaattcatttcttggtagacaaagcctgttattttgaataaaagacgtgttgaaccagaagaaaaatggacaattgtcatagtatttaggaagattatcccaataaaggcttccactctcaggtccctccctctctctcgctattgctcccacccatcagtcgagcacaggtctccgggatggctcccccttccagttggccctgtgtgctgccctcttctctcgaacaatttcctaatgaagtactggaaaagacaacctttttctccattactacttggacttttagatcacatacatcaccacgaatcgaataaataatgaatctttttataaagagtatccgtcttggagggagattccagttgtagagatgtttcacttgtgcaaaatatccaacatatctattctgagaaggagtttctactccctgaaatttattgctgtgggttttattggttcgcctttctccaaaataatataggctttcctcggcagttaaaaatatttcggaggcaataaggagggcacaaaccatagtcccggttcttcctttgcctcctttacagtgaatcgctacgatgttttcaagatcttgagccatccactcatttacttccttggtgaaaaccaccatctcatgtagagtggggacattatgatcatcaatcatgattctactgaccctattatggaagtgcttaggatcataagctctttcactgcatagattgta

SEQ ID NO: 345567 - DNA, 1000 bp, Homo Sapiens
ttttttttttttttttttttttttttttttttttttttttttttttttttttttttttttttttttcttttgacttcacttacaattttatacaaaagcagaagttattaaagattacttttcatatttaccaccatcttcttaccccaacccccatgtctgtgtgtaattaaaggaagcttgtcaagtaagctacctatttagtgctcggaatgaaagggagtgtgtgttgggagttgggggactgcttgcgtgaaacatttctctcttctggatttaaaacttagtcttggttgccaatctgttaacagacagtttgtaaatgaaggggaagaaaaatatataaattagctttctaataaatctgaaattacaaatgtgaaccaaagcagggaataaatacttgaccaaaaatatgtaagtaagtgggtgttggggaatcacaatttttgaatatctcaagtttttgctttgaaagttctatttcaaagttcttcaaaatgatgcctgatgttcctgcatactgtgttccaaatttaggtaaatacaagatggaaactgtgaagtatgtaccttcaaaaaagaagaaagacactgacattttatctatatatatgtaatagatttatgaagaacatatataaacatatataaacataaataaatacttcaaggaacatttaggatagatttaggatatatgaacatgtggcagggttggaaagaacataattctttcccagaaggggaagggggagctatacttaatcggatccagctacaacatcactggaagtcattttctcgccaaaaagtatctccacggcaaaatctgatggataaattctccgtgctttttgtttatgtagattatccaattcattttttggtagataaagcctgttattttcaataaaagatgtgtgcaaccagaagtaaaatgagcaattgtcatagtatgtaggaagattcgaatagaaaaactgcactttcacatcat

SEQ ID NO: 345568 - DNA, 1000 bp, Homo Sapiens
gaagtaattagcagaagatttactcctattaagctgtgctattattaggcctcgcctgtgtcaataaaaattttcttctgtgttcctggtggacacagagttaacagaagacctatggagaagctcttcttttgaggtctcttggaaatagacaagaaaaaattacagtaagtggataaggtgaagatacttgcccacctctgggccccgtaaattacccagacaaggacaggtaaacctttcatgcagaaaatgctgactttgagcaatggcaaagggttccttgtctggtgtctaggaccatcttacttacataccctgttctcccccagctcacctgcagccagccctgcctcactcgcacctgccttcccgtaaggtaagaggccactccaggaatgctggaaggacagaacctgcatagaggcaaggccaggcgcaagagatggggcaggggagaagctgaaagggcagctggtgccaaggtcctcagccatgcagcatgtgccaggcccctctctggatgctcacagctgggctaggaggggagggcagtagacagaccagtgataccatgtgggatgcagtcttgagaagcacacagggagaaggtaatgccagagccaagcaggcatcccccaggtagaggaagaagaatggagaaggctttccgggcagggcagccacaagtgggcagagcaagaagttgagagaccggccactgcatgcaggcacccaggaggcagagtgccagggggaagcagcacagcacagggttggggtcttggcccttcagccaggctcccaggacacatcctgggctcctcaccaagagaccttgtgcatttcacttttctgagctccattctccttttctccaccaagtggaatctacatcctcctgtggggtggtcatgaggattcaatgagcatagagctggggtgggaggaaggcggcacatcctagagcagcagtgacagctgtgggccactccagggg

SEQ ID NO: 345569 - DNA, 1000 bp, Homo Sapiens
ttttttttttttttttaaataaatatagctttattcatctttcagagattgccatttagcctagaaaattacatcaaaagatgaactgatttttgcttgaaaaagtcaaccatgtttaattgctcacacaattttaattacaacagatgtaatttctaatatataccatttgatcacacaccatttttatgttctggagtgagacctgggagtattttgcttaagactttctcattctctaaaactagctttggcagttaacaatgtggagaattcagcacaaaaagcaccctagcccagcctttttattttatttttttaaatctctatttaacccttcaaagtttcctttgcagccatatgcatttctaggtggctctacctgtagaaggctgcactttccaagcggcgagggactttaattctcactttccaccactccagcctctgctggctgccttgaatttttgcttccatcctctgacttctttttcttctgtgcttttcgttctaggttaatctgagcaatctcttcacttttgtctgtgatgtattttagcagtgaattactcctcctggctaagagcttcacatcttcagtgttaattgtggttcttttcgcatgtcttgcaaacatttcaaggtctttggcaaaattttcacactgtcggaaagtcagctccgaaatggccgcaatggtctgtttgctgaactgcatctctttgtccaatgcaacttcctcgcaaagacaacccacagtatagtgaactgctgcctttagcctcgtgttcttgcaacttttctgaaggtttgaacttctcaaaagacaaggggcagggtagacagctgctgcagtgtaactttgtagagaggaaactcccgcgtctggagctcattcccgcgtttcttcagtccgtcctctttaaggtcgccactccgggtcttgcttttaagcctcttcacggcaacgttctcagcctctgacgccccatatgcccgg

SEQ ID NO: 345570 - DNA, 862 bp, Homo Sapiens; identical to SEQ ID NO: 161220

SEQ ID NO: 345571 - DNA, 1000 bp, Homo Sapiens
tcaagaagccaagatgcttctcctgataatgtctgtccttctgctgatagtgctgctggtgtgtatacatttcttttctgatgcctcactctctgagtcactcatttccacatcggggacatacccgtcattctcattgtcggattttaatttgctttttgccctttccttggctggaactcggcctaagcccaaatatgggtagtctgagtgctggtggcaggccccatcgtgggcctctccctgctgctgccgttcccccttctttggaatccggaatcctccccagtttttcactgggctggcaggtgttgtaggcactttgactgcagtctgattatagtttactttgattagggagccattgcacttgggcactatctccttccttgtgccaggtgctgactgccccactccaggggaggtggcagctcttgtgttgtccagatgcctctgggacacatctgtggacctgagaggcttgtgactctgtttaaaagatttgtcctttaagtctcctttaatgagatcacaatgaaaacgattgtctcttcttttcccatggtctggcatcaccacaccatttttctgttgtgctgatatgagacgtgcttctgcaaaggtcttttctaaacccaaaaagctctctgggaccaccatcccctcccttctaccacacaggtctggctgcttcagcagggttttgccttcacttccagggctattctgcaaaggatctcgcttatggggctttttcagcgaatgaaccaaggaagtacccatttgttttctgaagaatgcagaatgccacttcaagtcctctatcttgggagcatcagggccaacagaaggactgttaaacaaaagcatgttttccagtgaggaggaggagcaggaagaaggcacacctgaaactctttcttgctccaaaagcttagtgtaaagattgaatatctgttcctggactttgcacacagaccgtttaatcttttccctgcgg

SEQ ID NO: 345572 - DNA, 1000 bp, Homo Sapiens
ttttttttttttttttttcaagagacaaaatttaatatatgcacacagttttatatataatgcagcatcacaccatgtagggcatttactcttattttatacattcagatatgtttgaaacacttcttaaggctacaaaacagaacatagaaaaataaacaggaatatattcaacacttacaaaaagtgatatgataaagaatataaagtactagtttccttttaacacttcaaaagatatgtatatatacttttttttacaagtaacatcacaaatgatcacatcttcacatgctcttaaagtattatttgtactcagtgtaaggctattatcgtttttcatacataaaattttctagctctgtaacacaatgcaatttttaatccattcaagtaagttcaaccccaaagttgccgcttcccagcattaagacatgcacccacccctcttctaagattttctaaaacttgtatttcggggagaaagacctcttttaaaaaataatcccaattagtgggagagtaaatggctgacattagtagcaaaaccttagttatctgaaaataacatattggaaatgagacattattaggattttaaacaaacaatagcatttagacataaagtaggaagcaaaatacagtaaacagaaatagtgtagccaaatatgcattctcttcagctacactagagtggaccttgcttagtacccttaagtaaaagacaaaacatttacctcatctaaaaatgaaggtaaaacgaaagaggcaaaaataaatattgctagtttctaggatggctgaatgttttctaaaccagaaatggttagaaaggaactttattgcaccaagtcaatcataagcaagtttgcagttcacaggcattttaattcaaccttgagtcacaaaggaaacaacacgctgcaagaatacagtctgcattaaataagatatatcagcattgtggtctgggaaaacctatgcttgccaggacaaggca

SEQ ID NO: 345573 - DNA, 1000 bp, Homo Sapiens
cattaattaatatattttctgcattatagttaacatatgtactttcttcgtgtcaccttattttccgttaagtattgatattttgttatattcaaacatgagtacatttcaacagtcttttgcaataaataccataaaataatagagattcgcataataaatattctttacaataaaaaagtttaacagacttttgtcttaaaaatagtcagaattcaactttgtgatttatacataaaatatacaaaaagcaccacaatttgtggttaaggcaaggaaaacacagaagagattagaattactcaactgttaactatccaaggggccaaaaggaccattaaggagccaagatcactttaggcagcatagttctgtgacacatatagattgatcagctataaatatcaacttgagttatccaagtgccctcaatgacaacaaaaatttggtgagaagcatggggtgaagaaggaaggtggctgagtccttcacaaatacgaaggctagagtgaagatgggcaaggtccaaccaatattatctccaatgtgaagatttacattgtaaggcgaatctaaaattacatagaaagaaaaaatacacttggcatctccagagtaagacaacaacaaaactgagggggaaagaaccttgaaggagaaagaaggagagggcagtggttaaaggaaaatttttacgttatagcaaaaaatatatcccccatgctacttaaggggcctatgctaggaagatagccctaactggagacagatttaatacataccttatttaagcaattaaacagttgctttttaaaaaaccaatttccctgctcccacggtacccaatcaaaacaactctaaatcactgtagtctggatgtgggtgtatgttcatgtacacaactttagaaagttgcttgcagaacaaaaaggctacacaaaagcccactggctctcaataccctcaagtggatggcagaggctcttgttgaaagtgggag

SEQ ID NO: 345574 - DNA, 1000 bp, Homo Sapiens
aattagaaaaatgtacaatttattaatataaatgtataaagcaaatagaacacattcatttaagctagacagacgtcgacacaaactttcaaattggattgtcagtttcatcaaatttggaataaacagaaaaatacagtatttacagattttagtaaaactaaacagaaatggtacaagaaggaaatttatttttcacagaacaaaaatgacaattttgactcaggtacccacataggagcaggtgaagttctcaaaggacaactttttttgttgttgtttttttggtaagcaaatgaaaaccaagacatatttttctgctcttttatttatattgatgaaacctcaaagtctgtactcaaatacttattaaaatatatccatacatatatgatttcttgtcaaaatgcatcattcttcttcaaatacaaaaacaaaaatattttcactttcctaaaaccatcactttttcttagatcacacttttatctttcttctgagtatagccctggaaaagcagtttgaatgcaaagccccttgacaaaatatctgctttttaaaaatgttaatttaatacacaagaaaaaaaaagcctctgggagaagaggataaagaagttaggatttctaactcctaggctaaaaaacagcatatcagaaagccattcaatttcctttacaatgctgattaaagccttcattttaatcttcattataaatggaggacattaatccctaagctgtttttaaacaattaatagtaaccttcttcaaccctatccatgatttccctgaaaagcaatagttgagttctatttattcagtgtaatggactggcatttcattttaaataaaaccatataagcatgtctctatgtgagatataaatgttacactcatctatgtacataatgctatgtcgtggagaaattacagtagtaaaataatgcagtctttagcaatgtcattttgaagtaaatgataaaaagagtagatgcttg

SEQ ID NO: 345575 - DNA, 1000 bp, Homo Sapiens
tttttttttttttttttttttttttttttttttttttttttttttttttttttttgccttagacacagaagctttatttttctataaaattattcccgagagaaattttcttttaaatgcccaaagtaaataacttatatcccttcttgaaaacatccccaaagatagtctgtcagaaatccttcggtcaagcaggtcagctggctcccatggcccttggggtggcctgactctgtcactattcctaaaaccttctaggacatctgctccaggaagaactttcaacaccaaaattcatctcaattttacagatgggaaaagtgattctgagaccagaccagggtcaggccaaggtcatccagcatcagtggctgggctgagactgggcccagggaaccctgtctgctcctctttttcccagagctgtgagttctctagccaaggctgcactcttgagggagagccaggaagcatagctgaggccatgacaacctcactcttcacctgaaaatttaacccgtggcagaggatccaggcacatataggcttcggagccaaacaggcctaaagaaatagttgacacacttcctcccccaggtcatctcccctggagtcaagggtctgccaaggctaagtgcaaggagacacttctgttttgaaataaagaagttccacatgcctttgctttgagtctgtgtgatatcaatctgcttggcaactgagattcttttcttgctgcgcagacgtccttgtgtgtctttattttgtgtgtgtgtgtgtgtgtgtgtgtgttttgctgggataggcaaagtcttttgggacacgaggtcctcaaaggtggtggaagatgaacaaaaccatcctcggggctgaaaagtgagggcttctgaactatgcaattgcagagggactttctttccaagtacggcattcccgatataccagaaaggggtggaagaatgtcagaagaatggcaagcatgaacatcacattcacgtaa

SEQ ID NO: 345576 - DNA, 1000 bp, Homo Sapiens
tttttttttttttttttttttttttaattgaacaaatatttattaagcacctactttgtgccagacattgtgctaggcaccctcactgtgtgctgttcccacagcacaatcatctgctcagaaattaaaaccaagaaaaggaacactgttgcaaccgtacaaactgggggggcggggggcagggggcagtagcgtggatgcaggcaactccgggccagaaaatgcacccaccagaagcttgttttccatctctcagaaagtttccactaaacagttgttttaaagcctctcgatgttgacagagaggaatgttgttctctctgtgccccccggggctggtgtctggtggacattcaaatactctgaatgctatttgataaaaggagcctgatggcttggtgtaaagaatatcaatatttggattacaaaatgcgtgttttttcagttcatatggttgcaacagcccttatgaaagatataaacatccctgccctgactgcataaatgttgaaggtagacctagttctggattcctgagtcagaatcttccagttgtccacaacctcacaaggccagagaagcgagaggagatttctattctgaaaaggagtgagtggacggcacaactggtttggaaacacgacaaactgcgcctgcatttacagaagcaatgcacacagaagaacgtcctagagctatctggtctcgcacacacgcttgggactcacgggcggggcctgggcctcggccagccctagttatcggtgcccagcttggagagccctcggcggaagtcatgcaggtcgtcaatcttcccgtccagcacctccaggaagctcttcaactccaccttcaggtggcgctgtcggtatttgctctcctcaatgtctgtctttaaggaacgcactttgtcttccaggttttgattgtctctctctgccgcctctagcttctcagagacatattcgcactctgacatgagctgaggtatgatttcact

SEQ ID NO: 345577 - DNA, 1000 bp, Homo Sapiens; identical to SEQ ID NO: 161221

SEQ ID NO: 345578 - DNA, 881 bp, Homo Sapiens; identical to SEQ ID NO: 161222

SEQ ID NO: 345579 - DNA, 684 bp, Homo Sapiens
ttttttttttttttttttttttttttttgctagtattttatttgtatttttggagaagatatagagtttcatgagaaacactgatttttctcaaacaatagaaaaagtgttttttgtgtgtgttttttttttttttttttttaaaaacccaaaaaacaaaaccactgtcttagaagaagaaaacaagtctcttcagcaagcatgtggccaattcagatgggaggaaccagtgaagttagaagttacacacaggaagtgagttcagatttatccacaaatgtcttctggtctagttctgtaaggctccaaatgggccatctcagcttaaaactggcaacaccctctcaaagctctcaggatcccatctggtttgaacctggggcctcattctccaggaggctgcatctgtttacagaactcatcaaactgctgctgctccagttctgtcatgactctgttgagggcatagatctctgctctttgtctctgcttcagctcctgctgggctgatttctgtttggccttctcaactctgctgacagattctttaactttggttttttctttacgtgcaggtggatccatggcttgacttctggatatttcttaggaggctctgatctttcccgaccgggccactggaagttggagcctccgccgagtcgcagacaacgcctccgggag

SEQ ID NO: 345580 - DNA, 1000 bp, Homo Sapiens
ccttctatgacactttttattctttacttaaaagccacagcaaagcaactggtacatcaaatatgtcttttatgtgtgtcacagaagcctttcacaaagtacatttatatttaggaaattacagaacttttataatttgctatgtttgaaatgataccatagtacttgaatatagagaagcactttgaattagaaagcacttgaaatatatgactttctgaactttgctaattcttatttaataataactctgtgtgagaatggtcccaggggccaggtgcggtggctcacggcgtgtaatcccagcactttgggaggccgaggcgggtggaccgcccgagctcagaagttcgcgaccagcctgggcaacacagtgaaaccccacctccaccaaaatacaaaaaatgagccgggcgtggcattgcgcgcctgcagtcccagccactcgggaggctgaggcaggagaaccgcccgaacccgggaggcagaggttgcagcgagccgagatcacgccactgcactccagcctgggcaacagagcgagaatccatctttattctttatctggatgtcatttcgatttttttttcaagtgcagtgaagaattaaagatctcgtccaccaaaaatactccgagtgtgcatttcgggttttaatatggtattgtctgatgggtttgacaggctggcggtccaagttgaaaaaggtctgtgggtgtctaatagtcaaagatgcctttatgaagctttagaaagaccagatatggtttgccttcaattaagaaaaaggtggaatataaagatatttgtacttatataaatatattccttcttttcttctcctcctcctcctctgccttcaactttcttcttcttcttcttcttcttcttcttcttcttcttcttcttcttcttcttcttcttcttcttcttcttcttcttttttaactctccttttagagttaaagactggagctaagaacaggggagcaatagacaga

SEQ ID NO: 345581 - DNA, 1000 bp, Homo Sapiens
tcagaacaccaagaatgcttagattcaaattcagaaacagcatataccaccaaaaagtgcttcttttctacctcactccatggccaggctctccaggggcttgtctaaagcagagtcacttgttctcagatgccagagtagaagcagactcactctatgcaggaccacggtgatggcttccatgctgagggacaagtggaccccaaaactctgtcccttactgttgctcccgtgatctctgatggggctgccttttgccacctgggaatcacttgcacccaaggcttatgtgctgttgctgaataggtttgtattcatgggaattcagtgggacaacatccagagaggaaacaggtacatgaggaagattccactccacaagatacagaacccacttctcatcctgtgctactgacattcaggttcgagaatgtattgttgcttccaaaagtaaccctcaaatgttcgaatcacaagcaacacattgctgcaagataaaaggcacatgtctgtaagacagaggtttcgaagatagttacaaaactgtccaccagcttctgtccatagtgccttccaaagcttcataaaactggccatgaattatgcaagacacacggcaaaacacttcttcacagcatcccttgcaaatggtatgaaggaaaggctgtaccacgtcaatgccaaagactgcaaaatgcagaagataagtgcaagtcccttgttatgccaccaaaaggcagaacacagggtaagtgcaaaacacaacagcaccatgatagttgcaatcaaacgagtaggctcaaacattcgcttcagctgtttcactggtcccatgaggaagatggtactcccaattgatgcgatattaccaaaggtataaaacactgcgaagaggtgtagtcccttcctgggcacccacagcagaacagtacccagcagtgagcagagaattcctatagcaaaacacgcaatgaagccttttatcctggtactccagctt

SEQ ID NO: 345582 - DNA, 1000 bp, Homo Sapiens
accatccactgattgtcgctgcagtccacggcgttactaagcctgcgccacccacgtgctgccccaggaggcgctaccaggctcttcgggccacaggcctctcctccactgcatgtggcggcagggcgggtaggtcgcagggctccatgattgtggggcagcttcaagggcacatggggcagaggccctcgaaggtcccctcctcagtaggggatgtcattctgatagtactggatcatgttgtaggtccggctcctgttgctgaggaagcagctctggatgaccttcatgatgaaatttgcagcctcgcgctcagtcatgttggggctaaacctgtgcttcaagaacttgattgtctggccgcgaaaacagggcaggcccgtgtccaacatgatagtgaccagggagacgaccacatccatgtagggcccaggctcaccgcacagccaggtagcctggacacacatctccatgaaccacttgaagggtgtggcctccatcttgccccccatgatcatcaccatctcatccgtcagcttgatgtcgggttcccagccgagattgccgcccggcgagctttcaaacatgaagccaaagtcgatgtggatgatatggcccttcttgtccagcataatgttgccgttgtgtctgtccttgatctgcagcaggaacagcaggaggctgtaggcggccatgcttcggatgaagttgtagcaggcctgctggaaggccagagtggactcatccccgtactggcgtgtgaagtagtcgtacatgccaaagtctgtctggcggcccagctggtcccgggaggtgcagtcggggatgcactcgatcaccccgcacccaggggcagtggccaccacgcggtagggaaaaacaaagaggtccaggccgaccagctggaagatgttcttgaagaggtcgatgatctgcagggccagcatgtcctgggaagccgggaggcgcaggatgcggtcagttggcgtccttgcacccc

SEQ ID NO: 345583 - DNA, 1000 bp, Homo Sapiens
aaaaagttttattatggaaaatgcatacaaaaaagtggacaaaatggtataataaactttcacgagtccatcacctagcttcaacaatgatcagctcatggccaatcttatttcatctattccccatgtatatacttcgcttctcccattttttttgaagtaagttccagaagtcatattatttcttctgtatatatttcaaaatgcatctttaaaaaataaatattttaacacaatcatcacagtaccatattataccttaaaaattaataatggttcacagtatcaccaaatattcagtaagttttcaaattttcaaccatcccataaatactctttatttttcttgtttacattaagatcaaaataaagtccatatattgcatatttctttaatctatggattcctgccacccatctctctatttgtccttgcaatttatttgttgaataaactggaacttgtatcctgacattttccatgatctagatttgctgttgcatctccaacgtgtagcataatatgttcctctattcttatgttttccttaaattgggaggcagatctagagaactgaccagattcaggtcaggattttgtttgtttgtttgtttgttttttgcacgactgcttcccaaatgctgtttttcccttcagaggcatatgtctagctgaagatactgagtatgtaacttctgcattatttccttcatcaggatcctttgcaaacacagttgtaaccaacatatttactggttgaccttccagaaccttcacgtgtaactcctttccagggagacactgggggaagaagggcctgttatcattgatgtcagtaactgagacgtaaaccgccatggtggcgtttcgtggtggggagccgcggtctgtcactagcacagtcatctcatggtgcccccggtgctcacgatccagtgccacccaattgattaactctcctgtattaggattcatcttgaagaattttccatcagacaa

SEQ ID NO: 345584 - DNA, 1000 bp, Homo Sapiens
ttttttttttttttttaagtcactaagcatttaattctaataaagtatttgtgttacaagaaataatttttaacataagaatgtcaaacattttcatatttacatgtataagcatttcccaattgttgatagaaaaatacattgccaattctaatattttcactattcaaacatgaacttttaatctctagaacagtaaattaattaatatgttttgccattaaaaaagcaactaaagcaggatttttaggtaaaactctaacagtagtatgtaaatgtacctttctttggtaacttttcatcaacatctgggctaaaaagcaaacctgtttttacagattcaattcgattttttaaactttgttgatttgcaagtcgccaaccaacactttcatatctattgacaccagaacatccatttacttctctgccatttttccctagattgaatttcaaacgcagagatcttcgaaccttttctttatggctgattttaggagaaaagcagcctgcttttcctgattccactctgcaaacttttttgcctgcaattcttttacttcgccttggcacacctgcagtgatcaaatggtttccaccaatgagtacaggagagagtgaactctgagatgacccttctgagcttgtatcgatgtgaactgataccggtgtagaactgctattgaagagattacttggcaacagctcaaagttaaaattgtgcttgatggacttccttttcttacttgagaaaccatgagaagaatctactggcaatgtacgcttagcatttggtgtaagaatcactggtgattcagatagctgggcaattctttcttcttgaggtgtaatagaaggtgttctgttaggtttaaatttatttagtgctccactaacaaaatctcctacactttgtcttctctttctcttatattcaccaggagtttcatattcaccttcttcaaagccttccagtgatggagtagcacagagaccatca

SEQ ID NO: 345585 - DNA, 1000 bp, Homo Sapiens
tttttttttttttttttcccccaaaggaatgctttattgacaaattacccattattataataactttaaggaaaagatacatcggtcaacacccgcacaacctgccttctcaccacaccccacaggccgattttaaccctggacgaagggcaccgagcgctgggcttccctggcccctgcatctctgtcgtgtgtggagtgccatccccaagggtgtctgaactgtccggggacacggctgtcagaggacacttgctctaccgaacaggacaccttgagctgagcagcccttcccctcccgggagtggcagagccgggcacaccacaggcaggccctcagtgtcctgccaagagccactaaggcacagagctccccctgcagaccacgccatctgacatgcagggccccggtgtgcgagagaggctgctggggtgcgactatttagtaacaggaagagatctttgtagctcctgagaaaaagactgtaacggcaatcctggctgatgcccacgccccaccctccacctgacctgtggggtcgtttcatcccaagtacagcaagcaggagggttggagtcactgacgaatgtgagccgggccaggcccatgcaaaggcagcactgagaaggggggcacagttcttttaaagggtgctaaagacagggttttccttctcttggcccctcccattcccagaggctcaagagccctttagggcagggcataggagccagcgggagctgccacggttgagaagagaagcaggttttgtacactgggatggagtgtgcgtgacataaaacacctcaactggaagaggctgccacgcaggccaggtgtaaaattccacacaatgctcacaaccattaaggaaccctcatctatatacatataaaaattagaaagaaataaagcataaggcaatgtaaggcttgtatttcagcttgagtccaaagaaataatattctatgaggctaaagctgctttgcctaatttaaa

SEQ ID NO: 345586 - DNA, 1000 bp, Homo Sapiens
ttttttttttttttttttcacatgctgatgactttatttttcacagactgaaaaaacagagcctggcatggtgactcaagccttgagtcccaactacttaggaagcttgagcctaggaggtggaggctgcagtgagctatgatggtggcactgcactccagcctgggcgacagaacgacaccctgtctctgaagaaaaaaaaagtcgaagcataaaatgttcacagcagccttttctgtgtgtggctgcacgtcaggggccgtcgtcttgcttccaccaccaggggatgactacgttgaagggaggcctgtgtgaaccgctgggcttccgcagctcccgcgtgtggtcagcgccgacgctccccatcaacgctttccagcacaggagccgggacctggacgtccatcgccggcggtgcctccagtgctctttgacttgcgcccttcccgggggctctggggtccgcaggacaccgccatggaccggctgacgtaaccaacaaggcttgggcttttctcttccccagtgagatttccccacgaccggcacagcgtcggccctatcctgtgcgcttccatgaacggaagcaacaaagcctggcctgggacctcggcagggctgagcatgcacagctgtggctctgcataaagggacttgtttagagctggcactcaacaagaggccttcagtcagcggattcccaggcctgagcaaatccgggggcggaagcagctattcttatgatggcacagagaggttatgtggagaagatcgtttgatatacgcttgcctttgggctcaagtcactcaaaaaggtggtctctatcttcagtgcaaaaggcaaccccagcagagcgaatgaccctccattgccctccgtgaccctgtgggctccgtgagacaggagcaggcgggggtctttcctctgagcttcctcatggtcccctgggagggtagctggtcaagagaggcaccatccatttctaccagaagctggttg

SEQ ID NO: 345587 - DNA, 1000 bp, Homo Sapiens
ttttttttttttttttttttcatttttaaaataaagttatttaatagtctccatttaattggtttatttgctgttaataaattggcaacacaaggaagggccccatgtccaggctcaggcaggagcggctgcctcaggcagaggcagggcaggcacagctgccccgtgccccaagggatggagggaaaggcccctcacttctgggagaacccccttggatgaacacagcggccaatgagcaaacagaaccagaggagctacaggaaaatgaggcagaggggcaggcttgggggaaggcagcattctctggtacccaccacccctgcccagggctcagaagcctttgcctgggtccaaaggccagggacaagggaggcttggctcacagatggggggtgggggtcacccatatcttcctccccactctgggactgactgacagccaagaaaccggcaggagctcacacagagctaatgctaaatgtcctcttacctctgggtggccctgggccccagggttctgaaggaaaggtgggcatggtaccctgtcctcattatggggactgaggctctccatgacctagggccctcagacccagggggaccaagggcttctaggacttccctcccaccaagcctgtacccaaagacctggggcaggcagagagcagcagggaggaacgggaacagggcagggcgtgtggcatcgtacccacgctcacccacactggcccagcagcctcccgaggcctggcccaaggtcactcctcagtgaagtccctgtctatgtccatgtagggctcctcaatgtagctaacgagagcagagggtgactgccggtccgggttcaacaggatggacactgtctccttccagtatgagaagctgatgcaggagctgttctctaggcaggtgctgtccttgtccttgtgcaggtagtgctgctgccagaagcgcagcaggttgtggaagttgttgagcaggaagccggggtacttct

SEQ ID NO: 345588 - DNA, 1000 bp, Homo Sapiens
ttttttttttttttttttctttttgaaatgtaagtatacagattttaatttatttttaagaataattgtatattttaaaaacaggacacgtactgtatgagtaaacagcgtggctaacaccaagtccacactggtaagcttttgagaaccatttacactatgttgacagtagtactgctgcaggcagacagcggaagaataaataatagtgcttcaagaagagtagtgattgagaggataggtaaagagggcgcctcatcgtggaagctagagcaggaacacctccccagtagtgacatgtgcaaagttccagatctccacgacaaagacagctcaacccattggaacaaacagactcccaatgtggctggcaactgcgggggtagaagaactcaggcaaagtaggcacaggaatgggggagatgagagccaagggacaaacgccgagaaagcgttccgacaagcatgtgtgttcatacatgcatacccccaacaaagggcaatgcactgtgtaacagaactgaacacaatttaacaaagctgctcccagccttcctgtcacctctttggcagtagggcaggccatctcaacttcggacacacaaagacattctcttcaggaggaaggctgtcctgtgtggtggggacaaggcttcaggtaagagcaaagctatgatagctacagcattaattgaacatgcctaaacaaaaaagatgttaattactagttacaggtatacatgccaaaattacccccagggatgggcatagtcaatcattttcctacagtggtgaaataaaacaagctttgatcatgcttcagcaagtagaattatgtggtagagaagtcaggccccatatgctaaaatttgcacttcttgccataaacttttcatgtatataagtcaaaaccaagtctcctaggaccactaaacctatgatgggctttcaactgtaacactcattcacatctttaagttaggcccatggtcatggaacc

SEQ ID NO: 345589 - DNA, 1000 bp, Homo Sapiens
ttttttttttttttttttgacagcaaaagaaattttattcccattttctaggggacagaaacagagcccagtggtgcctagcatgtttctggcaagggtagtgaaaagaccacttccttttgggggaagtctttcaattaagaaaaacacacgcaactcctgggggtggctccacctgtacccaggacagggcctgccactccaggggctcccaggctggattttccaccagagcagtcttgggggcaggagcctgttagaaatgcagatccccagggacctgcagcggtctgggcagtacctccaacacagctgcttaaggggaggcagtccggccctcatctgggagcgccgtgctgacgctgactgcacgctagggctctcggggttgggtggacagggtttctccgagagatgggctcccagcagccagagcacactgtgggtgtcaagctgctggtgggaagcaggctgttccctgagaccatgacagggtgaaggtgggaatcaccagcccccacactcaccaagaaatgcttttgctacatgctggggcttttttctttttttgagagggagtctcactccgtcgcccaggctggagtacagtggtgagatctcggctcactgcaacctctgcctccccggttcaagcgattctcatgcctcagcctcctgagtagctggcattacaggcacacaccaccatgcccagctaatttttgtatttttagtagagatggggttttgccatgttggccaggctggtctcgaactcttgacctcaagtgatccacccaccttggcctcccaaagtgctgggataataggcatgagccaccatgcccggccatgctggggcttttctaagaacacaagcacaccggagggtaagacaagattctggagaggcacagacccagaaagccaggggcacacaggagcctcgccagcgagggcggcacaggccatccatgcggaccctcaaatctcatgtgaa

SEQ ID NO: 345590 - DNA, 1000 bp, Homo Sapiens
ttttttttttttttttttttgtttgtcagactgaatgttttatttcaacagacatccctggtttaaaaaaaaaaaagtggtggtggggagggttcaacattttatcacacctgacagagagcaaaactcccaccccagaactcagagccccttcggaggcatcacacaagtctttgctagctccaggacagaaaggagctgaattttctaacttgttaagaaaaatctatcaaatatgttcattctcgcagaggcgagggctgggtccttggggaaagagatcctgggcttagagcagctggggtcccagaggtgaagctgggggccaggccagctgggctggcaggagatcctgggagcaatcagttccagagccctagaatccatatttggcttgggtctgacggcggctgagcttgttctctgaccaggtgttcttcagttccagctcccgctccttggcctgatgaataagatatgtgatctggtgtttccgccgctgctggcctgttggctgctcacctttctttttgctgaatgacttcatggttttctcttctgtcaatgacttagtcatccattgctgggccccactgagctggtcatcacctttgatctccacaaagttgatttcttctctccctcggttcctcttgccctgcagccgcttaaactgataataagcaccagcggcattggcatcgccatatgtggaaaactgattgtagctgtagtcgtccccaggcttaggcatccaaggggccccacttgaacctgctgccatcttgaattcaaggggggcattggctgcatcgtcctggaaagccggctctggttccgtgcctggaggcagctcttcagggacagtggggatggggtaagggtatggctcaactccaggtggctcagccttttcagggagggagaaaaagttttcgggggctacttcctcatcactgtcgtcttcttcctgcgtgatctgctttgtcacctgcagggc

SEQ ID NO: 345591 - DNA, 1000 bp, Homo Sapiens; identical to SEQ ID NO: 161224

SEQ ID NO: 345592 - DNA, 1000 bp, Homo Sapiens
ttttttttttttttttctcataaattcattttatttcaacagcaaaaagattagctccatccctctgattgggatcacaaagtacaatcttttcagcatgggttttctcaccatgccacaaacagaaagaggcactaagggactgataagggggtattttctgtctctggcagtattatattgacctgcaataaaaacatctgatcttacagaacaggatacctcttgaagaggtatagtttattttataatatgtaagtattccaaatacattcattgtatgaattagggaaggaaaagcaataagaaacatttcatgaatattcattcctacactccaaccataccaagtcttactactttatagaattcataatttattagccaatactattttaaaatactatttccgtactgtaaaattgatattagaggaaaaaaagtcacacacgatgcctaccaccaccagggtgaaaccaaatctttatctgcctatggctgctgtctgggtcgattgaggcagcagcttcattttcttcatggtttacccagacagatgtggaaccaaagtgctaagtgcatatttcaagcatctgttctgaatatgtttaaagccacagtaagttacaaaaggcaaattcatagatgctctttgaaagtgaatgtaactattatacttggtattctacttcccccacgcccccagaagtttttgatgctatagacactgatatatagtttgaaactctcactataaaattactaggctaagtctatcaagacttgaaagtttgttttgctgaggtaggtgaaagggtaatctctgttctttccaggtgactgcatctgcacaggcttccctgggaggacttcatcaacagcacagttacacatcaaagtcctttagctctccccagctggcgcctattttcactttcactttcaatttcacagacagttttacagcactttccatttcattcttgacaatctgagctac

SEQ ID NO: 345593 - DNA, 1000 bp, Homo Sapiens
tttttttttttttttttttggattttacataggaagttttaattaagtagaaatgaaaatttatccagatcaatttatttgaacttacatccaagaagaaacattcaacttaaggattagaaataaaagtggcaattgtctacttcttttgtggtaaggaatagatcatacaagcctgactgatgagagtaatagctttgtgaaaactgtatattcgagtacatgtgaactcatacttggcttatacagaatttatccaattctagcaaagtcagcataatttaaataaacctccttgagttttacaccatggctctcaagtctgaaagcttagatttgattataaccatggcaaaagtgattatctttattttctgaaaacgtaatcaacttttaaaataagttaagcaaacatcagttttacacagaccatatgaagggtaggaggaaactgcaattgttcctctaattgcagagcctaaaccataaattcaaattgtactgctatctctactgttaaaacaagtcaagaaagtcttttacagtctaagagaagtgaatgtaattatgcagcatccactacaaagatattttgaaaacctatcatcatgttagtactcaatggctgtacagcaattattttaaagtacgctcccagggtcacctcttgctgaagaattaactccaggaagtcgagttacaagtatcacctacattttataggaaataaaggcaaagatttaggactgagtcatctgttcaaaattagaaagtaaataaaaaaatagactttggttttatttgaaaatccctttctattgggttatatccattaatctacatttcaacttccaagccaatctattttaaaaagttacctccattttgtgtccaatatcttactgtattagaatagtacaggtagactcttgcactgctcatttctagtaggccattaataaagaaaagaaaaacctttgtgctttctgttctttcctta

SEQ ID NO: 345594 - DNA, 1000 bp, Homo Sapiens
tttttttttacacagagctcctgctgttttaaagtgcacatgttataaagtacacaaagtacaagtgtgtaatacatactgttaaagtcaatgtttaatttgtgacacaattatagaaagtcaaatattgactgggtatttgataatataaacaaaatactgttaatgatattagagttttattttgaataaaagaatatgttttagaaatacatagtgaaatatggatagatgatgtgacatttgggatttgcttcaaaattacctagatcagggtgcggcggataggttgggggttacagatcgggagttagcaaattttttctataaagcgctacacaaagtaattattttaggttttgcaagccatagagtctgctgcaattactcaactctgccaatgaagtacaaaaacagccaaaaacaataagtcaacaaatatgtgtggctgtgttccaataaaaccttatttacaaaaacagtcagagggccggattttgtccacaggccatcatagtgtgccgactagtttgtacagatgaaacaaaacccgccatgagttgataatttttgaagctaaatgttgagtatgtgggggtttgtaacattattctctctatatctatttgaaattttccataataataagaacattttcataattttcataacaaaacacttaacctgtttttttgttgtttgtttttttctaatttgagaagtccatgtttaactttggtaacttcatttgacttcaagtcaaagtggaaaacacagtgagtactgatgatgacaggttatgagtttcatcctccaggaggtacggaaaaaaggaaaactcaagcattctactggaaaactggagctaaaagcagcccatccatggagaattatgggaccagaagatgaggtgggatgtgtgtggcacacgcctgacagctgaaccaaacagggcacacgggctctcctaagagtccctacttccgacagcctttccctc

SEQ ID NO: 345595 - DNA, 1000 bp, Homo Sapiens
ttttttttttttttttttttttttacagctgctgattgtttattgcacaagaaactggcaatatcgaggcaaggggcgggcattacaaaacaatctggtgaccagcccatggctagcaaagggcattccgtacagacacttcagttatatacacgtacgcacacacacgcacgaacacacatgaacacccgtgagcctgatgcttccaaacctcaccagcagcttgcaccctgacccaccctggagcggcttccatggtaacgtgccacagggaagtacagcaaatgactgaaagggacagaagaggctgcgctgtggcaagctaagccactcaaatcagcacacacgacagaggcagacgcaggctgcacctcccgggccgggggaaggtcgagaatctgggagcatggagactgtgcttggaaggcacccgggaccagtccaaggggctgcctgggggtcctagaatcctgggggcccaggccgggagtctgccatgactactgccccagcaccccggtggggcatggtcaccttgaagatttcaatatgacctatgaagattccagttacggcagagtccccgtgttggaggctggcgggaactgcagaaatcagatggggctatgcagcagctcagggcctttctgctggttttcatgtcctgtgtgcagataaagcctcacacctatgcagaatgaacactttccgctggcgggctgcactccattctgaacaggggaccaacaggccctcctggagctccaggggctggcaggggagctccacagccggacccctgtgtcccgccactggggactgcctgggggaccctatctagcaaagggatttcttctctattgaaggcggcaaggctaggagtggcgctcgggacctcaacccctctcattctgccaggcttggggacgaggtccctgccaggctgtgccgccgggtcaggcctgcctgagctcacggaaccgccaggtgggttcctgag

SEQ ID NO: 345596 - DNA, 1000 bp, Homo Sapiens
tttttttttcttgtagcttcacacatacaaacatgtttattaaaaaatatatttattaatttttacacctgctgcatagcacaagactattaacactataactcactgaatgtacaataaatgttcacatttaaataacaggatagggtcaacattttcaaccagtgggtcagctttagcatctcatgaagtgctttttagacctagatatcttaagagtttttttgaaaggatacttccaagtcagaaaacaagaagatcaaaacaataggtttttccagaataacaggaattttacatgatgaaatgtctatttctgtcggtacaaatcaatgataaaaacaaaatctacatccaacctactccaaaatactcacactggactgaatgaagtctacagtgtcaatgtgtcttgagagaggccacaatatccacactggctacatacatgttttccaaattaagttttctgatggctcatcatttgccatctcttcaaatccaggtccttttaaaaatctatgaccttggaatgaatgtgcagaatacctgatctgaaagccatgcgatttggctcgactgccatccgcatctctggctgataatatacaaattagttttagagtctttatttcacttaaggaccaaagaagaagaagaagaagaagaagaagaagacaacttagaagggaaagcaacaaagaggtccttccacaatattttcctctgtgtattttaaaacttaaaacaactgccataaaatgaacattccattcagtgattcttttcagttttccaataagttattcctgaagggaggggagataccttatggttcaaattaaaaagaacgtaacagggccaaatttaagttataaaagctaaaactgaacctttagaaaattccactagtcttctcctagaaagtctttctagaccggacactaggatatttgtaatcattacactgtgggacttagggaacccgaacctgtgtttt

SEQ ID NO: 345597 - DNA, 1000 bp, Homo Sapiens; identical to SEQ ID NO: 161225

SEQ ID NO: 345598 - DNA, 1000 bp, Homo Sapiens
acactgtgtaatcctgtttttattcaagaagaatagtatgtacaggcacagaaacacctgagagcagataagccaacatgttaacagtggttacttctgagtggtggtataacactttcttgcttatctacacttttacaatgaccttacacacacactgcctatggtacttttgcaacaagaatctttttctaaaaggtgtactatgttggcagttcgatgcagggttggagcgcacgggcccttgggttgggcagatgggtttggctctacccatcacaaccctgaagctctgcatacatttttgtgagcctgacttgcctatctgcaaatgcatggtggttgccatgagaattaaatgaaataatccctagaaagtctgtgcctagcacagagtctggcccatcagtaatagctccacaatgttaaccagtaatattgaaaataaatataaccaatgtttacagatgtttaccttagaagtgattcttctggctactcagttaggtttatttaggaccatgtcagaagaagatggccacactctacaattgtggttactcacattgaacccatatggacagcaaggaggggtgaggaggagtgcccagaagcaggctggggctgagcagaaggtttcctagggcaaaccatgagactgacagattccctctactgcccacaccttattcccctccctcccctctctcaccctcccacccttttctctcaccttcttcccaccacttccttgctattttggactctgaactgtaaattccgttgaggccagaggttatgaattagacagctgtccatcagttccctcacatgaagcatgttattggacctagtttatagctaccctcttggctgttataagcagggggacctattggagacttccccactgggtggggcattagaggacagtgctagtgatgggaatggaagggaaatgcagacataagagatatttaaagggaaaatgaaagatctt

SEQ ID NO: 345599 - DNA, 1000 bp, Homo Sapiens; identical to SEQ ID NO: 161226

SEQ ID NO: 345600 - DNA, 1000 bp, Homo Sapiens
ttttttttttttttttttttgaaatggcaaatagatttaatgcagagtgtcaacttcaattgattgatagtggctgcctagagtgctgtgttgagtaggtttctgaggatgcaccctggcttgaagagaaagactggcaggattaacaatatctaaaatctcacttgtaggagaaaccacaggcaccagagctgccactggtgctggcaccagctccaccaaggccagcgaagagcccaaatgtgagagtggcggtcaggctggcaccagcactgaagccaccactggtgctggcactggcactggcactgttattggtactggtactggcaccagtgctggcactgccactctcttgggctttggctttagcttctgctcccgcctggatccgggctttggcccagggtccgatatcagcttcgtcccagttgcagggcccggcagcattctccgagccgagcccaatgcccattcgagctctaatctcggccctagccttggcttcagctgcagcctcagctgcagccttcaaatccgcttccatcgcctctcggtactgagctgcccattccttgggatccttcttttgtaccttgcaggcaaacttgaggactttcatcttgctggtctcatagtaagagcgcaggccccagaagaactcatattcagggggattgctattggggactctggcatagtccaggtacttctgcttcacaaactcatcagtgatgagcttcttcacgtccccaaagagtgaatgatgtatcccagggcgcagccccaacttgcgcagcacctcccagatgacagcctcactggaccgatttccattcatgaagatgatgctaagaagcaccatgagcagacccagcttgggtgagtccttagtcgttcccagtatgcctgcatcagtgggctctaaggtgctgagaagaatgtacaagtggtcattcttatcaatttccttcaattgaatcccaaataccttctccaa

SEQ ID NO: 345601 - DNA, 1000 bp, Homo Sapiens
ttttttttttttttttttttgacttacttaaagtgatgtttaatgctgtttcatgtattcagagttgtacaaccatcacaatcaatttcagagcatcttcataagcgcccccaaaagaaaccctgtactcattagcagtgaatctccatttcctcgcaatcctcctcccagtcctaggcaagtactcatctactttctctctctcaaacagatttgcctattctggacatttcatataaacgaaatcatacaacgtgaaaccttttgtaattggcttctttaacttaacacgtcttcaagatgcacttaccttgtagatgtttaactacttctgtctgtgtatttgtttgtttgtttgtttgtttggaaacagggtttgctctgtcgcccaggctggagtgcagtggcacagtcatagctcactccagacttgaatacctgggctcaagcaatccgcccatctcagcttcccgagcagctgggactacaggtgtgtgccatggggccccagtaattttgtttttatgtttagtggagacagggtctcgctttgtttcccagactggtctggaactcctgtcttcaatcagtcctactgccttggcctctcaaagtgctgagattacaggtgtcagccactctttttttttttaatggccgaataatagtctgttgtataaatataccatattttgtttatccatttattcattcttggacatttgggttgtttttacttattggctattatgagcaatgataatgtgaaatctcatacccaagtttttttgtggggagatatgttttcatttctcttggctacatacccacaagtggaactgctgaatcctatggtaattttatgtttaatcctttgagaaactgccaaactgttttccaaactggttgtaccattttacatccccaccatcagtgtgtgaatttcctcccctgtctgtctcttgctccctctctcaccatgtgacacgctggctccgtt

SEQ ID NO: 345602 - DNA, 1000 bp, Homo Sapiens
ttttttttttttttttttaaacatcatttaaatttattagtgtataaattctaaagagtccaaattaaatatgttgatattgagaacatttcagttttcagttttgctaacagggtttaagcttaatcataacaattgcagaagtttgattatgtcaagaaatagccaactgaaggaataatttataaatggtcattacctttaaggggctagctgaatacaatgtaaatactcatgcctgtaatcccagtactttgggaggctgaggcgggaggactgcttaaacccaggaggttgaggctgcaatgaactgtgattgtaccagacctgtactctgaaatctttatcatactatttttaatgcatgaaataaaaatggtttatatgtacatagaatacacacacacacacacccctaggtcaatttcttaggtctcagttgtggttaaattcacttttaaatacaaggttccaagtatccaagttgccaggccagttgcctgtacctggaacagcctttccaccgaataagaagagtccctacttaaacagcttaagctaatttccatcatactatttatcacagtctaattaccagtttatcagtctcccattaaagtgggggctccctgagagcaaggactgtcatcttcactttgccttgaaaagtagacataggtcccaaattatctgctaaatgagtaatgaacaatatttctattcagaaggtgtgtgcttgcccataattaatacgcaaatattctaaactataatctgatttaaaatccccaaatttaaacaagaaaattataccaaggctttgagatttagcttgtgctaaatcattttttaaaattgtagctctgaggcattttattataaaaacttagtactcatatacataaactaatacgaacttaaaattcatcatacatttacttcattttttagcttgaccttctagtaaatctttagcttcattgattttggctgctatata

SEQ ID NO: 345603 - DNA, 1000 bp, Homo Sapiens
ttttttttttttttttttttttttttttttttttttttttttttttttttggcttgatagatctacctttagttttgtcattttccagtattcacaatcctttcaaagtttcctttaaaggggaaaaaacagaggcttgtaagaaatatgctcaaagaggttctaggacttacagacatcccattccagtataagatacaaaaggcaaaatgtttcctttacccatgatccaggctagctccaagaatcctaaaaacgatgttttaatttggaatctgggatgcggcgttttgtggattaacatgtgttctgacacaaggactactctacttccttaagaaacatgagcaaaaatgctttgctcaacaacctagttatgtatgtacaaatggtgatcatggtccttactgataaaaaacttataagcaatttctgttacaaaatcgatcttgctaacaggtcttggtgtataagttaggattatcattttcattttcaggtgtcagaaatggaagtgcagaaaagctaggtttcagggtgacattacttaactgaggtagaggcaagatgagaagctgtcagtcattgggaatatctgatttgtcagtcttcactgctattgtagactggcagaacctatttcaaagtatttctgcaatgagcgtagaggagagaacttgggacccgccttggggattttgatggggaaatgtgaccacggttctgtgaatccagattttaagttcgcatccattggctgaattgatgatataaaaaacatcatcagtcgttccaacacccaccttcaaaatcagaatgtttagagtctaaaaaacgctgcctttcagcattttttttgtactgaataaacaagcactattcttaagaataaggggtaagggttttactctcagatttgcttctcttatggagtgatatcgtacaagctaattggattctctcagcctcactttcctcatgtgtaaaatgacaataattc

SEQ ID NO: 345604 - DNA, 1000 bp, Homo Sapiens
tttttttttttttttttttttttttttttttttttttttttttgagagttgaccatcaggtatattggggaagggagagatggaggcaccttcatgagtgcctcccaagggcagtagcctctgcaacttgctgggggttcaggggaagcagggagttcatggggctcctccagcaaagatgagctccagggctgcttggatgtccccaccggtggcctgcagggcccgcaggctcagctcatcgtcctggatgcccatgtcacgtagctgctgcagctggggctgccactggctctgaaggctgggctgcccagaggcctgaagggcatgctgtagggcttggctgaagagatcattggtgatgggcgtccctgactggacaccagaggacattggtgaggtccctgaggaatgaccctgggtgccaggagtcggtgtgtgagagctgctctccggagtgctggccagggccaaggcggtggccagctcactctgggtgatgggccggggcccagcagctccactgtaccccagggaggctgggcgggagctgggagtactgctagagggtgtggacctggtgtttgggtgaaagtcatcctcatcatctgagagcccttcaaacaggaagccacctggcatatcccggtatgagctggagggcatgctccgggaagaggagtcagtcccaggcattggggcactgcctgctacggagtgcagaaccaggacaatggcattgacgagggctgggtgagcaggcaccaacgtatcaagcatattgggatcagcgaagacagagaagaggtccttgtcctggagaaccccaagagcaatagggtcactgctgaggcctggggtggccacaatgatctgatccagagactccttattgctgagcatcttaaagaccgcctccctgtaagaggagctgctgtgcagggcagtgtgcaacacccggaactctctcatggcagccactttgtccacaggttccggt

SEQ ID NO: 345605 - DNA, 1000 bp, Homo Sapiens
ttttttttttatctctggtataatgtttatttaaatagtaatcttaaaaaggctttatacaaatcatataaacacagtttgacattgttgtttattttttacattgaagaatcacagtaaaagctctcaagttcccgtgatctggctcagccagtgaatggtcgaatacctctaactgcaaaccctgaaaaagttaacctgctatgtgacaggttaactctttcccttgttttcttgtcattcatgcttattccttggaccctcatccctgtcaactcccctgccccaccaaagacagaaagcaaccctgtggccctgttgaccacctagtccgggagagtgtggaggtaatgtgtcattcagtacaaggcaaaaaggagatcaatactggcagtggggtttcccaaagggaatgactcaaggagatgggtcagctagcctacccacagataaagataacaaacacaccaaggtgtcccctggccaagtcaaaattgggcccagcgtctttctttctgtcttatgacagaccagcctccagccttggtgtggtatctacatgtagccctgcgtaccctgcttctttttagcattcaaggcccactcagggcctcaaattagccaatggtgaatatggatataggacttttagagggatgcaggttgagttgtacataacttagaggtgaagtgcaggtccgaaacagggctagactttggagaactgtaaaatggctcactgagcatgacagcatcaggacccctggagtggctttcaaacttaccttcttctgcaggctacttctggaaatccctaggacttaccagctttctgaacactgcgcatcatgggagggtgaagaggaaaaggggctagttaaaatcttgcttctactgtgggccgaactcaggaggagccctaaagctaagcccttgggcttgacagctctacttttcacctctaactaccactgtgccaatgagtgccgagtgccaagat

SEQ ID NO: 345606 - DNA, 1000 bp, Homo Sapiens
ttttttttttttttttttttttagataaggcaacaaaaagcttcaatctcttctccaagtaaacaaaacttgtacagtatattattttcttgtaaaatgtaccccaggagaagtaacataagagttaaaggggccctctctgaacactcacccctcgcccaaacacacacacaatgaaccagccgctctctcacacacccacacacagagagctattcacacacacacatgtctactatgtacatacacacagatccaggcttcccctcacgtctcctggcagactgcccactgagaggaggtatgggataaggcaaggggaaaaaacaagcgaaccagtctctggaacaaaaccagctgagccttgagttgtggagtgcttgggggtggatctcttcggatagtccaagatgcagcattagagttgggtttgttggtttggaatcaacaaaaaggaaaaagaaaaaccagaaaccaaaatgaacccaaggaggatggttgggattgataagagtgctcagggttggggatccgggaaagagatgtctgagagttcacacagaaactaggcgaggagaaaaaagtgcaaaatcgaggcaacatgtttgcagtctttctcgtttgttttgggtgctgttcttgcttcggccctcagcagtgcgagccacggtcttgctctagcttaatggttagggtgggctccaccgccagaggggccccgttggtgtagtgggaggttttgtaggtgatggagtgatcggtcttcttggccgcatagcggaaccggtggtagtggagcaccagggccagcgcgacggagaccagcaccagcacggcgcccccggcggccattacgtaataccagtaggctgggatgggctgcatgggcaccgtgtccactgtgggctcggtccctggcaggagggtgccccctgcaaaagccgagatgggttccatgcagttctccagtgggacatcagtgcttatccgaatgtcatca

SEQ ID NO: 345607 - DNA, 1000 bp, Homo Sapiens; identical to SEQ ID NO: 161229

SEQ ID NO: 345608 - DNA, 1000 bp, Homo Sapiens
ttttttttttttttttttttttttttaattttctttaaacctttttttatttagagatttttctggtaaggagatataccataggaaagcaatttcactggcagtgaggtatgtatatactctaccaaaatactccttattttaactgtttttaactttatttacatacgaagcaaagaatcaatgcatatccttggttcaactatagtattagccatactacatgaaataaaatggtgcttgcatacaaaaacttgttgtttgtaaaggaatctgatttcagattaaaatacctaattgtttttggaaaaaatttttaaaaagaatcacaatttatcatgaccaagacacctgcaccatattttccattcctcacagcacatttatttcagtaattctgttatgtcggttcttagcatgagcatagtgttacacgattttcgtacatataatcacatccaaaacaagttctaaaatttaaattgtaaacattctcatatgtagaaatattttaattggtgtattaagttttgctaactgatcaaatttggaagataatataaatgagaacgtctattctaaactgtgtagtgagcattgtttattaattacatttctacaatgttaaataaagtaagaggcaaacctgtcctgtaagcatgtcaaattttaggtaaaacattaaaaagaaacaaacctgttaacaaaagaatgtcttgcaataaagaacattagatttttaaaatctattatgatacaaaaatgtaaagggtaaatagcatctttgttgacaaagtaggaggtagcatggatgcaccactttattgtctgagaaatgcaactggagtaaagaatatttccttaccacaaataatttccagaactatgtacatatttcttttagaaatacttgtttaaacaaatctccctccactttttagtataaaaaaaaccgttccatgtgattttaaaaaaaacacttacacatctagatagaata

SEQ ID NO: 345609 - DNA, 1000 bp, Homo Sapiens; identical to SEQ ID NO: 161230

SEQ ID NO: 345610 - DNA, 1000 bp, Homo Sapiens
acgttgtaacagagctttattgcaattcatttcaaataaggttatgtttacagacttgtggtagacatgtgaattgttcattccaatataatgtgaattgcagtggtagtagcggtatacacagtgctatgggggcacagaggaaggtggggatgtcagagaaggcagtcgtgaatcagataacttcccaaaggaagagatgatgcctaaactctagaaaataggaattagtcacaagggagaacagttgttccaggtgcacaagacagactgaaccaaagtggggaggcaggaatctgcagattacatgaggcaattgtgaacagcagagtagcattggtacgtaaaagttgaggtatgcagagactaggtcgaaggaggctaaggagcttcaacttaatcatactggtctctaaattttgtaaccctaatcaaaaagggaaaaaattacacctgcacaaccaatagacatacaaagttatgaaacatgtaactgtcaattcaaatatttaaaagttttgcttgtgtaaatatataaaaagggctagtattcctcctccctccctcccacacacaccagtggtatatattaaatgcccaagtgcatgtactccatattggagacttctgcagaaggtgaggggaaccactggaaggttctcagcagagaagtggtagggttgcacttagatttccctggcttttgatttgaatttgaagtggatgcaagtatgttaagactagaagctttaaattcttgatctcttcagccattctacattcttttatgtggtatcaggccaagataaccaaggtttaaatgaggaaaatggcagatgcgtttgtgaaatacttggagtagaaagcttaatttttaattactgatttgctagccacttaaatgccctgttaaaaagcttatatttcacacaattaccaaagaaatcattttggtaccaattttgctaaattggatatactaatagaaacttcctcactg

SEQ ID NO: 345611 - DNA, 1000 bp, Homo Sapiens
tttttttttttttttcatctcctctattaactttaatcacattttcaacatgcagccaagaatgaagctttgacagtaagccatacatttacacaggcaggcattgtcaattttctgcagtcgccacactgagataacacaagagagctggatattttctttcttgtgcctttctttactaaagagcaataaaaaatatgtgaaagatttatccatacctcaaatttgtttaccataaatctcgaaattattgcatttacttttgcttggtttatggcaaataaaaaatcaacttagttcttcagttagattttttttttgttgagatggagtctcactctgtcacccaagctggagtgcagtggtgccatctcagctcaccgcaacctccgcctcctgagttcaggtgattctcgtgcctcagactcctgagtagctgggattacaagcgtgcaccaacatgccgggctaatttttgtatttttagtagagacggggtttcaccatgttggccaggctaggcttgaactcctgacttcaaatgatccgcctgcctcggcctcccaaagtgttgagattacaggtgtgagccactgcacccagcctcaaattagactgttaaatgcaggtttttaaagatcacagtgatgacagaactggtacatgtttcatcataatatacctgcttatgagaacagacattaacactaaaaaggatttacatttaacatggaccatttgctgtgtgggcaaacacttctggttcattcaaagccaggaactttatatggttccagagggactctctggcagattttgttgattactcattaaacagtcgaaacatgtatagacattatttatcttataaagcttacccacagcaaaacagacacaaaaatgaggtaaatactatgggcaagattatagctcttggaaaaactaaatgtcaaaatatatttttggtaagcttttccttctaagcatgctttaaaaagct

SEQ ID NO: 345612 - DNA, 1000 bp, Homo Sapiens
tcaaatgaatagtgtcaggactttatttgaagcaaagggagaaattgaaattgtagaaaggaaatgcagttttagtgggagactaaagtcagacagtgaagatttattaggacccgtaggtgcagtttggatggcacaggtggcacacatggccggcgtctgcgtacttccagaccagggtgttgttttctcccatgactcctgccgggcaggtcttgacgcagtgggggccgtcaatgtagtgggcacactggatacagttgtctggtccccgtcctgtgcaggtgatgttcatggcctgaggcaggcactctgggtggcactgtatgcactcagagttctccacaaactcccttggctcaccctccagaaggttgcacttgtccacgcattccctgcctcggctgacattccggcaagagacgcagtccctgggctccgggccccagcagccctcgggggagcacaaggcatggcagacctggcctgtggccttgcagctgttttcacctctgttgcttataattttggttttctgaccggaggtcccaaacagttttttccagtttattgtatttgcatagcacaaatttttgtttcctgaaattatcacatctccatcacttatctccttgagggagcgtaatcccaaggatgttatgttcaggctgacgactgcaagagaaaactgaccatgttgcttggtcctgccgcgtatgatttctaggttctcaaaggcatggaggtccgtcctgttttcaggccaagcctgaatcagcaaaaaccctgtgatttcctttacggttttcagaatatccagttcctgtggatccagaggaggagtatgtgtgaaggagtcacccctaaatgccaccggcaggatgtggagatcgccactgatggaggtgcagtttttgaagtgtttaatattcgtagcatttatggagagtgagtctttaaattcaccaatacctattccgttacacactttgcggcaagg

SEQ ID NO: 345613 - DNA, 1000 bp, Homo Sapiens
cccacctaaagcattcttttcatttcattatgctttatgtgaccattttcaacctcttctccctctccccatttcttaaggttgaatggtcactggttagtattcatttttttcttccgacagacccatgggccatgctaaaataggttctttatatcaagatactagctgtcacataggtgttactgtcattgtccattccaagtaggtctgtgtgtcacttcaaaatccttgcctaatcatttacttttttttcagtaagtggtctggtaagactagtctttctctagaccctgtttgtgatagaacagtaaatacccttcactgtagagtaagtcctcaatggtagccttggtgatgatggcatcatcacagctgaaccactggtccttttgttgccggatgaagctggtatagtggccactttccaaagttccatggtgattaatcactgcaaacaaggaatacttattctcattgggcacacaatctgttggtggctggccttctttcattctgctctctttagtagaggccaaaaacggagtcatgtccagctccaagggaaaggagataaaggtattaatctttcgcctctgtttgcctacatgctcaaaccgcttgagatgaaaacaagccacaatgggtaattttttcattgtgagctgtttagtagactcctggtagctttggcaactattgcatttgattttggcactgcttcctaggtgctctggccttgtaaaccactgtagacagtctgtaagtgaggggattcctggtatgtggtcatccctgctcactgtgctgtcagccctctctgggttctgggaatcgaatgtggcacaagagccaggcaagtccaaactgatgtcccagcatgggtctatggtggtagaaacactatggcaggcttgacatgtgacatctgattgcaggccacctgtaaagatttggtctatgatgcagttacagcagttggggttattggcctcctgcc

SEQ ID NO: 345614 - DNA, 1000 bp, Homo Sapiens; identical to SEQ ID NO: 161231

SEQ ID NO: 345615 - DNA, 756 bp, Homo Sapiens
tttgtgtttcaataaaactttatttacaaaggcaagtagcagatggaatttggcccaccagcagtatattgataatccctcatggaaccaaatttctgtattttaaaaaccgacaccttcggcctcgtgtgggatggcagcttgcccaaggttaaacagcaagttaagcaggaagtggcagagttgaagttgaatttgacccttccagcttccagggaagtgctggattcattgtaatgacacatggatggtcggctgtgtccagatggaaagtctgcctcagtcttaaagcagatccgaaatgcttcatgcgtttgatgtctatagaattgtgatgtgcggatggctcctcacatctccagtgaataagttgcttttcagagacatattttttttcttcagcagttctgtgttgatgttgatttgcacatctctcactgaacagatgagggtacatcttctcctgtgtcatgcattttctggctcttagaaattcatgcaacacacttcttactcggaatagggttctttgaaaaacttccttaattttcctttcagttgtgtatatatttgaggtgtggtgtgtgtctgaagtctaaagactataatgataccttggggaagtttcttgttgtccttatgtttctgaatctccatctgccggcctctgcaggtacccacgtccctaggacccgccactgggccaggcccaagcagcatcaagccccgggtccccgccattgcgcccgcgtcgcg

SEQ ID NO: 345616 - DNA, 1000 bp, Homo Sapiens; identical to SEQ ID NO: 161233

SEQ ID NO: 345617 - DNA, 1000 bp, Homo Sapiens
ttttttttttttttttttttttttttcacagtgagaggcacggtttattgccaggttataccctaggacggtgtccttccctccctcctagggtgggaggtcatgtgcgggagttccgctcctcttcttcgttctccagtagataggctggacggtatgtggggtgtcctcctgggctcaggcacttcagggccgggttccgcacggtattctcccgactccccagtgatgtgtatcctcggtcatacaggatacagtatgggacaaacagctgacgcagaaaatcccagatgtctctgtaggtccagtccagcagtgggttgatgcgcatgaatgcgggccagcctgggtcagtggggctgaaagggcagaggctacaggagtaggggtcagtccggcgggtgcccataaggacagcctccagctgggggtgccgtgcctgcagttcacccagggcctgcttcatgctgccctcagcttccaacatctgcagattatacctcttgatagtgtcctgtagaaactgttccagctcagggaaaggggagatgctgcggatatacaggatctggagggggtttggaacatcaggtaatttcctctgcacagctgcatggaagaggtgcaggagggcagtgcagtctttgcccccgttgaagcccacacagagctgggtgaggctgtactgagccagggaggtctcaatggtctgtagggcacctgccacctttttccccaaagaagaccctgattcagcgagtttgtatacagcctcactggcctgctccacagcgttgggcatgtaggggaccagcgatccctggggcaaacgggcagtcaggtaggccaagcattcctccaggggtccttcttcctctgagtctagagtcagcttcacctgatagtagttgctgccccagtcagggtaggaacccaggccaagcctacgtccaaagtgggcctgggcctcagccagaatgggggcgatggaggcttcatc

SEQ ID NO: 345618 - DNA, 1000 bp, Homo Sapiens
ttttttttttttttttttttttttaagagaaaaggtatctggtttatttaggttgctgtgatctccctgagaaataagagtcagtatagaccaacgctgtccaaccaatagaactttctgccatgatggcatatcctgtagctgcactgtcccctcatgtggctgtctgaacacttgaatgactaatgtgactgagaaactgagcttttaatcttaattaacttaaatttaagtttagccacatgtatttagtggctactgtactggacagtgcaggtctagctagaccagtggttctcaattgagggcaattttcccccacagataacatttgccaaggtctggagatatttttggttgtcacaactgggggagtgcttctgatgtctagtgggcagaggccagggatgctgctgagcaccctaccatacaccagacagccccacaacaaagaattatctggccccaaatgtcaagtacgagtttgagaaaccctggtctagactgtctagcacctgccttttgacaaggacagaccctcaactgcagcctgggaactgggattggccaaaggtcctgggctgccctcaggaagacagatgggtccagaggcctcagggaagtccctaagccctttattccatcagccaaacaacacgcattactgggcatgtgctgagcttgtgccagtgccaggacaggacagagacggatcctatcctgtgaagggctgcctgctctccctccttccagggtccttcaaggatcttggcagggggatgggaggttggtgcagggagcactaaaggtcctagcagccattcataagtccatctatgtctccagccccacatggtatcagccgcttccctcatcctcataggcgatggcaatccctcgtcttccactcacagcttctgtcactggcgtctgacccaggcggggctccagcccttgccagctccgggaactaaggaatgaggctgcaggactgctctca

SEQ ID NO: 345619 - DNA, 1000 bp, Homo Sapiens
ttaaaccccccgcagcctcaggaggcagcatcagatttatttattcctactcaacatgacccgggaacacaggagcaactctgtacacttctagaaactcacagctagctccaaaacaatagaaattttaaactacaaaagatgagttgtattcagcaaatataaagggtaattttagactgtgtgaacgtttatcagactatttacagcacccgggagacgggttcagatctcgccggcctccttctcttctgacctccgtgaagccatcttcccgttggagctctcaagcctccagtccgggggccctcgctcgctccgcccgctctcccaggactcctctctggatgcccgctctctggagaacttgtatttcgcacttcggtcccgggaagcccgacgatgtccccggctgtggctccgggaacggctgcggtggcgccgatgtctatctcgggaccgggaccgggacaatttccgtcgctctcgggaggtagatcttgaccgcctccgacgccgatcccgggagcgtgacctcctgcgatctctggttcttgatcccgacctcctgctcagacgctcctcccgttccctctcctctctcctcctcaagcgatcctgatttctcttctcctgcttttcagcgacagttttcctcaactgatcaagcttctctcggatctgaatgaaccccaagtgtaacttgccaccgaagtggtctgccaggcgacggtcattgtcatggagaccaaggtaggctgaacagacctcgcagacacgcagcttttgctgctgaaaactggatgcaggcatggaatttctgtattcttcctcagcttcttttttcttcgcacgaactttttccacttccataagaatcttctgggattcatccacattaccttcagcccctagctgttcggctttagcaaggagttttcctatttcttcatttaactcatgtactttttctgcctttgcagaaacttccgcactgatt

SEQ ID NO: 345620 - DNA, 1000 bp, Homo Sapiens
tttttttttttttttttttttttttgtttgtgttttttttttttttattaataccacatcaatttgaaattttacaggaaccaagattcaagctccttaggtgctactgtatttttatgttgcacgcacagacacgtacacacagtttcattagtaatttttcatctataggtttttcttaaaaaaaaaaaaaaatcctgtgtggcacaaagatctcttcaattatctaaacacagcagcaacaaaagaaaagaactggatgtggcacttccactgcagaaggtcctttggaggggaagcccaaaaagacaatcactgacttcctgggagggcagaggatgaggatggagaatgcacttcctactaggacatgaaaccagttaaaacactcaaagggggctaagaaaataagatggagtaaggcaagggtaccttttacccatccaaattcctaactaatttttccaagacacgtagacaatttccttccactactttttgcagctgccgtactttgggaccatcaaatatcatagcccttactttaaactcgccagtgcatattccctctgaaggatcatgactatgagtgagaacctgaaggaactcacagatgatttttctttcaagttcgctgaattctcatattgaaggtgaagaaaaaaacttgcccccaaatgggaatcggagatttgaatctcgggaaaagatcaagaaaaaaaggctttctgtatttcacctcttgagaatgttcccccccagactgagataggatcacaaaaactcaataactgaggagcccacatgcaggttatttttttctctaacaagtttacagcagtgcacagcagttacagacatttattttatagtaagaaaagtacaaccttatttattaaacttgaggtgggcaggggagagggaggaaagcacattcgggaacgagttctcaaactaatgctcagaaccggtgtccagtgacgtagaaaccactttccca

SEQ ID NO: 345621 - DNA, 1000 bp, Homo Sapiens
tttttttttttttttgtttgtgttttttttttttttattaataccacatcaatttgaaattttacaggaaccaagattcaagctccttaggtgctactgtatttttatgttgcacgcacagacacgtacacacagtttcattagtaatttttcatctataggtttttcttaaaaaaaaaaaaaaatcctgtgtggcacaaagatctcttcaattatctaaacacagcagcaacaaaagaaaagaactggatgtggcacttccactgcagaaggtcctttggaggggaagcccaaaaagacaatcactgacttcctgggagggcagaggatgaggatggagaatgcacttcctactaggacatgaaaccagttaaaacactcaaagggggctaagaaaataagatggagtaaggcaagggtaccttttacccatccaaattcctaactaatttttccaagacacgtagacaatttccttccactactttttgcagctgccgtactttgggaccatcaaatatcatagcccttactttaaactcgccagtgcatattccctctgaaggatcatgactatgagtgagaacctgaaggaactcacagatgatttttctttcaagttcgctgaattctcatattgaaggtgaagaaaaaaacttgcccccaaatgggaatcggagatttgaatctcgggaaaagatcaagaaaaaaaggctttctgtatttcacctcttgagaatgttcccccccagactgagataggatcacaaaaactcaataactgaggagcccacatgcaggttatttttttctctaacaagtttacagcagtgcacagcagttacagacatttattttatagtaagaaaagtacaaccttatttattaaacttgaggtgggcaggggagagggaggaaagcacattcgggaacgagttctcaaactaatgctcagaaccggtgtccagtgacgtagaaaccactttcccaaatggcggag

SEQ ID NO: 345622 - DNA, 1000 bp, Homo Sapiens; identical to SEQ ID NO: 344892

SEQ ID NO: 345623 - DNA, 1000 bp, Homo Sapiens
ttttttttttttttttttttgaggtcgatcgatcggctgactatattgacaagatactgattggttacatgttgaagaaaacatacaatacaaaatacagaaaaagttggttccgtcccctcccactcccccccttacccacccacccccaaatactcatcatcatgatttggtcagaacagggctcagagccagaggttggggtgaccgagggtggaggggttgtgggcaatgggttcgtggctgtcacaataatgctgtgataatgctgtggtttcccagcagggaggtgggagcggggagggggctgcagcctgatgagagccagctgaaggaagagctgcctctcccttcctaagccccttcccaaggtctgccccaccgcccaaaccaaagaccactccgaacaaagtgaggatgtggatgctcttgctgggtccgctgttccgcaggagggaaagaaagggtagctgcactgaccccactgtccccatatacaagggttggggggcaagagcatgtggctactcccagcaagggaaaatgggagagcagtagaaaggggaggaagtgggaagagcagaagatcatatatattaaaaaagtgacttaagacttaaaattgaattagtatttgtacagaaaggtgcaggtggaatgactcactccggcctatgatcaaaattatatggagaaatcatggtggacccctccccctgcccccccagtggtggcccgagtcgttaagtgcgattggttagagtggattccagtcgggtcattcaggcggaggaggcgggggcagcgggcaggcaaggggggctcagttgctgcagcactggctccggctggctgggttgttctcctggaggtccacacctcggtttcggcctggagcaccagttgcattctggggctcgttcttgggaagcttcttagctattgccatgaagatttcgttcacgttcattgcagtctttgctgatgtctccatgaacag

SEQ ID NO: 345624 - DNA, 1000 bp, Homo Sapiens
tttttttttttttttattctctaagataccaaagtattcagtttattaggatagtacactttaacatattacaagttacaaagcctaagaaaaagcaagcaacaagtcaataaaatcacaactcagaattctaacattttcagatggtatatgtgttgggcagggagcggtggctcacgcctgtaatctcaacactttgagaggctgaggcaggcagatcacttgaggccaggagttagagactagcctggccaacatggtgaaccccatctctacaaaaaatacaaaaatttgaatcaaacattttaaacagactattttagatgtttatttaatactgaaatgttgtcaactatcataaagtatttctctgcatcacaaaaattccatatattaaggatttacacaatccaggaaaaaaaatttttagaaactgtttttttttttttttagcctgagcagaaaaatctaaaaaggctctccaaaatcttgagtggaagtatcatactctgcaatgaaatgcttgagttcttcaacacaccgctcacctatttcatgtaaattctgcctcaatgcaaactgtatagacttttctaatgaaggatctttttcaatcagcattttcaccaccatcccgaaagtttcacagtcttgtcggtaaacctgttcaatctctttggtttttgatgctattgctttagagcgagtggttagctgactatcttcaaataattctatcccatgtgttgtgtttgactcaggttcctctggctggtcagtaaacaatggtgctgtggatcccgcctcatactcagaaatttcaggcaagttactttcatctgatttctctagcttttcagcagcccacttgcttgcagcctcagcaagttccttttcagttagcctactgggtttgtctaacacctttgatgaagaaactgctgaaccacttgagggtgaagtatctcttgatgttttcaaagactggacaggcctctct

SEQ ID NO: 345625 - DNA, 1000 bp, Homo Sapiens; identical to SEQ ID NO: 161234

SEQ ID NO: 345626 - DNA, 1000 bp, Homo Sapiens; identical to SEQ ID NO: 161235

SEQ ID NO: 345627 - DNA, 1000 bp, Homo Sapiens; identical to SEQ ID NO: 161236

SEQ ID NO: 345628 - DNA, 1000 bp, Homo Sapiens
aaaagacaaacaaaagagggtttaatctgtgcttctgtccaggtgtgtggagctgggggtggggttgcacctgcccgggagcattcccaaggcaaatatttgagaggaattagatttctaatacccaggttggctctcactttcaggaagatgtgagacctgaatcctaacctggacgcattgttcccctaattcccagcagcagatctatgaattagcggtctgggtggcagcccattcttctttcagaggcccagaacaccgtgaaactatgctttcctgactcaagagaccctacctagacgtgggcccctttgacgagcacctgcccctcaggagggtctcaggcgaccttcttggaaggtgtgaccacttgaaaaggacgaggaggccaggcgctgtggctctcgcctgtaattccagcacttagggagccgaggcgggaggatcgcttgagtccaggagtttgaggccagcctgggcaagattgggagacactccccaccccgccccatttctacaagtaattaaaaatttagccgggcgtggtggcgggagcaggagccactcaagaggctgaggcaggagtatcacttgagtcctggaggtggagactgcagtgagcggtgatcgcgccactgcattacagcctgggcgacacagcgagacctgtcaatcaatcaatcaatcaatcaatcaagaggaggctggcgggagcatgctcgtgaccaccgggggcgacatagaccctaaccctaagtccaaccccaaggcagaccccaccgtcccgccaggcgcactcctaagagcgcggcttccggagcaaagccgctgacccccgcccccagggtcttggcgccgattggccaacgagagcgcagggcggagccaaatcttaaaggatccgggagctaagccagacccgggtggcggtggcagctgcgaaacccagggagccgatgccacgtgacccaatgtggacttcttttaaacctttcta

SEQ ID NO: 345629 - DNA, 1000 bp, Homo Sapiens
ttttttttttttttttttttgctaggtgattacaacagctgatttttatttttcttcttgattctcttctacagtttccaaattctctacaatgaacatgtacttctttttaatatcaaaagacaaaagaattggtacgtaaaaagaacatccttcccatcttcaaggtcaagattgaacgctgactcctgcaggaagtcttccaggattcccaggcaggaatgatggctccctgtccctgtagctccaggagttcttgcttcacgcacgcctcacataccagactgaatgttggcaggaggagtgaccaggtcggtcatctgtgtccctaccacctacaacaggccagcaatctacccgtgtgtgtttgttggacagaattaaccatgatgggcggccgagggcgcctggagctatttgggggcttggagagaacctcttaggagagtgtcaggccctaggccagtgtcaccagaggaggtcagtctcagtccttggagtggtgggatggaaaccagacgggactggcatggtccacagttcttgccacaagagggcttcaggagaggctgagggcccctctgaggcgtgtgcttggtcagggtgagcaagggcaatgcagctcatacaaaggcccagatggacagagggacctagcccagcccacgcatcggtaccgagcctggctcaggggcaggccgaggcttgtgcagtagacaaacatttacagcagacaccaggcagctcctggaaaccactccccaaaaaacagcattggaatcggggacccccagctgtgaacgaaggagcaaggaggccctgggagaggaggagaaccccagggaagatggagggaggactggggggctgagggagggagggggcctgggctcagaggtaggcgagctgctgctgtgctcctggcaaagggcctctcctccgccagggctctggccctgaaggtctgccctgggccccattcgccctgggtgccacctga

SEQ ID NO: 345630 - DNA, 1000 bp, Homo Sapiens; identical to SEQ ID NO: 158596

SEQ ID NO: 345631 - DNA, 1000 bp, Homo Sapiens
tttttttttttttttttttaaagaaaaaaaaatccactttactgagtcacacccagctgtaaacatgtcaccgtgagagtcccgccccccacccccaggccgcacagtccgcgatgaaatgacaggggagcggggagggtcgccggagcgggtgccaagcaaggcagggcaggcaagtgcagcaggcgctgagtttccgggaggaagcccggaggaggtggggtggggcaggagcgggggctggggacccggccgaagaccagggggcccaggaagcctcttcccgaaggcctccccctctccagcccctccactcctgggagggcatctgctgcggccagggagcgccctgccccagaaccccggcaaaggcatatccaacccagccgtgtcttgttccctgtgagcctccgggtccggcggggtcctcaggggaacaggtgaggcccccccagctcctgagtccagccctaggtctgggcggctccttagggggcggcatggggctctttccctggggcctaggtccccccgtggccgtcccactggaatgtggcagtgaggtgggcaaggaaggcgctcgtcccctggccgcattgtccctcctgctgcccgtgggcggcccgctacacagccgtctcctggtcctcccgctggatcatctggtagtgctgccggttctccaggtaggcggccagctcggtgtcctgagccttctcagcccgctgccggggagtgtcgccctgctggtctgtcttcatgagcgaggccccggcctccacgatgtagtggcagatggtgcgctggcccagggccgctgcttggtgcaaacaggtctccccgttttcctccaccgcatcaaggatctctgggggggcgtggtccagcaggtagcggaccacatccttgctgccagtgctgactgcgtggtgcaggagcgtgcgactctgctcgtctcggtgcatgaggtcgcccccagctcggtgcagctcctggagct

SEQ ID NO: 345632 - DNA, 1000 bp, Homo Sapiens
ttttttttttttttttcaatttaaataactttattcagaggaatcctttggtccacttctgctgactcaacccctgcccatgccaacaaaggagtactaagaaaggcaggttagcctgaatgtctaaattcaatttgttcaactttataaaagcaggcaaagctactgggggttgccccctcccaccatcattctggtccaccatttgggccacaggcttagggaaatgaaggaaagtcgttttctttgaaggaaatcctggccaaagtcgagaaagtgggcaccattatgaggtcaactaaaccctgatggcagtgtgaagtgcaattcccttctccctccaaaataagaaacatgaatccaggggaaggggctttttcgtgtgctaaggaaaaaccctttcccacatagtcctgcctggcagagccacttcctgagaaagcctcgtgtgtataaggtggggtaaaggataggggactttatgactatttgacaggtaaaagccaagttggctccttagaggatggaaaggagagcaggcccaagcttcaccagagctgcaggtgggcatttttttttccttcctggcccagaagcttcttcaccttgcgccttagagggatagccagaatgaaacccaggcaggagggcctgcaaaaacagtgtgcctctaagaacacagaggttgctacagtttctggcagcacaaaataagcatagccttatttgatcttgtgtccatcagctcaccattgacgtgaggcagtatcagattagggtaagttctggatcaaggactgtggagggtggtggggagaaggatctgtagaaactatcatttattgaatacccattatttcatatactgtactaagtgctttacattcatttcctcattttaatcctcacaacaaccctatgaggtaggtattatcaccatttacaaatgagaaacaggctcagaaaaattaggtcacttgtccaaggtcacacagctagt

SEQ ID NO: 345633 - DNA, 1000 bp, Homo Sapiens; identical to SEQ ID NO: 338797

SEQ ID NO: 345634 - DNA, 1000 bp, Homo Sapiens
tgaaatgtaaaatatttttatagtttgttcatactatatgaggttctattttaaatgactttctggattttaaaaaatttctttaaatacaatcatttttgtaatatttattttatgcttatgatctagataattgcagaatatcattttatctgactctgccttcataagagagctgtggccgaattttgaacatctgttatagggagtgatcaaattagaaggcaatgtggaaaaacaattctgggaaagatttctttatatgaagtccctgccactagccagccatcctaattgatgaaagttatctgttcacaggcctgcagtgatggtgaggaatgttctgagatttgcgaaggcatttgagtagtgaaatgtaagcacaaaacctcctgaacccagagtgtgtatacacaggaataaactttatgacatttatgtatttttaaaaaactttgtatcgttataaaaaggctagtcattctttcaggagaacatctaggatcatagatgaaaaatcaagccccgatttagaactgtcttctccaggatggtctctaaggaaatttacatttggttctttcctactcagaactactcagaaacaactatatatttcaggttatctgagcacagtgaaagcagagtactatggttgtccaacacaggcctctcagatacaaggggaacacaattacatattgggctagattttgcccagttcaaaatagtatttgttatcaacttactttgttacttgtatcatgaattttaaaaccctaccactttaagaagacagggatgggttattcttttttggcaggtaggctatataactatgtgattttgaaatttaactgctctggattagggagcagtgaatcaaggcagacttatgaaatctgtattatatttgtaacagaatataggaaatttaacataattgatgagctcaaatcctgaaaaatgaaagaatccaaattatttcagaattatctag

SEQ ID NO: 345635 - DNA, 1000 bp, Homo Sapiens; identical to SEQ ID NO: 161235

SEQ ID NO: 345636 - DNA, 1000 bp, Homo Sapiens
tttttttttttttttttttttttttttttttttctgttctgaataactttattgcaagtcacataatcttggtttagacttgacgcaacgggaggttacagagctgtaaataacaactggtcattaccttattgagtttagaaaactttcaagttcgtgacatatgttaattgcacttaaatagacagtgagagaaagatttataaaggcatcattcaaaaggatttttacatttgggtgtgccttactcgattacaaaaatttcaaaccatcttcccacctagggcctagggcgagttttctctttccctgggactgaactatcacaaagcactaaagggtttaagcaaacgtgagtatcactgaaaagcactagaagaaagtctcaatgtggctggaagaaaccagaaggcaagattgcctgggtgagaaagaaaacataaaaatctgtgtgtgagatcacaagcagcaacttctctgtgttgaattcagatgtctttcccacagtcggggcacaggatgtcgtccctctctgtgaggaagccacgccccaccagtgagagggagcacttcttacagttaaagcagtcgttatgccactgccgttcctcaaaggagatgtattttgtgccaccaagtccgctgatggggttggtgcacccagcacacttcttggcatacaagtcacagaagcagttcaggcagtaggcaaagtcatcgcgagctgtgaagcgctgcccagacagctgcttcctgcaggcggtgcacacgaagcactccttgtgccagggctgctcccggtaagtgacccctcccgtggtgatgggctttttgcactgaacgcactgcatggcatgttgtttctcatagcagggcacacagaaattctgattgtctttggggatgaaactcttggttccaattggctgctggcagcggtggcagatgaagcaggtctcatgccagctgctgcccttgtactccatcttgcgggtacctg

SEQ ID NO: 345637 - DNA, 1000 bp, Homo Sapiens
tttttttttttttttttttttttttttttttttctgttctgaataactttattgcaagtcacataatcttggtttagacttgacgcaacgggaggttacagagctgtaaataacaactggtcattaccttattgagtttagaaaactttcaagttcgtgacatatgttaattgcacttaaatagacagtgagagaaagatttataaaggcatcattcaaaaggatttttacatttgggtgtgccttactcgattacaaaaatttcaaaccatcttcccacctagggcctagggcgagttttctctttccctgggactgaactatcacaaagcactaaagggtttaagcaaacgtgagtatcactgaaaagcactagaagaaagtctcaatgtggctggaagaaaccagaaggcaagattgcctgggtgagaaagaaaacataaaaatctgtgtgtgagatcacaagcagcaacttctctgtgttgaattcagatgtctttcccacagtcggggcacaggatgtcgtccctctctgtgaggaagccacgccccaccagtgagagggagcacttcttacagttaaagcagtcgttatgccactgccgttcctcaaaggagatgtattttgtgccaccaagtccgctgatggggttggtgcacccagcacacttcttggcatacaagtcacagaagcagttcaggcagtaggcaaagtcatcgcgagctgtgaagcgctgcccagacagctgcttcctgcaggcggtgcacacgaagcactccttgtgccagggctgctcccggtaagtgacccctcccgtggtgatgggctttttgcactgaacgcactgcatggcatgttgtttctcatagcagggcacacagaaattctgattgtctttggggatgaaactcttggttccaattggctgctggcagcggtggcagatgaagcaggtctcatgccagctgctgcccttgtactccatcttgcgggtacctt

SEQ ID NO: 345638 - DNA, 1000 bp, Homo Sapiens
tttttttttttttttttttttttttttttttttctgttctgaataactttattgcaagtcacataatcttggtttagacttgacgcaacgggaggttacagagctgtaaataacaactggtcattaccttattgagtttagaaaactttcaagttcgtgacatatgttaattgcacttaaatagacagtgagagaaagatttataaaggcatcattcaaaaggatttttacatttgggtgtgccttactcgattacaaaaatttcaaaccatcttcccacctagggcctagggcgagttttctctttccctgggactgaactatcacaaagcactaaagggtttaagcaaacgtgagtatcactgaaaagcactagaagaaagtctcaatgtggctggaagaaaccagaaggcaagattgcctgggtgagaaagaaaacataaaaatctgtgtgtgagatcacaagcagcaacttctctgtgttgaattcagatgtctttcccacagtcggggcacaggatgtcgtccctctctgtgaggaagccacgccccaccagtgagagggagcacttcttacagttaaagcagtcgttatgccactgccgttcctcaaaggagatgtattttgtgccaccaagtccgctgatggggttggtgcacccagcacacttcttggcatacaagtcacagaagcagttcaggcagtaggcaaagtcatcgcgagctgtgaagcgctgcccagacagctgcttcctgcaggcggtgcacacgaagcactccttgtgccagggctgctcccggtaagtgacccctcccgtggtgatgggttttgcactgaacgcactgcatggcatgttgtttctcatagcagggcacacagaaattctgattgtctttggggatgaaactcttggttccaattggctgctggcagcggtggcagatgaagcaggtctcatgccagctgctgcccttgtactccatcttgcgggtacctggc

SEQ ID NO: 345639 - DNA, 1000 bp, Homo Sapiens; identical to SEQ ID NO: 343531

SEQ ID NO: 345640 - DNA, 1000 bp, Homo Sapiens
gtgggtcatttctttattattttatttgtattggttaacaatgatcagccatgcaagaataaatgattattgtaaaatctgcaaacaatgtagatatgtagagagtcccttccttggagcttgaccttgtcagacaggtatagatgagtgttccggggcagccgtaaaaactgccagagactgggctgcttataacagaaacgcatggtctcccagaagcccacattcaaggtgtccaaaggcctggctcctggaggctctggaggagagcctgttccctgtctctcagcttctgccggttgccagcaagtgttgccgttcattcactccagccactgcctccatctgcacacagcaaaacagcgtatcctgaagtgctcaaccttatagccattattttaaaatatccggaacacacaggaccgtgggagtggcaaggtgtgtaatgtcatccacggcccagtgcagaggaacacaggtgctgccgtcagactgccagggtccgatcccgcctcctcactcaccccgggagatccctttaagccaggagtcaacagtgaggatggaaacatgagtgctttttaaagtcctgaaagttcagaggcagactgtcaatttctcctccacccctgggcacacaccaggagaactctgtctccaggttggaggaagtgcctgtgagagagttgtgtccctcagattctgttcaccacaggtgacactcgatgcaaccccaaacctcttctgcacaatcccaaggggtgctgactaatccaacccaaaggctgtgatgtttggcagaggcagaaaagaaaaggccaggtgttctgggaaagaccacctttaaataacacagcaccctcatagcccagagagacagttccaactattatgccaataaacccggaaaagaccaaatccaatatgacacatatttcctgtttcgttttgatttcatgccccctcccttaacctcccaagcagcatggataccccgaag

SEQ ID NO: 345641 - DNA, 1000 bp, Homo Sapiens
tttttttttttatgggttcaagatcttttattttcagagcttccaacagttggttagtaatgctagctaagctggtataatctgaaggccatcccacctttctctttaggcagtcaaccaacagaatctctttcttacaaacaatatcattaaccagttggaatctgtctcaatgcgcgtgtaggaagaagtcctctcccccacatttttcccaacaagattgttttatagccaaatgtaactcaaacccgtaacacagcaactagccatctccagtatcactgattcccaccccaagaagttgaggtaagaggggagagactgtctcctgtttaagaaaaacccacctacacctcagtgaagccgtgatggtaaggaggctggcaccagagggcagggatgagtaggcactgaaacaggtctctctagaatcaatgaagtctgccccagctccttggatgaggtgttcttttgaaattcccacttttatggagttagataaggggacaaccggtgatgattcatcactccctgtctctaaaattaaaacatgataaacccagaaagttttaccttcaaaatccaccaagctccctcctgagaaaattctatccagtcatgtccatgccagcacccactcccttctcctaatgcccagggcttccagcccctctcctcacccttgggtggtccatccaacactgatttgatactctttgactcataatatgaccattttttaaaaattagaaaataaaagctatcaatatcacagcaacataaggaagatactcagtggacatgctcctcccccatcctgtggagcccacctacccccaccccccttccctgggaaacctacactgcaacattccagcactgagccgggggtggcccaacagatgctgcctcaagtgctttcctgactgtggctcctataccagccaatgtcatggaactggggtgaggaagaacagggccacacctcccaccaaataga

SEQ ID NO: 345642 - DNA, 1000 bp, Homo Sapiens
tttttttttttttttttgggagaagttataaaaatttattttcccacgaaataattccacaagctgtgtaaacatttcttactaaaacaaatactctaacacacaaagattgtacatttccagtgaaacactcacagtaaaattgcctgtattttcactctctaggagcaaaaacaaggaggcagcagatgaatgctttcctagttacctttggcagcaagcttactcacattccctgactgctcaatgggttgttaaagcaacatatagcacaattaattaaatacagagcgaggtgggcagaatgctcgatatcagtctctagtttcttcgttagtcttcagcattccaattcatctcaaccattcagtcactcggtgcacactttcttacatacggacacacacacgtgcatatagcgagttccggctcgtagactccagtgcagtgactagaacagacactagctactaagaatgtgtcacaatcagtgtgaactgtatggagtagaacaacctctggagttttatatttaccataatttatggtggaaattacaaacttacttacaaggatggtataacattcagaattcaaaccttttcaagtcaagcaatcacacatatttacagtatgtacacactttctactagaatgaggataggtgtctagacaatgttattacaaatttcctgaatgtgggcatttctagtccctgtaattcataaagcaaatctgctgacttggcattaagactctaaaatagtgtgatcaaactgatatatatatatatattatatataataagaaggtgtttgtttgcagaaataacatttacaaactgtctatacagtacacagtactagtacatagaaaatagattctaactttatgatcccctttgtgtaaggcaagactgaatctgtccccaaatttagtcagccagaggtacaagcaagaaacagtggtccatgaatgaatatgcaaatcagatgcctgc

SEQ ID NO: 345643 - DNA, 1000 bp, Homo Sapiens
ttttttttttttttttttgacaattttaactctttatttgaaacaaacaatttcagagacagaaggttagtcgtgacaacagcttctcactacaacacaagggtgggcatggctcactgaagggacaggccaggcgcctcagaacaatatatacaatttaaacagtggctaactggtgacagttataaaaacacaaaaaggagcctgggaaacagcaaagtcaacagggaaagaagtgggtaccccctttgccagaagctaattgttttctgggacctccaatgcaagatggggaagagagaagatgtaggcagtggcggcaggccctgcgcccacagctcctcgcctgtcctttgaccacagatcccatcctgcatgactcaaggtcccataggcttggcctagctcttatgataggggaacaatagaggggaacccagcctcaacccaagtcagaaggtagtttttgccttgggaggtctgtccattgaactaaagggaggcagttacagagggggctaagcatgttgacaccatggctcatggcaacctaagatggcagagagacaaacacagaaaccaaggggacaggagtctgcacaacaggagtctgctccccgtacttagtcattctctgcctctgaggaaaaaaaggcatttggaagattttaaaaacggcagcaccaaggattggtgcttgccgagggggtgagggatatgcggtggtgagatggtgccaacaaccaattatttcataggaggggaagagtgtctaagctctgtgttttatgtaaatggtcccctcatcgctttcattgtttatttcttacctttcagataagaccttttggcatggtgctggggaagagtagagaagggagtgggcacagggcagagaaggcagctgggtttttccctaggtcatgcctaggaacaagaggctctacctatgcgggatgggtcaggaaacccaaagccaacaggatcaccagagctatta

SEQ ID NO: 345644 - DNA, 1000 bp, Homo Sapiens
tttttttttttttttttttttaggttttagcatatttattttggaaaatcaacctgttttaaagttttatttttactgtacaaaataggattaaatataaaatgacttttgctccaaaatatcattatttttgatttaccagtcttctcatgagaggtcccattaaaaaaattaccttagtctaatctcaataatgtcaaactaattcatatctgaaatgtgtgctatttcatctttaatatccttaatctcagcttggactattgttaaattagatattttttcacttaagaaagcaatttctttctctctttgtagtaagtcggtaaccaatctcccaatgcgtagtgttaaatcatttactaatggttctaaacgggaaaagtccttctttagattatacacctttggttttagatcatttgcaaaagtcactgtcttcagaactttggctctgtcaccttctaagcttagaaatctatctgtatgtttgtcgaagtcactctttagttcggttagcgtcttcttaacagagttaattctttgtgaattttcagatgctgtctttcggagcgttgctgttcgatcaatactgcttgaaagaagatcacctatattttttactgtatttttttctactttctctattttattttctagttcttgcacagaatctgtcaatgatattacatcagttactaaacctgaaatccgtcgtatatctgtttttacacttgtaatcttgagaccaacatcttttgccatggaagttgtactttggtctacttttgtaatgtcttgagaaagcgtcgtcagactgttgttcagtatatcctgtttttcagttatcctattggaccaagtttttacctcattaatttcttcctgtagacgctttagatgagcaattatttgaaaagacttcaattgttccatgatagcttcagatttctgccacttttctgaaattaaactgattttactttgaagttgttggaat

SEQ ID NO: 345645 - DNA, 1000 bp, Homo Sapiens
tttttttttttttttttttttaggttttagcatatttattttggaaaatcaacctgttttaaagttttatttttactgtacaaaataggattaaatataaaatgacttttgctccaaaatatcattatttttgatttaccagtcttctcatgagaggtcccattaaaaaaattaccttagtctaatctcaataatgtcaaactaattcatatctgaaatgtgtgctatttcatctttaatatccttaatctcagcttggactattgttaaattagatattttttcacttaagaaagcaatttctttctctctttgtagtaagtcggtaaccaatctcccaatgcgtagtgttaaatcatttactaatggttctaaacgggaaaagtccttctttagattatacacctttggttttagatcatttgcaaaagtcactgtcttcagaactttggctctgtcaccttctaagcttagaaatctatctgtatgtttgtcgaagtcactctttagttcggttagcgtcttcttaacagagttaattctttgtgaattttcagatgctgtctttcggagcgttgctgttcgatcaatactgcttgaaagaagatcacctatattttttactgtatttttttctactttctctattttattttctagttcttgcacagaatctgtcaatgatattacatcagttactaaacctgaaatccgtcgtatatctgtttttacacttgtaatcttgagaccaacatcttttgccatggaagttgtactttggtctacttttgtaatgtcttgagaaagcgtcgtcagactgttgttcagtatatcctgtttttcagttatcctattggaccaagtttttacctcattaatttcttcctgtagacgctttagatgagcaattatttgaaaagacttcaattgttccatgatagcttcagatttctgccacaggccaggcccaggcacgtccccagcgacagcaggctcaggc

SEQ ID NO: 345646 - DNA, 1000 bp, Homo Sapiens
ttttttttttttttttttttttttttgccttttcgtttttgtttattggcttttacttaaaataataattttaagaggtaataaatgcatgtccatatccattcttacctggcctagaacaatcaattggctataagtcctttgactcataaggccttcagccatagggagtcccatggaagtataggatggacccgagatggggagccatgccaccctagcaacgctgtgggacaaaattaaaatttgctggtttttgatgttgcctctggcaaatcttggccagaaggggaagaacgtaaatgaaaatgaaaattcgaaggccccccacaactatctgaatggacttcctcttcctccagggttcaggccatgatggaaagtgggaggtgggacatgcttcattatacctctctggcattaacattcacagtctattctctctgaagcttgctacctggatgtttcatctgcatgataaaatcccaggtcttcagacaaactcaactaattgtcaaccagaaaatatttaaatttacctatagcctagaacccccaccccctacactccttcaatgtatttgattgatgcctcatgcctccctaaaatatgtagaaccaagctgcactggattggccatcttctcacatatcattctttgtttataagtgcagtgataatattgaacatatagtctatttatatatccacaatacatgttatttaagtcaggtgcgtttcttataacccaggcagaggagttgattatattatccactctcataccacgagtggaatcttcttcaggagataatcccagccaatagtcatatgatctactctgggattttataaattccaatgcatttttgttgtttatcttcaacaggctggcattctgagcagcacaggccattttactctcctgccatgtttggacatcatcacttaggaaataacagctgtccttatgccaaatccatctccttggacaaggct

SEQ ID NO: 345647 - DNA, 1000 bp, Homo Sapiens
ttttttttttttttttttcatctaatcattttattaatatcatataactctgataattgtcaggtcttcatctttatcctagatcaatttgaaaagcatcacttttttacccgaataaaaatttccaattcagtttttcttcttttttcaattttctccgcctcaatttggcaagtatgacaaatgtacagatggttgacagctggtcctccaccatacctgctatataggttatcccaaatgttctgaggcagcatcaaaaccaggtcttcaatataaccagcttttcttggaggaacacctccatgaatacaaagaaagtcattatttgaaatagggccaggttcggcaaaggtcttaaatttattaagccactgtcgagaaatataaaactgaaggaggcttggttccattatgttcaataaatttgatatccttctcctctctttttgtgcctcttcgctgctcttcctatagaaaagaacgtaagcttctgcattttgtacagtagattctgaaacttcagtgacactctgatcatcaaattcataccagagattatttagattgtttcggcagtaggctatatagtgtccactacttgcagttccatgatggcaaatgactgacagaagatcatatgtcacaatttgagctggactatccttagcaagaaatggctgaagatccaagccttctagcggaaatgaaacatgggtactgattttggtggaaaacattagttcatgtctgaatcttttaaggtggatgcacaaaatctcaggaaagttttgtactttacaaaacttcactccatttctcaactttttgcatttttcacaactgtacatattgtcaccttttagttcatctctggcaaagaaggcagcaagacaatcttgcaaggttactactggaccccaaaaccagctcttcacatattccatgaaaaaagctatccacccttgtggagcatatgcttcgccacatgatcctgctt

SEQ ID NO: 345648 - DNA, 1000 bp, Homo Sapiens
gctgtgcagtagtatttattgttacagtgttaaaattcactctcggggaagtgatttggggccacggccctagaaactgcatctttgttcagagccaacccatttcctctgcagccacaaaatgcctttgtgtgtcagggctcgggagattctcctcgctggccagccattggcaagaatgccagactcagaggttgccattgcccacaggctttcttctcctttcctttcacagcaggaagagccctccagagcctcgaaaagcagagtggaagtggtggtgcccaggacgcatgggctctgatgggaagagggaggtgggcctgagcatgggccttcttctccccaggtcagaggggcctggatgcccctggagggaacactgaggtcacctctggccaaatcttcctgttctgccagtacccagccctgttcagtgacgtcaagcttttgggtccctgtcctggggccctccacgctggccgggctgtgtagagacgcccttctctccactttattgggtccagattgttgtgtggcttctcccctcctctgcagcctggggtctgaaaacagcgatgccaacagacagacagatttccaaaagaaaggtccggctcagccaaggacaaaggggccttgcagaggctcctgggggtcagaaagctgagagtctaccgggcaggtgccttctccacccacaggcacaagctacaacagctttccaagaagtgcatccacatcgtccccaggtccagatgcccacatcgccctgcagggaccaagaccacactcgggctgcttggacaggatgtagctggtcactgttctggagctggcccctctgtagcctgtgacaatcagcttgagtctctctgccaagtctccgccttctgttcttcttgccgaccttgaagcagagttgacgtttcaggtttttccagcagacaaagctcactcaatctgatactgtggaggttgttaatttaacaaccaaccc

SEQ ID NO: 345649 - DNA, 1000 bp, Homo Sapiens
gaaactcacacgtctggcgcgttgttccagaatttataatgcaaagtctacataaacattcctgtaacccttaatgtccttaaacttgttgcttctcatattagcttggatctgcctttgtccactcttgaaggggacggtctccagaatgatgcttgcttggtgttggggtttgaggactccaaggaagactttctgctgtttcttgaagaggccacttccttccacagtcagcacacagtcctcaacctgctccgagagggggtttgaaaatatcacctgtatggagagtggctggttcacaacggctgctcctagaacattaatcgtgatgcttggataagataaggtgatgatcttgttcaccaggattttctcaggactgcttttctcttcacccagggcactgatgcggatcagcttgtctgttgacaggtactggctgtactgggaataggagattttgcaggggtaggtctttgcttctttaggagagagtgtgatgaacgctgtgtcctgccagaatggggacagggggctgccatcgtgcagcagagactgggcactcaggttcactttgaggtccttgaactgggaggacatgttgagggccagcaggacaaagcatatatcctggcccatgttgggcgggtcgagcagcttgaatttcagggagacttgcaccacatcactgggtcgaagggaaggtgtatgcaggctccgagggctgtcctggctcagtgatgtgggcctggaaggttgcaactctgctcctctttgggagccatggaagcttctagccttcagcttctgcagagccttcagaaacacctgcctctcctggagggatccttcttcatacttgtagttctctgtgatgtcatcccgctcgtcactctggatgctctttgtgctgataaaattgccaacagaactcgtgtcctggtgaagcttctgctccttccctccctggacgagccaggacatgcagtcagcattc

SEQ ID NO: 345650 - DNA, 1000 bp, Homo Sapiens; identical to SEQ ID NO: 161239

SEQ ID NO: 345651 - DNA, 1000 bp, Homo Sapiens
ttttttttttttttgtgataaataaatttttaattattttattattattttaaataaacaaataagttcagactgttatttatgaattacccagtctcaggtattttgttacagcaggaacaaactgagattagtaatgtgctgaggctaattggacaagcaggtgttcatgctgtctcctctcccttcaactcctatctctcctcaataaaccatcacatccctgggtcaaggtgctcccaccttcaccttttcatacactcattcctttcatgctgtcaccatgatgaaccacttagcttgaacaaacacaataaaaattgtatacagtcaaacacaaaactttctgtattatttaggagttgtgggttttggaagctcatctttagaaaaaacattggatcttttttcctggaataggagcttggagaggataggatatcatcagttgatatttcttctagtaacattccctgctatatcatgtatactgtatttagcctaatatcccatatatatttgtgtccagtatatttaatgtacctataaagtagcaataacaggagaggataatctctaaagacctgctgaggagagtccacttgttgatcataagggaaaggctttagaaagaaagaagtcatagtgctcagaaaatttaattcacctcttcctagctcccagaaaaactggcaagggtcttgcaactgaggaaccagggattccaggagaagtaatttggagcaatatgtatctgatgaagtgtcatagaggtcctggaaatgtggggaggtaaattgcttatgtcaaatgtaagaggacctgggcctgcttcccactgagaaacctgtgaatgcagggaccatggcgatgctgttgaacatcacactgcttccccagagtccaaacagtgcccactcctttactgctgattacaatttattatttcttttcatccaccatccactcctcaaattatacgcccagacctgcccaacac

SEQ ID NO: 345652 - DNA, 1000 bp, Homo Sapiens
tttttttttttttttttttttttttttgttttgactgctgattttattgcaggactttaggtaggggcaacatgtcctaagcaaaagagactggaactctagggaatatagaccaggtcaggtttatgcccagttgcagcaatcacagctggtgtcgaagacaagcccggcctggcagttctgctggtacgtgactccattcacgcagtgccagaaggcatttctgttatttgccacggggtagaggccgttggctctgacagcacagaatccactgcctcccgagctgcctccagagctgctactcccgctcccgttcccgctgccactgggagcagcagttattggctcaatgggctgagctggagccgtgcaacttgcactctgcaggccgagggccttcttcagggtggagattaggggaaacttgccctggttgcagaaagtgccagtgaagtcatccagatcaatggcccagaccatggcgcctccaaatttgttgtgcttaagccattgagccttaatatcgaagctcttgatgttgtcatagccaacccacacattgccctgataggcataaggcacttcctgaggggcatcccatccctgagtggctccatttttcaggaaggtacagatctcgtagtaagcccagatcccagactccttggcatagggcccagcaggaccagcaccagaggtgggggcaccaattccagtgttggaggggttgctcaggatgaagttgtgtccataggtagggaatccaacgatgagcttctcagctggtgctccattgtccttccagtagttcatgacataatccacattgaggtaggcgttgctgccggtgtcagtcgggtatttgtagagggggctgttctctccagtgtagccctcccaggagccatggaggtcgtaggtcatgacatggatgtagtccaggtactgtgacagttgggggatctcatagccagactggatattggagatgccagca

SEQ ID NO: 345653 - DNA, 1000 bp, Homo Sapiens; identical to SEQ ID NO: 161240

SEQ ID NO: 345654 - DNA, 1000 bp, Homo Sapiens
ccaaatattaatataatggaagtagaatttcttcatgcagtagttgggaaggagaagagagatgttttatcacttcctaactaaaacacttctatactgacttttaaatattgtttaaaatatcaccagagaccaaaacagaagataaatttcatttctatatttcagaaaacctacttgaatacactttgaaacaagagtacaacaaaatagaatatacttcaaatgttgaatatacaaactattatagttcaaaactgaacactggtatttccctcataaacttcaactaaaaaaaagaaaaaaaaacaaagaaaactccaggtattagagctacctgccaaaaattcatgctgagcctgaacttccaagtgacagcagaactgaaaatggtatgtctgcacaaatgccaaggctaagtgagtgacacaggcatgttacagcaaaaggccagagccaactgttaatttgtccacaattaagaaactgacagacttaaactaccatataaaatgttacatgtatattctataacaatactgtgctaggtacaagatttttaaaatttttcttttaataaaaaagctttacacaaacaagccattagcttatttcaagaaagaaaatcgaaaattagtctaaggcctttgttttaaatcagcttaagctatatgatatatatatatgtatgtatatatatatatatatatatataaaatcgcactagatctttttttgctatcctctttctgaagtttttgggatccattcttcaattcacattctaaaatacctatattagcagagtcttcacatagcaccagttaagtgagaactgtgcgaacacagtaataattgctggtatgcatataaaatgcatcaaaaattgctatatgtaacaatgagattacccatcccaacccctcccactgaaaactatataacctcttacagaatgttagtgttccaagtcttagtgtaacttgatatcgtagtgagc

SEQ ID NO: 345655 - DNA, 1000 bp, Homo Sapiens; identical to SEQ ID NO: 160043

SEQ ID NO: 345656 - DNA, 1000 bp, Homo Sapiens
tttttttttttttttttttgatggtgtgaagaatttgtagctttaataacagattagttagggggtagggatgatacttctgtcctacctgtgccattcttcaaaagcagagactcccttcacctaagagctagacaatgcctgcttcatttttgaatcaagaaagcagaacataccttacacacacatattcatcaaatagacttctttccctaattatgtcttcctcctttgagtttcttatggctaatgatcatgtcttctgctttcagctcttgcctcttaaaaatctcaacccttaaatctttactgatcattaaaaccttcatgacctctaaacttataagggtgaaatctgcagtaaatggattagaacaatttgtttactataaatgaggctggaaaaattggtgaagagccccacagagatccggaatgcagtaaccttgcccagaatccttattctgtgataatttcaaccctggactgcagcctcatctgactctggataatgtcattgtttcacgtgtctcctaggccctgcttcctttaatgattctttacattcttctatgccaatctgtatctccaaatcatttccaaactagtaatgggactgatggtccccttactgaatgcaaagccacagaacaaagagcccagaaaggagtggagctaagagggttgctgaggaaagaggaaccccagcatctgaggggaagagatgcagcttctctaagtctggcaggaaggctcgggcatcctccagtgctgcctgagctgccacggtaaagttgggatcaccagaaattaaaacatcaaagacacaggaatggaagtaagcatcttccactggaagcccttccttgcacagccgtctggcagtatcaatggttatagctccccgacgattgcgctctgatcgagagagtcgctgacttggagggcaccccccaacacagagctgcaggtcctgttcagctgagaaggccatggccac

SEQ ID NO: 345657 - DNA, 1000 bp, Homo Sapiens; identical to SEQ ID NO: 338426

SEQ ID NO: 345658 - DNA, 1000 bp, Homo Sapiens
ttttttttttttttcttttttttttttttttttttttttttttttttttttttttaaaatttttaaaaatatttattcagaactcagaaatgtatagattttacacgtttgtataaaattttttattatgaccataaaaatgaccctgtaatcaataacattgtaaatttaaaaataactaaaagtgtacaattgaattgcttgtaataaaaagaataaatgctagaggtaatggatatctcatttcctctaatgtgattattatatagagtatgcctgcatcaaaatataccatatatggcatacatatatacacatattatgtatccacaaaaattaagaaaaataaatttaaatgtgaaaataagaataaaaatttaacccataggaacaatattctttaacttattggcaatttaaagccactggcaaaaaagattgctagagatgtcagtacattatcttaccaaatagtgtattgttaccatcttttacctacatccttgagtaagggaataggttaaagttagtggcataagaacacttcattgaattcacaatagtatttaatatgttaaaaatgttgaattgaaaagctaagttcacacataatttataatttaaaaatagactgcatattatttcatagaagtacaattaataaaataacatatgactaacttaattttaactaaaattaagaatgcttttcattcataataatgcagaggaatattattctgaacacctacctcatgcatcactcaatattataagttaaccacaaagagcctctctacctaaattttcctcacgcatcttacattttaatgtccttatcttttcatagaaaaggtcataaataatgcctaataaaaaagaatctcatatcttttatgcagcaattagtcacatgctttcacatatgaatacaccagcaatgatgaaacagcatgaatttaagagttgaacacattattcacttttaaaaaaaatctgt

SEQ ID NO: 345659 - DNA, 1000 bp, Homo Sapiens
tttttttttttttttttttttttttttttactgtgtcccaggcttctttatttaagaaaaaagtgatacatgatgtgggattaaaatcaagagcatcattgaacttcaccttccctccaaccagttgccccaaactcccctgcccccaccctttgtgttcccaattccttccttagtgaatgaagaacttaatcccaaaaaccctggcacaaactccaggttttctttccctagctcctcccctccccctgtcccccattcctagaagggcaggcacctcagtttgaatgcatgggagagcccagagtggtgacggagacagggggaaaggcttccccctcagggaaagggaccgaggagtacagtgcagtgaagtgagggctcccatagcctggggtaccaaaatggggccctggggccagaggaaaggacactggtccccctgagaaaggagacccagcagcctcaaaatcctctcgttgtgcatagtcgctgcttgatcgcttgcccttctggcgccggttacagaaccacactcggaccacatccttctcgagcccaagctgctgggcgatgtggctgatctgctgcagtgtgggtttcgggcactgcaggaacaaattctccaggttgcctctcactcggttctcgatactggttcgctttctctttcgggcctgcacgagggtttctgctttgcatatctcctgaagattttcattgttgtcagcttcctccacccacttctgcagcaagggccgcagcttacacatgttcttgaagctaagctgcagagcctcaaagcggcagatggtcgtttggctgaataccttcccaaatagaacccccagggtgagccccacatcggcctgtgtatatcccagggtgatcctcttctgcttcaggagcttggcaaattgctcgagttctttctgcagagctttgatgtcctgggactggattttaaaaggcagaagacttgtaagaacataaacacacc

SEQ ID NO: 345660 - DNA, 1000 bp, Homo Sapiens; identical to SEQ ID NO: 158065

SEQ ID NO: 345661 - DNA, 1000 bp, Homo Sapiens
ttttttttttgtattttcaaaattgtattaggtatcactacataaagtaaaaactcttaagttagagtgcaaaatgaaagcgccttattgttttaaaggtgcaaaagcaaaatatcacaaacattttcaatagaaaactgatttataaatccatttacagaagatcaaaaaaatcaatgtttagtaccaactttaactataaataactaagaaggaaaaaactgtccttcatccttctgtttctgtttcaacgtctatgtcttctgctccttgccttttggagaaaatattgcgttgtaaggctgacgtctttttggacgaggacaaggatcaagatcttccttaatataacctctttccatacaagtctgagtggaaggaaaaccaacttcccaaaaattctctggtgtgttgggtggaatgtagcggaatcggtgtcttgagcaggaagccaatttcttttctctttcttctgctggcatatctgcataatactttcatcacctttaaaatacggctccacaaacgctttctgcttgactttgtcttgtttatcaccatgagtgtgtagtttctttgtggcagtagacaattcctcctcttcatctgctgcttgggagaaactgtctgccaaacaggattcatactcttcatgtgttgtccgatcaaacatatcttccaagctatcattcatttttctttcttcatttgaacttttttctcccttctgctcttgcttcttcatttttaagagaacggtttcactaaccaatgtacagtccatgtccactgtctctcctcctaattttgactgactgccatcctttgtatctattacagtaacatccattttatactgagaaaggtctgctcccggatctatactccactggatattttcaaaggatacatcttggttgttttgtagagactttattttaccagttctacatggatttaactgaagaactgatgcaagttcacatcctccatggtctga

SEQ ID NO: 345662 - DNA, 1000 bp, Homo Sapiens
ttttttttttttttttttccaaagacagctcatagtttcattttcatctcctcacccccttcccaggggagcgctgagcagggagtagcccactgccacccttccagaagcccagctacccagaagctggagaacaagtagacaaggggctgaggctggccaggggaatgccctccagggcatgggctgagaaggccttggcaccagggtgctctgctgttggcattttcctgagtccgtcaggagcatatttgtgctctgtgtgttgtttagagctggctgcatctttaaaattgtaagtgccaacttgtgttttgtgtttcaaagttccagaagcaaaaacaaaaaaagttcgggtacagcggctcacacctgtaatcccagctcttagggagatggaaactggaggatcacttgaggccaggagttcaagaccagcctgggcaacatagcaagacccagtctcttaaaagaaaattaaaaagaaagagtaaataaagttccagaagctttgctctccttatccaagcagcgtttgtactttggcactggaaagtgcgggagtcaggggtttgtgagagcacgtgttggttgtcgcattggtcaggatgcacccatcactctgtatcctccggctaaggagtgctggagagccgtgatgcccactggctgttgtcccgggcttgtcactcaaagacgggacagatgtctccttccagttctggcccagactgtcctctgagctgggagcacagggctcctccctgagtagatgacctgtcaggtcagctggatccagaggtcccacaacctctcaaggcagagctggcagctgtccagaaggcagcagccatgataacaaacgtggttggcccaggcccagacctgccccctggcaacagagaacagcaggactggctttgacattgttttagggagccaggcacccttcccagtcagggcagaagccccctggagagctgggctcctgacctcaccg

SEQ ID NO: 345663 - DNA, 566 bp, Homo Sapiens
tttttttttttttttttttctgttcagaggattttatttcaagataaatcataacttctacccatactatgattccaaagggtgaaaaaagtgttttgcctcttctaccctccaaagagggcatggcaatgccaatgtctctaaaatgcctctgcatagttgtcagaagctatatttcagtcattgaaaatacttgtccattttcagctgaggtaaggtttgttaggaaacctctgtaacaacttattcaatttatttggaagtaaactcccagactctcccagggtttcctgtattgatctcatctttcgggcttcctgagccctcgcggcacaatcgaggaagccctggatctcttttctgcacgcatcgtcgcggaattcattctgcttccagcaagccatcatcaccgacatctccgtgatgcaagtcgcctcgcccttctcccggcgccgctccccgacgcggttagctagaatgagaggtttattgggcttcagcacaggcttccgcgggttcccaaaccgcgccagacgaccccgcaggctgggtgtcgccatagcgca

SEQ ID NO: 345664 - DNA, 1000 bp, Homo Sapiens
tttttttttttttttttttttttttttttttttttttttttttttttttttttttttttcatttttaatgctttattcattgattaaaagaatatacatttaacataaaccatacaacatcagtcatcaggtcaaacattcagctggtttccttacagtttctgtcaggagttattttatctgatcacatttataagataaaatctcaccacatctggcatttacacacactgtgccagtggattcacactactgatgtacatataaaatccgcatggtatgtgctcactggagacaaaacagtgcacacctgtcaaaaggtcattttaatataagatggtaaaaccatttgtaaaacacatataaacttttttccataaatagaatcatatctggacatctgttgcataaattgtgtttccaaagcttacaatagagcagccaggtctcagcactgctgggcacccaggttggctacttactttattattgcagactgtcctttaacattaaatgcacaacattcgtaccacttaaaactggggtcaggtggaagtctcacagagaccacgtctgtaccgcggttgccctgaaacagttaataggcttttaaagcctctcagatataacaaggttttaaaacatacttcatggaatgttcttcatgtatcatagcagctcatacctgtgatagaacaagctttcagtttttcctttctttcctttacattcactattcacagtgaaacaggtgcatgttttttttttcttttttttttttttttgttttgttttttcagagttctgaggttgctgactgagccacagcacagctgtgtaccacaggtcgaaattcgaccttaaatattacaatctagcagtatctggctggccagagtgggccggcccctgccagcatgtgggcacttcttcattaagtctattctttggcagctgacacgcgtgctgacagagaaaaatccagtgacttgttgctagg

SEQ ID NO: 345665 - DNA, 1000 bp, Homo Sapiens; identical to SEQ ID NO: 161245

SEQ ID NO: 345666 - DNA, 1000 bp, Homo Sapiens
ggtacggagtcttgctctgttgcccaggctggggtgcagtggcatgatcttggcccactgcaacttccacctccccggatcaagcagttctcctgcctcagcctcccaagtagctgggaatacaggcgtgccccaccatgccctgtaatggctttgtatgtttactggagacggggtttcaccacgttggccaggctggtttctaactcctgacctcaagtgatccgcccacctcggcctcccaaaatgctgggattacaggcttgagccactgcgcctggccaggaaaactcaaaaaagttgcgcctgcggctgggcgcggtcattcatgcctgtaatcccagcactttgggaggctgaggtgggtggatcacaaggtcaggagatcaagaccatcctggctaacacagtgaaaccctgtctgtactaaaaatacaaaaaattagccgggagtggtggtgggtgcctggagtcccagctactggggaggctgagacaggaaaatgacgtgaacccaggaggcggagcttgcagtgagctgagatcgcaccactgcacttcagcttgggcgacagagcgagactgtctcaaaaaaaaacaaaaaacaaaaaagaaaaaaccttgtgcctgcatgccactggactcttgttgcatgaccacgttcctctcaaggctcagaattatttaaaggtcggtagcttttaatttgaaacatttgatgtttgaattatttaatttcctactaagatacaggtactatctcccttgtttgccttaaaaggatcgctcccaagtccttcagaaatacatccctgggtcattaaactgaaaaaaggtttagttactttctaaaaaataccacttcaggccggacgcgtggctcaagcctgtaaatccagcgttttggaaggccgaggcgggtggatgacctgaggtcaagggttcaagaccagcctgaccaatatggagaaaccccatctccactataaatacaaaaatt

SEQ ID NO: 345667 - DNA, 1000 bp, Homo Sapiens
ttttttttttttttttgttaaataatttctctttataaacatagtgacaacaagattgtacagtatcaattaaaaagacccaatgtgaccaggtccactgcttcctgcatcttgaagtaagacaagtgttcagcttagagatgagcacctttctttccagagggagaagacatgatgggagaaaaaaatgttctctctgagaatttacccagataaagagctgggtagtcggatctaaatggtcccacagcaatccttttctcgggggaggtgcgtagatctttgacaagtgatgaacgaactttgcttcgtgtggttaggcctgggactgaactttgtaaccagggatttggtgcgcggggcttcacaggctttatcactgcttcagtgtcacaaacctcggaaggtcttctaggaagaaccatctcatcctgaaaagtttcttggagtaaagtctggagtgttagtggtccttgttctcctttgggtttcaagtaaacacgttttgcttcctccctcacttttcccatgaccatctccagcttgagtattttgtgtgtcagcaagtccttttggcttagtgttttaatcctgttcttgatctcctgaagcatttcttggtttccttcatttcctaagttgagtatcttcattgtctggtacatttcctttagaacagcatcgtggttctccaggagcagcacgtctaggaaggtgtccctgacccggtccccttgaagtttcagggctaggatgctacggcaagcttccagccgtacacctggtgactcttcatagtggatagcccagagcagaagatccgtcagctcgggacttacttgcccaatctgtcccaaagctcgaatggcaaaggccttgattttccagtaaggatctctctgcatcaggttcaggaggcattcaagcaccatcttgtcgcggatctgcagggcaccagctgccaaacaggctgcccgccgaactgctgtgaagtcatcag

SEQ ID NO: 345668 - DNA, 1000 bp, Homo Sapiens
ttttttttttttttttttttaaggatcaaatgagatctgtttttaatataaagatgttttcttaaaatctctgtatgaaattatctccggagagatagattcaccatgtttgccctgagatttagaggcctctgcctgccactccacaccctgtttgtgaaggcccaagtcactcactatgcaaagaagtcattccctctagttagtgttaaaaccagttatgggtcttcctggcatggtggataatccacacgtggataatcaagagttgactatatgggttcctccctcccctccccttccaccagggatccctgacagaggccacagcgagactcttcagcggatgtagatcatgtcggagatggctccaggcaagtgggtcatgatctgcattcgcagccaccagtagtagtccatggggtggtagcgggtgtagggggtggtggcggtcagggcgtgtgtgacagcatcgatgacaggggacgtgtctgtggagccactgctgcagtaggtctccatcttggcgatcttttcatcaaagtacttcttgccgtagtccttgcgcacgacctcaggcagctcctcccacatcttcttggcgatggcctgaatgctctcagggctgtaaaggctggtggcagcgatgaagttgccgggctccaccacgctgaccttcacgcccagggggtacatctcatagcgcaggcagtccgagaaagcctctaccccgaacttggtgatgcagtacggggagcgggccgggttggccatgcggcccagcatgctgctgatattgacgacgcggcctttggcccttcggatgagggggagaaaggatttcgtcatccgcactgtgccccaaaggttcacttctgccacctgcttgtaggtctccaggctggtgaactccacctccccgaacgttgagatgccggcattgttaacgaggccccacatgcctttctcagggtccttcaggctcgagcggacaatctcc

SEQ ID NO: 345669 - DNA, 1000 bp, Homo Sapiens
tttttttttactgtgtccaggagagcttttatttgtacggaacagttttaaaaatacagaataaaatagctttatctctactattattcacaacatctggtccaaatattacatatttttaaaatacttaaacgtttaatgaagccatgttagaaaaacaatatgaaaattctttttaaaaactccataaaagaattacacatctcaaaaaacaaccccaccccaaataccctcggtaatcaaaataaaaataaaaaacaaacaaaaccccagaaaggtatatatagccaaagtcagtcacaaaaactcaaggaaaatataggcatccccactgttttaagaacagtcagaaatgtattaaggtgtcaaatgaagattgttactaacgaacaaaaaaggagagtcatttgaactgtcagtaagatggcaacgtggggaagggtgtcctaagtgcctggaaacacgcacagcaatgctaaggacatgggagggtagagtgatgctgaaacacagtcaacaccaaccagaaaggacgggaatgtctgtgaggctgctgaaaagagacccccaacgctaatgtgccttatgggtccatgggcagacgctgaacgctggcaaaaccgggtggccgttcttgcactactcgggttctgactgcaggaggggcagagggtggtcgatgtcctagtccctgtgtctaaaaagtcatgaggggacagagtacaacaggcagcacgttaagtccctgggctcttttccaaagccaagaggaggctccctggagaagcgagctttgcgaatgctcaggcccggagccgcacactaacgcggcgtgcagcaggtgtggctgggtgtgcacagctggcgtccagcgacagccatgccgggcctatgcctatagcgagtgtacaccccatgcacggccatcccccaggatgctgctgcttctctggccagatgggttctggaatgaggcttctgctactgctccatattcacc

SEQ ID NO: 345670 - DNA, 1000 bp, Homo Sapiens; identical to SEQ ID NO: 161249

SEQ ID NO: 345671 - DNA, 1000 bp, Homo Sapiens; identical to SEQ ID NO: 157840

SEQ ID NO: 345672 - DNA, 1000 bp, Homo Sapiens
cacgggatgagactctccactgccatctgggacggggactgagccttgaactcctaccacctcaatccctttcttccctcagccatctggggtatatccctctagagctacactactgccaatgccttcatactgagttctgggcccttctgcaaataagtctgagaagccccttctctccttcctttatcgtggcctatgctgcagaatctcactgcagctggcaaaaggcattggccagctctcagaaatccctttactcaacgttgaagctgcattttggtcaatgtgggtaacttactttagaaaatgacttgagtttaggtctcccccacccatatttaatttttcccaagttgctggtagaagagaaatttaaaagtggatcaatcctcacagagagagttctttttgttgttgtttattgaaaaaaatgcaatacaagaagcaagaccaaacagatatctaaacactacaaccacttctactacgaaaggccaaaacagcagacttgattattgcctgtgtagtctaaagattctgccaatctgattctgctgcccgagttcctattttttcaagaaatgtaaacaactacttgatatgattcataattttaaaaaaaatttacaaagctccttcatttttgtcaccaaaataatacatttgagagagatttgtagaaacaaccagcctggggctgagatcctgggcagaaatttcccgtgagcatcaaaaggcgtcagtcaggccgcagctctggctccagttcccgaggtttgttgtctcctcacccccagctgccaagcatccccccaacacacactgatgggcccagcggtggaggggggggtggggacggggatgggtcacggggccctgacgggtcccgcagttaggctccctgagccctcggcttataaatacaggtcttgctttgtgggtgggtgccagagtcctcatgtggcttggaggaaatctttatttctcaaattaaaat

SEQ ID NO: 345673 - DNA, 1000 bp, Homo Sapiens; identical to SEQ ID NO: 246613

SEQ ID NO: 345674 - DNA, 1000 bp, Homo Sapiens
tttttttttttttttttttttttttttttttttttttttttttttttttttttttttttttttttttttatttttttttttttttttagcctctaaaacctttaataacgaggcgtggatgctctccacgtggaaaaggatttctctaccccgtagggccaagctcgagtgctaggcagtggaaggtgttctcggtggatgccccggccacccgaccagccagcccagggcctgtccgcagggtcgcccttaccgcagctccggggggtgcagggcgccacagaatctgcccctccgaccgacggcgtctcctccagtcccagggagccccagatagggtgcagcgtggctgggcccgcatatgagctccccgcagaggggctgagggcctggaagggggccacgcctctctgcagccttttgtctggtttcacgtccacgtgtccctcctctggaaaaccttggagaagagggcacctggcttcactccctggtcagccgggagcacgggacgggggacccaagccatcacagcaggagaggagcctgagacacacctcggggcttgctctcgcagtgggccctcgggctcacactctgctgttgctcccagctggggccccacgacagtgtctcgccctccaggaagtaggtcgggggcagaaggggctggggctgcatgctcacccactccccaggtgcccctctgccccagttgggccccaaggctccagggcaggctggggtggcaagcgtgggggtggcgagcgtgggggcggcaggtaggctgtgggggcacgagcgcagcaggcccacagctgggtccctgacggtgtccggcgcttcggcaccctgaagcttggcggtgaggctatcgacccgctgcttgaggactttggctgtggtctctagcgcctgcagctgcgcctgcttatgccggaggtgcagggagctggaagtgcccaggtgctcagcctccttcgggtccaggtagatgcac

SEQ ID NO: 345675 - DNA, 1000 bp, Homo Sapiens; identical to SEQ ID NO: 161251

SEQ ID NO: 345676 - DNA, 1000 bp, Homo Sapiens
ttttttttttttttttttctgatataaatgatcccttttattgtaagtaatgcgcaacactggcctggctttgcactgcaagccctcggtcaagatatagtcaaataactatggctgcaggttccacagttccacaataaccatggctgcacgatccacaattcagacacagacatagagctggggtgggtggaaggggcaggagggtggcagagtgcggactgtccccagccctggcctctccatgcagagttggcccaggcagacacaccccatggaatgatgagaaagtgacggcacggccccttcccacagcaagcctggggctgccaggaactgcccttcagaacctttgggcccaggtcaccctgaagccccacaactttttatctggattagttattaaaaaacaataaattaagcaacaacttggtcctgaggatgctgagccagcatgtccacagtttttggcacaaaaaaattagggtctgttttgcttttttggagtgcagggtttgttggcttgtcttcaaattcattttcaaaacacattcccagtgaggtaagaccccagggggtggagctctgtaagaccctgaacctgggacgcacagttgagtcagccagcaccgtgctctgtatcctcttggggaacagggactggggatgggggtgcgggccaggaagagtgtgcagccaccaagatggggtcgtagagaggccgagctgccacacagcagctttggtcaagatgagggccaggccccaccctgggcaagggccgaggtggaagcaggagcctgtgttgtcttcagagggcagtgtggggtacaggggctgatagagcccctgggggaacagggatggacacaggagggtccaggcccaactggcgcatgcgacacacacttctgcaaaaccagctgctttcattttctcttctctctcttgaggcgtccgtcacctgtaacagtctagaattgatatatataaaaaccat

SEQ ID NO: 345677 - DNA, 1000 bp, Homo Sapiens
cacagctgggtacaggtttattgtggcactggaggtgaaagggggctggtgtggccagcaccggtgtgctgtggtggtggagggagtggggtgggaggataaggtgggtggggcagggcccagggagccccaggctcgggccaggagccagggttaaggcaaccattgccagccctacccagaaatgcagggccacgactccaggcccctcaggctaggggccaccgcggcagctgtgggcagaaggggctcacacatgagagaaggcatggctcttgcagagaggcctgtccttcttggagtagaaggtctttccttccaggttgatctgacatatcgcacagacgaagcaggtgtcatgccagctgaagcccagggcctccaggaagcggtccccagcgtcgatcttgaagtcacagccatggcatttcgtgccaaacatcttctcatagtctcgctcgcaatagggcacgccctcctccatgtagaaggccctgttccggatgggcgtcttgcaggcagcacaggtaaagcagtgcacgtgccaggtcatcttcagggcgtgcatgatctcgcctgtaatcttcttcttgcacttggcacagctgggtgcatagcgcacgtcatagcatggtgggcagaagatggcgcccttctcctcaaagaagccaccctcttccaggaccttcccacactggctacacacaaactcctccgggtggtacgcgtggcccagcgccaccaggtagcggccccggatgaccttgtggcactggtgacacacgggagtcttgccgttgttgctgccccctcctggcacccctccggcagctgcctgcacaatggaggtgcggctctgcagcggcgtgggcgtggccggctggctgtgccgggtcagcactgtgctcgttttgtccggggcatagcgctcggcaaacgcagggtccacagcccagggcgggcggctggtagggctgggggcggtagggccaggccaggg

SEQ ID NO: 345678 - DNA, 1000 bp, Homo Sapiens; identical to SEQ ID NO: 161252

SEQ ID NO: 345679 - DNA, 1000 bp, Homo Sapiens; identical to SEQ ID NO: 161253

SEQ ID NO: 345680 - DNA, 1000 bp, Homo Sapiens
ttttttttttttttttagtttttacaatgcatgaggtatttaatccagagatgacttagagtgtacagggagatgtgggtagataacatgcaaatatgtaattttataaaagaaacttggcatgtgtggatttaggtatgatcagggactgctggaattaatcccctgcatatgtcaggggaaaactgtatttgaaataaactgaaatcacttaagccttcaccacatggtttacattcatagagtttatttctttttctttttttttattttttttgagatggagtctcactctgttgccaggctggagtgcagtggcgccatctcagctcactgcaatccccgtctcctgtgttcgagccattcccctgcctcagcctccagagtagctgggactacaggtgcgcaccaccatgcctggctaagtttttgtattttagtagagacagggtttcaccatgttggccaggatggtcttgatctcctgacctcgtgatccgcccacctcggcctcccaaagtgttagggattacaggcatgagccaccgtgcccaagccatagagtttatttccaatgtgatttgtttaattttctcaggtaaaataaaattaatgaatgctttcccacattccacacatttatagagtatctttccaatgagtccttttgtgtctgtgcaaggagctgagagaactcaatgcttttccacattccttacattcacatagcttctttgcggtatgagttctttcatgtccttgaaggaaacgggaatgagtgaaggctttaccacattgtttaccttcataaggtttctctcgagtgtgaattctttcatgttgtagaaggcaagtgagccaagagaatgctttcctgcattccttacattcatacggcttctctccagtgtgaatcctttcatgttgctttaagtgaccaaaatgactgaaggcttttctacatgtttgacactcataaggtttttctgctgtatgattt

SEQ ID NO: 345681 - DNA, 1000 bp, Homo Sapiens
ttttttttttttttttcatatcaaatttacctgtttattcattccatagcaagcaggatattcactatttaaaacaaatttaagcagatttctgttagatttctttaaatcactgaaaagtaacacaaaaatacatataggtagtaactaagtactgacaaagtattctacctatgcaatatcctattaaatgtctaaattaccatatgtaaatttaattgtattatttactcaatggggaaaatctggattacagaactgaggaaaattatgttttatgtaaattataaaaggccaaagtcaatcatgttgaataaaataattttgaaatataagccagtaatataccatatgagtatcccaagagaaaccctggatagaaagaaacttttaaagtcactcttttttttttttattagtaatgttaatgtttgagctcagtgtttgagcatgctggttttacctatttatgctaattttaaaccaacaattgaagtgagaaaatatttatccttgaaagtatctttagcatggtcttcctaattaaaaataccacttaaaaaagtgaggcagcaaaagcatgaactggagtcagtggtctgtctgggttaaaattggccccacgatttactacctatgacttcaagcaagttgcttaacctcgcacttcatcccacttcattatctcatttgtgaaatagaggtaaataattaaccctgtactcacagggaataccgagattatgcatgtaaagtgcttacagtgcctagcacatagtaagtgcctaataaatgttagccataaatattattgtgggtatagaaaatcaaattccctagttgcaaaatgtatgcactaaatgctgaatatcaaagaagtcaaaattcaaccacacaagtcttaacagttatagagtctttgcatggacacagtttcgaagctaaaaaatgagaacctaatattacatgcaagttatgtgactcatcagtaaattcttcc

SEQ ID NO: 345682 - DNA, 1000 bp, Homo Sapiens
ttttcttaaatgaattattttttattgctattttataaagcttaatattttcctaaaaatattagaaaaaaaatcagaacaaaaaatcagtttacatgtagtacagttacaagtaaatagctatagataatatagccattaggaaaaagagcagagctaaataataagaaaacaaaagcagtaagcagcaataaaattaatacctacatacaactagcagtgcaataagataagcagaaagcagctttacgttaaaagaaagttatttaaatacagaaatagcaccttacaaaaaggaattgagaaatgtaaacttggtaggtagattcaagtataaaagttatacccccgactcttgtaccagaatgaaagggttttacaaaccctggtcagtgtagggcacacacagcctctgtgacaactcaaaaaagctgcattctcttagtaggaccaccaacgattatttttttcttttactaaattatacaataatagactcaagattgccattgcttcttcactacccaaaatatccaagtctagcgcagcagcttcaattccaccagttgttctgtaagatttattttcctgacagaaacaaccactgcattattatttttacatataaagccacattaagaagtggatactgaatacagaagcaattgtccttggttttctactcctaagaatggtcaccaagtcataatatcctcaccaatgggactgcttcttaacacccctcaggaattatgaattctgaggttaaatggtcatatcatgatcagaataataaaaaaagatagcaaaaatgttaaaacaagtatagagcattcaggaacagtgaggggaaaagcaatttctgtttccgtctaaatgcagacctctccatgaaatattttgtggaagttcttaagcatggtagaattaacatgcatataccctgcacagattgaaacctgaaaaaggtatatttttatttgttttgatagggaaccca

SEQ ID NO: 345683 - DNA, 1000 bp, Homo Sapiens; identical to SEQ ID NO: 161255

SEQ ID NO: 345684 - DNA, 1000 bp, Homo Sapiens
tttttttttttttttttgattttcaatgcagtttccatttttattttggaggcccctcccacgaaccttctcccattttactgaggcccagggagaatgcacagggagctgagcccctcctttgatcttagtttggtggcagagacaggcagtgatactgacgatgtgatggcagtgtcaggtgcactctgtcttcactagaaaactggcctcctggaagggctggaagctcccacccttgactgctctgactctgtctccagcagctcttcgctgttagggcttccctgacaagagtgcagtccctctcgaggctgattagtgcagggcgggctcctcgtctccgaccaccggctcctgctggctgttccctccaccctccgtctcgggctgcgaggcttcccttaacactcgaaaggggggcccgtgaccaggtacgaccacgtcggcaacgaccaggaccctcttccggctccgctcctgggctgcggggtcttcactcagtgcctgccacgaatcctcgtccccatctcgctcaaacacatctcccgccaccaccacggtgcccagagccgtgccggccaccaccacgctcacgtcgcgctggcccccgtggcccggcgtggcccacacctcgagccccgggcccaggcgcaggggctgcccctcacccagcccgtggggcaggtagcggcctccgggaaggcagaagtcgtgcgagaccagcagagccgcgcctgggaacagccccaagttcccgatgtgatccgagtgcccgtgggtccccaccactagcgtcacgtctcccggggccacgccctgccccgccagcgcccccagcagcgcctcccgagcccaggggcccccggtgtccaccaggatggggccacgggccgcctcctccagggcggcctctgcgccgccactcccgcgcggggactctcggtggctggaggccgggccccgggtctggggtaggaccagggtcacggagccgtcg

SEQ ID NO: 345685 - DNA, 1000 bp, Homo Sapiens; identical to SEQ ID NO: 161256

SEQ ID NO: 345686 - DNA, 1000 bp, Homo Sapiens
ttttttttttttttttttttttgaaataaaatgactaatatttattacacaagtgcttagttacacttatctgaaaattataataggacaattggtgcatgtcacattcatattactatccatataagaacaaatacatttagtcaactatatcaggataacacacaaggtttttgtttgttttaggcttctcagttgaaagaaaacatcgagtaaggaaaatgaatttccagtgattaagtattaacaatataaataataaaaattacttctaaatgtcttacattttgacaactttgaattatacttacatactaatatttccaaaaatcatttaagttacaagggtcactgtcagggtgaaaatatattttgaaaagctttttaaagatatgttattattatgctttaacatcatttcatttattcttggcacacacggcatcttggaaagtaaaaatacatcttgccaattttctgctattgtgcagttacaagagaaagagaagtgtggggcagacagacctgtgttcagttactagctttgtccaaaattgtgttgaggctggtcaattaccttttggtgctgggagtaagattaaattaaataatgcatattttaaatgtacagcatgggcactcaataaatgatatactttaccttatttattcacattgaagtaatagcaaaatatcacagttctatgttgtggtacaatttgaaaaactgaaaaaattgggaaattaaaaaataataatgtgttttgaaaaattgcactttttataaataaatccttcagcaggtttaaatatttcctaataaaacttagtgcctactataccctgattttttaaaaaaaggcctaaaatatgataaaaatggtcagtggttaaggacttttggttttcctttgtgctattgatataaaaataatggctttatttaaggcttagtaagtgattatttgtagttgccctgaaccaaatcattattctcaat

SEQ ID NO: 345687 - DNA, 1000 bp, Homo Sapiens
tttttttttttttttttacttccttttaaaggtcctttaatgttgttatagtggatatgcaataaacacaaatggagggtaaaaggggggggaaattccttggtattactgtcgtttttgttttgttttacctagcaagaatataaacttattctcaaaatcctactgaagccactcacagtgacagagccatttttagggtgcatgacatggatcaactaactacaagcaatgggccagtggcctgatttgtaaggcccacaaactaagaatggtttttacatcttttttctttttcttttgagagggagtcttgctctgtcacccaggctggagtgcagtggtgcaatctccgctcactgcaagatccgcctcccgggttcacgccattctcctgcctcagcctccggagtagctgggactacaggtacccaccaccatgcccggctaatctttgtatttttagtagagacggggtttcaccgtgctagccaggatggtctcgatctcctgacctcgtgatctgcccgcctcagcctcccaaagtgctgggactacaggcgtgagccaccgcgcccggccgggttttacatctttaaagaagggggtctgcctgggcacagtggcttatgcctgtaatcccagcactttgagagaccaaggcgggtggagtacctgaggtcaggagtttgagaccagcctgacaacacggtgaaaccccgtctctactaaaaaaacacaaaaattagccgggcatggtggtgggcgcctgcaatcccaactaattaggatgctgaggcaggagaatcgcttgaacccaggaggtggacgttgcagtgagctgagatggcgccactgccctccagcctgtgtgacagagggaaactcctcaaaaaacaaaaaaccaaaccaaaacaaaataaaaaacaagggcgtctggctgtgttgccctggctggactggactccaactcctgggctcaagagatcctcccatttca

SEQ ID NO: 345688 - DNA, 1000 bp, Homo Sapiens
tttttttttttttttcctcttggcatgataggtcttaagtcccctcccagatctgtgacatttgacaggtgtcttttcctctggacctcggtgtccccatctgagtgagaaaaggcagtggggaggtggatcttccagtcgaagcggtatagaagcccgtgtgaaaagccatactccaaggggctccaagtccagcgcacagtcccagaagggcccagcaaggcagccagggcggcacaggcaccaggtcccaaccttcttccctgtttgcccactctcagaccccggagttcatcatctcggagccgctggccaatatgtactcatgtgggaaccagaacacactgatggaggagttggcagagcaggcacagcagcacgacgagatgctgcacatgcaccacgcgctgaaggaggcgctcagcatcatcggtgacatcaacaggaccactgttaccatgcccccgcccgtggacgacacctggttgcaggtgcagagcatccctgacgcacacaggtaccagagactgccccccacggccccaaaatcccccacccgggatgcccagaggagtgccctggggacaagtggcacaccccctcaccggggtggctcccacctggagtgacggggggagcttgacaaggagcactggctgcgggggggggggggggaggggtgggatgttctcgctgctgggggcggggcttaagctccggcaaccgccttggggtgtggcagggaggagcttcagtgcatgggtgtggccggcactgcgctggggcggggccgcccatctctcccctccctgtgcctcccaggtcgcccaagtccagcgccaggatgcccaggccctgccatgtccctagcccggcctgggtggcagggcccagctcctgggcggcaggacccagctcctgggcttcctcctgctgggtccgcccttggggaagtgtgccccataccctccaggccagaggcttcccctgatccctttgg

SEQ ID NO: 345689 - DNA, 698 bp, Homo Sapiens
tttttgaggtactataagaatttttattaatgacagctttgcaattaaatgtacattcactaaatatggaaacaagtgagaactaacaataaaaaggagttccaagaaaattgtcacggcatgaactgaatggactcatactgggccagcactttcggtcttggcatgaacagcttcatcattccagaactttcttgatttccaaggtttgtcgtgctcttttttttttttaatttaaccatcattatgttgtgcattcatcatctggagtttttagttgtttagaattccctgttggcagccaaattcctgtctgggaaaatgtatgagccagccttcattttccacgatgactttccaaggaaccattacaattaagagaatgtaagttactcatctccaataactgtacatgaagcaatattccgaggatttgttaactgtctttgacaggagatcatctactcacagtaggtgcttaacaaatgccatcttgaatgaatgaagaccctttctcacagtaacaaagttgggtccaggctccttcatttttgctcagcaagatgaagctgggattaggcatgttctaaatggcagctccatcttctctttttgccacccatgtttacagaaacgagtggacaagacggcccctgccaagtgggaagcctatttgcataacaagattagggtggggt
